United States Patent Application Publication US 2004/0034888 A1 - sequence listing, part 21

SEQ ID NO: 65429 - protein, 473 aa, Zea mays
  Clone ID: LIB4764-013-F2_FLI.pep
THLAPPSSPLLCCSSRRRSDVMASAAVLRNAGSRRLFSYPTLRAAAIYVPSALPDAPAAAAAPAQPPPTAGTLWARSMATFTRTKPHVNVGTIGHVDHGKTTLTAAITKVLAEAGKAKAVAFDEIDKAPEEKARGITIATAHVEYETAKRHYAHVDCPGHADYVKNMITGAAQMDGGILVVSAPDGPMPQTKEHILLARQVGVPSLVCFLNKVDAVDDPELLELVEMELRELLSFYKFPGDEIPIIRGSALSALQGNNDEIGKNAILKLMDAVDEYIPDPVRQLDKPFLMPIEDVFSIQGRGTVVTGRVEQGTIKTGEDVEILGLAQTGPLKTTVTGVEMFKKILDHGEAGDNVGLLLRGLKRGDVERGQVVCKPGSLKTCKKFEAEIYVLTKDEGGRHTAFVTNYSPQFYFRTADVTGRVELLGEMKMVLPGDNVTANFELISPVPLEPGQRFAIREGGRTVGAGVVSKVLS

SEQ ID NO: 65430 - protein, 231 aa, Zea mays
  Clone ID: LIB4764-014-A9_FLI.pep
PGFREAETSARRPSSVVMAAVEVCVKAATGKPDTLGDCPFSQRVLLTLEEKKVPYEVKLVDLDNKPEWFLKISPEGKVPVFNGGDGECIADSDVITQTIEEKFPTPSLVTPVEYASVGSKIFPAFITFLKSKDASDGSEKALLDELQALDEHLKAHGPYINGENVSAADLSLGPKLFHLQVALEHFKGWKIPENLTNVHAYTKALFSRESFVKTKPSEEHVIAGWAPKVNA

SEQ ID NO: 65431 - protein, 339 aa, Zea mays
  Clone ID: LIB4764-015-F6_FLI.pep
ASASATQTLQAGRHSVRTRNSQTRTTSPPPKPIPPARSLTGVTAPQIRLPSPARSRVFRSSAAMSHNHGDTIPLHPSSAQSDMDEIESLIHAAPSPATVLPARPPSPTRASIPVSSSPALAPAPVPTKPPLPAASIPISVSVSPVLTSVSVPIGADGFGPPPNTLTEPVWDTVKRDLARIVSNLKLVVFPNPYREDPGKALRDWDLWGPFFFIVFLGLTLSWSASVKKSEVFAVAFAVLAAGAIILTLNVLLLGGHIIFFQSLSLLGYCLFPLDVGALLCMLKDNVILKIVVVTITLAWSSWAAYPFMSAAVNPRRKALALYPVFLMYISVGFLIIAID

SEQ ID NO: 65432 - protein, 159 aa, Zea mays
  Clone ID: LIB4764-017-B1_FLI.pep
PGKQFKCLCRVQMKTIHFALRRSSSNASAMFDRFPDRDKRRSPQQKARDISSSQLTGSTRCHVFPAAVASVPPESTAIPVRLLSSSTHPCPPRRLRRRQVLPPPHLRQRDPAEEGGLLHRRRERAVGMGVQVLADGEGELRAALPLAGVLRPHIRRGSA

SEQ ID NO: 65433 - protein, 416 aa, Zea mays
  Clone ID: LIB4764-017-F8_FLI.pep
GSSELPANFASPPPIHHPHPVTETEGRAGPRDATEMEHTNHRRRRQALATVSATTTLLLPLLCLAALTTAEALREHRDEGGASSSSGGSGSGCGKQSPAVWVFGDSYADTGNLGDLGRELTREWYDPYGTTFPGRPTGRFSDGRVLTDFIASAMGVPTPVAYKLRRGAARGLVARGMNFAVGGAGVMDTGNFQRNIGEQIDLFQAQRPPPPPSARGCDGGVAVVVVSGNDYSYAADKDNSTSAAIAYIPAVVRQLREQLLRLRDEAGMRKVVVTNLHPMGCTPLFTRALNYTACDPLANAGAVQHNAALQSVLAALDPANRTFLLLDLNTPFAALVDGAAAATAEERFAEPRRPCCESFSADGHCGQQDDSGRRQYTLCSDPSKHFYWDDVHPTQAAWAAVSRTFRPMIQEFLLST

SEQ ID NO: 65434 - protein, 225 aa, Zea mays
  Clone ID: LIB4764-018-B2_FLI.pep
IRQSKAHAQYSTLQRRRTGWLVFVLEVLGGGRGLVPDAVAVVGEHHEDVARDGADHGREHGHHGGLGELQRRVEAGDGVGVEEREGGEDEQRERGVREVAGAEAVRRQVPGGGVRVGREGAQAPPRHHAVVHAPVRAHVAVGEAGEGAGGAAQRHQRPAQRLVQRGAVPVVGRQRAQELEQEHRAAREQLDQVRHAAQRAVRQAPWRRHVVLSCLLACSCCLSSS

SEQ ID NO: 65435 - protein, 243 aa, Zea mays
  Clone ID: LIB4764-018-D10_FLI.pep
PGLRSQIEISVSPVTNPTPTSPRPGWPQQQRIAPGGGSRRTKQEMASALSSLRYGDSLSVVGISAATAVLCEAISWLLIYRTATYDSLRASIERHSRKLDAMKSGSNSSGAASSSAQAASSRAKKMDRVETSLKDAARELSLAKLKSGAVVAAVLFVVFGLLNSLFEGRTVAKLPFAPIPLVQRMSHRGLPGNDPTDCSMVFLYFLCSMSIRTNLQKLLGFAPPRAVAAAGGGLFPMPDPKVN

SEQ ID NO: 65436 - protein, 207 aa, Zea mays
  Clone ID: LIB4764-020-C10_FLI.pep
SCQHGRGQGEQGRGDSRGHGAGGEGLRRGVRVRRRRGRGAAGGLGAGGGRRRCGGRGSRGGDADVHLLAGSAVARVAAEEVVVARGVEDDGIVPRGPGGRRLGGDAVLVVRLAHRQHVVELLVIREHNSVADDDLLGAGPGGVVGVAHDGPPNGAAHLVHGRRRHARPHHQQQRRATAAHGSGRDRAAAKGRERWQCAVLSVWINSR

SEQ ID NO: 65437 - protein, 256 aa, Zea mays
  Clone ID: LIB4764-020-E12_FLI.pep
PQSTGFCFTCRDAEYDWIAELVMPKECFVRTMLFLAVNQIIQKNPTQPVATKIPTTAEITVAEMTKIATDTAPIYTATKQAKKMAKNPPAAASDIKTETMIALAVATNRKNMKVRRPVNAISVIVPTEMTRMARRPLPRLVHSSRSRAEFRDAPLRRGAASQDAARSRRSRGSSGYQTPSTKLRRTPASVSSSPTSTSRAPEGASPLVAGLAEASAGAGPSTSIGGKMWGPGRSQCNWALAWRTAVLASPRGTGTP

SEQ ID NO: 65438 - protein, 480 aa, Zea mays
  Clone ID: LIB4764-020-F7_FLI.pep
RRQNTRPAHRMTGSSKPFGFSSAMPLAAVLLPLLVLGASSVCQGQGAASHNITAILAAYPEFTDFSAALVSTGAAAEIDRRSTVTVLAVDNAVMARLKAQKLQLDDLQRVIYLHVLLDYFDAAKLGSIQGGFAQAASLYQASGKAQGSDGIVNITVFRDGRVAAFTPSGPSNRLPTAFYQRSIKEQPYYIAVLQVRDLIWSPAPADGVQAPPPAPQPDAAPGLTDLLSKNGCGGFASLLAATADAVTKYDSSAAGLTVFCPADEAVEAFNSTFKNLTADAQLALLLYHGVAEHYSAQSLKAINGDVSTLASDGSKNNNGYNLTIRADGDTVKISSASASAATVTKTLLDKAPLAVYLIDAVLLPRQQSNDDQGHTAPAPAPASSPAHAPTPALAPVSPSPAPVPVSPSPSPAHAPTPPLAPAPVTAPAPRSRPAPSPEHTTPAPSPDADGQPLADQKNNAARDTASWTIGAVLAIVCLLS

SEQ ID NO: 65439 - protein, 284 aa, Zea mays
  Clone ID: LIB4764-020-G11_FLI.pep
CWCVWCGSSISPASLARSLATTMKAATGSSSVARALALLLAACLLWKEAACFSASGLNKAFATFYGGSDASGTMGGACGYGNLYSTGYGTDTAALSTALFNDGASCGQCYRIPCDYQADPRFCIRGTSVTITATNLCPPNYALPNDDGGWCNPPRQHFDMAEPAWLKIGIYRGGIVPVNYQRVPCVKKGGVRFSINGRDYFELVLISNVGGCGSIQSASIKGSRTGWMAMSRNWGVNWQSNAYLNGQSLSFQVTSSDGQTKTFPDVAPASWGFGQTFATSQQFS

SEQ ID NO: 65440 - protein, 321 aa, Zea mays
  Clone ID: LIB4764-021-F3_FLI.pep
LLQIPSAIYLRAATTAPVLKPATVAMQSPEPSSSSPVLLNIGGKKYATTVETLMQREPDSMLAAMFSGRHTLHDHPTTGKGVVFVDRDGKHFRHVLNWLRDGAIPVLSESDYQQLLREGLVDYINERLGWKETDNSEAELTRKDVIKCIQTQRVRFRGVNLSGLDLSKLDLSEVDFSYACIKNTDFSYANLYKAKFGQVEASSSSFQNAILRECEFIGANLEESILDGANLRSANLQDACLTRCSLILTDLHSAHLQTANLTQADLRGANLEAANLKGAKLSGTNLQGANLQRAYLREVDLRDTQLTGAKLGGANLLGAIR

SEQ ID NO: 65441 - protein, 189 aa, Zea mays
  Clone ID: LIB4764-022-E4_FLI.pep
PDTLHVRQHLSSNPGTMAAAVPLLLLLLPTILMAASAASGEKSTHIKLYWHDVVSGPSPTAVPVAQAAVTNTSKTAFGMVVVIDDPLTEGPDLKSSKPLGRAQGTYVGAGKDELSLMMNMNFVFQAGEYNGSTVAIMGRNAVFDAVREMAVVGGTGAFRMARGYAQARTHTFDLNTGDATVEYNLYIKH

SEQ ID NO: 65442 - protein, 321 aa, Zea mays
  Clone ID: LIB4764-023-E9_FLI.pep
PRKSSPKTRRNSPRAKYKVYKPTPPLPLFPLPPPPAPRDSLLSSRCSPSPTRNPSDCHCPRAARPMNGGGSGLAPNAAHTADEVFRDYKGRRAGMIKALTTDVERFFKLCDPEKENLCLYGYPDETWEVTLPAEEVPPEIPEPALGINFARDGMNEKDWLALVAVHSDSWLLSVAFYFGARFGFDRETRRRLFSLINNMPTIFEVVTGAAKKQAKEKTPNSSSKSNRPSSKVQSRAESRSKAKVPQDEEESGDDDEDEEADEHNNTLCGTCGTNDSKDQFWICCDNCEKWYHGKCVKITPARAEHIKQYKCPDCTNKRARA

SEQ ID NO: 65443 - protein, 200 aa, Zea mays
  Clone ID: LIB4764-024-H10_FLI.pep
GLRFLLHTASSVLTTTAVARRRVGRMPRKITLVKEGEPQPVDAAQGEPAPAPAAPTAALTEAEVDELPRAIVRRLVKDKLSHVAGGEGAEVIVNKDAMAAFAESARIFIHYLSATANDMCKESKRQTINADDVLNALDDMEFSEFVEPLRTSLQEFRNKNADKRSEAKKQQKEKRRKLNEETLPQKENDPADDAKENGVA

SEQ ID NO: 65444 - protein, 282 aa, Zea mays
  Clone ID: LIB4765-001-D2_FLI.pep
RLAVRGSSGMEWVDRTKASAAAAAAAADERAGGAEGLAGYVKVMTDEQMEVLRKQISIYATICEQLVEMHRALTEHQDTIAGIRFSNLYCDPQIIPGGHKITARQRWQPTPMQLQILENIFDQGNGTPSKQRIKEITAELSHHGQISETNVYNWFQNRRARSKRKQAASLPNNAESEAEVDEESLTDKKPKSDRSLQDNKAMGAHNADRISGMHHLDTDHDQIGGMMYGCNDNGLRSSGSSGQMSFYGNIMPNPRIDHFPGKVESSRSFSHLQHGEGFDMFG

SEQ ID NO: 65445 - protein, 444 aa, Zea mays
  Clone ID: LIB4765-002-C8_FLI.pep
PGPPPTSPPPLLALTPPLPTSCLYCIQTPEEAERANEARHELPFRRRGARAPPGPARRRPVPRGPARRRGRRHRHGELHRQRRRRVLGPLAEGPGHLVRPAQRRRPRRQRWRVRIQAHQPVPLHVHGLLRQPAIVQGRQGLGLLLQDSVQEGPVLLRADGDGDHHRHELLPGVQVPLRPQRHCVRQAGQARPQRQAPPLRHHRHRVHQGAVRVPGPEDRVPRGGVLEPRLLRGAGGVRGRRRRRGAGGPDGVQDGARPADGAVDADARVLGLRLAHGHQPPHAAALLHPHPQRVRQDARRQQRHPGQLAPQHLLPLLRPVQLTDRDPCPARNWSWLAGALLGSVTIVYSTILCSTTTRLLLLLLVYYHQVRRNGTASRRRRPWEGRCLRSPCRCSCIVIMVLGVVASGARFLGQASCAMFVGSGWHVMPCVTLIASRQARRQKN

SEQ ID NO: 65446 - protein, 288 aa, Zea mays
  Clone ID: LIB4765-003-B9_FLI.pep
RGEGTPQTPGNYRCICSRLDMSSSSSMLRLPPCRPAVHPVCRGAGSSGGSTHPLRSSSRSRPSSLTAACALKTPSNGGSRGKVNPRDLFTFSHKFSTDIPMSETQGASIDEYLRNSPRIVGAVFPDQRKRRKINDEEWSVQLLPIRFLFLSASPVIVMRFVSKSGGKEYPPNVPVHATSLLLMEVTDYKLNGLDSNAMPSHLALTVRGLMYPQRQREGRKSLKGHVEMTVGFDLPPVLALVPASIIRGVGETVLRQMAEQMKQDMDTGLAADFNKYRREKLTERRSSP

SEQ ID NO: 65447 - protein, 464 aa, Zea mays
  Clone ID: LIB4765-003-H6_FLI.pep
GREKGRKRGATPRVETPGRQASRGPPPLPMPVPKPMERKQAAYSNLDERYAIQGEKYQGQQYSHIYFTRLHHMRNLLHALVPSWKPQLPVTTVLGLEEGKDCIIVGTLYKHMKLKPSILDEYAKERSAIPLVKPHNFMHPDDHLILEDESGRVTLAGAIPPAAFVTGVVVALHGKETSAGNFLVEDVLEAGLPPQSALSSAEEDKYVVFISGLSVGSDTFNPLQFQLLIDHVTGHLGDENEQSIASNIVRIVVVGNSVHISPRFVNGQTVPSKDQSRIAEPIKELDIMLTQLVASLPVDMMPGCHDPANFSLPQQPLHRCLFSGASTYNTFSSCSNPHQFELDSVQFLGTSGQNIDDLYKYSDAKDKLEFMERTLRWRHLAPTAPNSLGCYPYTDKDPFLVESCPHVYFVGNQDKYETRLLEGQEKQKVRLISIPRFSESGVAVMLNLRNLECSTLSFSTSFDA

SEQ ID NO: 65448 - protein, 503 aa, Zea mays
  Clone ID: LIB4765-004-A10_FLI.pep
PGMTKILLLLLLLALPLPAALALTAEGLALLTFKAAATDDPHSALSRWSESDQDPCRWPGVICANASSSAPSAAPRVVGLAVAGKNISGYIPSELGSLLFLRRLNLHGNRLSGVIPAALSNASSLHSLYLYGNRLTGGLPVALCDLPHLQNLDVSGNALSGELPLDLRGCRSLQRLVLARNAFTGELPAGVWPEMPNLQQLDLSSNAFNGSIPPDLGELPRLAGTLNLSHNHFSGVVPPELGRLAATVTLDLRFNNLSGAIPQTGSLASQGPTAFLNNPGLCGYPLQVPCRAVPPPTESPTPPATTTPLPSTASSDQHQPIRTGLIALISVADAAGVALVGVILVYMYWKVKDRKGRRDGGGDDSSKSGLCRCMLWRHGGSDSSDASSGDGDGEGKYSGGEGELVAMDRGFRVELDELLRSSAYVLGKGGKGIVYKVVVANGTTPVAVRRLGGGGGGADRCKEFAAEARAVGRVRHPNVVRLRAYYWSADEKLVVTDSLEKIG

SEQ ID NO: 65449 - protein, 370 aa, Zea mays
  Clone ID: LIB4765-004-B10_FLI.pep
APGARCGQAADMATEASTSAAGGIWVEGMSADNIKGLVLALSSSFFIGASFIVKKKGLKKAGASGVRAGVGGYSYLYEPLWWAGMITMIVGEVANFAAYAFAPAILVTPLGALSIIISAALADIMLKEKLHIFGILGCVLCVVGSTTIVLHAPQERTIESVAEVWDLATEPAFLSYAAIVLAATFVLIYYFIPRYGQTHIMVYIGVCSLVGSLSVMSVKALGIALKLTFSGMNQLIYPQTWLFTIVVVACIVTQMNYLNKALDTFNTAVVSPIYYTMFTSLTILASVIMFKDWDRQNPTQIVTEMCGFVTILSGTFLLHKTKDMVDGLPPTLPVRIPKHEDDAAEGIPLRSAEGIPLRSPRATESFRSTL

SEQ ID NO: 65450 - protein, 349 aa, Zea mays
  Clone ID: LIB4765-004-F1_FLI.pep
LELDRLDTLELEGVIHGGGIEQAGALDSMVQVAVVVEQPRLDRRQRHLLMGRRHARLRLVFEDRPTTSGRRRGRCDGGATVRHLRRVRGSRGRALGTAGGARGPAAADLPASPPVQHPRDVLRGENVRPRGGGGEGRWRQRGGLRRARRARSRAVTAARARASGRRVGGGVALQLRLEVVERGEGLAKRAARQVDVRLQPPLPLALGRRRRPVRRRLGRPVAAALQLALEVRVPVVLDVVVRPLRQVRRDGRPPVAEEGLEVHDELLLLLGEVAALDARPEVVGPPQTAALAAPHQPGSGRDGAPVAGAVLLDVGDEDEVLLRRPWPLLDALLVAARRPHHGVSVLMND

SEQ ID NO: 65451 - protein, 376 aa, Zea mays
  Clone ID: LIB4765-005-C1_FLI.pep
AGRAHPARRVQVAGLLLPPRPLHRRRPRRPHDGEKDSLEPWKFKVAYDKLVFACGAEASTFGIRGVTDHAIFLREVHHAQEIRRRLLLNLMLSDLPGISEEEKCRLLHCVVVGGGPTGVEFSGELSDFIIRDVKQRYSHVKDYIHVTLIEANEILSSFDVRLRQYATKQLIKSGVRLVQGIVKDVQPNKIILDNGEEVPYGLLVWSTGVGASPFVKSLPFPKSPGGRIGVNEWLRVPSVHDVYAIGDCSGFLESTGKEVLPALAQVAERQGKYLASLLNHVMKAGGGHANSETEADLGRPPFVYKHLGSMATVGRYKALVDLRQSKESRGISLAGFVSWFIWRSAYLTRVVSWRNRFYVAINWLTTLLFGRDISRI

SEQ ID NO: 65452 - protein, 467 aa, Zea mays
  Clone ID: LIB4765-005-D12_FLI.pep
PGSRKRHQSLLPLPPAVPPATPPLFQESSRGEEGPQVHSRGSTATYAGRILDRDRSGRGLGFLSQAGAMVGCSRGSLPTWMTAAAARVDLSGGVTPSHQGSPSPPHSSSGPAPAAGADQQLGLFERALSAAGAAFVSAIIVNPLDVAKTRLQAQAAGVLYHQPAQMAALGPDAILSEFRCSPSCTRGLLLGSEPVCPPDCFQYKGTLDVFLKVVRQEGFSRLWRGTNAGLALAVPTVGIYLPCYDIFRNGIEDFTRSNAPGLTPYAPLVAGSVARSLACIACSPIELARTRMQAYKEFRPGLKPPGMWKTLVGVLPPLAGSSQNVQNYRVLWTGVGAQLARDVPFSAICWSTLEPIRRQLLGLLGEDGNAASVLGANFAAGFVAGSLAAGATCPLDVAKTRRQIEKDTEKAMRMTTRQTLTEIWRSGGLKGLFTGVGPRVARAGPSVGIVVSFYEVVKYAIHQRHTS

SEQ ID NO: 65453 - protein, 673 aa, Zea mays
  Clone ID: LIB4765-006-B12_FLI.pep
QSAMGIRACSVCWLFYVLVLVCSLCQVLYVGSVAAQTAQLTVDASPQNAQIIPGNMFGIFFEEINHAGAGGLWAELVSNRGFEAGGSNTPSNIDPWLIIGDESNIIVATDRSSCFASNPIALRMEVLCGASETNACPSGGVGIYNPGYWGMNIERTNVYRVTIYIRSSESVELMVSLTSSDGLQNLASHTIMGDKEDFVEWTKVEFDLQSNYINTNSRLQLTTTKSGIIWFDQVSLMPSDTYMGHGFRKDLASMLANLKPRFLKFPGGNYVMGNYLINAFRWSETVGPWEERPGHFNDAWAYWTDDGLGFFEFLQLAEDLGACPVWVVNDGASIYEGVPSATIAAFVKDVVNGIEFARGDPETAWGSVRAAMGHPEPFQLYYVSIGNQECSKYYYKDNYVKFYSAIKASYPDIKIISSCDRSAISSDNPADLYDVHVYTSSGDMFSKSRMFDNTARTGPKAIVSEYAVTGNDAGRGTLIAALAEAAFLIGLERNSDVVEMASCAPLFVNDNDQRWNPDAIVFNSWQHYGCPNYWMLHFFKDSSSATLHPSTIQLPNYDQLVTSAITWNNPHDGNTYMKIKVVNFGSKAVSLNISVTGLETDIQTFGSIKTVLTSGWLRDENSFQQPDKVVPAASPITNAGKQMGVILNSYSLTSFDLLLDSESQVRASIQAYD

SEQ ID NO: 65454 - protein, 264 aa, Zea mays
  Clone ID: LIB4765-006-B7_FLI.pep
RECFQLQPSQPKPMASGSRGGGGSDFSVVVVGSDAGAGAALLVPSDRHSWHDCLAEADACFSDLEERQVVRVQGTDRARRTIVRVVGKFFPAPAIDGERLKKYVFYKLRTELPVGPFCILYMHSTVQSDDNNPGVSILRTIYEELSPEYKERLQVFYFLHPGLRSRLAIATLGRLFLSGGLYWKIKYISRLEYLWGDIRKGEVEIPDFVIEHDKVLEHRPLTDYGIEPDPLHLADVPAEEVGYSLGRYEDKWTPEDRWYSGNYM

SEQ ID NO: 65455 - protein, 368 aa, Zea mays
  Clone ID: LIB4765-006-H6_FLI.pep
RMEDNLPVNVREYQELAKKALPKMHYDYINGGAEDEYTLRENIAAYGRILLRPRVLIDVSKIDMSTSLLGYNMPSPIIVAPTGAHKLANPEGEVATARAAAACNTIMMLSFSSSCRIEEVASSCDAIRFYQLYVYKRRDVSATLVRRAESLGFRAIVLTVDTPVLGRREADIRNKMIAPPLSNLEGLMSLDDFDDAEGGSKLERFSRETLDPSLSWKDVEWLKSITSLPILLKGIVTAEDARKAVEAGAAGLIVSNHGARQLDYAPATISALEEVVKAVAGAVPVLVDGGVRRGTDVLKALALGAKAVMVGRPVFFGLAARGEAGARHVIEMLNKELELAMALCGCRSVAEVTRAHVQTEGDRIRALL

SEQ ID NO: 65456 - protein, 522 aa, Zea mays
  Clone ID: LIB4765-006-H9_FLI.pep
GPKASLSRDSSSSRLPSSSPKIQGAVPGIGRVATMLEELLIFTRGGLILWSSCRALGAAALKGSPIDALIRSCLLEERSADASFSQDNYALKWTFHNDLGLVFVAVYQKILHLLYVDDLLAAVRKEFSQIYDPKRTSYDDFGDIFRQLHREAEARAEEMKKSKQALSSRPQPALTQKKPGPKGRGGDSRGGAANKGGSGAKDDSDGDSYGNQDHRTLANGAFKGQENGVRKENSSHGRTVVVKGKENGAPKDEGAFDVSKLQKLRANKKNGATDNGTKKLTKPDIKKKGKQDRVWDDKPSNKKLDFTDPADERGDEVTDNVAVIEGESMMDKDEDLSSDSEDEEVEDGPKKKGWFSSMFQSISGNNVLEKSDLQPALKALKDRLMAKNVAEEIAEKLCESVAASLEGKKLGSFTRISSTVQTAMEDALLRILTPRRSIDILRDVHAAKERGRPYVIVFVGVNGVGKSTNLAKVAYWLLQHNLSVTLAACDTFRSGAVEQLRTHARRLQIPIFEKGYRSIGWK

SEQ ID NO: 65457 - protein, 321 aa, Zea mays
  Clone ID: LIB4765-007-F12_FLI.pep
GTQTFRYPRVVWPPPAASFSPSIPLPVTSPTRQALRSTRAASPVCPSHTHTVARVPRSAEQGREEGMAVVGVLALQGSYNEHMAALRRIGVKGVEVRKPEQLLGIDSLIIPGGESTTMAKLANYHNLFPALREFVGGGKPVWGTCAGLIFLANKAVGQKTGGQELVGGLDCTVHRNFFGSQLQSFETELSVPKLSEKEGGNDTCRGVFIRAPAILEVGPDVEILADCPVPVDRPSITISFGEGTEEEEYSKDRVIVAVRQGNILATAFHPELTSDSRWHRFFLDMDKESPAKAFSALSLSSSSRDTEGLPKNKPFDLPIFE

SEQ ID NO: 65458 - protein, 209 aa, Zea mays
  Clone ID: LIB4765-007-F8_FLI.pep
HAARPAAMEDEEHEVFGQEIPVDGEDVDMAAGDDATKLQELDDMKRRLKEMEEEAAALREMQAKVAKEMQGVDPNATTSENKEEMDSRSVFIGNVDYACTPEEVQQHFNSCGTVNRVTILTDKFGQPKGFAYVEFVEVEAVQEAIKLNESELHGRQLKVAPKRTNVPGMKQPRGRGFNPYHGHPYMRPYGYSPYGYGFPRFRRPRRPYF

SEQ ID NO: 65459 - protein, 510 aa, Zea mays
  Clone ID: LIB4765-007-G7_FLI.pep
STIYHQTLSPVVPHQPRARDFKHQTTIIMAPPPAMQNPGELNDGAYDAPHILFIPSAGIGHLTPVFRVIAGFSSRGIDVSVVTVLPTVSAAETDYFNGLFADYPAVRRVDMHLLPLDASEFTREDPFFLRWEALRRSVHLLRPIITNAAPRITAIITDITLTSCVIPIAKELDVPCHVLFPTAATMLSLNAYYPVYLEKLKGGPEPGVIGDAVDIPGVFRVPRSALPPALLDVNKLFTKQFIDNGRAIVEADGVLVNTFDAVEPAPLAALRGGKIVPGYPPVYTIGPLKSHATKAGDKPGDALLDEWLGKQRARSVVYVAFGNRSAARLDQIREIAAGLEDSGYPFLWVLKTTKVDREDDAELAEVLGDGYLERVKERGIVTKGWVEQEELLKHPAVGMFVSHGGWNSALEASSAGVPLLVWPQLGDHRVNAMAAVRAGIGAWAEHWSWDGEDTLVTRQEIADKVKEVMADEKLRAGVAVAREEAAKAVAEGGTSYRNMHDFIAKLKGGA

SEQ ID NO: 65460 - protein, 446 aa, Zea mays
  Clone ID: LIB4765-008-G6_FLI.pep
RVHQDISFVKKKNNNYCWIERLRDGLTLSGRISGRLFFLSGYPFQDFGLRGDEMMRRCVSALARRRRPDRTVDTMKARFQCLVNISSSIRDTDSQRCSSTCATSCATDPDVLSREASSSEMLVDSFGRFHNYLRISLTERCNLRCQYCMPAEGVELTPKSELLSHDEIIRIADLFVTSGVNKIRLIGGEPTVRKDIEDICLHLSSLKGLKTLAMTTNGIVLSKKLPKLKECGLNALNISLDTLVPAKFEFMTRRKGHSKVLESIDAAVELGYSPVKVNCVIMRGINDDEICNFVELTRHKPINVRFIEFMPFDGNVWNVKKLVPYAEMLDKVRQSYKGVERLQDHPTDTAKNFRIDGHVGTISFITSMTEHFCAGCNRLRLLADGNLKVCLFGPSEVSLREPIRTGVDDAGLKEIIGAAVKRKKAKHAGMFDIAKTANRPMIHIGG

SEQ ID NO: 65461 - protein, 292 aa, Zea mays
  Clone ID: LIB4765-008-H5_FLI.pep
PPKQHIQSRDRMDMDRPEEEGQQRRETMTPVLLRLFGVDVHRGGGSGEPEESPMDLRKSSSMPDLTINPLLSPEEKEGCKGYASDDAELASGQQKRRRRKAQDRKKGIPWTEEEHRKFLDGLRQLGKGDWRGISKGFVTTRTATQVASHAQKYFLRQTNPGMKKRRASLFDVGIADYKDNQVPGPQSIVAAKPAPTQEIIHTDRGDVPIPRYRGLGEILGSNMQVNQLTDYYYFNKNSHVPAGTSLSMASGLETASTVDSLELSIAVNGLELSIAPPSRCVCGGAAGAIKVL

SEQ ID NO: 65462 - protein, 464 aa, Zea mays
  Clone ID: LIB4765-009-D3_FLI.pep
GAISSIHPAALVSGNRTPNRVPAPPTNYSPALPMTTVSRALGSAFAGFTRAPAVAQTATTLPSPYGSSALHQHWRWSRACRTRRFSSGRAARISMSLRAGIVGLPNVGKSTLFNAIVENGKAQAANFPFCTISPNVGVVAIPDPRLQVLSKLSKSQQTVPTSIELVDIAGLVKGASKGEGLGNQFLSNIREVDSILQVVRCFEDDDIVHVNGKVDPRSDIDVINLELIFSDLEQIEKRLDKLNKSKTKDTQVKVKEQAEKSGLEKIQQALMEGKPARSVDLAEHEKEAIKHLYLLTMKPVIYVANVTESDLAEPDSNSHVKEVAKAASDLQSGMVTISAQVEAELAELPLEERVEYLKSLGVAESGLGNLVKATHNLLGLRTYFTTGDKETKAWTILSGMTAPQAAGVIHSDFQKGFIRAETVSYDDFVAAGSLGVAREKGLLRLEGKDYVVQEGDVMLFRFNV

SEQ ID NO: 65463 - protein, 344 aa, Zea mays
  Clone ID: LIB4765-009-F9_FLI.pep
PSPTHPAPPAHATTRTAAAPQLLTHTGQQTPPPSPRERTTRRGHRRTLRSPPLLLSMVSASAPPPPPQAQSDAAGSGEEASKKVRKPYTITKSRESWTEQEHDKFLEALQLFDRDWKKIEAFVGSKTVIQIRSHAQKYFLKVQKNGTSEHVPPPRPKRKAAHPYPQKASKNEPNYGLKTDSSSIHRNSGMNVSVSSWPHRSIPQAVASSMVKEDLGAGTLGPNNFCSSSTEGPPRTWQPGETNGPINQIPSLRLMPDFAGVYSFLGSVFDPSTSDHLQKLKEMNPIDVETALLLMRNLSINLTSPDFEDQRKLLSLYSASDGPELGSSRSSALATSAPFMIKGG

SEQ ID NO: 65464 - protein, 509 aa, Zea mays
  Clone ID: LIB4765-010-A6_FLI.pep
REVLGRFGVPNSSRLRWVGYDRKPRTDQLIARAVSVDRTQLDFSNPDWKKQFQEDFDKRFSLPHLTDVIDVEPRPTTFSLKSRAPLENANGTMQGSWNGYVNDDDRALLKVIKFASPTSAGADCIDPDCSWVEQWVHRAGPRKQIYFEPQYVKAGIVSCGGLCPGLNDVIRQIVLTLEKYGVKNIVGIQHGFRGFFEDHLSEVPLSRHVVQNINLAGGSFLGVSRGGANISDIVDSIQARRLDMLFVLGGNGTHAGANAIHDECRKRKLQVSIVCVPKTIDNDILLMDKTFGFDTAVEAAQRAINSAYIEAHSAFHGIGLVKLMGRSSGFITMHASLSSGQVDICLIPEVPFTLDGPNGVLRHLEHLIETKGFALVCVAEGAGQEYFQKSNATDASGNMVLSDIGVHLQQKIKSHFKDIGVHSDVKYIDPTYMLRAVRANASDAILCTVLGQNAVHGAFAGFSGITTGVCNTHNVYLPIPEVIKSTRFIDPNSRMWHRCLTSTGQPDFH

SEQ ID NO: 65465 - protein, 423 aa, Zea mays
  Clone ID: LIB4765-010-B9_FLI.pep
MMKSHAAIATDRYGSRAPPTISGKNGVERLGVGELLVGTLVGLDLLLEPGELDVAGHLAAVHLGEGDGMVQYGRLPVAHGQRVHRRVGRRVLERGDGQAAALRVHHRLVVRVLEPAVAQEVAVVAEVDDEGALHGPHGDPGPAAVARGLGAADEVLQQQRDGAGVGVALEPQREVRLRAPRVEVDHHLLVHVHAGPGQRLRVQAHGLREHAQEPARQRHQLLAVPLHHRPPRRRLVRPPGVVAGLHRVREVGHDLTPVLHRLPLEVAGDDEAALLPAGHVEAELVLGREREEVAREARHVGHERGVHAVVHHLEDAPVLAGRGHARADLGPPRAVDALERHHRHLVAEAVVRHLGALVLLAHERRAQLRLPPRRRREERNSADAHGSHGASSCSAYVRPPPPRRRTRRRAGIVMLLLLLYTTP

SEQ ID NO: 65466 - protein, 377 aa, Zea mays
  Clone ID: LIB4765-010-C6_FLI.pep
RNQPCICILSVCAASNKPCISLTWDITMPKDRSSRVSSYESRRAGASPYFSSSHGQSSSCRRSEESCGAAAAAAAKQAAEWEDVRCPVCMDHPHNAVLLVCSSHEKGCRPFMCDTSSRHSNCYDQYRKASKDSRTECSECQQQVQLSCPLCRGPVSDCIKDYSARRFMNTKVRSCTTESCEFRGAYQELRKHARVEHPTGRPMEVDPERQRDWRRMEQQRDLGDLMSMLRSGFNSNIEDDSGGLGDTEEGGEEAEMTPASITMVFIMPSRGSIMQYLSERSRTIILVSRRRASSSSGGDAEATAPDSEEGDDLCHRQRHLLVHSILPNKRRLTVTLPNDVSQLARGVPWHLLSLKIPTNMATWYVAKKNMDAGATKA

SEQ ID NO: 65467 - protein, 323 aa, Zea mays
  Clone ID: LIB4765-010-E5_FLI.pep
AAEDRSQSGQRLLPALGSRWRGCLVPTSRSNHKRYSAVHHRCRGPSLIPAITGRNRSWSSTPISTSRSNRRRSHIRGPLITTPLISSLVISDCGKLGGNGSFLLLLLCFLWVSVEKQIDHDLPLVPREDSAPHLQNHPGQKPEQASNAVSPLVVRWDADIDIPHGRVSITEGNGGDVPQSRLLNWLMVSPWVGKDEQPRLAEGGLELVSEGTRGVPPSDGMSASVLSELEDSTLAIGAGGLDDDVLRVLDGNDNPRCKLQFLPCLAKVDDVDAVGAALKGIALHLEIAVLGAKVDVGGEHHLYVLLLLGQRTHRASACCRCHD

SEQ ID NO: 65468 - protein, 482 aa, Zea mays
  Clone ID: LIB4765-011-B5_FLI.pep
RGARCHSSVSFSSSCFPSPALIHKHTELAARIERTMEETSRIPGYFKNKGILITGATGFLGKILVEKILRVQPDVKRIYLAVRAPDAASAKKRVETEVIGKELFGLLRETHGKRFHSFIEEKVVPLAGDIIHENLGVEGPQLRRMTRELNVIVNGAATTNFYERYDVALDVNVMGVKHICQLAKQCPNLEVVLHVSTAYVVGEKQGMILERAFKQGETLRMETELDMDAELRVARDYQQQVVPAVIVRPSIITSIHKEPLPGWMEGTRTIDAILIGYAKQSLSCFLADLQLTMDVIPGDMVVNAMMAATVAHASAPGGHKEESPTVYHATSSLRNPAPYAVLYRTGIRYFCDHPRVGKDGRPVRTRKVHFFGTVAAFTAYMLLRYRLPLELLRLLSLLSGGLLFSRLYADLDRKYRFVMHLVDLYGPFALFKGIFDDANMERLRMAMPVADRLEFNFDPNTIDWDDYFYKIHIPGVMKYVLK

SEQ ID NO: 65469 - protein, 473 aa, Zea mays
  Clone ID: LIB4765-011-F12_FLI.pep
HCWSTNIHISLNIWHSMPPSKARRKRSLRDITATVATGPVANSKPGSSSTNEGKQHDKKKEGPQEPDIPPLPPVVVNIVPRQGLGCEVVEGLLVPSRKREYKPNSKYTVGNHPIYAIGFNFIDMRYYDVFAIASCNSVIIYRCLENGGFGLLQNYVDEDKDESFYTLSWTIDQVDSSPLLVAAGSNRIIRVINCATEKLDKSLVGHGGSIHEIRTHASKPSLIISASKDESIRLWNVHTGICILVFAGAGGHRHDVLSVDFHPTEVGIFASCGMDNTVKIWSMKEFWIYVEKSYSWTGHPSKFPTRNIQFPVLTAAVHSDYVDCTRWLGDFILSKSVKNAVLLWEPKPDKRRPGEGSVDVLQKYPVPKCSLWFMKFSCDFYSNQMAIGNNKGEIYVWEVQSSPPVLIDRLCNQECKSPIRQTAVSFDGSTILGAADDGAIWRWDEVDPAASSSKPDQAAAPAAGAGADADADA

SEQ ID NO: 65470 - protein, 450 aa, Zea mays
  Clone ID: LIB4765-012-D8_FLI.pep
RDSHAMGPISSSSITRKGAMRSSFSGTSSSAASFGSTIGTCPSTVKTFTITELEKATENFSFNKIIGEGGYGRVYRGVIEDGVEVAVKLLTRKHQNRDREFIAEVEMLSRLHHRNLVKLIGICIERSTRCLVFELIPNGSVESHLHGSDKIYGPTDFDTRMKIALGAARGLAYLHEDANPHVIHRDFKASNVLLENDFTPKVADFGLAKEASDGMDHISTQVMGTFGYVAPEYAMTGHLLVKSDVYSYGVVLLELLSGRKPVDMTQPPGSENLVTWARPLLTTREGLQRLVDPSLPAGYDFEKLAKAAAIASMCVHVEASHRPFMGEVVQALKLIHSGGGGDETCSGSFGGGATEESPWNDVSRSSWNDDPPATPGPALPLGYGSDPAGADERRPRSASSAVLDKIESLAMYDWSGPLRTKGRGSFYRLRGSMSEHGRPSDDGSVEGYLM

SEQ ID NO: 65471 - protein, 395 aa, Zea mays
  Clone ID: LIB4765-012-F11_FLI.pep
LALAMGKSCVPPVAMVLVQLGFAGMNVVSKLALDAGMSPYVLIAYRNLIAAAVISPVAYLLERRSGATITKKVLLQIFVSSIFGATLNQVLYFVGLKSTSPTVACALTNTLPALTFVMAAALKMESVRPGTPAGQAKLVGTAVCVGGSMVIPFYKGPVLGLWASPLHWRFVADHAPSPAAAAAHSGAAVLGDVLIIASCVAWAVWFILHTKMSEGFSAPYTSTAIMCLMAGVQCAGVSAAMDRSLDVWKLGCDIRLYSVLYIGIVGSGIGFTLMSWCIQVRGPLYVSMFSPLLLVVVAIIGWAILGEKIRVGTAVGSVLIVAGLYMVLWGKGREMDRPDLNNDDDIADEETAVGLVGFSGKGGGAVAIASSRVEAISLPVSFSTTSPKRLQHIHG

SEQ ID NO: 65472 - protein, 250 aa, Zea mays
  Clone ID: LIB4765-013-D1_FLI.pep
PSFLPDSPAFLSVAAGGRWWLEMTHVFPREGASSSSTSMSSQRSETDDDRMIAMVLSEEYAKLDGAMAKRLTNLTSIPHVPRINTYFPTYSDATMDHYRLLDRLNAYGLFEVRVSGDGNCQFRALSDQLYRSPDYHKNVRKEIVKQLKECNSLYEGYVPMKYKHYCKKMKKYGEWGDHVTLQAAADKFAAKICLLTSFRDTCFVEIVPQYQAPQREIWLSFWSEVHYNSLYDARDLPSKYKPRKKHWLLF

SEQ ID NO: 65473 - protein, 488 aa, Zea mays; identical to SEQ ID NO: 59675
  Clone ID: LIB4765-015-B6_FLI.pep

SEQ ID NO: 65474 - protein, 308 aa, Zea mays
  Clone ID: LIB4765-015-D4_FLI.pep
FPYAQVTAFYSYWLGFGSGMDFGWAAAWDAARGESRRVRRLMEEDNKKAMRKARREYNDAVRGLAAFCKKRDKRVVDMVLKKKLEEEKRKAEEKERRKEEDKRKKERAMAYQEHEWARAEEGLYDEDEEEEMRAKKELLYCAACNKKFKSDKQWKNHEQSKKHRNKIAELRKTFREEESLKKAEEGEGDWNEVDMGFDFKPTQESDDASAFSDAAEELAEEFESNYAGNGHHGKCEVQPEGSVHVNDVDDIMEGPSSSNVNNGAVIMVLQLPSPLPVLCCSRRNKLFSHLEETGHAMLKSLVGSAWFS

SEQ ID NO: 65475 - protein, 137 aa, Zea mays; identical to SEQ ID NO: 60594
  Clone ID: LIB4765-015-F4_FLI.pep

SEQ ID NO: 65476 - protein, 448 aa, Zea mays
  Clone ID: LIB4765-015-G3_FLI.pep
GATDASSPTPPPSSPLQESGELASRVRGRGCVRRRSTSTTLSRRARARVSMADGEPSLTRWTFEDFVVHYEARFGLRREADGDDAPPPRGSDHGASRPATARANGGADLAVFEQFERMERKVEISNGAIEDGPLQKSLLPSFESAEMRNLAETLLRDIIRGSPDVKWESIKGLENAKRLLKEAVVMPIKYPKYFTGLLSPWKGILLFGPPGTGKTMLAKAVATECKTTFFNISASSIVSKWRGDSEKLVKVLFELARHHAPSTIFLDEIDAIISQRGEARSEHEASRRLKTELLIQMDGLTKTDELVFVLAATNLPWELDAAMLRRLEKRILVPLPEPDARHAMFEELLPYTPGTMEIPYDVLVEKTEGYSGSDIRLVCKEAAMQPLRRVMAVLEGRKEEVPEGELPEVGPVTTEDIELALRNTRPSAHPHAHRYEKFNQDYGSHVHG

SEQ ID NO: 65477 - protein, 421 aa, Zea mays
  Clone ID: LIB4765-016-C2_FLI.pep
ESIGIARRNADLNAHNSPLRSGTTPPPIPIVTVAMSNPGSLPASAHHEHEHTPLCRSCGAPTTSPTPAPWSGTTDSPPPAYRPIRLPAINAPTNTAAIVLSPVPQPLPVPPAAPPHAFLVPAKRITSPDDIARFHASVHGLHFLGFVAALSASVHGRKLSDPLPSPPSPAIAALLDLVSALAALVASTPPLPHSSRYGNPAFRLWHEKLTDSASELISRITATASSPADLAGADVELAPYLLDSFGNATRIDYGTGHETNFAAFLYCLARLGLITEPDYPAVVLRVFTAYLDLMRTLQDTYQLEPAGSHGVWGLDDYHFLPFVFGSAQLIDHKYMKPKSIHNPDILENFSKEYMYLACVAYVKKVKKGPFMEHSPMLDDISGVANWKKVNSGLLKMYKAEVLEKVPIMQHFLFGSLIKWED

SEQ ID NO: 65478 - protein, 435 aa, Zea mays
  Clone ID: LIB4765-017-E1_FLI.pep
ASTAPLPMEDEDTGPGDGGEASPPHHVAASSDRARDMVASPTSSRSVTQTVNGSHHFVIQGYSLAKGMGVGKHIASETFTVGGCQWAIYFYPDGKNPEDNSTYVSVFIALASDGTDVRALFELTLLDQSGKGKHKVHSHFDRSLESGPYTLKYRGSMWGYKRFFRRTALEQSDFLKDDCLKINCTVGVVVSTMDYSRPHSIEVPESDIGFHFGTLLDTQEGVDVIFSVAGEKFHAHKLVLAARSPFFRSEFFDHELGEEKNGTDTGDEIKEIVIDDMDPVVFKAVLHFIYRDNLVNDDELSASSSDCSIFDRLSGKLMAAADKYELPRLRLLCESYLCKHISVNSVATTLALADRHHAMELKSVCLKFAAENLSAVIRTEGFDYLKDNCPSLQSEILRTVAGCEEPCSSGLKSQSVWAQLSDGGDTSGRRVRPRV

SEQ ID NO: 65479 - protein, 291 aa, Zea mays
  Clone ID: LIB4765-017-C2_FLI.pep
VLRGRRIMASSLAEEEEAFEHTLLVVREVSVYKIPPRTTSGGYKCGEWLQSDKIWSGRLRVVSCGDRCEIRLEDPATGELFAACFVLPGQRESAVETVLDSSRYFVLRIEDGRGKHAFVGLGFNERNEAFDFNVALSDHEKYVKREQEKETTGAGGEETGGGEIDIHPAVNRRLKEGETIRITVKNKPSTGSGMLSAAGLSGGTTAKPKTSMLLAPPPGAAGKLRSPLPPPPNDPAAARMNSGHTAGIRAPKEPTKRNNDPFSDLSAIKQNLPSSAEPGQTKSTGAGWAAF

SEQ ID NO: 65480 - protein, 395 aa, Zea mays
  Clone ID: LIB4765-018-B8_FLI.pep
PGTAAPAPRTRMAAADASSLPPSAITCRAAVAWGPGQPLVMEEVEVAPPGPMEIRVKVVSTSVCRSDVTAWQSKAQLDLFPRVFGHEASGVVESVGEGVTEFQVGDHVLTVFIGECKSCKHCVSGKSNMCQKLGLERKGVMHSDQKTRFSVKGKPVYHYCAVSSFSEYTVVHSGCAVKVGLTVPMDRVCLLSCGVSAGLGAVWNVANVSKGSSVAIFGLGTVGLSVAQGAKLRGASKIIGVDTNPEKQEKGKSFGVTDFINPDELSEPVQQVIKRITDGGVDYSFECVGDSGVVSTALQSCSDGWGVTVTLGLPKGKLEVSTHYAFLLSGRTLKGSMFGGWKPKSDLPSLVDKYAAKEIQVDGLVTHDIPFNEINKALELMLENKCLRCVIHMPR

SEQ ID NO: 65481 - protein, 419 aa, Zea mays
  Clone ID: LIB4765-018-C10_FLI.pep
RPMSSHVSTSRGLHPPGKLGTLDSPGAWQPPAPMAQPEAGRGDDQEVRLLSVAWNQDCGCFAAGTSNGFRIFNCEPFKETFRRDLKSGGFAIVEMLFRCNVLALVGGGSNVLYPPNKVIIWDDLLSRCIGEFAFRSDVRAVKLAKDYIVIVLERKIFVYNFTDLKLLYQIDTLSNPNGLCCLSHHSNTSVLACPGLHQGHVRVEHFGLQMVKTIPAHDSHISCMSLTMDGLLLATASTKGTLIRIFNTMDGTRLQEVRRGLDKAEIYSIALSPNVQWLAVSSDKGTVHIFSLRVRVAGVDSSNEQRALEGPRMDHQNSSSSIDPLIQANTGSNASSSLSFMRGILPKYFSSEWSFAQFHLPEVTRYIVAFGAQNTVMMVGLDGSFYRCSFDQANGGQMLQREHFRFLKSDSPPFRTAAA

SEQ ID NO: 65482 - protein, 461 aa, Zea mays
  Clone ID: LIB4765-018-G1_FLI.pep
PGAISANAHKRRTNKQQESGTPKGKGKGNGNASQRQSAPRHDEEGGGGLAGGGDGGPAAPVVVVGGRLRPATAAAAARGQQADGGEQPAAAEGVRGAAGAEARGDGGPQEPDAELVRAGRVRLLRRVLRGGAGRAAGADGGRGGPEPRRPGGDAPGGAGPAGGPSAAAPQLEPVRGDAPGVPPQDAAPARAGREQQPPLGRVPAAHPVPAKCEVRGPAVQRAARAGAAGALRQAAGRRLPQRQRLRLRAAGQPGQLAGVRARAGQPAPARVHPAQRGPHGGHAGRAGGAQLGPPLLPPAGAGLAARAHRAGPQLQPAAGDAAGVHGRHAQPAAAPRGAQRAVGPRPRGRLRAARAPQLHLLVQLLLLRAKPLPRRPPRRRPPELHRRPPRPAPRRPVPRLPPPPARALRRQRLLRPAAAALLEIHAYSGSAGGGRETEGEGDSRRRLAASGLVNFACVDVW

SEQ ID NO: 65483 - protein, 145 aa, Zea mays
  Clone ID: LIB4766-002-H3_FLI.pep
LGYRSPTPGAESLADFFASEECPPDPPLMDNVESAPDSPAQAPPSSASSLPKEQSQVELELRLLQALEFYPPSKLKGIHRHFVLYGLMEYLRKSLDRQFSSDEVLQLLDRFFNLEMLVSGKPISELLCYISLLFLSYIVWTIGVY

SEQ ID NO: 65484 - protein, 111 aa, Zea mays
  Clone ID: LIB4766-002-H9_FLI.pep
RGRPGLLVGPFVKAGPLRNTEIAGQAGSLAAGGLVVILSLCLTIYGISSFNEGAPSTAPSLTLTGRKKEPDQLQTADGWAKFTGGFFFGGISGVIWAYFLLYVLDLPYYIK

SEQ ID NO: 65485 - protein, 215 aa, Zea mays
  Clone ID: LIB4766-004-D2_FLI.pep
RGEHALRTSEIQDHHQPKVLRLARSPPFRRPHPMAGSTKVLAAILLVDLVAFGLAIGAVQSRPSARLETDERQEWTYCVYRTDAATALGGATLALVFAGQAVAAAASRCFCCGSVLRPGGARACALVLFISSWVTFVIAEACLLAGLLQSAYHTGYRKVFFQNPPDCETVRRGTFGAGAAFALFTCVLTSAYYYCFSKARIYYHRPEAAIGMTPL

SEQ ID NO: 65486 - protein, 156 aa, Zea mays
  Clone ID: LIB4766-004-D9_FLI.pep
GLLLCDSLRTQATNFKSNHGELNLLCLLPPVCNLGRPRGTILILHPRPGRLLPPSQVRLSRIRRRVQPPRRRRRRVSDGVGEQPAHSSRKELHKLRCAEEEHCPLLPTWCFLLQLPPRRSGQPLQPRMQCYHPMQALNLFFFSFFFISFFYLYFCN

SEQ ID NO: 65487 - protein, 170 aa, Zea mays
  Clone ID: LIB4766-005-D6_FLI.pep
PGSISSGAPTPLTSSPSSRNASPPAVATSTASTSSSPTTNPSSTPAVSLPTIQGSGRVMSSTRISSISPAASMRKPPPYEFPILTPNTTSPSSHQSRTTACSICSIDGKKAGFQYTSIVSLEAWNPIPLLTHRTCQQKRERDLGIDPGYRFCCAGKIHADTLRKLVKSIW

SEQ ID NO: 65488 - protein, 510 aa, Zea mays
  Clone ID: LIB4766-006-E10_FLI.pep
HHRGLPSLGGSFPDPSREVKKEAGRWWMDGPKRHLRVRLRVTARRRGAYGDGAGGALGPRRRKCRMETPVLNSAAKLQRREIGGRQLAARGGGPAAAVPERFRNMQLQEEFDTYDDNANLFVKLQFLKRRSKINEIVAAKDIIFALANSGLCAAFNRVTNKRIGFLNLSPDEVIRSLFYNKNNDSLITVSVYASDNFSTLKCRTTPVEYIRRNQLDAGFPLFESESLKWPGFVEFDDVNGKVLTYSAQDGIYKVFDLKNYYFLYSIPDENVQEIKISPGIMLLIYDRTPSYVPLKILSIEDGKQLKFFKHLLHRNKKIDFIEQFNEKLLVKQEDENFQILDVRSSELIEVNVSKFMTPSAFIFLYENNLFLTFRNRTVAVWNFRGDLVTSFEDHLLWHHDCSTNNIYITSDQDLIISYCKSEAVAEDGTVVPVGSINMSEIMTGKCIAKITANDPALSAPPRRNGRSKRRSSVWSTVPEALEDVTALFYDEDRNEIYTGNSHGLVHVWSN

SEQ ID NO: 65489 - protein, 453 aa, Zea mays
  Clone ID: LIB4766-008-B4_FLI.pep
IPKLHSAAPAQPRRKKSPREVSVPVAAASNPKPRPLPVHNKENQAEGKVAEEGAATEEGEKYRAEPEILPLPPAMAKLGPGQGLGCEAAEGSLVPSRKREYKPCGKHTEGKRPLYAIGFNFMDARYYDVFATVGGNRVTTYRCLENGSFALLQAYVDEDKDESFYTLSWARDHVDGSPLLVAAGSNGIIRVINCATEKLAKSFVGHGDSINEIRTQPLKPSLIISASKDESVRLWNVHTGICILIFAGAGGHRNEVLSVDFHPSDIERFASCGMDNTVKIWSMKEFWLYVDKSYSWTDLPSKFPTKYVQFPVLIAAVHSNYVDCTRWLGDFILSKSVDNEIVLWEPKTKEQSPGEGSIDILQKYPVPECDIWFIKFSCDFHFNQLAIGNREGKIYVWEVQSSPPVLIARLYNQQCKSPIRQTAVSFDGSTILGAGEDGTIWRWDEVDHPSSRN

SEQ ID NO: 65490 - protein, 436 aa, Zea mays; identical to SEQ ID NO: 50973
  Clone ID: LIB4766-008-C2_FLI.pep

SEQ ID NO: 65491 - protein, 152 aa, Zea mays
  Clone ID: LIB4766-008-G1_FLI.pep
SVTLNPHQNPSSPPSPPSNPRNERAGEEVPLSEMARVFRGSLLLMSPAAAAAAAAAAGAKKAASTKPRAPAGITKPMPVSEAFRRFAGGAREVARSEAIKLVWTHIKAHGLQNPSNKTEINCDATLKSLFGGRDKIGMMEVSKLLSPHFLKN

SEQ ID NO: 65492 - protein, 246 aa, Zea mays
  Clone ID: LIB4766-009-A3_FLI.pep
RFPSASIMLVAAPATKGSPTKDLTAVEPGDEVAQSVFDAGGAMGSVSVCQANGNYPPPPPQAEAEQVVEDGVAVDRINGNYQPLELVAEAGQVVEEGDAGVTMEGVASIALLPTGAISGHFIRLPDSICYGLHGTPISCERECSRGEDYRLIKLTIIDFKSKREKVLVVECRGHDAARLQNIDHLHGWEDDIVGLVEKDHGNQKVLLSFECETLKADKDAEDHIAKYMPNLCGLDAVESARMNSIR

SEQ ID NO: 65493 - protein, 343 aa, Zea mays
  Clone ID: LIB4766-009-B11_FLI.pep
FHLHPHHLVHQSCLPYLHATAPVAAASALFAPGPTSSPSVRVSRPRRHASMSAAADSSSSIVVSGDAAVSSLSPESIEHNDLLIVGPGVLGRIVAEMWKQEYPGCKVYGQTATTDHHSELTDIGIIPSLKGSVPGPKFPYVIFCAPPYRSEDYAGDLRVAASNWNGKGSFLFTSSTAVYDCSDNGFCSEDSPCVPIGQSTRTDVLLKAENVVLEAGGCVLRLVGLYKSDRGPHVYWLSKGTLDVRPDHILNLIHYEDAASLVISIMKKRLRSCIFVGCDNEPLSRLEIMDRVNRSRKFDTQFHGFTGTDGSLGKRMDNSKTRAKLGWQPKYPSFTEFLGLSNL

SEQ ID NO: 65494 - protein, 173 aa, Zea mays
  Clone ID: LIB4766-010-D12_FLI.pep
SRSLEGSSERLCRAGESAMGKMRQLICLVAAVAAAAILLTASAKKSGDVTELQIGVKYKPESCTLQAHKGDKIKVHYRGTLTDGSVFDSSYDRGDPFEFTLGNGQVIKGWDQGLLGMCVGEKRKLKIPAKMGYGERGSPPKIPGGATLIFDTELIAVNGKTSGGAKAESDSEL

SEQ ID NO: 65495 - protein, 439 aa, Zea mays
  Clone ID: LIB4766-010-D3_FLI.pep
GPAAKLPPPCLLPRRPALPPSAPAMGTGRRGGGGGGVFHRLLALSSLLLLASGEVVFEERFEDGWETRWVESDWKRSEGKAGRFKHTAGRYSADPDDKGIQTTIDARHFAISAKFPEFSNKNRTLVVQYSIKFEQDIECGGGYIKLMSGYVNQKKFSGDTPYSLMFGPDICGTQTKKLHLILSYQGQNYPIKKDLECETDKLTHVYTFILRPDASYSLLVDNRERESGSMYTDWDILPPRKIKDVHAKRPKDWDDREYIEDPDEVKPEGYDSIPKQIPDPKDKKPDTWDEDEDGIWKPRMVSNPAYKGPWKRKRIKNPSYKGKWKTPWIDNPEFEDDPDLYVLKPLKYIGIEVWQVKAGSVFDNILICDDPEYARKVVEETWGANREAEKEAFEEAEKERKAREDREGQKAKDDGGRHRIHRRHKKHYRDHWDDYHDEL

SEQ ID NO: 65496 - protein, 242 aa, Zea mays
  Clone ID: LIB4766-013-C2_FLI.pep
RAQNLNLAFRQYNASAAPSISSDMVLGLYTFADIDADGAPRLEVADGEEFVRVDRVVELALGPRVLKAPGTLYLTTRRVIWVSDGGEGYAVDFVAISLHAVSRDPEAYPYPCIYTQIETEAISDEESDVSDSETNGELELSKVMEMRIIPSDPGQLDELFEAFCNCAELNPDPSAESDEEHGWVHGDEGYEDTVDGSDTEFSDVNPIGQTGEQDINHAVIELQINDQRFEDAVDEESHRNGN

SEQ ID NO: 65497 - protein, 349 aa, Zea mays
  Clone ID: LIB4766-014-B1_FLI.pep
SKMGGALLLALLLVSAAAAPQVLGVGNGDNHMRIIQEDIIETVNNHPSAGWTASRNPYFSNYTIAQFKHILGVKPAPQNALSNVPVKTYSRSLELPKEFDARSAWSRCSTIGNILDQGHCGSCWAFGAVECLQDRFCIHLNMSILLSVNDLLACCGFMCGDGCDGGYPIEAWRYFVQNGVVTDECDPYFDPVGCKHPGCEPAYPTPKCEKKCKEQNQVWQEKKHFSMDAYRINSDPHDIMAEVYKNGPVEVAFTVYEDFAHYKSGVYKHITGGIMGGHAVKLIGWGTSDAGEDYWLLANQWNRGWGDDGYFKIIRGKNECGIEEGVVAGMPSTKNMVPNFGGAVGRAIV

SEQ ID NO: 65498 - protein, 314 aa, Zea mays
  Clone ID: LIB4766-014-H7_FLI.pep
HLPTSVSTSCREGVGRRNRATGAMGTVLDSHFLALTAIVTVGYQLLFFIITALLRFDKVTDFAGSTNFIIIAILTLALKGAWHFRQIVLTVLVTIWGLRLGLFLLMRILQWGEDRRFDKMRDNLGKLAVFWIFQAVWVWSVSLPVTVVNASDRNPSIEARDIIGWIIWLVGICVEAAADQQKLVFKSSPSNRGKWCDAGLWKYSRHPNYFGEIFLWWGVFVASTPVISDAEWLVILGPIFLTLLLLFVSGIPLLESSADKRYGRLEEYRVYKNTTSPLIPLPPAVYGSLPAWFKVAFLLELPLYNPGPGGDPIS

SEQ ID NO: 65499 - protein, 352 aa, Zea mays
  Clone ID: LIB4766-014-A10_FLI.pep
RRHHSSRVVDRSQEMGASGGEKLGTLVCVLAHVSLLLVLVLAPCVCKATGGDYGGLSNDHYTESCPELETIVKKSLAPIFAVDITSPAALLRLLFHDCQVHGCDGSILLNSDERRHITSELGSRKNLGIRHVGTVGLVKAAVEAACPGRVSCADIVVLAAREAVAHTGGPRVASVPLGRRDATTTSTQAADAQLPSRFLGIDGALDIFTSRGMTVEETVAILGSHTLGGGHCVNIDTGRARRDKAFEALLHLQCPKTMPPLITEAVVFVPSDLTPTWFDTHYYRGAAAGRGLFNVDDEASTYARTAGYVRRFAEDREGFFGVFASAFVKLSGFGVLTGEQGEIRKKCDVVNY

SEQ ID NO: 65500 - protein, 332 aa, Zea mays
  Clone ID: LIB4766-014-E11_FLI.pep
GVPIRRPPFSISNCKPVLLFRLLDATRRRLLQLAPRSSPHHLPLPPTMPTSEVWSLSDFEISKYIAEGRFGKVYLAREKQSGYVVALKVIFKAKLKKHRFHAHLRREIEIQQSLDHPNVLRLFTWFHDEERVVLVLEYAARGELYKVLRAAGRFTERTSATYVASLAGALAYCHKKQVIHRDIKPENLLIDIEGRLKIADFGWAARSNAKRHTLCGTIDYLAPEMVEKRAHDHAVDNWTLGILCHEFLYGSPPFEADEQDDTLRRIVRVDLAFPSSPCVSSEAKDLISKLLVKDSSKRLCLEDIMKHPWIKKNADPSGSCIKQKDVTRSKLL

SEQ ID NO: 65501 - protein, 381 aa, Zea mays
  Clone ID: LIB4766-015-E12_FLI.pep
RDRKSSLGQEEPTEKYSSKNTTPPAPSTSFVLKRAATTNGLLQHCIFSGDSAGVRADVSGLPRREEAHRAGAGAGHNHEVPQGRAPVGPHRRQLHLVRRLLGAAAGGDHRLRLVADGGGPGRGAAGAVRGHVVQDGAQVLRQLQGAVPGAAPRLPRRRPELLPRQAPDGEGPAQARRQGSPEPRHQPGAHGRRRGRGRVLRVPVRHARRVPAVPLRPVRVRVGRQPGVAVPRAVRVAVPPARVRPAGGAAHPAQRRRWGRRHGHLAGVHARRHGHQPVRQRVLLPGGLGRRAAGGRHGVRRRVRQGRVPRLRGLAAGRPGQRGQLQCQRGPREEVPGPGARRPGHVVVRHLGLDFAGRNQCFVVAGAVRGECSTRLTILVV

SEQ ID NO: 65502 - protein, 653 aa, Zea mays
  Clone ID: LIB4766-015-H12_FLI.pep
REEEMAKGEGPAIGIDLGTTYSCVGVWQHDRVEIIANDQGNRTTPSYVAFTDTERLIGDAAKNQVAMNPTNTVFDAKRLIGRRFSDPSVQSDMKLWPFKVVAGPGDKPMIVVSYKGEDKQFSAEEISSMVLTKMKEIAEAYLGSTIKNAVVTVPAYFNDSQRQATKDAGVISGLNVMRIINEPTAAAIAYGLDKKATSSGEKNVLIFDLGGGTFDVSLLTIEEGIFEVKATAGDTHLGGEDFDNRMVNHFVQEFKRKHKKDISGNPRALRRLRTACERAKRTLSSTAQTTIEIDSLYEGIDFYTTITRARFEELNMDLFRKCMEPVEKCLRDAKMDKSTVHDVVLVGGSTRIPKVQQLLQDFFNGKELCKSINPDEAVAYGAAVQAAILSGEGNEKVQDLLLLDVTPLSLGLETAGGVMTVLIPRNTTIPTKKEQVFSTYSDNQPGVLIQVYEEERARTKDNNLLGKFELSGIPPAPRGVPQITVCFDIDANGILNVSAEDKTTGQKNKITITNDKGRLSKEEIEKMVKEAEKYKAEDEEHKKKVDAKNSLENYAYNMRNTIKDDKIASKLGADDKKRIENAVDGAISWLDSNQLAEVDEFEDKMKELEGICNPIIAKMYQGAGADMGAAAGMDEDAPAAGGSAAGPKIEEVD

SEQ ID NO: 65503 - protein, 235 aa, Zea mays
  Clone ID: LIB4766-015-H6_FLI.pep
GPLLASSPPPPLLPSPSRPAMATAARALVAARPARPLLPSRRLPSSSSIRPARQRAGVGCVRCMARRPDSTYSPLRSGQGGDRAPTEMAPLFPGCDYEHWLIVMDKPGGEGATKQQMIDCYIQTLAQVVGSEEEAKKRIYNVSCERYFGFGCEIDEETSNKLEGLPGVLFVLPDSYVDAENKDYGAELFVNGEIVQRSPERQRRVEPVPQRAQDRPRYSDRTRYVKRRENQSYQR

SEQ ID NO: 65504 - protein, 168 aa, Zea mays
  Clone ID: LIB4766-016-B5_FLI.pep
LEAGRGFCSDFRRASPSRSSRFTAPPLASPTAARMPFKRFVEIGRVALVNYGKDYGRLVVIVDVVDQNRALVDAPDMVRCQINFKRLSLTDIKIDIKRVPKKSTLIEAMEEADVKTKWENSSWGKKLIVQKRRAALSDFDRFKVMLARIKRGGAIRQELAKLKKASTA

SEQ ID NO: 65505 - protein, 605 aa, Zea mays
  Clone ID: LIB4766-017-A10_FLI.pep
ALAPEVRLRRHRHAMSKPADQQPSDMQVDSSVAEEKPAIRFSINVLELMREAQMQHGLRQSDYTRYRRYCSARLRRPYKSLKFLHGRGKYNRRNITESTVTDVRFLHVVFYMAERAWSHAMEKKTAGTNAKQRIYMLGRFRKAVKWASLFSQLCSVKGDSRTSLEAEAYASYMKGALFFEQDKNIDAAMINFKNTRAIYEELGKYGSIENQLLCRQRIDEVEPMIDFCSHKLGGSYLQAHELLDTANDLLKAKMEAVLSETRSQQAASMTEFNWLGRTFPITNAKTRVSILKAQQLERDLSAAATESVAADKKLAIFDKIFSAYHDARSCIRNDLASAGNAEDIKDDLNGLDKAVSAVLGLRTIERNQLLVSIGKSKFTKHRDEKNERITKPEELVRLYDLLIQNVTDLTDLVSSGRNKNEEENSFIHEYELKGLAFRAERCFFLAKSYSSAGKRAEAYALFCHAHTLTGSALQQHSNSHDKALIQDLEFLSNNCRSNSCIEHATGIMEEEIVPLKLSKGVSTMSLADNKTKENKYLLDMLESYESAIGEPNTKAPCRIAQFPPPFQAVPCNPIVLDMAYNSVEFPNLENRMKKEKKGLLSRFWG

SEQ ID NO: 65506 - protein, 218 aa, Zea mays
  Clone ID: LIB4766-018-F2_FLI.pep
GSAGSGSPEMDWSAVTAEDLVDALREVDWSTPPRTVSEFFSRFTVPRSYSKWTSRLKCNLYYYRTNYFILIMFILGMGFLWKPVAILAAFMTGLSIAFLNDSFAVTFNEKVTRTIRQFSPHLAAKMRPPTTPVLRGRPNSKRSIHICGRPRRVFVIFFSAVSCILWLTSCSLLTVLWALLIALFATMLHASFRTPNLKARLNTFRQEFRAVWRNYSEL

SEQ ID NO: 65507 - protein, 169 aa, Zea mays
  Clone ID: LIB4766-019-A12_FLI.pep
SLLDWMEVRGSAPSMKPKVEPPLEASHDWEVTPLSGDNPFFTSVMRKSQVQKPFQLVIPVRFHRHLPEARAPAVLLCRDQSWTVSYAGVGKWKRLQGAWRDFARDNGLRLGDACVFELLVPSTDATQGDGGGSKDQGEVVFRVQVLRGGLPAEITSRGATSDDPLVIVD

SEQ ID NO: 65508 - protein, 176 aa, Zea mays
  Clone ID: LIB4766-019-H10_FLI.pep
KSTERIPRIAFAAFAASHHRETPAAASMAPKAEKKPAAKKPAEEEPAAAKAPAGKKPKAEKRLPAAKSSGKEGGDKEGKKKAKKSVETYKIYIFKVLKQVHPDIGISSKAMSIMNSFINDIFEKLAGEAAKLARYNKKPTITSREIQTSVRLVLPGELAKHAVSEGTKAVTKFTSS

SEQ ID NO: 65509 - protein, 282 aa, Zea mays
  Clone ID: LIB4766-020-B12_FLI.pep
ATGLSPGDGHTAPVTMAAMNTGMGGLGGRPIHPQANPFGTALQGAGPGLIRTGLETYGGRILDSSSEFMQSNITQYLSDPQYYFQVNSQYVRNKLKVILFPFLHRGHWTRITEPVGGRLSYKPPVQDINAPDLYIPLMAFGTYIVAAGYALGVLGRFTPEALTLQFSKGILGWFLQVVLIKGLLYSLGSGEAPLLDIVAYAGYGFAGTSLAMVARIFWSYLYYFIMPWFCLCTGVFLVKTMKRVLLGGPRSYERHPGRNHYFLIFLAVVQFPMLFWLGNICG

SEQ ID NO: 65510 - protein, 257 aa, Zea mays
  Clone ID: LIB4766-020-G1_FLI.pep
HPQSSSSRSPPQAFHDVRAIQVHRVLDCFDGIFGWEEIIHCNFFVFILFIIFKKAADLLKAMRGEVRDVLVVTEFRVISTDSYDLIIFLTLIDHRHEPNSTSSQETPRDNLFLHQYEDVHGVAILTECAWNETIVMWVNNRGVKDTIHLDQTRYLVQLILNLAASRNLNHTIEHFRSLWSYLQIMPWVSSNIFLGHGRKDTLIESSSSSHDGADRMVPSLARWREREEASGEVAERPRVRCCCPGLRGWLPGSNQIP

SEQ ID NO: 65511 - protein, 88 aa, Zea mays
  Clone ID: LIB4766-020-H11_FLI.pep
RASPVTSLHRTLPDFAVHSPAAAAPFAGTGGIVEHQDAGDADDHRCPPGAGHPDVLKRSPQAPLHAPSMGAFVGDGSRCSVCEPAGKV

SEQ ID NO: 65512 - protein, 186 aa, Zea mays
  Clone ID: LIB4766-024-C5_FLI.pep
PRRFIVTIARFRARGCDATPSTRPEGPRRPPMPPSLAGEVGPGVDAELAAVLPVVADARVHLGGVVPAALEGAVDGPGGGAEPLRHHPVHAVHPEPERRLERHHGVPRHPAGVPEPVEADGPPRGPVVVVPRDLQRAAPVVLLPRGARPLPLGRVAVGVALVDLADVAEICPWTQTQQRKIFQKKN

SEQ ID NO: 65513 - protein, 249 aa, Zea mays
  Clone ID: LIB4767-001-A11_FLI.pep
PPAAKKFMKVLCSACEAAEASVLCCADDAALCARCDREVHAANRLAGKHQRLPLLAPGGQGAAAVSPPKCDICQECDAYFFCLEDRALLCRSCDVAVHTANSFVSAHRRFLLTGVQVGQELEPDDLSLEQREASSPPPAKSEPTPPLYSESDFGWAAGAGATGSLTDWSAVQEEFGSPAPRLAEAAPRATPKRTPRAPAFGAGQGRIAGGVMDWPLGEFFRGVSDFNGGFSFGESGNSKVSADLCFFGS

SEQ ID NO: 65514 - protein, 529 aa, Zea mays
  Clone ID: LIB4767-001-H9_FLI.pep
PCPSTTLPQRQAMACGSATAARPAARLWLLAAVVVATSFLAVAAPPGALVTSVPGFGNKQQLPSKHYAGYVTVDERHGRRLFYYLVESERDPARDPVVLWLNGGPGCSSFDGFVYEHGPFSFEPSGGSAGSLPKLHLNPYSWSKVSSVIYLDSPAGVGLSYSNNVSDYETGDFKTAADSHTFLLKWFQLYPEFLANPFYIAGESYAGVYVPTLSSEVVKGIHKGVKPVINFKGYMVGNGVCDTVFDGNALVPFAHGMALISESIYKEASTACQGNYWNSSSAKCDEALSKVETEIDGLNIYDILEPCYHAPADTKQAAVTPQAQSTSELPQSFKDLGVTSNKPLPVRTRMHGRAWPLRAPVRDGRVPSWQELAADVASTSSGVPCMSDEVATAWLNNNSVRSAIHAEPVSSIGPWELCTDKLDFDHDAGSMIIYHKNLTSQGYRAFIYSGDHDMCVPYTGTEAWTASLGYAVVDPWRQWIVDEQVAGYTQGYEKGLTFATIKGAGHTVPEYKPQEALAFYSRWLAGAKL

SEQ ID NO: 65515 - protein, 294 aa, Zea mays
  Clone ID: LIB4767-002-F9_FLI.pep
FLQSDTASSFPSAICEAMKPPLERNPTKKRHSWWWDSHISPKNSKWLAENLEEMDKQVKEMLQLIEEDGDSFAKKAQMYYQRRPMLVTHVENFYRMYRALAERYDNVTGELRKNIPTRLQTTGFLTSSEYGSELRRSPSPSPEPLQRSWTREQSPRAAGFGFFLSNRSNDSPPVYRKEPEDAASQSESDAKSADGEDDGIAYTLHQRVLELEDELNATNQKLQDANEKLEVLEEKSLRCHCDYKENGNGAQRIQKFQAKRGSWKPKSSISRRKRTRQEGDSKRHCLNEMEKSAS

SEQ ID NO: 65516 - protein, 346 aa, Zea mays
  Clone ID: LIB4767-002-G9_FLI.pep
VCPARTNVKKRRKRMKHVNTSTDRDVLNLQDNVSSVMARQCLHISSHRTSQSTSKHKGNLSRLLHNEVPIRMGERNNLTENSENDSLSDSFSEPQTSDTLCIEAQRKSSAPSSSLRRSTLDSLYEFGETSRHEPAGRTKLDNVELRETSRSLLPFDLSGQEPAFCTQEQVDKCSLGTLADNKPMEKSSNMERQPELSCVICWTDFSSTRGILPCGHRFCYSCIQGWVDCLASRGKVSTCPLCKASFTWISKVDEAGTSDQKIYSQTIPCEASTDVFVPGNVGYDFSRPTSGQGACYQCHFREPEELLLSCHVCRSQWVHSYCLDPPLTPWTCMHCRDLRMLFHRYR

SEQ ID NO: 65517 - protein, 636 aa, Zea mays
  Clone ID: LIB4767-003-B8_FLI.pep
LPRLSSKTPSLNPSFRTPPRSPMASSSQSGGAGGGGTVASNPRVWIVASIAVAGVLVLAEVARRRRRWLRGMSGTAPDAGSFCDRFELHPPAQPPPPAARHILSGLTFAASDNFEIEGYVAGFGNPDWKKTHETARHTAVAVTMLRKQGATCVGRTIMDELGFGVTGENLHHGTPANPVSSSLVPGGSCSGSAVAVAAQLIDFAIGTDTIGDVRIPASFCGLLCFRPSYGVISTLGTIANSQSLDTIGWFARDPCILHRVGEVLLPAAVGGLKQTRQFVFADDCFQLLKVSNQKTVHAIKNAVQALRGYQPPKHINIGQYIYSNVPSLKEFCEPATKLEEGTSALKAISTVMLLLQRYEFKANHEEWVNTVKPKLGLDISTRVLQAVNFARENIKSLYAIRNELRVALKNLLKDTGILVLPTTAGYPLKRNSKERLSSGFEDRMYKFVGVAALSGCCEVTIPMENLDHHVSLSFVAAHGSDKFLLRNILDTYSLIQDQVVLASKLETAPVTNVDVDVNASELLKEKGNSAFKRRQWIKAIEFYSEAISLSDTNATYYCNRAAAYLELGRFKQAEADCDRALLLDRKNVKAYLRRGFAREVTLNYKEALQDFRHALALEPQNKTALAAERRLQKLLK

SEQ ID NO: 65518 - protein, 363 aa, Zea mays; identical to SEQ ID NO: 42242
  Clone ID: LIB4767-003-H1_FLI.pep

SEQ ID NO: 65519 - protein, 521 aa, Zea mays
  Clone ID: LIB4767-004-C6_FLI.pep
RESFVYTLAAGWDLLPAPAKMRRSNTTTFVLLSVAILLGTSHVVASSQEAQLSKLMASGRSRPRLSLSRNGRAETDTCSDSGTYAPLPERCRRPPSGGKEADRIKELPGQPPRACRFGQYSGYVTVNEERGRELFYYFVESPADAASKPLILWLNGGPGCSSLGYGAMMELGPFRVNPDGETLSENKHAWNSLANVIFLESPAGVGFSFSRDAADYKTAGDRRTAEDTYIFLVNWLERFPEYKGRELYVAGESYGGHFVPQAATVVTLMNRRLPARQTPINLRGIFLGNPLLDLYLYEKGKLEFMWSHGVISDEVWASTLHNCSFLHDLCSSNASEHTFEGGRMDCFDLYAPVCLQSPNGTYYSSSHLPGYDPCSDHYVRSYLNSVEVQEALHARIRNWSACMPNLVWNDSPAFMVPTIRYLVDCGLRVWIYSGDFDSICSLTATRYSVKDLNLAVTKKWGPWYTPNGEVGGYVQQYQGGFTLASVRAAGHMVPTFQPERSLVLLKAFLSNTLPPADIVTN

SEQ ID NO: 65520 - protein, 462 aa, Zea mays
  Clone ID: LIB4767-005-A1_FLI.pep
PDAYGASQDICCRPRPVPFLNLGSASPGSLIPSPQASVVSPSHTHYTLLCCSKKEEASASLALVVSNGHHRRVQPPQVLLRGLPAPFGHAHHHPVVRGRGHPARRRRPHPRVHLLLPHPALRPDVLPVQPHQGVHRVPRDDPALHDGHDHPRRHRRGDRGRRVRGPVLRVRAVQGPLRERRHRGAVRVPGRRRVAGRAAVLGHGGAQAGAPVPGRAGRGLRRGRGLRGGQARGAVHVHRDEPAPGAAQREAVQRRGGGGPDRAAGARRRRGHQLGARVHEPRHAVVHGPQRDGGQGGGQLLRPRRALRRHRRQEAPGHRHDQRRARDEGARHERRGGRDRAPHARGRARHDRHRDGGRRDRRRPEDGPDVRRHDDLRPEGGAPGAEGTGQAQRRGRDHPRGVAGAARGVRDCVQGRRGRGRLSEHPRASMQAASYLGRRHHGVSSFNLGLCCCWTNEFPSIG

SEQ ID NO: 65521 - protein, 454 aa, Zea mays
  Clone ID: LIB4767-005-B4_FLI.pep
TPAISAATAMFGTPSITPAFGNPSSTPVFGTPSATPAFGATSSTPAFGTLSSTPAFGTPSSTPAFGTPSSTPAFGTASTTPAFGASSSTPAFGTTSTTPPFGSLNFGTPSSTSAFGTPSSAPAFGALNFGTPSSTSAFGTPSSAPAFGATPSPSPFGFQQQATPCPSPFGLLGGGGAQITTQMAPVAPLPLSPSDRDIQAIVDAYKEDPGNPRYAFRHLLFSVTEPSQRVKPVAASDIMWAEAMGKLECMDSADRERLWPQLVQGFKDLSHRLKLQDEVLVSDTDRLSMTHSNVKKLQRHFQADTYPWIQRLKQQELAIQRRLLRFVRIVEALENRGYRCPLTKEEADLYERLVAILKRLKGHNADLSKRVNTLVSTSRLLASSGGAGGSVYIPSSAKVDERSVTKLLEALQQQTEAVAKLGNVLKRDIRDMEIIQSEGTDMAEDNVGRRAQKI

SEQ ID NO: 65522 - protein, 503 aa, Zea mays
  Clone ID: LIB4767-005-C2_FLI.pep
APDSSDSRMELHRNSTNGSCLSACGPLTDYYIPDYILKPAYEPVTVDNVPCCPVVVFINSRSGGQLGSSLIKTYRELLNEAQVFDLSEESPDKVLHRLYSNFERLKSSGDHVATQIQKSLRLIVAGGDGTASWLLGVVSDLKLSHPPPVATVPLGTGNNLPFSFGWGKKNPATDQAAVKSFLGQVKGAREMNIDSWHIIMRMRIPQEGPCDPIAPLDLPHSLHAFHRVSVCDSLNLEGYHTFRGGFWNYFSLGMDAQVSYEFHSERKRNPEKFRHQLRNQGTYAKLGFKHSLNHLSSRNISQLAKVKIMKRPGSQWEELKIPRSIQSVICLNLPSFSGGLNPWGTPGTRKAQDRDLTAPYVDDGLIEVVGFRDAWHGLILLAPNGHGTRLAQAHRIRFEFHKGAAEHTFMRIDGEPWKQPLPKEDDTVVVEISNLRQVAMLANDPCRSKSVNEPSSPSCHGHEDNDSNSLEDEDEDEWEDGRKKFGAAATFKIPDEVDIAHLS

SEQ ID NO: 65523 - protein, 291 aa, Zea mays
  Clone ID: LIB4767-005-C6_FLI.pep
QKQTIFSPEPQPSDITADAMAGSPRHLSLFPLRLLLLLPLLAAGKPVLEDGYTVTTFADLNPLPASGPHPYAVLPRSRAGDLLLLDSAGSALYTISLSSSPGEPRRLAGGKRGSGFNDGGPGDAAFDRPRSVAVDAADNVYVADRLHGAVRKVAPSGYTTTIAGGFSSGPGHRDGPAQNATFSPDFALVYVPKICALLVADRGNRMVRQINLKPEDCAHEKQSGLGNTLVSFIAVLCTLLGSLIGFLARHFYPVNAGSLRQPLFQQDTEAIPEDTEEGNSDQLLRHKKRSC

SEQ ID NO: 65524 - protein, 548 aa, Zea mays
  Clone ID: LIB4767-005-D4_FLI.pep
GAVLLHPFSLSAPANGAPPPTSYLPPLRSPSVRPSLPPYSRWVGLLQALRRRQTPPGDLAGAGEGAPSPGAKSQQPGTRAAATSRAQSISGSDFHLRMGRDYDPMEIDDQKQQQLEVTAAVPEGFNTDYLRVYYGKLFPYGDFFKWLCYGNDGKHPGCDQSYVGRREFSFTLENDIYLRFQSFDTATELESSIKEKCPFKIDIGPVYSVDPSKRHAYAQSGNNVFVPVERELIFDIDISDYDDVRYCCSGADVCRDCWPLMTIAIKILDTSLRDDFGFSHILWVYSGRRGVHCWVCDSRARKLSNEQRAAIADYFRVYKGGENALKKVSLAGPVLHPFLARSYMDVLKTFFEDRLLLNQQLFASEERCRKILDLIPDESVASEVHDKWQGNRRSSISKEDVNATRWEQLKMTLQSGKKAQGLRRCVEEIVFSYTYPRLDMEVSKHMNHLLKAPFCIHPKTGRVCVPIDPSNCDDFDPAAVPTLSQLLGELNATGFQTDPENNWERTSLGKSISFFRTSFLHPLLKACKEELESAYSAKLQQSKNSLDW

SEQ ID NO: 65525 - protein, 481 aa, Zea mays
  Clone ID: LIB4767-006-B3_FLI.pep
PGKKKTNSRDAILTIHTKPQPKSRVVVVVGHGGVQGDADLGGPREAGVGDARGDAAAGLGGPVPDAPWPGGVDAHLPVGRGRGPGRDPGGAGQGAGLLLPAGGPHRGGGAAGAPRHPLHRRWRLLRGGRGGLQPGGRALPGAAPAAAQGGPRALPRRRPLARRAAQHHHDDADHQVHLRRLRDGPAVQPRVGGRHGRGAVHQRGGGHGAGAGGAEGAARVAPGEVPGPEHQARPAPGAARAGAGLRRARLPHGLHRRAQAGVQGAQRQVLLRLRRAHGQALAVPHPGAGPGPGRRGQALLLRQRPPPAQARPGVLRQLHLPRQDVRAGRQGAGLLARGGGRHHPGGQGQDGRRVLPLRWGGDGPGPIPDDLQLRVHLRLRLEQARLLRGRLRLRPAHLRRPARQQRLHRLRRLPQGAAPARRHQDARQLRHQGTLRGVRPWHEGRPALNLFFLAYYILLMIILSPGCREMMNGDVNMLLFR

SEQ ID NO: 65526 - protein, 418 aa, Zea mays
  Clone ID: LIB4767-006-D6_FLI.pep
RALPRTPQFRITHPTPPPATASSDSLPPHPTVPLTPAQPASPQPSDSEHRRHPAMCGGAILSDIIPPPPPRRVTAGHLWPESKKPRRAAAGRRRAPVEQEQEEDFEADFEEFEVESGESELESEDEPKPKPFAAPSSALARGGLNTGAAGVDGPAANSVKRKRKNQFRGIRRRPWGKWAAEIRDPRKGVRVWLGTFNSPEEAARAYDAEARRIRGKKAKVNFPDEVPTAVSQKRRAAGLASLKAPKMDVEEEKPIIKPAVNNMTNSNAYHYPAVVGHNIIPEPFMQTQNMPFAPLVNYAALVNLSSDQGSNSFGCSDFSLENDSRTPDITSVPAPVATLAAVGESAFVQNTAGHAVAPPATGNAGVDLAELEPYMNFLMDGGSDGSISTLLSCDGSQDVVSNMDLWSFDDMPMSAGFY

SEQ ID NO: 65527 - protein, 551 aa, Zea mays
  Clone ID: LIB4767-007-C2_FLI.pep
PAGARPHPSRHLARRPPLPSIKSDRQLLAAAHSSPLWLFLAPRAPTHLHALSQLDRPHWQSRRLPYPFLFLQKDWTGSSQSSRSESRRIFFDEASICCSPSACWGLAPYPKMSFRSMVRDIRESFGNISRRNFEVRIHHRGRSLGSSGDLQDRPAEVQQSRWASLPPELLCDVMKRLEEDDSSWPDRKDVVSCASVCTTWRDMCKDIVRSPEHCAKLTFPVSLKQPGPRDGVIQCFIKRDKSKLTYRLYLSLSSGVLDENGKFLLAAKRSRRMAHTEYAIFMDSRNFSRSSTGYIGKLRSNFLGTKFIIYDTQAPYNGGRVCTQERAPSRRLSSRKVSPRVPSGSYPVAQVNYELNVLGTRGPRRMQCAMHSIPASAVEPGGVVPGQPKELLPRLFDESFRSTATSSFSKYSVADSSMDLGSCPFSEVEVGGGSLREGDESEKERPLVLRNKAPRWHEQLQCWCLNFRGRVTVASVKNFQLIAPAKTQPQPQASGPPPPPPPSSSSYHDPVILQFGKVGRDMFTMDYRYPLSAFQAFAICLTSFDTKLACE

SEQ ID NO: 65528 - protein, 495 aa, Zea mays
  Clone ID: LIB4767-007-E2_FLI.pep
LTPLPWPPPPPPLSLSTISHSRTNMQGRSRDAATVAAAVACAAVLLLGDAWTVSAQAAAEEDKISALPGQPPVGFAQYSGYIPVDAAGKRSLFYYFAEAEADPAAKPLVLWLNGGPGCSSVGVGAFSENGPFRPSGNALTRNEYSWNKEANMLYLESPAGVGFSYSTDPAFYEGVGDSMTARDNLKFLQGWFARFPQYKGRDLYITGESYAGHYVPQLAQRMVEFNKKEKLFNLKGIALGNPVLEFSTDFNSRAEFFWSHGLISDSTYNIFTTVCNYSRYVSEYYRGSLSTACDRVMSQVARETSRFVDKYDVTLDVCISSVLMQSQVLVPQQGSRELDVCVEDETMRYLNRKDVQQAMHARLDGVQRWTVCSSVLEYKQLDLQIPTVNTVGALVKAGIPALVYSGDQDSVIPLTGSRTLVGRLAARLRLNATAPYRAWFQGKQVGGWTQVFGGGALSFATVRGASHEAPFSQPERSLGLFRAFLAGQQLPESFQ

SEQ ID NO: 65529 - protein, 466 aa, Zea mays
  Clone ID: LIB4767-008-F3_FLI.pep
LVKTQDPSSMPANMISKILEKSSVLPLVDDVAPIHVKTAGGAPRTSVMRNPNMEKLQKGYLFPEISIKREAHLKKYPHAKVISLGIGDTTEPIPSVVTSAMAEYVLALSTPEGCQGYGPEQGQMNLRKVIAEEVYPDMGIQESEVFISDGAQCDIARLQTLFGPNVTIAVQDPTFPGYVDNGVIVGQTGSADEAGKYAGIAYMRCAPENHFFPDLSRVPRTDVIFFCSPNNPTGHAASAAQLRELVDFARRNGSIIVFDTAYAWYVSSSSEAAGDGDKMKPRSIYEVPGAREVAIEISSFSKFAGFTGVRLGWAVVPDELRYADGSPVARDFDRIVCTCFNGASSVAQAGGLACLSTEEGRDAVRRVVGVYKENARVLVDTFASLGKEVYGGTDSPYVWVRFPGRRSWDVFAEILDKTHVITVPGSGFGPGGEGFIRVSAFNSRDRVLEAAARLKKFLPGLSAVPL

SEQ ID NO: 65530 - protein, 180 aa, Zea mays
  Clone ID: LIB4767-009-A5_FLI.pep
REGPMLHREVRTRLRGVHWHLHLSNQQSKFLFAESGTGTHGRSWASASTPRRSSRLAGAQTEQRRIRGEELGAGARLPGTGRSSTRARGCRRKDRRGRAAAGKELGAASCQAGRRPEPLGGGASSRRRSSDRRAVAELWPETDRRGTAAPRLGSGRCLGGRLGVGGCDSRRRLRVFGFSR

SEQ ID NO: 65531 - protein, 318 aa, Zea mays; identical to SEQ ID NO: 61167
  Clone ID: LIB4767-009-H3_FLI.pep

SEQ ID NO: 65532 - protein, 515 aa, Zea mays
  Clone ID: LIB4767-010-E6_FLI.pep
GVVSSPRPRPPPLANDSGLHCRSRSLPSHAMVADRLRLALLLSACLCSAWARPRLEPTIRLPSERAAADETDDDAVGTRWAVLIAGSNGYYNYRHQADICHAYQIMKKGGLKDENIAVFMYDDIAHSPENPRPGVIINHPQGGDVYAGVPKDYTGREVNVDNFFAVLLGNKTALRGGSGKVVDSGPNDHIFVFYSDHGGPGVLGMPTYPYLYGDDLVDVLKKKHAAGTYKSLVFYLEACESGSIFEGLLPNDINVYATTASNAEESSWGTYCPGEFPSPPPEYDTCLGDLYSVAWMEDSDFHNLRTESLKQQYNLVKDRTAVQDTFSYGSHVMQYGSLELNVKHLFSYIGTNPANDDNTFIEDNSLPSFSKAVNQRDADLVYFWQKYRKLADSSHEKNEARRELLEVMAHRSHVDSSVELIGSLLFGSEDGPRVLKAVRAAGEPLVDDWSCLKSTVRTFEAQCGSLAQYGMKHMRSFANICNAGILPEAVSKVAAQACTSIPSNPWSSIHKGFSA

SEQ ID NO: 65533 - protein, 268 aa, Zea mays
  Clone ID: LIB4767-010-F2_FLI.pep
GLKWRFKKLENWHHLKNTLKCKMPKIKSLSNACRVSFSPEGPISEEALERVRALLDMIRPLDVGLDNEAQIARNWSSSTRPSNGRRGRNGANQFAAPIKYLHIHECESFSMGISCMPPSSVIPLHNHPGMTVLSKLLYGRLHAESYDWVDIPDHPIDQLQTRPAKLVKDCEMTAPETTILYPNAGGNIHTIRAITPCALFDVLSPPYSAEDGRHCSYFRKSQMNQPPVVLPAEIDSSQVVWLEELEDHQPPEGFVVARGLYKGPVIRR

SEQ ID NO: 65534 - protein, 470 aa, Zea mays
  Clone ID: LIB4767-011-D6_FLI.pep
KPPLAAARKPSFFSLLRRDVPRLRRRIRDSDLGFTAAHRAAPTPGPIRALLSVASVMAGMAPEGSQFDAKHYDSKMQELLSTGETEEFFTSYDEAFESFDDMGLQENLLRGIYAYGFEKPSAIQQRGIVPFCKGLDVIQQAQSGTGKTATFCSGILQQLDYGLVECQALVLAPTRELAQQIEKVMRALGDYLGVKVHACVGGTSVREDQRILGSGVHVVVGTPGRVFDMLRRQSLRPDNIKMFVLDEADEMLSRGFKDQIYDIFQLLPSKIQVGVFSATMPPEALEITRKFMNKPVRILVKRDELTLEGIKQFYVNVDKEDWKLDTLCDLYETLAITQSVIFVNTRRKVDWLTDKMRSRDHTVSATHGDMDQNTRDIIMREFRSGSSRVLITTDLLARGIDVQQVSLVINYDLPTQPENYLHRIGRSGRFGRKGVAINFVTRDDERMLFDIQKFYNVLIEELPANVADLL

SEQ ID NO: 65535 - protein, 375 aa, Zea mays
  Clone ID: LIB4767-012-A7_FLI.pep
SDLEALEAMKALGRAMRDEPGRRKKDASWRIFSLKELQSATNNFNYDNKVGEGGFGSVYWGQLWDGSQVAVKRLKSWSNKAETEFAVEVEILARVRHKSLLSLRGYCAEGQERLIVYDYMPNLSIHAQLHGQHAAECNLSWERRMKIAVDSAEGIAYLHHHATPHIIHRDVKASNVLLDSNFQARVADFGFAKLVPDGATHVTTRVKGTLGYLAPEYAMLGKASESCDVFSLGVMLLELASGKKPVEKLNPTTKRTIAEWALPLARDRKFKEIADPKLNGSFVEDELKRMELVGLACSQDKPEQRPVMSEVVELLRGESTERLSRLENGDLFKPDISFHGSSGPDSSDCVTEERSPKADATEEAVDSSETVPSAR

SEQ ID NO: 65536 - protein, 398 aa, Zea mays
  Clone ID: LIB4767-012-D1_FLI.pep
NCHFARRAGSAVNRENSTVSVYTRQASSPPSPEAFEMAAAEASRTSEARRDAVFGRWVVFSPARSRRPTDLKSHNPTNPSPGPGADAPPKPSCPFCAGRESECAPQIFRVPPDGSLPWRIRVIQNLYPALRRDVDPPPRRDVDPPPVPEAEGDVSSDEPGERAVPGFGFHDVVIETPRHDVRLWDLDAEGVRDVLLAYAERVRQLGEHPAVQYVQVFKNHGASAGASMAHSHSQMLGTPFVPPSVTTRLNCMKEIFDRSGNCSLCEIRPKDILISETPNFSAIVPFAASYPFEIWIIPRQHISYFHEIDQDKALDLGSLLKTMLQKLSKQLNDPPFNFMVHSAPFKISSSCLPYTHWFLQIVPQLSVVGGFELGSGCYINPVFPEDAAKILRELDCSV

SEQ ID NO: 65537 - protein, 485 aa, Zea mays
  Clone ID: LIB4767-014-B10_FLI.pep
VSFHQSRSAARWPPAATSMETYTTDDALTAMGFGKFQALVLVYAGTGWLADSMELMLLSFVGPLVRQQWNVSAQHESLLSSVVFTGMLLGACSWGYISDKYGRRTALLFSVTLTAGAGLTSALSPNYISLLALRFLVGVGVGGTHVFSSWFLEFVPTKNRGAWMLVFSAFWTIGTIFEASLAWVVLSRLSWRWLLAFTSLPCFALLVFFVVAPESPRYLCAQNRISDATLVLERMSRTNKAALPPGALAYHHTETQLGLGGSTTDDASKSGSGGMAALRRLFPRKLLRSTLLIWFVWFANSLAYYGLVLLTSQLSDANRRCASSSAHKSQAHEGNPNLYKDVFITSLAEFPGLVISAIIVDWLGRKATMWILLFGCCGFLGPLAVHQKESVTTALLFGARACGMGSSTVLCLYAPEVYPTSARSTGVGIATAIGKIGGIVCPLIAVGMLRSCHQMQAVLVFELVLGLAGVACILFPVETKGREMK

SEQ ID NO: 65538 - protein, 228 aa, Zea mays
  Clone ID: LIB4767-014-C1_FLI.pep
PPAGPPAGEGVAPTHPTSAAEGERAADEMPSHGDLDRQIAQLRDCKYLPEAEVKALCEQAKAILMEEWNVQPVRCPVTVCGDIHGQFYDLIELFRIGGDAPDTNYLFMGDYVDRGYYSVETVSLLVALKVRYRDRITILRGNHESRQITQVYGFYDECLRKYGNANVWKYFTDLFDFLPLTALIENQVFCLHGGLSPSLDTLDNIRSLDRVQEVFIRAMSGNCRILPN

SEQ ID NO: 65539 - protein, 224 aa, Zea mays
  Clone ID: LIB4767-014-E3_FLI.pep
GIRGVWIKLPITLSNLIPTVVEEGFWYHHAEETYLMLAYWLPNTTHTLPVNATHRVGVGAFIMNDKREVLVVQEKSGVLRGLGVWKFPTGVVEPGEDINVGAIREVKEETGIDAEFVEVLAFRQSHKAFFDKSDLFFVCLLRPLSYDITKQDSEIEACQWMPVEEFAAQPFVQKHELVKYILEVGLAKVDKKYAGFSPISIKSAFTDKLSLFYMNRRDLDKASG

SEQ ID NO: 65540 - protein, 389 aa, Zea mays
  Clone ID: LIB4767-015-A4_FLI.pep
RPRSDLMFPTVDDPSAAGAMVSASFPDADAYGNGDSDDLDFPVDPNPNPVFSSPAAPASAGAAGERRPLFQRLWTDEDEIVILRAFAEFTAQRGTAFASHQYDTTPFYEDMRRRLNTGFTKNQLVEKIRRLKRKYRNCVERLRVAGAGFNFRSPHEQAIFEIARTIWRPASDKHGRDSDDEGGGGGNNAHDATFAMDAATFAIDAALAAANGGSARSPTSRPRRGRRRRTGDFPADAVPETTLALPPAPMLVMTEDVLPSFPQVTAAAVMDGGCGVSVDPASGLPAALSTAAAAAAVSGSSTAENPILAALFKEMVHAMLSVGVGGSTALLGLEPPPPIAGVPMEGEKWRQQRIQELEVYLRRIDLLQDQARAALDELRSAPHAGGMNT

SEQ ID NO: 65541 - protein, 460 aa, Zea mays
  Clone ID: LIB4767-015-H9_FLI.pep
RWEMVNVNLDWREAVPHPDDRVEYELWTNSNDECGPKCDMLMNFLKEFKGAAQLLEKGGYGQFTPHYITWYCPQAFVISKQCKSQCINHGRYCAPDPEQDFSIGYEGKDVVVENLRQLCVFKVANENKKPWVWWDYVTDFHIRCPMKEKKYNKKCAETVIKSLGLDVKKVDKCMGDPNADSDHPLLKMEQDAQIGEGSRGDVTILPTLVVNNRQYRGKLERKAVLKAICAGFEETTEPNVCLSDDIETNECLNDNGGCWQDKSANVTACRDTFRGRVCECPTFNGVQFKGDGYSNCEPAGPGKCLINHGGCWHETRNGKTFSACQESGDGKCLCPAGFRGDGVKKCEDIDECKEKKACQCPECNCKDTWGGYDCTCSGDLLYIREHDTCISKTAVQAKAAWAAVWGILIVVAVVAAGSYVVYKYRLRSYMDSEIRAIMAQYMPLDNQGEVPNHTHDEDRS

SEQ ID NO: 65542 - protein, 318 aa, Zea mays
  Clone ID: LIB4767-016-A10_FLI.pep
RDGCTAPARHLSGPEHASAGGRCETPCRPTVWLLSFSSRFVRSPARSSPQAVMETGSACGASAGAAVSLARSSDTLAARLSFAAGDTPRSPMMDSSTASQRRLFSIATPPAAGTDESLEKATVRTPAGECVKRMEAPGAKVSGLNTSLNFSTATPSASVYRPAAFQNATQFSVTFSAYCSPVSGRIIVTLVNFSKSPVTTSRKKAASEASSSAVLPPHFLASAGTAASSRYTPMAVNLMKLPPISRPRTPAPPRKCEPAEPGGRATGGKTTPSTTTSGTAMLNSAPRDGTGSSATDEATGYGCGTWQAGVVAINMRGP

SEQ ID NO: 65543 - protein, 341 aa, Zea mays
  Clone ID: LIB4767-016-C8_FLI.pep
CCRQVAFYIGPTVGGLLNATFGNVTEVIIAIFALYQGKVVVVKCSLLGSVLSNLLLVLGTSLFFGGLANLGTEQLYDKMQVDVSTGLLILGVLCHSLPLMLRYAVSSGEHAESSWDSGLELSRACSIVMLLAYVAYLFFQLKTHRQLFEPQPQEVEDDGDDSVSQDEAVLGFSSAMIWLGVMTLMTALLSEFVVSTIEAASESWELSVSFISVILIPIVGNAAEHAGAVIFAFKNNLDITLGVSLGSATQISMFVVPLSVLVAWIMGVPMDLDFNLLETGCLFLAILVTAFTLQDGSSHYLKGLLLVFCYIVISLCFFVLRQHGNGSNDDQLGVASKPWRI

SEQ ID NO: 65544 - protein, 459 aa, Zea mays
  Clone ID: LIB4767-017-D7_FLI.pep
LYAARERRGPSAKKTPHRPLHRPITRRRAMAAATATGDSVKEPLLHRAYPSQVASASSPALPSALPGSAGRRFPGVLDVPNLKKRGGGTRSWIRVEAVTASVQTLEIDKATMMRRCELPARDLRLLDPLFVYPSTVLGRERAIVVNLEQIRCVITADEVLLLNSLDSYVLQYAAELQRRLLQRAEGDQLPFEFRALELALEAACSFLDAQAAELEIEAYPLLDELTSKISTLNLERVRRLKSRLVALTRRVQKVRDEIEQLMDDDGDMAEMYLTEKKMRMESSVFGDQSLLGYNSAGAAGASVSAPVSPVSSPTESRKLEKAFSLCRSRHDSTKSSDNTTTDHIQELEMLLEAYFVVIDSTLNKLTSLKEYIDDTEDFINIQLDNVRNQLIQFELLLTTATFVVAIFGVVAGIFGMNFETSVFKIENAFQWVLVITSVVGVFIFCSFIWFFKYKRLMPL

SEQ ID NO: 65545 - protein, 452 aa, Zea mays
  Clone ID: LIB4767-017-G1_FLI.pep
GGAGGGVQIQIRWAARTRSPPTTMAGAVSALFLLDIKGRVLVWRDYRGDVSALQAERFFTKLLDKEGDSEVHSPVVYDDAGVTYMFIQHNNVFLLTAARQNCNAASILLFLHRVVDVFKHYFEELEEESLRDNFVVVYELLDEMMDFGYPQYTEAKILSEFIKTDAYRMEVTQRPPMAVTNAVSWRSEGIRYKKNEVFLDVVESVNILVNSNGQIVRSDVVGALKMRTYLSGMPECKLGLNDRVLLEAQGRATKGKAIDLDDIKFHQCVRLARFENDRTISFIPPDGSFDLMTYRLSTQVKPLIWVEAQIEEHSRSRIELMVKARSQFKERSTATNVEIEVPVPSDATNPNIRTSMGSAAYAPERDAMVWKVKSFPGGKEYMCRAEFSLPSITAEEGAPEKKAPIRVKFEIPYFTVSGIQVRYLKIIEKSGYQALPWVRYITMAGEYELRLI

SEQ ID NO: 65546 - protein, 469 aa, Zea mays
  Clone ID: LIB4767-017-G6_FLI.pep
GPHLKTSPLAKKLVRPCLSLHSTMAAPPATAPATARCLSVAKSCWAAERSSSSFVLSAPATGLRQSGSRVLSIRAKVATGLQRACIADDGAERPWKLSDARLVLEDGSVWTAKSFGASGTQVGEVVLNTSLTGYQEILTDPSYAGQFVLMTNPHIGNTGVNPDDEESNQCFLGGLIIRNLSICTSNWRCKETLEKYLIKRNIMGIYDVDTRAITRRLREDGSLIGVLSTDQSLTDNELLEMAQKWKIVGVDLISGVTCDAPYEWSDKTDSEWEFKRDPSSETFHVVAYDFGIKHNILRRLTSYGCKITVVPANWPASEVLNLKPNGVLFSNGPGDPAAVPYAVKTVQEIIGKVPVFGICMGHQLIGQALGGKTFKMKFGHHGGNHPVCDLRSGRVDISAQNHNYAVDPESLPEGAKVTHVNLNDNSCAGLQYSKMKLMSLQYHPESSPGPHDSDTAFGEFIELMKSNRL

SEQ ID NO: 65547 - protein, 381 aa, Zea mays
  Clone ID: LIB4767-018-H9_FLI.pep
AITIMALMLLARNLRSRLRPPLAAAAAFSSAAAEAERAIRDGPRNDWSRPEIQAVYDSPLLDLLFHGAQVHRNVHKFREVQQCTLLSIKTGGCSEDCSYCPQSSRYNTGLKAQKLMNKYAVLEAAKKAKESGSTRFCMGAAWRETIGRKSNFNQILEYVKEIRGMGMEVCCTLGMIEKQQAEELKKAGLTAYNHNLDTSREYYPNIITTRSYDDRLQTLEHVREAGISICSGGIIGLGEAEEDRVGLLHTLATLPTHPESVPINALVAVKGTPLEDQKPVEIWEMIRMIATARITMPKAMVRLSAGRVRFSMPEQALCFLAGANSIFAGEKLLTTANNDFDADQAMFKILGLIPKAPSFGEEEASAAAPTESERSEQAASM

SEQ ID NO: 65548 - protein, 210 aa, Zea mays
  Clone ID: LIB4826-001-B8_FLI.pep
CSLSSSIGCLHSPRRAEAMSSAPLQIAPVPEHVCYVHCNFCNTILAVSVPSHSMLNIVTVRCGHCTSLLSVNLRGLIQSLPVQNHYYSQQQENFTVQNMGFTENYPEYAPSYRMPTTLSAKGDLDHMLHVRAPEKRQRVPSAYNRFIKEEIRRIKACNPDISHREAFSTAAKNWAHFPNIHFGLGPCESSNNLDEATGAMCHPQKVQDLY

SEQ ID NO: 65549 - protein, 426 aa, Zea mays
  Clone ID: LIB4826-001-F4_FLI.pep
LDNGRRGTIRQRRCFVLVLGTAIVVAFSALFGTTSGAALVGDSCRASSSTSDGGGCGKGLRCTTCVPPPGTGPAACARTTPVDPKTHGTGLPFNRYSWLTTHNSFAVVGTKSPLGSAIISPPNQEDSVTDQLKNGVRGLMLDAYDFNDAVWFCHSFHGRCLTFTAYVPALSVLTEVRVFLDANPSEVVTVFLEDYAAPGSLSNTFNAAGLSKYWFPEAQMPSPSKGGGDWPLLRDMIADNHRLIVLTSKKGKQGTEGLAYQWDYVVETQYGSEGMADGSCPKRTESKPMDSKAQSLVLLNFFTSNPSQSWACSNNSAPLISRLNACYHASAKRWPNYIAVDFYMRSNGGGAPLATDIANGRLQCGHDNIAHCKISSASAPAPASASSPAPASASSPSPAPAPDFAATSPAISSSPGPAPGPLNSYY

SEQ ID NO: 65550 - protein, 364 aa, Zea mays
  Clone ID: LIB4826-002-C2_FLI.pep
PGTGGHTPTARRKHLHLRNSHTISSLDRSTMAASVAAATRLSGGGGGVALLLLVLLAAGTSSSSAQLSTGFYSHSCPGVHDAVKSVLQAAIAREQRMGASILRLFFHDCFVQGCDASLLLDDTPSFQGEKMAKPNNGSVRGFEVIDAIKSAVDKACPGVVSCADILAIAARDSVVTLGGPNWDVKLGRRDSRTASFSGANNNIPPPTSGLANLTSLFAAQGLSQKDMVALSGAHTTGQARCTNFRAHVYNDTNIDGAFARARRSVCPAAASSGSGGDNNLAPLDLQTPTVFENDYYRNLVCRKGLLHSDQELFNGAATDAQVQAYVSSQSAFFADFVAGMVKMGDISPLTGSSGEIRKNCRRIN

SEQ ID NO: 65551 - protein, 194 aa, Zea mays
  Clone ID: LIB4826-004-F11_FLI.pep
RRGQTTQGCICLCLCLCMTTPRDEKEAGRQGRSGRPPAVASASRARRLPTDVAYRSPGLLVVAAAVVLRIEVVRGRSLGPQLLGFLVEVPQQDVPRLRCYHLIGWRISPVGCNISGWCDIRGLCGWVGRDELAEVVRVVRRPPAQRAPHLRPTAVFFCSSSARRPQLRRCSLPFHGTPRVVGSSQCPVALSFPR

SEQ ID NO: 65552 - protein, 295 aa, Zea mays
  Clone ID: LIB4826-007-D6_FLI.pep
YTCTALLSQLVAGDEVRGVCPGVVGDGVGDVVEEVLDGALAGDDGLHEEAEHGEHGKAAVLELLHLELGGGVRVVGEAQRVEGAAGVHLVEPFPERAAADAVALDEAHEHHLARPDGQDALCVHQVGVPQVVQPALREDLRAGLEPHRLAELDAVLSQDLRKHAAQRAQHRPPGVDHLQLPVARERLRVSREARGVPPIVAGELAGQVRRRLLGERAKVLGAIRAVPYALGNALDGAAHGDAAVGIDAGGAGDQGLPEEAGGLVQRRRGHRRSVCPSGDHGAAQWSVRSGLVGLP

SEQ ID NO: 65553 - protein, 209 aa, Zea mays
  Clone ID: LIB4826-009-A5_FLI.pep
GLAVSTSSSSSSSPPSLFLLAKRRGGGCRSGHRRARPPAGDPVRSQRVTYKGDAAMATSSSSLTTLHSRFFSPTPSSPYMAALPRRRRAGARYPRIRAIDLDQNTIVAISVGVVSIAVGIGVPVFYETQIDNAAKRDNTQPCFPCSGSGAQVCRFCSGKGIVTVVLGAGETEESQCVNCEGIGSLTCTTCQGTGIQPRYLDRREFKDDD

SEQ ID NO: 65554 - protein, 252 aa, Zea mays
  Clone ID: LIB4826-010-A5_FLI.pep
DGQSKTNLTHQLLSRESALAGMGMRTLAAATNDARAQNARLDLCCRPWPEKEIDQIMLESERQFSDISTSDASNCSMGFFSPICLNCSSQFCMSCAAMPMVARMVTASLKPMARRQAPRLSSTSRYRLLHRSSTVRALGDAVTAASLTCALAASVRLLNASTRIRNTAMASNTPALCASLPTVPVQMSGNAVPLQISASVAASTAAGVAKSAATAATRRYRARVPAMAVAFVPCVSIGAIYVSEEAGEKMKG

SEQ ID NO: 65555 - protein, 414 aa, Zea mays
  Clone ID: LIB4826-012-B11_FLI.pep
RENPQIRPLLHPCAALSQLSRLRIQIRRHQRLLLPLLLHHHHQEVQQGGSGSGGGGDMGRDGGGGVAGGMSDSVLRKVLLSYFYVAVWIFLSFSVIVYNKYILDPKMYNWPFPISLTMVHMGFCSSLAVALVRVLRVVDLPTSPSMTPQFYTSSVVPIGALYAMSLWFSNSAYIYLSVSFIQMLKALMPVAVYSIGVLFKKETFRSSSMLNMLSISFGVAIAAYGEARFDVRGVALQLAAVAFEATRLVLIQILLTSKGISLNPITSLYYVAPCCFCFLLVPWAFVELPRLRAVGTFQPDFFVFGTNSLCAFALNLAVFLLVGKTSALTMNVAGVVKDWLLIAFSWSVIRDTVTPINLFGYGIAFLGVGYYNHVKLQALKAKEAQKKATQADEEAGSLLQERDGHSDRKSDNQA

SEQ ID NO: 65556 - protein, 263 aa, Zea mays
  Clone ID: LIB4827-004-B1_FLI.pep
SRRRVSNRPVPSHSQSHLDDMAAAAGPSSSVKETLPPALGSTSQPPPVFDDTTRLYICYFCPFAQRAWVTRNLKGLQDKMELVAIDLQDKPAWYKDKVYAQGTVPSLEHDSEVRGESLDLIRYIDSNFDGPALLPEDAAKRQFADELFASANAFTKALYSPLLSHAAVSDEVVAALDKLEADLSKFDDGPFFLGQFSLADVAYVTILERVQIYYSHLRNYDIAQGRSNLQEFIDEMNKIEAYAQTKNDPLFLLDLAKNHLKIA

SEQ ID NO: 65557 - protein, 239 aa, Zea mays
  Clone ID: LIB4827-005-E8_FLI.pep
SSILRCRRQRDDSIIISSQSTQATMVTSIRVIVGIIGSVVCVLLYAVPVLTFKRVVKEASVGEFSCVPYILALFSAFTWGWYGFPIVSDGWENLSLFGTCAVGVLFEASFVVIYVWFAPRDKKKSVVLMVSLVVATLCVIVSLSSFVFHTHHTRKLFVGSIGIVTSISMYSAPLVAVKQVILTKSVEFMPFYLSLFSLLTSFTWMLYGILGRDPYLTVIWIYSLLFCLCFNLLINFASF

SEQ ID NO: 65558 - protein, 287 aa, Zea mays
  Clone ID: LIB4827-007-G2_FLI.pep
PGYPCMRRDHKDSVDLCSCVSSARMGSGRNALPPQGLHDVLAVQVHGVLDGFAGSGGGQEVVDGHLLVLVLLVVFKEAADLLEAVRGELADVVIVAVLGVVGADGDDLVVLLSLIYHRHEADGPGAEEGAGKDGFLHEHEDVHGVVVLAERPGHEAVVVRVDDGRVEDPVHLDEPRLLVQLVLHLAPLGDLHDDVEDGRSFRTDLEVVPGVRGDGPPRQRRQDALVQPRRPALRLHLHHVGGVLPVGASVLLVLAHLPLPLRTKTEIGRRLRLRSLAGAGRRRSYLF

SEQ ID NO: 65559 - protein, 264 aa, Zea mays
  Clone ID: LIB4827-009-D8_FLI.pep
GTTTNRAPTPSSSRTHGRLGGTGAGEDRPEGGGDLRLAAQGVGQHRPHPRRRGDLQGVDPGAGGGARGHLGAAAAEHRPGGPGPRRVPGGRRGVPRQGARRRLLPVRVARVQLLHLGPAQERAGLGVAPAQLLGRQGRRHPQRVGRVGGQPLAVPRPPGRRLPRPPLRQQARGVHQGAPAAQKVRPRRQPRRPGHQGPGHQGAPGAAGSRAQAAAGEARCCCTLFLNVVVVGGALNYTTHRRRAPNAVPCPCVRASINSRRPTL

SEQ ID NO: 65560 - protein, 436 aa, Zea mays
  Clone ID: LIB4828-005-B9_FLI.pep
PLLESCDEGTEMASSSSDSGRIAGTLALRTSSALAAASLIPGLPDDVAAVILCLLTFPDQSRLRATSRAWCLLLSAATLLPLRRSLRLPRRHLLCLFPTDPSLASPILLDPAAPTTWWPLPLLPCSPQLYGLANFTAFAVGRHLYVLGGSCFDARSYPLGQPSASAAVYRLDLANSRHCWERLPDMQLPRGSFACAHAPSAGGLLVAGGGSRHPMFPSNGSRTGSTEWYDATTHSWHLGASMPRDRAGCVGFLARGAGDGGEDEFWVMGGYDGYTTLGGVVPNDVYCRDAVALGLWSGKWRVIGDMWEEGERRRLGPIAALSADDGRITEVFMLDGNDVFRYDFASNRWLKEATTRRKIPNTESCGFVPMNGELYVLRSAKVRVESSGPWRQLKKKLAMEFQVYNPGAKKWRVLTTYPPVDAPIDFRTAALCTVEL

SEQ ID NO: 65561 - protein, 164 aa, Zea mays
  Clone ID: LIB4828-005-D8_FLI.pep
LSRSDRMSWQTYVDEHLMCEIEGHHLTSAAIVGHDGAVWAQSTAFPQFKTEEMTNIMKDFDEPGFLAPTGLFLGPTKYMVIQGEPGAVIRGKKGSGGITVKKTGQAMVVGIYDEPMTPGQCNMVVERLGDYLVEQGCEWIHLTSLARLSMVRASSSNDTNISII

SEQ ID NO: 65562 - protein, 145 aa, Zea mays
  Clone ID: LIB4828-008-E4_FLI.pep
ANCGQVRDERHGGGARLRPCVRPGHPVPRHAPPAGLSRGHHRSDLPGPCSVRARQTRQGYGLTATRKAPIDFAFTDAEAIEEGTLAAVIGRRKTESGEPSFMAEKAMAKSAHKLAFITGNDKYVTTGVEGSIPVLIKSAIFRGTG

SEQ ID NO: 65563 - protein, 200 aa, Zea mays; identical to SEQ ID NO: 65231
  Clone ID: LIB4828-010-C6_FLI.pep

SEQ ID NO: 65564 - protein, 416 aa, Zea mays
  Clone ID: LIB4828-011-H12_FLI.pep
SIDHDKMACTNNAMRALFLLVLFCIVHGEKEESKGIDAKASGPGGSFDITKLGASGNGKTDSTKAVQEAWASACGGTGKQTILIPKGDFLVGQLNFTGPCKGDVTIQVDGNLLATTDLSQYKDHGNWIEILRVDNLVITGKGNLDGQGPAVWSKNSCTKKYDCKILPNSLVMDFVNNGEVSGVTLLNSKFFHMNMYRCKDMLIKDVTVTAPGDSPNTDGIHMGDSSGITITNTVIGVGDDCISIGPGTSKVNITGVTCGPGHGISIGSLGRYKDEKDVTDINVKDCTLKKTMFGVRIKAYEDAASVLTVSKIHYENIKMEDSANPIFIDMKYCPNKLCTANGASKVTVKDVTFKNITGTSSTPEAVSLLCTAKVPCTGVTMDDVNVEYSGTNNKTMAICTNAKGSTKGCLKELACF

SEQ ID NO: 65565 - protein, 407 aa, Zea mays
  Clone ID: LIB4828-012-C2_FLI.pep
TNNAMRALFLLVLFCIVHGEKEESKGIDAKASGPGGSFDITKLGASGNGKTDSTKAVQEAWASACGGTGKQTILIPKGDFLVGQLNFTGPCKGDVTIQVDGNLLATTDLSQYKDHGNWIEILRVDNLVITGKGNLDGQGPAVWSKNSCTKKYDCKILPNSLVMDFVNNGEVSGVTLLNSKFFHMNMYRCKDMLIKDVTVTAPGDSPNTDGIHMGDSSGITITNTVIGVGDDCISIGPGTSKVNITGVTCGPGHGISIGSLGRYKDEKDVTDINVKDCTLKKTMFGVRIKAYEDAASVLTVSKIHYENIKMEDSANPIFIDMKYCPNKLCTANGASKVTVKDVTFKNITGTSSTPEAVSLLCTAKVPCTGVTMDDVNVEYSGTNNKTMAICTNAKGSTKGCLKELACF

SEQ ID NO: 65566 - protein, 455 aa, Zea mays
  Clone ID: LIB4828-012-E2_FLI.pep
PEHASDMGNGGGTGDKTKTKATGGLTGRESSSSSHASKRRRGLRGESMADRFIPNDFPDFVAEAEASDGEGHRPAGHRGLLSLPYTRLSDHFVRAARRLKDKVVEETWVKAGRKVTDYTLYTGSLGTALLLFKSFQVTGDRGDLALAADIVRACDDASRGLPFLTFICGRAGVCALGAVIAKHCDDQLRVTQYLSSFDEITITEKVPNELLYGRAGYLWACLFLNKHLSEKTIPLDHINSVAKDIINEGRGFASKGSSPLMYEWHGKKYWGAAHGLAGIMHVLMHTELKPDEQDDVKNTLRYMIKNKFPSGDYPSSEGNESDHLVHWCHGAPGVALTLAKAYEVFHDDYFEQSAAEAAEVVWNRGLLKRVGICHGVSGNAYAFLSLYRLTGNVEYLYRAKAFACFLLEKADQLIAEGAMHGGDRPFSLFEGKAGMSYLLLDMVDPSESRFPAYEL

SEQ ID NO: 65567 - protein, 153 aa, Zea mays
  Clone ID: LIB4829-001-E8_FLI.pep
LEAGRDLFFHCLPTTSSSPARNSLMAATASLTTTAPSPPALLKASAPLLISFRPVSRHCKNLCIKTKATENDQSAKKHQKVKSILCQDCEGDGAIVCTKCEGNGVNSVDYFEGRFKAGSLCWLCRGKREILCGNCNGAGFLGGFLSTFDETAQ

SEQ ID NO: 65568 - protein, 229 aa, Zea mays
  Clone ID: LIB4829-004-C3_FLI.pep
PPPPPRRPKMISPDAARNVVGIIGNVISFGLFLSPVLTFWRIYKAKDVEEFKPDPYLATLLNCMLWVSYGIPVVHPNSILVVTINGIGLVIEAVYLTIFFLYSDSQKRKKAFAILAVEILFMVAVVLGVILGAHTHEKRSMIVGILCVIFGSMMYASPLTIMSRVIKTKSVEYMPFLLSLVSFLNGCCRRPSPRTRTPSTASSASTTSGRRSASASSPTSPPAASRDRG

SEQ ID NO: 65569 - protein, 174 aa, Zea mays
  Clone ID: LIB4829-004-D12_FLI.pep
IKYNSSHMVPQCFLCPTANFAADGWETKALVSLVAVASREAIIDPIDLQHINRYLEADDTDTVHEFLHLDWIIGPRSHQRPPDLVQWNFHYHWALLLRICCQGWHCCTVGGGSGERQIPAPRSARAPSPSWSEGGVRDRAAGEEGAGAHRQIQGRTRRHGCRAAARSVAGPRRE

SEQ ID NO: 65570 - protein, 279 aa, Zea mays
  Clone ID: LIB4829-005-C7_FLI.pep
EAGREHPTSSSHPPAQSTQSDTMADRGTSRGGGFASRGGDRGRGRGRGRGRGRGKNEEKEWQPVTKLGRLVKAGKINSMEEIYLHSLPIKEYQIVDNFLPKLKDEVMKIKPVQKQTRAGQRTRFKAIVIIGDSEGHVGLGIKTSKEVATAIRAAIIIAKLSVIPVRRGYWGTNLGAVHSLPTKESGKCGSVTVRLIPAPRGTGLVASPAVKRFLQLAGVEDAYTSSAGSTKTLENTLKATFVAVSNTYGFLTPNLWKETKLIRSPLDEFADTLREGKRY

SEQ ID NO: 65571 - protein, 322 aa, Zea mays
  Clone ID: LIB4829-005-F5_FLI.pep
AAMESLGVLLLHPLDTYLEQELDRRCRLLRLWEVPHDRRGEFLRAHASSIRAVVIGGGSGFGGNPALIDDLPRLEIIACYAVGYDCVDLTRCRERGVRVTNTPDVLTDDVADLAVGLAIAALRRIPHADSYVRAGLWKANDGHYGLTTRFSGKRVGIIGLGRIGLSIAKRVEGFGCPVCYYQRTRQDAYPNYIYLPTVLQLAANSDVLVVACSLNEQSRGIVSREVIEALGPTGVLVNVGRGAHVDEPELVAALADGRLGGAGLDVFQAEPDVPQALMALDNVVLAPHMGSGTHETRKAMADLVLANLEAHALNMPLLTPVV

SEQ ID NO: 65572 - protein, 139 aa, Zea mays
  Clone ID: LIB4829-006-F10_FLI.pep
RLFELNASKQGSLFYPCLDQCSQMRTAPHYQLQPEALFLYRRRVQHDANGSTERLGGERRGELGADDARVSVRTGDLAPDDADLGATDLLLGTVDESDLLAEVEVGGVGVVNTLDLDQAGSRAGGVTRALVAQVTSLDV

SEQ ID NO: 65573 - protein, 174 aa, Zea mays
  Clone ID: LIB4829-007-E3_FLI.pep
TLSPTPQHRCRRWERRRRRRHRHRHRLGKETEETTAMVVRIRLARFGCRNRPFYRVMAADSRSPRDGKHLEVLGYYNPLPGKDGGKRMGLKFDRVKYWLSVGAQPSDPVQSILFRAGLLPPPPLLAMARKGGPRDRRPIHPMTGRPLDLEGVAIIDNSNAPEGDTEVPTDEVAQ

SEQ ID NO: 65574 - protein, 140 aa, Zea mays
  Clone ID: LIB4829-007-F3_FLI.pep
PDEPQPTVKMVSAKKHVPIVKKRTKRFERHQHDRFMRVSPSWRKPKGIDSRVRRRFRGTIAMPSIGYGSNKKTRYMAPSGFKAFIVSNKSDLELLLMHNKTHAAEIAHNVSSRKRVDIIARAKQLGVKVTNPKAKVTTEV

SEQ ID NO: 65575 - protein, 240 aa, Zea mays
  Clone ID: LIB4829-007-H10_FLI.pep
YIGLSIKQGSNQYADVNLNDSSVRQVKFYQYIVLMLNSPPLWMLATPREKKIREERAPALLELLDEGEVVEHLLDLLVPGVADEPAAGLEGGDERGGLAAGVGAEVAERAELELGEAVAAQRLADLAHGVGVLVAAEALHVLQRLLEHLRHLRRRVRLRRRVLLDLLVLVLQDDRHLAVHQALGLEELFADLELRGVLLLLARHRWWLVVLPTGAKSLAGVGRRGMGLGIANCDWSRDGS

SEQ ID NO: 65576 - protein, 229 aa, Zea mays
  Clone ID: LIB4829-008-F6_FLI.pep
IYPGALAMAGASLLSPSCTLLRLIPSASHFKRFDRVRRFAPAAMATSSGPKEAPANNPGLQTEVDPATKGYFLQQTMLRVKDPKVSLDFYSRVMGMSLLKRLDFEEMKFSLYFLGYEDVTLAPDDHIKRTEWTFRQKATLELTHNWGTENDPEFKGYHNGNSDPRGFGHIGVTVDDVHKACERFERLGVEFVKKPDDGKIKGIAFIKDPDGYWIEIFDQTIGTVTSSAS

SEQ ID NO: 65577 - protein, 192 aa, Zea mays
  Clone ID: LIB4829-010-F2_FLI.pep
MIKWVRLRRGGSATATAKSTTELRSELAGSTTLLALASIPSSVSTLTVTSVTTAATAERSSLALALTEHATGRSVRSLLLDVGSGNDLSGEVKPLAEVVETLGGQGVVVVLPRELSLDIAARVERLHSLDNEQVLGVDIGVLGKVEVLLGDEDTLTEEVLVDLLAVGLGNQHRGGICCSSEGSMLEGPGRPR

SEQ ID NO: 65578 - protein, 223 aa, Zea mays
  Clone ID: LIB4829-011-B3_FLI.pep
DPETQKKQDPCPCSRLFVLDNVALLGDVQTVQELSDILVSHPADLLDIGSTLRNVLERVTREDELILLGGGSLNIDTGVHDDSADELLTDEVSDLNLVQVGLGVLGDVDVDGEMGVDVSHLVLEALGDTNDQVVDEGSDSSEGSDVLADTVVDLDGDLVLLGAGEVDGQVAEILDQLAAGTLDGDNSRLNGNLDPLGDLKELLGVNVLHPAGCEVLMSGVEGI

SEQ ID NO: 65579 - protein, 218 aa, Zea mays
  Clone ID: LIB4862-001-B11_FLI.pep
ADTSKTALDWQGSGHLDLEAPAVPPSSRLLKLPTLRANIRLGVAVRHSWCRPEVPDSFPSVLRTPQQNRVLPKWGTERELVEGEALSASIDDPGPRCLSEPERADLHRRHLADPLVVGHGAHNHGDLITLPLHEPDEAAHRERRAVGLAHEEALEDHGVEVALCPAHKEAVELDEELEVDIVGLGRRALGLLVAAAGYEIDTHGRAMAAAAAAGRAGR

SEQ ID NO: 65580 - protein, 325 aa, Zea mays
  Clone ID: LIB4862-004-D2_FLI.pep
LSRSKRCKADCRVALSQVKSLLRDRLSGKASAGSNGKTSGGSSEKSEPSASVELNSRNFDELVVKSKDLWIVEFFAPWCGHCKKLAPEWKKAAKNLKGQVKLGHVDCDAEKSLMSKYKVEGFPTILVFGADKESPFPYQGARVASAIESFALEQLEANSGPAEVSELTGPDVMEEKCASAAICFVSFLPDILDSKAEGRNKYLELLLSVAEKFKKSPYSFVWTAAGKQANLENQVGVGGYGYPAMVALNVKKGAYAPLRSAFQRDEIIEFVKEAGRGGKGNLPLNDAPTVVASEPWDGKDGEVIEEDEFSLDELMGDSSSANDEL

SEQ ID NO: 65581 - protein, 476 aa, Zea mays
  Clone ID: LIB4862-007-E1_FLI.pep
PNKPTVRNPERPKPSSDPSRRRHPHPDRHHHLLAPPPSAVAAMEDDPSRQVRVRFVTKLPPPLRAPPAAIAVPADLTRMGLSEIVNSLLAAAEPDHQSQPFDFIVQGELVRLPLQEFLLAKGISAERVLELEYVRAVAPRKQEEPCPHEDWVSAVDGSNPGFILSGCYDGLARLWKDAAVCTQILEGHNDAITSTRFINKGSETEGSLHVVTGSKDRSLRLYKCDTSVIMDYPKRVGAYKILRGHTASVKSISADPSGDMLCSGSWDGTIKLWAVEGSDDDDAVSLKKRRMNSDSSGPEESQLEGSATSTLLGHTQGVTAVTWPERKTIYSASWDHSVRQWDVQTVKETWNMFCGKALNCLDCGGEGSSLIAAGGSDPVLRVWDPRKPGTLAPVFQFSSHSSWITACKWHPSSCFHLVSSSFDGKVMLWDLRTAWPLASVDSHEDKVLCADWWKGDSVISGGADSKLCISSGIQIV

SEQ ID NO: 65582 - protein, 370 aa, Zea mays
  Clone ID: LIB4863-002-A11_FLI.pep
KNITATCVTCYIYIAIAHGKKKDPNIIRQTTDLWSEVNDDEGIDRRARTQVASRSLIQPPLSPEPAFSGHAPALREPLGVGAVVVDHELPLHPAHAAVAGVAELLVPPAAASSRLLHGANGALRPAAGPDAGVGAEPAERGDERRPRPVRLDAAALRGPVVGVPEAGVHPHGLRPRERHPAGLAVGEVPHRRAVHREDDVPRVPHHGVGVEVGGGVEPEAELLLPLPPPAREHVRVQRVGLARHVAQELQVDLVVRVALRRQVQGRHGARRVARHQLHLHLDLAEQVLVLGLEPGPGGPVQAQVQPAPAVHHLAAPLPPGHLRVLVEVAAMRDARYARRHRHEADQRGRPHLLLLLLLLLPCSSSSSSCL

SEQ ID NO: 65583 - protein, 356 aa, Zea mays
  Clone ID: LIB4863-003-E5_FLI.pep
EEASGTVSELEGGGGNGVAEWCWRWWSLSRGGCAGGCGRRGAAGRRGGCGGDQVRRRGAAQLGQRPRGVRRRPPQAPPRLQLRRRVRVKDQVPVRQGQRRPEARAGGLRRRRHGFLSVVGRGQAQRVRLRVPGQRDRRAVPGADQPVHRRRGQPGAAHRPVVRPHGRLPHVRRAVEPQPGGVHGGRHAHPGVRERHAAPRPRPRPPPARRRGGGGQRHQHHHHHAGCCPGAVPRAAADGRVQLHLERGRLGDAGRAREDGLVARAVRGHVPGGARGRVRLGGQRHGRRRRGGAPVQRVLVGQGGPLLVEGEGDVGAERAPEPPARVGARAPPRLRLLRRHRPLPRAAARVRRPLSS

SEQ ID NO: 65584 - protein, 209 aa, Zea mays
  Clone ID: LIB4863-004-H8_FLI.pep
ALTNTRFFCLFTITASSLLEILSLVILKDTNYISTLASGPYGLIFASFVPFFLDIPITSRFRIFGLNFSDKSFIYLAGFQLLLSSWKRSLIPGIFGLVAGSLYRLNVLGIRKMKLPQVISSFFARYFAPSPGSTSRPSRSLVGNTPSHRGRAVQNQPSTGFAPIVEPPESSVAMLVSMGFDGNNARQALVRARNDINVATNILLEAQSH

SEQ ID NO: 65585 - protein, 261 aa, Zea mays
  Clone ID: LIB4863-008-H4_FLI.pep
MASCSSVRAAPSLLVSAPPSRRRASTAVCLQGVRRGRVASSRVRCSAGAGQGGVKVPAKLAELWSAAKGAPPLAVLAGVAAAVAIYKVGSSLLAPRHPPPRRLEAQTAPPPPVPEPVQVGEITEEELRQYDGSDPEKPLLMAIKGQIYDVSESRMFYGPGAAYALFAGKDASRALAKMSFESQDLNGDISGLTPMELGALNDWEYKFATKYAKVGTIRRAAPVEVVYGNISPEMREEVSEPVVEPELEPEPEPEPHDDDAP

SEQ ID NO: 65586 - protein, 351 aa, Zea mays
  Clone ID: LIB4863-009-F11_FLI.pep
SVPAAYTMSKSGALDLASGLGGKINKVEVKSAVDEYEKYHGYYGGKEEARKSNYTDMVNKYYDLATSFYEYGWGESFHFAHRWNGESLRESIKRHEHFLALQLGLKPGMKVLDVGCGIGGPLREIARFSSTSVTGLNNNEYQITRGKELNRLAGISGTCDFVKADFMKMPFDDNTFDAVYAIEATCHAPDPVGCYKEIYRVLKPGQCFAVYEWCITDHYDPNNATHKRIKDEIELGNGLPDIRSTRQCLQAVKDAGFEVVWDKDLAEDSPLPWYLPLDPSRFSLSGFRLTSVGRMITRTMVKALEYVGLAPQGSERVSNFLEKAAEGLVEGGKKEIFTPMYFFLVRKPLLE

SEQ ID NO: 65587 - protein, 139 aa, Zea mays
  Clone ID: LIB4863-010-D4_FLI.pep
DHTVDEMNLSLVGGGVIIIGVGEEAVEGGEDLRALRGEEAAEGVLAVALALDGVVQHGALAAALAHPHVRVHQHVPGQLEHAHPRHERHGRDQRVHIWLQPTAHVDGWMASCSSLLQILLERTWEWITATYVELYLDES

SEQ ID NO: 65588 - protein, 274 aa, Zea mays
  Clone ID: LIB4863-011-F12_FLI.pep
KKRPCRVQVKMMKNYPGPASSSSVAVEVKKGSWSPEEDALLTRLVEQHGPHRWSLISAPIPGRSGKSCRLRWCNQLSPDVHHRPFTPHEDALILAAHARYGNKWATIARLLPGRTDNSIKNHWNSNLRRCRRRAAAAAVASRPQVQDSDDAPAAAAAHDDQPAAVVAAGGLGGGNSSSGLPPAAAGAATAEAEPSLSLSLGLPLPAAEPAEAAADDESRNSQGQASPLLEEGEGNAQLLAVVRRMVREEVQRQTGQLAYSLMAAAAARAKGHHR

SEQ ID NO: 65589 - protein, 283 aa, Zea mays
  Clone ID: LIB4865-002-C3_FLI.pep
RGRPGRAPTEFIPPPSPPIGRTTGPAAGRIASAAMVKAYPTVNEDYLKAVDKAKRKLRGLIAEKNCAPLMLRLAWHSAGTFDVATKTGGPFGTMKNPAEQAHGANAGLEIAIRLLEPIKEQFPILSYADFYQLAGVVAVEVTGGPDVPFHPGRQDKPEPPPEGRLPDATQGSDHLRQVFSTQMGLSDQDIVALSGGHTLGRCHKDRSGFEGAWTSNPLIFDNSYFKELLSGEKEGLLQLPSDKALLSDPSFRPLVDKYADEDAFFADYAEAHLKLSELGFAEA

SEQ ID NO: 65590 - protein, 199 aa, Zea mays
  Clone ID: LIB4865-003-F9_FLI.pep
SSIETLQSNRCDRLTNQSFVARAAVVVDDLGVGDGAGVLDDGAPDGVDPLLLLLLGVSNEVHGLARRGELEGVGSVEDVLGALDGEAGGDRDDTAGHGSARDGRFLEPEEPPLLEHEPPPPPCLDILALLGQPTHAFRGAPELNAAARGVGGVRGRRAGAHHRPPQTRRHGVGENFGIRSGRRPPFFSSFREGVGLGLV

SEQ ID NO: 65591 - protein, 176 aa, Zea mays
  Clone ID: LIB4865-004-D7_FLI.pep
GGGPGSIFVVVVLPSSSTRRRRCCSDGQGLEAEGRQGEGQAGGRLLWRRRRRRQGRQGQGQGQGRKSADGLGTCTYVKARHVLCEKQGKINEAYKKLQDGWLNNGGKVPPAEFAKVAQEYSECPSGKKGGDLGWFPRGKMAGPFQEVAFNTPEGTVSAPFKSTHGYHFILCEGRKN

SEQ ID NO: 65592 - protein, 383 aa, Zea mays
  Clone ID: LIB4865-007-B3_FLI.pep
STVCAVHGFILLSARSQLTHALREETPGDAAVCALGKEAAVLGGVTGAVHDAEDLLRRAVVGERQVVAGDDVPHGQPLGPQLGRHHQALVLHAPPPQRVPEVRDACRDLRHPAGIARHTRHPALVQQRTDHRVLRRLHRQQPRQQLSGLRGEEPGVGADVAGEADVGDDVGGDEEVEAVLVGVEGRVQRRVQRLLDDLAEVGRADVQQRPREAPHRLLDRPEVPDFLVTELGGHVADERGEGRGLAADGGRPAAGEVGVDGVEAVPQSGPAEELRLQVLQVQRELQQVHVRLRQQRPGRGAEEPAVGRPRPLAVHVLRLRKGPAQANHCRRGHHDDGRQRRRTHLRPAGGCDGNRAVTSIVALFGNAHTSLPLRFLSCTFGLS

SEQ ID NO: 65593 - protein, 207 aa, Zea mays
  Clone ID: LIB4865-007-C10_FLI.pep
QADLISFRRFFYFFWLVGLFSLSCDVIQICEQEVQQSVQGYDRRGFPHQGGAVRGQALHSANMGHCWPGKVSESRRCILPGADCCVLVYDVNSMKSFDNLNNWREEFLIQASPSDPDNFPFVLLGNKVDVDGGNSRVVSEKKAKAWCASKGNIPYFETSAKDGTNVEDAFQCIVKNALKNEPEEELYVPDTVDVVGGNRAQRSSGCC

SEQ ID NO: 65594 - protein, 189 aa, Zea mays
  Clone ID: LIB4865-012-H11_FLI.pep
INSDDDQVTIGIARWNTKGYIPWMLALSPYSAQLVGASKVLWANLAAIVEDEVEAKGHVEVDAEDVSLDGGAEAQCGVEVHQALQQRAALLVLGQADLDEAQHVGAHLEFQRVDRAASVAVRRHDWWGWYDWAGAIGSAAMRGGSEEEAEGKEERNLGSHCGDGVLVLRCVMSSSAGSGAAVRALVLWD

SEQ ID NO: 65595 - protein, 431 aa, Zea mays
  Clone ID: LIB4866-002-G1_FLI.pep
QAASSHRRPSLHLAVVPLPPSRRAIVPPQQDHLTEPSSLHSRSAGPHRRVVVSPHQVRRRGAATSLRLPARPVQLTRGRDHLRPPHPSGKQLLNSSRVSRSAALALSRWLAAAPVVWWRMASKYVARVPSPWWAPQRRLVGSWVSVCSVKCGALGGRDVVCAAVSFRPCIDIHKGKVKQIVGSTLRDSSNDGMELVTNFESDKSPAEFAKSYKEDELLGGHVIMLGSDPASQAAALEALHAYPGGLQVGGGINLQNAMSYLNEGASHVIVTSYVLSDGKMNIERLTKLVELVGKQRLVLDLSCRKKDGRYTIVTDRWQKFSDVFVDEPALEYLAAFADEFLVHGVDVEGKRLGIDEELVELLGHHSPIPVTYAGGVSTMDDLERIKKAGKSRVDVTVGSALDIFGGDLPYKDVVLWHKKQSMVGQVSRNMW

SEQ ID NO: 65596 - protein, 373 aa, Zea mays
  Clone ID: LIB84-003-F8_FLI.pep
NPSAAARERMHLALIISRIRLLPTAMPSTRSASASRLLVRADNSPVAREIKRESSVSFDTPKPEATVSVKRRRVNRELEVNGQHHKKQVPDIEDFIYEKAKTLTSSSKATTSLVKVEKKVGVSSVIKVGAPDNWEAVLGGIKSMRLSGEAPVDTKGCEKAGSLLPPKERRFAVLISTMMSSQTKDEVTHAAVERLSENGLLDPDAIVRTDETTLANLIKPVGFYQRKAQFIKEASKICLERFGGDIPDSLNELLALRGVGPKMAHLVMSIAWKNTQGICVDTHVHRISNRLGWVFREGTRQKTTTPEQTRISLEKWLPKDEWEPINPLLVGFGQTICTPLRPKCDKCGINNLCPSAFKESSSPIPKQKKTRSP

SEQ ID NO: 65597 - protein, 270 aa, Zea mays
  Clone ID: 700047895_FLI.pep
PTGKALPKQTRRKKGTRRLGFRRRLLFRRSRSGNHCAMPQSVLVERATSESLIGPDWSLNLEICDILNHDPSQAKDVVKTIKKRIAHKNSKVQLLALTLLETLIKNCGDFVHMQVAEKDMLHEMVKIAKKKPDYHVKEKILILIDTWQEAFGGARARYPQYYAAYQEMLRAGAVFPQRPESTVPIYTPPQTQPLRNYPPPALRNTDYRHDVPESSSAPEVPALSLTEIQNARGVMDVLSEMLNAIDPGNREDCMLTCSRLFNWTIQFQKF

SEQ ID NO: 65598 - protein, 159 aa, Zea mays
  Clone ID: 700052216_FLI.pep
SQGFFGGFIYRLSTELPVPAATTCGDPSLTMSSEKEAALAAVLDDSPTIFDKIIKKEIPSTVVYEDEKVLAFRDINPQAPTHILIIPKVKDGLTGLAKAEERHIEILGYLLYVAKVVAKQEGLEDGYRVVINDGPSGCQSVYHIHVHLLGGRQMNWPPG

SEQ ID NO: 65599 - protein, 197 aa, Zea mays
  Clone ID: 700201295_FLI.pep
GCHPNPMSSLLLLQALAPAMTVPRHHFLISPLRLASAATVPFARRFSNAASSNKPEPLLSEPDLESGLYLVSTPIGNLEDITLRALRVLKCANVILSEDTRHSGKLLQHYNIKTPLLSFHKFNEREREPTILRRLHEGEAVALISDAGTPGISDPGMELARLCATEKIPVIPIPGPSAAIAALSASGLPSNEFTFGK

SEQ ID NO: 65600 - protein, 348 aa, Zea mays
  Clone ID: 700201481_FLI.pep
HPVDVVRSKSINIMNLQLHTSDDDESGDSAVGPDLAAGAGEHADGAHLDHGGGEVGLEGGRVVGVGDDLHGGVLVAEQRLVRGQQAPVGHDALVEALVEGVGGDVVHGHERVAALRALPRQLRHVRGVHGRVLPARRRGRPRQPAAEGAAVRGADGVRARQDDHLLLRQALGAEDLRELRDVGRRRRQVAGVRRARHGPVPPPRRHLVRVPAGECDAVPGREREYVRAGDDAEAGLLDARLDAIDDLEAPQAEVGPGVLLRCVALGGVDEHGRVAAPNEAVVEVEAEQAGGEARVGRHRPAHLLLHDDLRRWARAVVEAHTQLRAQPRRHQQHRHRRRLQVQYCHRHS

SEQ ID NO: 65601 - protein, 372 aa, Zea mays
  Clone ID: 700073092_FLI.pep
PNPTCRASALRILPVPRHSPNRNPRLQHASRHATSPQGPAMSAPSDAAVAAAAPASTTTAAASSGGLTFKLHPLVIVNVSDHHTRVKAQAACSGDSSSPSSSAPGAGQPPRVFGCVIGVQRGRTVEIFNSFELVLDPVSGTLDRAFLDKKQELYKKVFPDFYVLGWYSTGSDVHDTDMLIHKSLMDINESPVYLLLNPTINLSQKDLPVTIYESELHVIDGIPQLIFVRSNYTIETVEAERISVDHVAHLKPSDGGSAATQLAAHLTGIHSAIKMLNSRVRVIHQYLVAMQKGDIPLDNSLLRQVSSLVRRLPAMESQKFQDDFLMEYNDTLLMTYLAMVTKCSSTMNELVEKINTSYERTTSRRGGRGAFM

SEQ ID NO: 65602 - protein, 366 aa, Zea mays
  Clone ID: 700073535_FLI.pep
WIGAWSVNSSRGGDAVGVWAEAVTADLADVPLGSPELAHLDHGGPELVEEPPVVVGEALDEPARARVAHQPLVRRQHHPLVLPQRQLHEVEVVEHGGRQEVQVPQRVAAPGGRARRRHAPRHVVGGRARHVAKRAAPRLPHRVRARQRHQVRRVRQVLAPERRQQLVHRRRRRRQREHVVAGRRRRAVQPPQRHREGRPAGQAHGVAGGQHRDVGARHGGPARRVHLPADVLHQLHGLLLQPHVGREAALAVVQEDGRVAALREAVVEQEAEETRRQTDVLLERRVHAGPHDRLQLRARVRVEVHGQVAGSRAASTQRSQDGPRGHGGCGEQHAEGSGQDEHTAAHCRRPTDHHCLCDKRIKTATK

SEQ ID NO: 65603 - protein, 360 aa, Zea mays
  Clone ID: 700075440_FLI.pep
NTLSSSPPTKTQTAGGMLLLDGDLVLSSSGSTGAASRTSDSGRELVAALLESPGIRHAVDRLKVAPERRISAGQEGAPKHVYVFQREYATVDPARVELVGTDEATTCIGVVIRNNKTGMTSVSHMDFPEIVEGGIKQMLELLGDDNAPFDVHLIGGFADASTKVVRSSGKKHIKQEGYSYPLCCKIVEVLHKSQLQFHLRSFCVLENNTKSDSFGNALPIIGGFVVETSSGVVIPATFDMDSRCPDEVVRRIRVSVSSYDPTWQGRLLETYDTQDDVFQIAPACWMPDWADIASSLNQLSDSEVLLRCSTSPAAEPPHFVENERRIWKYLIDNPDWEETFPKHKPRVFHRASAGSWSRYS

SEQ ID NO: 65604 - protein, 285 aa, Zea mays
  Clone ID: 700075601_FLI.pep
TLPFSSACPHRLPLYTSAGDAMAAAQPKPAKRLGGMAEALAIAADLGFPASTTQEDQTSSDKSDDLVKVLRELTVVQRNIANLQVELQGRKDDKNIAHLTHVSEMEKKCESLARMTAILKDVIQNKDRIIARLQQPYSLDCIPVEAEYQKQFSELLLKAASDYGALTASVGDFQWSQNFRESPAVWGEMLRPIPAALASCTRFFEAMSAMRESFSTLQKLRVGHSSLSITPSDSSDDSKFLTPPQWRDGSILDSWKQMDDINLESSGIDAMNQRRLSWPSIKRDP

SEQ ID NO: 65605 - protein, 404 aa, Zea mays
  Clone ID: 700076148_FLI.pep
LFSPPAQLARSVLDGRAAVGALEPAVGNGAVGRLGEVDAVPDEVVARVGAGAGPGHAAPRLVVVAVLALPAGAAADLEAVLEPEVVRGPDHVGDLGVEVGVHDPGVRVRPAQAGQAPPQQRVVVGGEAVVGAEAAVAVVVGGVGGAVEGEVDGEAADGEHPGHHHVHGSAPHDRLQAADELAHHHGHVPSHLRHGPPREERRVVVVAAELAHHEQGLGQVVLAILPAHGGEQLPEPLDLGVQRPVVPDLVAEADGLEEVKVHGGGADDRHVRPLLQVAAGFRSRQQGQPKVLGQEVDDDAAVGAASGGAAEEGLPVGRLPRGEPGRAPAPHAEVAGVGDGVAEAPDGVVPLRSSMAEHAQQKQKPPQHQCRLAAAGGRHHTSVVAKLDWLALPATASLPGTPPQ

SEQ ID NO: 65606 - protein, 379 aa, Zea mays
  Clone ID: 700150541_FLI.pep
QRRSTHQIARNHHRLRRSLPTHSTLSTQKATVLLAGHVDGSRPSVRVARISKLMSVYAMVYVDVCLLVGLPAVGADLAAGAGERADAAHLEDGRDEVPREGGAVARVLRRDGVDGAAAEELLVGVEQAELGHEVAEVAVVEPDGAHGVQRRQVAVAGPGLRLADLPPLRREPGADVGVVVHAGAEGGAPRRADRVRARQRHQVPRVQPLGRERRHQRRRARRRRRQVAVSRRLARRARVPATQLHRPRRTAQQVDAVARGEGEDVGAGDGAGAGGLHLGLDGVDDLEAAQGVGVGPRVLLPRQRRRVVEEHGRVAPLDEAVVEEEAEDGGPHPRLLLHGGGHPGPHDGLQAGAARVVERRRQLRHGAERQRARHGQSRQ

SEQ ID NO: 65607 - protein, 578 aa, Zea mays
  Clone ID: 700150613_FLI.pep
LHRRRQFLFRVPHRPSRRAPLLTSAAERPAGRTMATADTGASTVTDSRLRGVKQALISLSDKTDLANLGNGLQRLGFSIISTGGTASSLEASGVNVTKVEEITQFPEMLDGRVKTLHPSIHGGILARRDQEHHLKALKEHGIGTFDVVVVNLYPFYDKVTSGAISFEDGIENIDIGGPTLIRAAAKNHKDVLVVVDHKDYPALLEYLEGKQDDPDFRRTLAWKAFQHVASYDSAISEWLWKQSNKDSFPPSFTVPLTMKSTLRYGENPHQKAAFYGDRSLSLVNAGGIATAIQHHGKEMSYNNYLDADAAWNCVSEFESPTCVVVKHTNPCGVASRHDILEAYRLAVRADPVSAFGGIVAFNTTVDEDLAREIREFRRPTDGETRMFYEIVVAPGYTAEGLEVLKGKSKTLRILEAKRRRSGKGTLLSLRQVGGGWLAQEPDDVTPEDVAFTNVSERAPDARELSDAKFACLCVKHVKSNAIVIAKNSCMLGMGSGQPNRLESLRIAFRKAGEEAKGAALASDAFFPFAWNDAVEEACQRGVAVIAEPGGSIRDQDAVECCNKYGVALVFTGVRHFRH

SEQ ID NO: 65608 - protein, 313 aa, Zea mays
  Clone ID: 700150710_FLI.pep
SPHLPLLAPAKSPRFLSPRLAASKTTETAMAVRAIDTPLLLCTMVVVLTGLVSPSTAGLSLDTVRDFLTREEDTIVFSLIERAKYPLNRPAYDPLHSAAGRRLNASFVELFIRESEAVQSKAGRYQSLQEIPFFAYRVPSALAPPYNFTSDLYPAAASVNVNDAIWSMYFDELLPRLAKNGDDGNYAVAADADLACLQVLSRRINYGRYVAEVKFRGDQQTYTSLIQAKDRDALVKLLTSEAQEDVVKRRVEKKAAVFGQSVTLDGPVQTDANSQANSSLFKVDPSVVYELYGQRVIPLTKQVEVEYLLHRLD

SEQ ID NO: 65609 - protein, 456 aa, Zea mays
  Clone ID: 700151791_FLI.pep
FVVLLTYVSRGHRRVYPVVEKREEMSANDGAGDTKMRAIVVVEEGEMSAPAATPKQGKCCEYTLDGSVDMKGRPAVKGKSGGWLAGALILVNQGLATLAFFGVNVNLVLFLTRVLGQSNGDAANNVSKWTGTVYMFSLIGAFLSDSYWGRYKTCAIFQAIFVLGLALLSVSSHLYLIRPDGCGMEHAPCGPHSGKELGIFYIALYMIAFGNGGYQPNIATLGADQFDEEDPAEAHSKVSFFSYFYLALNLGSLFSNTFLSYLEDKGSWALGFWASTAAAATALLLFLSGTLRYRYFQPGGNPIGRIGQVAIAACRNWKAGVSTEVVSLYEGDEKADAGGRKLLHTQGFSFLDRAAHADTDSKLGARDPWKLCSVTQVEEVKSILRLLPIWLCTILYSVVFTQMASLFVVQGAAMRRTTPFSGFSVPPSSMSAFDILTVAATIFLYRRTICPFLARL

SEQ ID NO: 65610 - protein, 368 aa, Zea mays
  Clone ID: 700152834_FLI.pep
EPAAAAGDEECSWSRGRWVYDNVSRPLYDGLKCAFIFPEVACDKYGRKDVMYQHWRWQPHGHGCDLPRFDGIKLLEELRNKRLVFVGDSVNRNQWVSLVCMVEASIPDDRLKRRIFNGSLISFKALEYNATIDFYWSPLLVESNSDNPIIHRVEYRIIRADRIEKHASVWRDADVIVFNSYLWWRKQKDDMRMKVMYGSFEDGDAKLDEMEMADGFEIAIKKLTEWLAENIDKNKTRIFFAGSSPTHSWASNWGGQDKNKCLNETEPISYRPGGGYKAATTDYSLMAMARSYFRRTLEPRGIRVQILNITELSDYRKDGHPTVFRRQFVPLTKEQIADPASYADCTHWCLPGVPDVWNEFLYGYLVHV

SEQ ID NO: 65611 - protein, 332 aa, Zea mays
  Clone ID: 700153213_FLI.pep
LVCSLHPHTRVTFYTTLRKDQLSAPIDMEGDTGCRSEKEVAVVTGGNRGIGLEICRQLASSGVTVVLTARDAERGAEAASTLGLPNVVFHQLDVGDPSSAARLAGFIEEKFGKLDILVNNAAITGTTSNVVDPEAFRQELAGLDVMQMIEAINKHNTEPYEQAQKCLRTNYHGIKAVTKALLPLLQSSSHGRIVNLSSSYGLLRFFSGDELKEELSSIDGLSKQRLDELSELFLKDFKDGQLEARGWPNEGGFIAYKASKALANAYSRILAKEHPSLCINCVHPGYVQTDMNFRSGHLTVEEGTRGALMLAMAPKGGVTGAFFDHTEAASFV

SEQ ID NO: 65612 - protein, 423 aa, Zea mays
  Clone ID: 700154223_FLI.pep
SEALLLHCSRPEPQMTPSVHADEYVRPPQRPLALMAHDKPASHPQQVHISAVGAHHMRITWVTDDRSAPSVVDYGTSPGQYDASETGYQATYQFLSYTSGAIHHVTIGPLEPSTTYYYRCGRAGDEFSFRAPPATLPIEFVVIGDVGQTEWAASTLSQIGAADHDMMLLPGDLSYADRQQVLWDSWGRLVQRLASARPWMVTEGNHEKETLREHETVQRFVAYNARWRMPHEESGSRSNLYYSFDASGGAVHVVMLGSYADLEEGWSEQHAWLRRDLAAVDRRRTPWLLVLMHVPWYNTNRAHQGEAEAMRRDMESLLYEARVDVVFACHTHAYERFARVYDKKANSQGPMYITIGDAGNNKAEKFMSGHELAHLSLFREPSFGYGRLRIIDNRRAVWTWHRNNDKDAQVSDEVWLESLATSP

SEQ ID NO: 65613 - protein, 257 aa, Zea mays
  Clone ID: 700095034_FLI.pep
KGDDNHFTTPLGGSSLLFELAYVRGEHRNDIPGWRLQRGDERRSGSLQRAEQRGVHLGAAGHSLERLEVSGPVKLALKDGPDEVVGLLDALLFLEGAVGLERGWYLLGVDEEPGIHTLHARLERFPGGALDGFPHQSVLRHQQSAGLWERVADSLQLLHRQALVLDTSQEVAALQLLPDGGHRLLLAATGDGRAYGAAARALLGKFRCGYSVGSECREGLCGGERGGEEGGLHFAVREEAEERRVGLRAGTGRDERS

SEQ ID NO: 65614 - protein, 378 aa, Zea mays
  Clone ID: 700095319_FLI.pep
PLLLPHQSVSKLPARALNQPSGRRSEVSRVMSGANFLSTAALVARGVAACSSISTPTRRHPQIRLCCRVDAEAYAHEERLRFRRRDFIGTCVGTAVALEMIDGSTSFSGVATAADLIERRQRSEFQSKIKDTLYVAIKAKPELVPSLLTMALNDAMTYDKTTKTGGANGSIRLETSRPENSGLSSALDLLTEAKKEIDSFSKGGPISFADLIQFAAQSALKRSFLDAAIAKCGGNEEKGRTLYSAYGSNGQWGLFDRTFGRADAQEADPEGRVPDWSKASVQEMKDRFVAVGLGPRQLAVMSAFLGPDQAATEGRLIADPDCRPWVEKYQRSRETVSRTDYEVDLITTLTKLSSLGQKINYEAYTYPKQKIDLGKLKL

SEQ ID NO: 65615 - protein, 470 aa, Zea mays
  Clone ID: 700096308_FLI.pep
DGMTTRGAKRAATSDPAAPDLPSKRVMDGPSFDVHRAESSHQHVMAGPASLDPRRAEAASKHVRALNTQFASWVQLQLQNHPAELWEDGLKDYISHASEIMEKFKDVVNWLRQNQAGSIVVSSPSSLKDDKLNLPAADDSKLLVQPSSDNKQKAPVMASSSSSFQNSSLPNLFSSPSQQKTPDYSGMFADKNTSSDSSKPAFQFGGNNVIFGGKKDAPVDSSKPFQFGPNNGIFGDKKDTPSDSSKPFHFGANKGMFGDKKTTSGDSSNPFQFGANNGFPTSNAPSIFSSVGQSFNPQSPPLFSMNQQSVLPGNQNTSEASADADEDAEPEKPSSPSVKKAEEKGVVVVHETKCKVYVKHDDATKGWKDIGVGQLSIRSKEGTEKASKESTPTIVIRNDVGKILLNALIYKGIKMNLQKNTVASIFHTSDAQSSESAGDTVVARTYLFRLKNVEEATKLSTAIKENAPSD

SEQ ID NO: 65616 - protein, 547 aa, Zea mays
  Clone ID: 700100628_FLI.pep
IAVCPYPSSASLFHCPKPPPMATCDLLMLREASPWALAGAVASVSLLWLVAWTLEWAWWTPWRLDRALRAQGLKGTRYRLFTGDLRETARVNREARKKPLPLGCHDITPRVQPMHHSTIKEYGKLSFTWFGPTPRVMIPDPELVKEVLSNKFGHFGKPRSSRIGRLLANGLVNHDGEKWAKHRRILNPAFHHEKIKGMMPVFSTCCIEMITRWDNSMSSEGSSEIDVWPEFQNLTGDVISRTAFGSNYQEGRRIFELQGELAERLIQSVQTIFIPGYWFLPTKNNRRMRAIDVEIRKILREIIGKREKDTKNRETNKDDLLGLLLESNTRQSNGNASLGLTTEDVIEECKLFYFAGMETTSVLLTWTLIVLSMHPEWQERAREEVLSHFGRTTPDYDSLSRLKTVTMILHEVLRLYPLATFLTRRTYKEMELGGIKYPAGVELLLPVIFIHHDPDIWGKDASEFNPERFANGISSATRHQAAFFPFGGGPRICIGQSFALLEAKMTLCTILQRFSFELSPSYTHAPYTVITLHPQHGAQIRLKKLSP

SEQ ID NO: 65617 - protein, 283 aa, Zea mays
  Clone ID: 700103353_FLI.pep
GPWCQREAMEVGGGEKHFVLVHGLCLGAWSWYKVATALESAGHRVTALDLAASGAHPARLQEVRSFEEYSRPLLDAVAAAPDGDRLVLVGHSHGGASLALAMERFPRKVAAAVFVDAAMPWVGKHIGVTTEGFMKKAASKGLLMDCQIVAITDGTGSEEGAGQRGTAIVMGPEFLKKCYKESPAEDLTLATLLVRPGNQFMDDPVMKDEALLTAANYGSVKKVFVVAKAAHGSSASAEEVQSWLAATNPGTEMQEIAGADHAVMNSKPRELCDVLVGIASRYD

SEQ ID NO: 65618 - protein, 320 aa, Zea mays
  Clone ID: 700105015_FLI.pep
LWWNQSSRLSTEQLKDIPKPSCTSAMPMHALGSRHLHSTTATKCGFLPLRAEANEEEDSRKEKKEEEETGAPVVRGRGEESWSLVVSIYLVAKAVDGHGGSVEELMERDPRGGGGIAATLRLHRVAAVVARRVVEVEPQPAAGLLNAAVVVDVVVADDADDVAVRLLVDDDPRRRGRHRRHAARHGAVAPHVAAEGLADGELEAADGAAVQLGLGERGVAAAVPVQPRLLVAGAVAAQRLERREHAVARLAHEHALRRLPVLALLAAGEAGRQWQRLVLAVRARHEHQHARHLALLNCKPLHQMLALVNQLMSYSIAIRG

SEQ ID NO: 65619 - protein, 371 aa, Zea mays
  Clone ID: 700236990_FLI.pep
DGGADAWAPPITAVLQMKCKMASSSRVVAAAAVLVAFCAAALSSATVTVNEPIVNGLSWSFYDASCPSVEGIVRWHVADALRRDIGIAAGLIRIFFHDCFPQGCDASVLLSGSNSEQKQGPNQTLRPEALKLIDDIRAAVHAACGPKVSCADITTLATRDAVVASGGPFFEVPLGRRDGLSPASSDQVFTLPGPDFDVPTLLAAFKNRSLDTADLVALSGAHTVGRGHCSSFTSRLPPNADDGTMDPAFRRTLAAKCAKDASAAQVLDVRTPNAFDNKYYFDLIAKQGLFKSDQGLINDQTTKRAATRFALNQAAFFDQFARSMVKMSQMDVLTGNAGEVRLNCAVRNAARVVSADQLETAAGDEGLAADA

SEQ ID NO: 65620 - protein, 494 aa, Zea mays
  Clone ID: 700237838_FLI.pep
AERHNSLAGFSPLCALPAAPCSQRSPQDLLRARRPHRRQGGGAAAYSPGPPSGATLPFSGTSSNFGVPVMQRDTSSSDVSASHVGRVRRRKHPSEASTDGNRANGQPLLVNDQNKYKSMLIRTYSTVWMIGGFAFIIYVGHLYIWAMVVVIQIYMARELFNLLRKSSEEKQLPGFRLLNWHFFFTAMLYTYGRFLSRQLVNTVTSDHLLYKVVSGLIKYQMFICYFLYIAGFVWFILTLKKKTYKYQFKQYAWTHMILLTVFAQSAFTVANIFEGIFWFLLPASLIVINDIFAYLFGFFLGRTPLIKLSPKKTWEGFIGASVTTIISAFLLANVMGRFQWLTCPRKDLSTGWLYCDPGPMFKPEHYSLGESVPHWFPWKDLAIMPVQWHALALGLFASIIAPFGGFFASGFKRAFKIKDFGDSIPGHGGITDRMDCQMVMAVFAYIYHQSFIAPQNFSVEIILDQILRNLTYEEQKYLYEQLGEMFHERQLGQS

SEQ ID NO: 65621 - protein, 460 aa, Zea mays; identical to SEQ ID NO: 38996
  Clone ID: 700240185_FLI.pep

SEQ ID NO: 65622 - protein, 302 aa, Zea mays
  Clone ID: 700240552_FLI.pep
THYDPVSNSAMGQASRAHQLLASLAAIYVTLAISITQQQHVAGNMTDDLEIMWGNAKVVTDGSGQQAIALALDRSTSSAFRSKKTCQFCRVDIEIKLVPGNSAGTVTTFYMITENPWQFHDEIDIEFLGNSSGQPYTMHTNMYARGQGAREKQYKFDFDPTQEYHKYTIIWNKDWILFLVDDKLYRQIKNNQIDGAPYPYYYPMRVYATIWNADEWATQGGQVKTDWSQAPFTAYFRNYRAISCNSFMASPLCLPGSGWFDQQLDESRKQQLAQVDSSNKIYDYCTDSRRYKNGLPRECQVH

SEQ ID NO: 65623 - protein, 318 aa, Zea mays
  Clone ID: 700240655_FLI.pep
LVQKMEQAGDETPGEIGREAARREAALRSGGGDAGERVDKAVVDGGEDERFRVQRKWRRFLAHVGPGALVAIGFLDPSNLETDMQAGADFKYQLLWVILVGMVFALLIQTLAANLGVKTGKHLAELCREEYPRSVNICLWIIAEMAVISDDIPEVLGTAFAFNILLGIPLWAGVVLTVLSTLLLLGVQRFGARKLEFVVAAFMFAMAACFFGELSYLRPSAGEVVVGMFVPRLRGKGAAANAIALFGAIITPYNLFLHSALVLSRKTPRSVKSIRAACRYFLVECSLAFVVAFLINVAVVVVAGSICNAAGGNLSPVD

SEQ ID NO: 65624 - protein, 467 aa, Zea mays
  Clone ID: 700241632_FLI.pep
IHHPSPCRITFSTAKGHKRSSKPHQQLPLRSHPTAAGEISRMPLAGRRDGPLMLRGGGGGKPLSRGSRIAVAVAVGVALGCVCAFLYPNGLFFRPSASALQWTHQVDSTACESSRQVTNLKSQVSSLERENVELRRQINELSMKLQIAGQGENETLYKPGPFGAVKALRTNPTVIPENSVNPRLAKILEEVAVKKELIVALANTNVREMLEVWFSNIKRVSIPNYLVVALDDNIESLCKSKGVPVYRRDPDEGIDNIAKTGGNHAVSGLKFRVLREFLQLGYSILLCDIDIIFLRNPFDHLYRDSDVESMSDGHNNMTAYGFNDVFDEPSMGWARYAHTMRIWVYNSGFFYIRPTVPSIELLDRVAGRLSREPKSWDQAVFNEELFFPSHPGYEGLHASRRTMDFYLFMNSKVLFKTVRKDAGLKKLKPVIVHLNYHPNKLERMKAVIEFYVNGKQDALDHFPDGSE

SEQ ID NO: 65625 - protein, 346 aa, Zea mays
  Clone ID: 700242053_FLI.pep
GLNRSTGALPHAPRRLFSTSFSSGAVDQPTTRHQPTAKRRMAAETKPAAASGVAGEMEVEAYRRLFPVAFLERHLGESVRIDARRLREARPTTVALGAVSSAHGSALARLGDTAMLASVKLEVMSPPAEHPDEGSVAVEFHMPPICSPLVRPGRPTDVAPVISKALEDVLTSSGMLNLKDLCLITGKASWLAYLDIYCLNADGSLFDAALISAVAAFTHLEIPLVSVGDDGRLFTVGGNDGKNKFELVNREKRKLTLGAIPLSLTCALHKDEILADPTSEEESIIETYVTVVVDSSDRLVSLQKLGGAVTCMATIKECISLAKERRRSLREILLDSIKAMEVDQTE

SEQ ID NO: 65626 - protein, 421 aa, Zea mays
  Clone ID: 700242430_FLI.pep
VAEEAVVPAPAREVVVGYALTSKKAKSFLQPKLRGLARKKGILFVAIDQKRPLSDQGPFDIVLHKLTGRGWQQLLEEYREAHPEVTVLDPPGAIANLLDRQSMLQEVSELDLTDCHGKVHVPKQLFVNTDPSSIPAAVRRAGLSRPMLPNHIDVEPSPDARSRRGQLNPEARMARYDRAITVFSPDGHLFQVEYALEAVRKGNAAVGVRGVDTVVLGVEKKSTPKLQDSRSVRKIVSLDTHIALACAGLKADARVLINRARVECQSHRLTVEDPVTVEYITRYIAGLQQKYTQSGGVRPFGLSTLIVGFDPYTQKPALYQTDPSGTFSAWKANATGRNSNSMREFLEKNYKETSGKETIKLAIRALLEVVESGGKNIEIAVMTHEDGLHELEEAEIDEYVAEIEAEKAAAEAAKKGAPKGN

SEQ ID NO: 65627 - protein, 279 aa, Zea mays
  Clone ID: 700242506_FLI.pep
NQSLLPCRQGRGFINLSTSPSSPGEPLASAPLLCPALPRHTNQGAKNKRRLSHCLPRLVFAEASSRDDMELAEAPAPVPDEDGLDERGVALHLPRLLAGVVSGALTGLFALAGALTGAVTGAVAGRASDSGGVLRGAGLGAVAGAVLSIEVLEASRAYWCSSDRLGSHGGASSMADFIEQLLRARFVQEQFTASGYASYRWQLSISYFGQDDLYDIFGDISSEGLSQESLKKLPHHVVSDQTRDLLGEILCCPICLQVRSEQARSYHYRVTVKETFCHN

SEQ ID NO: 65628 - protein, 451 aa, Zea mays
  Clone ID: 700243094_FLI.pep
INKNQSFVLLPPARPAPVTNLPLPPSVAMARKKIREYDSKRLLREHLKRLAGIDLTILSAQITQSTDFAELVSQQPWLSTMKLVVKPDMLFGKRGKSGLVALNLDFNQVKEFVKERLGVEVEMGGCKAPITTFIVEPFVPHDQEYYLSIVSERLGSTISFSECGGIEIEENWDKVKTIFLPTEKPMTSDSCAPLIATLPLEARGKIGDFIKGVFAVFLDLDFSFLEMNPFTMVNGEPYPLDMRGELDDTAAFKNFKKWGGIEFPLPFGRVLSPTESFIHELDEKTSASLKFTVLNPKGRIWTMVAGGGASVIYADTVGDLGYASELGNYAEYSGAPNEEEVLNYSRVVLDCATADPDGRKRALLIGGGIANFTDVATTFNGIIRALREKESKLKASRMHIYVRRGGPNYQSGLAKMRKLGAELGVPIEVYGPEATMTGICKQAIECIMAAA

SEQ ID NO: 65629 - protein, 474 aa, Zea mays
  Clone ID: 700082519_FLI.pep
TAPFLSLPHLRSSPSCRLRRCWLLRHSPSPEICSTMATRRHILLLAAAFVSLLALEAVEGLEEGPRGRRLLVLLDDLAVRSSHSAFFGSLQARGFDLEFRLADDPKLSLHRYGQYLYDGLVLFAPSTPRFGGSVDQNAVLEFIDAGLDMILAADSSASDLIRGIATECGVDFDEDPEAMVIDHINYAAMDVEGDHTLIVGDDLIQSDVILGSKKIEAPVLFRGIGHTANPSNSLVLKVLSASPSAYSANPKTKLSLPPSLTGSAISLVSVMQARNNARVLLSGSLDLFSNRFLKSGVQKAGSKTRYERAGNEQFVTETSKWVFHERGHLKAVNVKHHKVGETNEPGMYRINDDLEYSVEIYEWSGTSWKPYVADDVQLQFFMMSPYVLKTMSNDNKGLYSTSFKVPDVYGVFQFKVEYQRLGYTGLSFTKQIPVRPYRHNEYERFITSAYPYYTASFSTMCAFFIFSLVYLYHK

SEQ ID NO: 65630 - protein, 622 aa, Zea mays
  Clone ID: 700085945_FLI.pep
LLALHVSISKAGLARVGQLDRPSLATSRSAGMHASLGMSSSSSSSSRGWSSYSPLLFATLLTLLLCSQLAIAKEQYHEFVVKEATVTRLCGTQQQRIMTVNGQFPGPTVEVAEGDALIVRVRNRGSYNVTVHWHGVRQMRTAWADGPEFVTQCPIRPGTSYTYRFTVAGQEGTLWWHAHSSWLRATVHGALIIRPRAGVPYPFNAGDTPAREITIILGEWWNMNPIDVVRTATRTGAAPNISDALTVNGQPGDLYKCSSNGTTTFSVTSGETNLLRFINAALNTELFVSLAGHTMTVVGADASYTKPYATPVILIAPGQTTDVLVTFDQPPSRYYLAARAYASAQGVPFDNTTTTAIFDYGTGASNSSSPAMPTLPAYNDTATATAFTTSLRGLRAADLPARVDESLFFTVGVGLFNCSSGQTCGGPNNTRFAASINNVSFVLPSTTSILQAHYAYAAGGATPAGVFTADFPANPPVRFDYTAPNVSRALWQPVPGTRVYSLKYGAAVQLVLQGTNVFAAENHPIHLHGYDFYILAEGFGNFDAAADTASFNMDDPPMRNTVGVPVNGWAVIRFVADNPGVWLMHCHLDVHITWGLAMAFLVEDGVGEMQSLEAPPSDLPIC

SEQ ID NO: 65631 - protein, 324 aa, Zea mays
  Clone ID: 700218977_FLI.pep
QSCVFLTQLRPSRGPRGPTPGGFTQGTMAFTSSLAPFFPPSGTFRAHPARRLRADAPGRFVASCLPPPDVVVTREQGKNARLISALEKHNVHPLELPLIKHVEGPDTDRLSDVLRNDKFDWIIVTSPEAAAMFLQGWKTAGSPKVRVAVVGEGTARVFHEVSESDDQSLELAFSPSKALGKVLASELPRSNENSCKVLYPASAKAGHEIEDVLSERGFDVTRLNTYTTVPVEDVDPLTLNLAISAPVVAVASPSALRAWLNLISKSDNWNNSVACIGETTASAAKKLGLKSIYYPTTPGLEGWVESILEALRVHRTASKEAPKR

SEQ ID NO: 65632 - protein, 354 aa, Zea mays
  Clone ID: 700223285_FLI.pep
AEGCPRMMGWNGTQRCTTITTSQRNVCGGAFHCPCSLQMRPVTRSLSSCLPPPEKKSAMFLWMMSPSKLSRTFRWLSLTLRGVPCHVSFRPPPPTSRLYPNPCASLSSPMNRRNAMYTGAIPSTNASKCRQKCCPKHLKTVSIHVAFSTSYGLGFTYRWLNVQPSCKSTLWSLMRWDTRNGTSPAIRHSEPAYGQLYGLNLQSSSCFSLLLYGWISVHPVLWYLHGSWSCSATFSRARHLMFPSSWRQVGQWFSTLCLQLEQIVWPFGHWSIGGRIELVHTGHSSKSFKPHSDDNATLASDADVDHGLLAESTSSMIPPSDSESPSSSPQSDSGTTVTMLLPGAIVKSSFQVRK

SEQ ID NO: 65633 - protein, 302 aa, Zea mays
  Clone ID: 700223490_FLI.pep
EEKAREKELNDLFKVAVSQPKVPVGVDPKSILCEFFKAGQCQKGFKCKFSHDLNVQRKGEKIDIYTDKRDAETMEDWDQETLEKVVESKKMEYQQNKPTDIVCKYFLDAVEKKQYGWFWVCPNGGKECHYRHALPPGYVLKSQMKALLEEESEKIAIEDEIEDQRKKTKTTTPMTTELFMEWKRRKAEEREAGQAALKAERAKNDRMSGRELFMADASVFVDDAEAYEVYEREESEANEESTNKSQNPGPSSSTSNGKEVEEPDDDDIDVDDDLDIDELNELEASLSRTSIQIREPGEGTSS

SEQ ID NO: 65634 - protein, 202 aa, Zea mays
  Clone ID: 700224009_FLI.pep
LCQLALLPCHTCMVQVHAVFWQVVLVGHSAGGLSVTHAMHLFRDKIKQAIFVAATMLPFGYQSEQDIKDGAPDLSEFGDDVYDLKFSLGDDRPPTSVALREEHQRAILYQQCTHEDSTLASILLRPWPAALGAARFGRADDGAVNTVRRVYVKTANDRMLKPEQQEAMVRRWPPSEVAAMDTDHSPFFSAPERLFELIIKSL

SEQ ID NO: 65635 - protein, 161 aa, Zea mays
  Clone ID: 700157645_FLI.pep
YRSITLNFTMAAEEDVKQRQIIENRARNISHNVRCTECGSQSIEDSQADVAILLRKLIRDEIKAGKSDKEIYKKLEDDYGETVLYAPKFDLQTAGIWLSPVIVGGIAAGIWAYQRHRQRTNVHIMALNLVRGVPLTPREKETMLDILTPPPAPRKWWWPGK

SEQ ID NO: 65636 - protein, 200 aa, Zea mays
  Clone ID: 700164437_FLI.pep
VAAEGSKQREMKLRVVCRKLYDYVRYDLKEIAFPSSLPDPPHIKKRPKLSWHERWCILKEATRLYGASWVRDIGPELRPNDYKKAAEDVEEQSSNGSHPSSGSDRKGKASSEPTVLEDLAVAARGGAETLKPALRRIYMARASTYTDAMKNFVETYQEGLKDQLQEKAHGGEGGGGGGRYHHQEQKEHGNEDEASKPPPP

SEQ ID NO: 65637 - protein, 360 aa, Zea mays
  Clone ID: 700165755_FLI.pep
TAPAPKPSPSVAPAPRPSPPPVTPVPPAPKPPPPPPPPPAPLQPPSNSTPTTSSALGQLSPSFYAQSCPDVELAVRDVVRSASTLDPSIPGKLLRLVFHDCFVEGCDASVLIQGNGTERTDPANLSLGGFNVIDAAKRLLEAVCPATVSCSDIVVLAARDAVVFTGGPAVPVALGRRDGLVSLASNVRRNIIDTGFSVDAMAASFTAKGLTLDDLVTLSGGHTIGSAHCNTFRERFQQVANGSMTPVDGSMNADYANELIQACSANGTVPAGTAAVGCDSGSASVFDNTYFANLLGGRGLLRTDAALVQNATTRAKVAEFAQSQDGFFASWASSYARLTSLGVKVGADGEVRRTCSSVNG

SEQ ID NO: 65638 - protein, 145 aa, Zea mays
  Clone ID: 700166796_FLI.pep
VKQQTLNCKAAVPHRTIYSSSSSLPSCSSSSTSDFDLLEPSASSPSRTSALAFLELVFSFLLALPSCFLLPPYFAFSSSDIERHFSPAALLTSFTPLSSGCFSRYCGLNSAKNAKKGVSPRLAPPTFLRLAPVALNEVSFMATSG

SEQ ID NO: 65639 - protein, 322 aa, Zea mays
  Clone ID: 700168401_FLI.pep
YYSSSSHSQVCSRESAMASLQVTPTSAFTQWNELKFEGLYLFHKYQGSGANQTQVISNKAPIGIGATVVNNWTVCDGPGPNAKLVARAQGLHIQAGNWVNSFSLVFVDQRFSGSTLEVTGIVVESGEWAIVGGTGQFAMANGVISKKLHGKTSEGDIIQLTIHAFCPVLGPTKRSATKVGPWGGSGGSPMDITAEPQRLKSITVATGIAVTSIAFSYVDSAGQTQSAGRWGGSGGETEPVIQLGDSEVLTELSGTIGNVDGLTVITSIKFVTSLKTYGPFGAWGDGSDTPFAIPVQQGSAIVGFFARAGIYLDALGVYVRSL

SEQ ID NO: 65640 - protein, 188 aa, Zea mays
  Clone ID: 700172395_FLI.pep
TSSTPRAQYTGHTQIRANHRRSVIIQPERPFLFSFTQRDRERSQAAKATHRFYRSALPPPLALSASAPSKSTASKQAGAMGLPMRRERDAEAELNLPPGFRFHPTDDELVEHYLCRKAAGQRLPVPIIAEVDLYRFDPWDLPERALFGAREWYFFTPRDRKYPNGSRPNRAAGNGYWKATGADKPVAP

SEQ ID NO: 65641 - protein, 380 aa, Zea mays
  Clone ID: 700172536_FLI.pep
DVDDQRRAHGAVGADGGNGGHQRRDRRHDGADQAGTEPGHEQAGPHHFPPDGGHPVPWTHRLLQGKEDETEVHFRDLRVHVSQWNSWAGAASVHTVCRIGLHDGNIRCNVRKYASSGYFPDITCFQVRSTGGEEQVGERQDLRDAHLPRRRNDAHLLQGFSTDTNHHRRHVVSSIQRRRPHQATSRRARHGPVGAGLRLHAGQRRRLRAVAAPAAEVHPQVPGRVLGHGVHVAIQLRPGRGAGPVDPEDQPCRVGPQGHRGDRHGGVLWRSGVWHWVPPAHLLRGEERPRVHCCLQPARPDLRRRHRSLHPPRASLPRKRAGVSAGYSWALPCTVGQERGSCCCCCFGKASAGRGRTTRESVIFFLYCSSKYSVPEQRRT

SEQ ID NO: 65642 - protein, 638 aa, Zea mays
  Clone ID: 700208501_FLI.pep
FVPFLIQASRDDCRPPPLSRLPLTRHHWTTPNGEGVREIGSSSGAWQGSCIALRRAAAMADSYGDGKGPSLKSQSQNQQPRPGPRLKPAIEMEDLINLLHGSDPVRVELTRLENELQFKEKELGDAQAEIKALRLSDRAREKAVQDLTEELAKVDGKLKLTESLLESKNLEAKKINDEKKAALAAQFAAEATLRRVHAAQKDDDMPPIEAILAPLEAELKLARQEIAKLQDDNRALDRLTKSKEAALLEAERTVQMALAKASLVDDLQNKNQELMKQIEICQEENKILDRMHRQKVAEVEKLTQTVRELEESVLAGGAAANAVRDYQRKVQEMNEEMKTLDRELARAKVSANRVAVVVANEWKDGDDKVMPVKRWLEERRILQGEMQQLRDKLAIAERAARSEAQLKEKFQLRLKVLEEGLRMSTSRTNVSGTRRQSIGGADGLSKANGFLSKRPSFQMRSSVSTTTTLVNHAKGASKSFDGGCRSLERYKGHVNGNGMNVSTDSSEDKDSNNSDEKCNEFASAESEDSVSGVLYDMLQKEVISLRKACHEKDQSLKDKDDAVEMLAKKVDTLTKAMESDAKKSRRELAAMEKELAAVRLEKEQDNRARRFGSSSGSASSSQLPPGRTLPRSGSARNM

SEQ ID NO: 65643 - protein, 178 aa, Zea mays
  Clone ID: 700209880_FLI.pep
LSCHMATSRLALVSVFAAAVLLGMASAATYNVGEPAGSWDLRTNYGTWVSSKRFHPGDQTVFKYSPQAHDVVEVNKADYDSCSIASPVATHNSGNDAIALASPGTRYFICGFPGHCDAGMKIQINVVPSANSLGPASAPAANSPVSPPPMSAPSSAATKATGFGALAAVMIAAGLMAY

SEQ ID NO: 65644 - protein, 401 aa, Zea mays
  Clone ID: 700210153_FLI.pep
FQYRFCPQQVPAPPPFASSPHSARSHPSRPPRGYRSRSMASAVVVDAGDAPEPTVRNLLDQESLKWVFVGGKGGVGKTTCSSILSVLLAGVRPSVLVISTDPAHNLSDAFQQRFTKFPTLVRGFTNLYAMEIDPKVENDDLSNEGMEGFLSELTNAIPGVDEAMSFAEMLKLVQTMDYSVVVFDTAPTGHTLRLLQFPATLEKGLEKMMELKNRFGGLLNQASRLFGLGDELNEDAMLGKLEGMKDVIEQVNRQFKDPDLTTFVCVCIPEFLSLYETERLVQELAKFEIDSHNIIINQVIFDEEAVESKLLKARMKMQQKYIDQFHMLYDDFNITKLPLLSEEVCGVQALQNFSQHFLTPYKSTLKRGTVEELEQRITILKSALQEAETELDRVRKGKQSV

SEQ ID NO: 65645 - protein, 387 aa, Zea mays
  Clone ID: 700210427_FLI.pep
LTCLVPSEFWRLSRLVTPASLPFESYLTPERSSSSSIGLRALGFLMGDSRRHEPWVILQPDGWLRRPALGLNSLMQIPDKIQSSLKVQFGRFLNKDGAVRRMSAEISSEKAKQSCSAAASAEVRLDRHLQAWWDNPSWTDEPPEIKVNVPEGSLCNLNLRFKAGLPPDAVYNIIIDPENKRVFKNIKEVISRKVLLDEGSRQVVEVEQAAIWKFLWWSGTFSVHVFVDQNRKKHTVKFRQGRAGFMRKFEGCWTIEPLFVDKELCLPLNPHSLEEYESCTGGRGRVGSAITLDQLIEPALLPPPPISWYLRGITSRTTEMLVNDLIAETARLRTISNNANAKQGTEETGDANIGDPVRECGDIKERWRQRRKSGRHGSSLRLTSRFL

SEQ ID NO: 65646 - protein, 655 aa, Zea mays
  Clone ID: 700212292_FLI.pep
GPSSMQPIRRRHRGFALLCLSAALLAAATLLPGAAVAEGVTPSEARRLRDEVKDMFYHAFDGYMKYAFPLDELRPLSCQGEDSLGGYALTLIDSLDTLALLGDKEKFGAAVEWVGKNVHFDINKTVSVFETNIRILGGLLSAHLIASDYATGMRIQSYDDQLLHLAADLAQRLLPAFDTPTGIPFGSVNLLYGVDENESKITSTAGGGTLTLEFGILSRLTNNTVFERVTKKSVRGIWSRRSKLNLVGAHINVFTGEWTQKDAGIGTSIDSFYEYLLKAYLLFGDEEYLYIFQEAYKAAMHYLHHDPWYVEVNMNSGATVWPLFNSLQAFWPGLQVLAGDVDPAIRTHAAFFSVWKKYGFTPEGFNLATSTVQNGQRSYPLRPELIESTYWLFKATRDYRYLDVGRDILASLQYGARCPCGYCHISDVETHKQDDHMESFFLAETVKYLWLLFDLAAGPDNIVENGPYKYIFSTEGHLLPVTPEIALEDEHCSYFGAFCNGGADHGYGASASSTKHRNGNYTQLDDIQTPSSHYSMSNVLFTPGYIKGVCPGLTHAQKFGISYSDEEDNFIEQTSESLDHHGESAIESSVQDQSSSIILISHPVASQQDEAFESESGSQDHANIVVTSDSDSDSTSRDNTVGSPGMNSEELMDDI

SEQ ID NO: 65647 - protein, 248 aa, Zea mays
  Clone ID: 700212508_FLI.pep
DTAAVQTVECRLAEYDSSRTSPFPCAAADEGVGGIMVAPDVKAETMKLMDQRGALEAEMDAIIARLTAAGGPGITGGLVDAEGFPRSDIDIPNVLAQRRRLAELRNDHKDVTNKIGKNLEVLHSAKLSRNEQSTSRRSDTTDPSHFGSSQSEPMEEDHVTGLPFAMIDEIADGSPASVDGLQLGDEIVKFGNVEAGDQLQERLMSEALSNEDSQVSLVIIRQGSVVNLTITPRKWHGRGLLGCHFRML

SEQ ID NO: 65648 - protein, 371 aa, Zea mays
  Clone ID: 700212615_FLI.pep
LSSGPRAQHTNPPVVSLTCGLRQTTSSRVTIQIPFPLRRTSREAVGAGREGEALAPSLPRTPMDPPRAVAFLLILLPVLAPVASGVPFVVLHGIGDECGNDGLSSFTKMLGEWSGSKGYCIEIGRGAWDSWLMPLQEQANTVCKKVKKMKELSEGYNIVGLSQGNLIGRAVIEYCDCGPPVKNFISIGGPHAGTASVPLCGSGFLCILIDDLIKSEIYSDYVQAHLAPSGYLKIPTDMEDYLKGCKFLPKLNNEIPSARNTTYKERFSSLENLVLIMFEDDAVLIPRETAWFGYYPDGAFSPVLPPQETKLYTEDWIGLKTLDEAGRVKFVSVPGGHLRITRSDMKKYIVPYLTPEASSKKNIHIHRMLSL

SEQ ID NO: 65649 - protein, 411 aa, Zea mays
  Clone ID: 700212808_FLI.pep
QCVASRGLGLTAHIIDHCKLVLKFPEGTNSTWYNAQFKIFEPLEYKYDVCETILLWEQYRNMTTVLTREYLDVRPDGWLDYAAKRIAQLGADKCYNHTLCDELLSILLPAKPPFHPRQFATCAVVGNSGDLLKTEFGQEIDAHDAVFRDNEAPVNKKYAKHVGLKRDFRLVVRGAARNMAPILKGSSDEALIIKSLTHKEINAVIKELPNPVYLFQGIVLRRGAKGTGMKSIELALSMCDIVDMYGFTVDPGYTEWTRYFSAPRKGHNPLQGRAYYQLLECLGVIRIHSPMRAQRVEDWSDIPSKEEIRRAHTIAFRLKKHETGQLAELGPFSNCKVWGTVDPDYGPVSGTSDMSETRKNSNYSKWELLPFEKLRREAQEHHIQMGGVSLYKMDGNKLDDLVCVRHQRSSS

SEQ ID NO: 65650 - protein, 378 aa, Zea mays
  Clone ID: 700212862_FLI.pep
LANEQAAELHSRQTTMDQSNISNKHMTMTTLMLLLCVIAIADCICHAAVAARVEPSTTVGRTTGGDEAMMMARYKKWMAQYRRKYKDDAEKAHRFQVFKANAEFIDRSNAGGKKKYVLGTNQFADLTSKEFAAMYTGLRKPAAVPSGAKQIPAAGSKYQNFTRLDDDVQVDWRQQGAVTPVKNQGQCGCCWAFSAVGAMEGLIMITTGNLVSLSEQQILDCDESDGNQGCNGGYMDNAFQYVINNGGVTTEDAYPYSAVQGTCQNVQPAATISGFQDLPSGDENALANAVANQPVSVGVDGGSSPFQFYQGGIYDGDGCGTDMNHAVTAIGYGADDQGTQYWILKNSWGTGWGENGFMQLQMGVGACGISTMASYPTP

SEQ ID NO: 65651 - protein, 330 aa, Zea mays
  Clone ID: 700213449_FLI.pep
GIYPVAPPWILVCFLLPGLLSSPKSIPRRQRRASQIFHLLHFQPRPHTSSRNLLPMAGGGGAGAGSSSGGGGGAAGRATGTAAAAATATTPSARFATAASIRASSSTPTPRATPSGYPAPGTGSAPQQLLANANWPYGMAGRYGMQSSGWPFGNGNPNQFLGVPKDWRNGDWFCSCGSHNYSSRTQCKECGAPVPSGIPSTTMKATSDASSTLGTKRLASEDLANDWDNKRLNPGNDNYPLSTGAANNLFLGIEQGAGSSNGQSAFPKFDNGSSVALPSGQGMSGLMGKGAKWRDGDWLCNNCNNHNYASRAFCNRCKTQKESAVHPGVL

SEQ ID NO: 65652 - protein, 174 aa, Zea mays
  Clone ID: 700213808_FLI.pep
EKLVEEGMDRIVGSKYKLGRKIGSGSFGEIYLATHVDTYEIVAVKIESSKTNHPQLLYEAKLYNALQGGTGIANIKWCGIDGDENILVIDLLGPSLEDLFVYCGRRFSLKTVLMLADQMITRIEFMHSKGYLHRDIKPDNFLMGLGRKANQVYVIDFGLAKRYRDSATNRHIPY

SEQ ID NO: 65653 - protein, 408 aa, Zea mays
  Clone ID: 700256784_FLI.pep
AFCGGRRLVPSGGPVSMAGPKFGSFKAEKGDSAAAAGAAAQRRDPYEVLGVGRNATEQEIKSAFRRMALKYHPDKNSDDPVASEKFQEATFSYNILSDPDKRRQYDASGFEAIEADSQELELDLSSLNTVNTVFAALFSKLGVPIKTTVSATVLEEALNGSVEISQLQLGKSLCRKVEKQSAHFYSVDITDKEAKMGLVCRVHSTSKSKFKLLYFELEDNGGLSLALQEDSAKTGKVTSAGMFFLGFPVYRFEQNNSAAAAKDPDSAFFKRLDGFQPCEVNELKAGSHYFAVYGDNFFKSASYTIEVVSGEPFSAQKEKLRSVEAKIIAKRSELSKFESEYREVLAKFTEMTSRYAQEMQTIDDLLKERNAIHASYTNNPTLQRSSSSSKGKSPSKGSRSEDDQTVKK

SEQ ID NO: 65654 - protein, 432 aa, Zea mays; identical to SEQ ID NO: 59269
  Clone ID: 700257680_FLI.pep

SEQ ID NO: 65655 - protein, 396 aa, Zea mays
  Clone ID: 700258466_FLI.pep
PPPANRSSVSNSPSMAEANVAAASLFGADGRLCSADILAPPEVRARIEVAVLNFLAALASPSSPAISVLPLISRSSANCSLRSGLLNDVSSVYLSYTFCKRSLTHNPKAFVRVWKVMEMCYKILGEGKLVQQRELFYKLLSDSPKYFSCQRHVNQAIQDVVSLLRCTRQSLGVMASSRGALIGRLVLHEPDGEQIDCSILGASGHAITGDLNLLSKLNLSSGSRYIIVVEKDAVFQRLAEDRLYNQLPCILITAKGYPDIATRFILHRLSQTFPNMPIFALVDWNPAGLAILCTYKYGSISMGLESYRYACNVKWLGVRGGDLHLIPEDAFQELKPRDLQIAKSLMSSKFLQESHRAELALMVERGKRADIEALYSHGFDFLGKYIARKIVQGDYI

SEQ ID NO: 65656 - protein, 664 aa, Zea mays
  Clone ID: 700259447_FLI.pep
PPAHSPLGADCRDLPGPLPRGVPALDPTSAMTVAALQAMDALSRRATMLRDSLRRSQGNTDGMVTILGSFDHRLSALEAAMRPTQVRTHAIRTAHENIDRTIKAADGILSQFDLARRAEATILRGPHEDLESYLEAVDVLKGISRFFSSNKNFKSSEGVLNHVNNLLAKSTLKIEEEFKQLMSTYSKPIEPDRLFDCLPKSLRPTKGDHESDGGSHHPSKGLEAAVYRTPTLIPPRILPLMNDIAQQLVQAGNQQTCYKIYRDYRASALEVSLRKLGVEKLTKDDVQKMQWEALEAKIGNWIHFMRIAVKLLLAGERKICDQIFDGVNFNKGHCFAELTANSIITLFSFGDAVAKSKRSPEKLFVLLDMYEVMRELQPEIDEIFEGKPCTEMREAASSLTKRLAQTAQETFADFEEAVEKDASKTIVQDGTVHPLTSYVINYVKFLFDYQSTLKLLFQEFDSGTEAESQLAAVTTRIMQALQNNLDGKSKQYKDPALTHLFLMNNIHYMVRSVRRSEAKDILGDDWIQRHRRIVQQNANQYKRVAWAKILQTLSVQGAGSGGDLTSSSVSRATIKERFKSFNTQFEELHAKQSQWIVPDQELRESLRLAVAEVLLPAYRSFIKRFGNLVDNNKNPQKYVRYSPEAVDQLLGQFFEGQQWAEQKR

SEQ ID NO: 65657 - protein, 260 aa, Zea mays
  Clone ID: 700262622_FLI.pep
GLSARGMASVQVSGAGVGAAAFSVKGKASTGALRLRSTLTFGEVCPARRAFRGLVVRAATVVAPKYTTLKPLADRVLVKINSSEEKTTGGILLPTTAQSRPQGGEVVAVGEGRIIGDKKVDVSIQVGAQVVYSKYAGTEVALNDHSHLVLKEDDVIGILETDDVKDMKPLNDRVLIKVAEAEDKTPGGLLLTETAKEKPSIGTVVAVGPGPLDEDGERLALSVSAGSTVLYSKYAGSEFKGADGTNYIVLRASDLMAVLS

SEQ ID NO: 65658 - protein, 499 aa, Zea mays
  Clone ID: 700263090_FLI.pep
RLLQSIPSTPAAKSRHTEAAAMAELKRLSESRDLTRIERIGAHSHIRGLGLDSSMEARDASEGMVGQLPARRAAGLILQLIRQGKIAGRAVLLAGQPGTGKTALAMGIAKSLGAETPFASVAASELFSLDLSKTEALTQAFRRAIGVRIKEETEIIEGEVVEILIDRPLSASAAGGSSAAPTGATAAGKSGRLTLKTTDMETVYELGGKMIEALGKEKVQSGDVIALDKASGKVTKLGRSIGRSRDYDAVGPHTKFVKCPDGELQKRKEIVHCVTLHEIDVINSRTQGFLALFTGDTGEIRAEVREQIDTKVAEWREEGKADIVPGVLFIDEVHMLDIECFSFLNRALENDMAPILVIATNRGITSIRGTNYRSPHGIPPDFLDRLLIITTQPYTEDEIRKILDIRCDEEDVEMSADAKVLLTKIGVETSLRYAINLITSAALACQRRKGKVVDMEDISRVYQLFLDVKRSTQYLMEYQSQYMFNEVPGEADGEDAMQS

SEQ ID NO: 65659 - protein, 344 aa, Zea mays; identical to SEQ ID NO: 59183
  Clone ID: 700263524_FLI.pep

SEQ ID NO: 65660 - protein, 386 aa, Zea mays
  Clone ID: 700264172_FLI.pep
TERGLFLFRQGNHHSTANTHTRTHRLTDMSWLRLRFRLLLVWNGDPVGTGLHVLPQQIRQRRHQLPNLPVSDGFAVPLDDGQHGEAASDERHLGAALGVLGRDVPGADAREQAGVHEARRQREHPLGRAPAEDLVEGREHELPLGRHERHVHHGALGHVPLVVHPHGREGAAVLGVHDGQHVGKVVHVLHGRELRRLHGHRGRDRAHPGAVHPALLVLRRDHHAVERRRRAAPGGQQEVAGPGAEPVADGAHAAARGGGHLDQDAPQRLARERGRAHARRRGRPEEAVQVRVQLVQGAVQDHGCVEHAVAPVDHVVVDGENHHGRVQDDAAEHARVHGRVGRRPRCRRRRRPFLLHLLKHLGARLVHRDLTISLDVGTHLSANGIF

SEQ ID NO: 65661 - protein, 516 aa, Zea mays; identical to SEQ ID NO: 56292
  Clone ID: 700264645_FLI.pep

SEQ ID NO: 65662 - protein, 780 aa, Zea mays
  Clone ID: 700265067_FLI.pep
LLSDSFLPTAYAERRLVAENTSLPNMHKEELETIIRNQLRKPQLPPSSYDTAWVSMVPVRGSHQTPRFPQCVEWILQNQQDDGSWGVSQSDSSVSKDVLLSTLACVLALKRWNVGRENIWRGLHFIGRNFSVAMDQQFTSPIGFNITFPGLLNLGIDMGLEFPVRQTDVCGILHRREMELKRLAVDSSFGRKAYMAFIPEGFGNMLDWDQVMKFQRKNGSLFSTPSTTAVALIHKYNDQALQYLNLLVSEFGSAVPAMYPSMVHCQLSMVDALEKMGISQRFVSEIESILDMAYNCWLQKDEEIMMDIATCAMAFRLLRMNGYNVSSDELSHVAGASTFHDSLQGYLNDTKSLLELYKTSKVTLSENDLILDRIGSWSGNLLKDKMCCSRVQKDSIFGEMEYAVNFPLYSTLERLEHKRNIEHFDAWGSLMLTTKSSSFRINQEFLALAVEDFSFSQRVYRDELRHLDSWVKENKLDQLQFARQKLTYCYLSAAATVFSSELSDARISWAKNGVLTTVVDDFFDVGGSKEELENLIALVEKWHAHHAVEFYSEQVKIVFSAIYTTVNHLGAMASAAQGRDLTNHLVEIWLDLLRSMMVEAEWQRCQYVPTVEEYMTNAVVSFALGPIVLPALYFVGQELLEHAVKDEEYDKLFRLVSTCGRLLNDYQSLEREGNQGKLNSVSLLVLHSGGSMSIEAAKKAMQKSIDVSRRDLLRLVLRKESAVPRPCKELFWKMCKILHLFYSQNDGFSSPKEMVSAVNAVINEPLKVQNSTTFLSSSSR

SEQ ID NO: 65663 - protein, 285 aa, Zea mays
  Clone ID: 700265678_FLI.pep
MTGKKTTASSAGRTRKKAKVVLEDEEEAGLEDEEEATVTLSVEKDALECDICCLPFQSEVFMCKNGHSVCAKCCIRTNGKCWTCSERIGDIRCRPLEKLLAAATTSCMFKSNGCYDVISYLEKVTHEETCQRAPYKCPVHGCAYSGLRLGYHVAQDHGHDDDGLASVVFIYGKAVATVRKDEPFRVLLQRNTERVFLLLNGHDLLQGRSLSLLCLGPRFQDGVEVELKYKMEVSGGAPGALTLSASGTIPFARRLDGFQAKGFLFVPDAYWGSAGSISVTVRIYV

SEQ ID NO: 65664 - protein, 428 aa, Zea mays
  Clone ID: 700266057_FLI.pep
PAVQPDLFPNRQILRSAPSSASASASCTLTPCFHSPPTSESRSAATNSCFSPPRLLRATTSARSSRSGGGGMGRDGGGGVAGGMSESVLRKVLLSYLYVAVWIFLSFSVIVYNKYILDPKMYNWPFPISLTMVHMGFCSSLAVALVRVLRVVDLPTSPSMTPQLYTSSVVPIGALYAMSLWFSNSAYIYLSVSFIQMLKALMPVAVYSIGVLFNKETFRSSSMLNMLSISFGVAIAAYGEARFDVRGVALQLAAVAFEATRLVLIQILLTSKGISLNPITSLYYVAPCCLCFLVVPWVFVELPRLRAVGTFQPDFFVFGTNSLCAFALNLAVFLLVGKTSALTMNVAGVVKDWLLIAFSWSVIRDTVTPINLFGYGIAFLGVAYYNHVKLQALKAKEAQKKAAQADEEVGSLLQERDGHGDHKSDNQA

SEQ ID NO: 65665 - protein, 162 aa, Zea mays
  Clone ID: 700266667_FLI.pep
GGLVPDLVWSCLGSPPGIAHRDPLRARTSRSRAGVRGRQGVAARWAWDRRDGSGMARAWPPAAAMAAASRRKRPPRRPRTFPRRRPPSTSRCRSRRCRLTSCKYPPLLSYLSSILLLPLAPRAGLVPLCACQQLVSCSSIRERAGRRTRAREPAGKCLRVCG

SEQ ID NO: 65666 - protein, 318 aa, Zea mays
  Clone ID: 700267056_FLI.pep
YTASVFSLDQRAAGRSGRVVERGEEVFPPLRAIGVVAGTAGLVDLEVAGVPRVRAAAELSGARRGGLQGRVAGALVVGVAERVGDGAGERGGEADDHAVDGGVAVRRDEGRGLRAVLGLVERPRALAGALRGRVADPDVRGGGAGAGLRAVQAALARAEALHGDVLRREHQRDAALPGPGPRGEGGDLRQGEGRAHGAAVVGRHLGGVQHHPGGGMLGGLRRLGQVLLLDHVPPLRDGRRGGLGRGGEREQEVVDDRLLHLREAAVPEHGHEDVGVEHGSVVVGEHVRRIGLVQLHAPPCPRGQLGGAQEQYQCCKHR

SEQ ID NO: 65667 - protein, 388 aa, Zea mays
  Clone ID: 700332227_FLI.pep
KSAYAPYLEESLKILIRHSGYFHEDVRLQAVISLKHILTAVRAIPPAHADVLEKQKDVLDTVLNIYIKTMTEDDDKEVVAQACMSVADIVKDCGFAAIEPYMLRLAEVTLVLLRQESSCQQVESDGEDDGDIDHDEVLMDAVSDLLPAFAKVMGSYFDPIFAKLFDPLMKFAKSPHPPQDKTMVVATLAEVAQEMGAPISAYVDKIMPLVLKELASSDATNRRNAAFCAGEICKNGGAAALKYYGDILRSLHNLFSNSESDDAVRDNAAGAIARMIMVQPQSIPLNQVLPVFIKALPLKEDHEESMTVYGCVCGLLLSSHPQILPLVPDVIHVFAQVVVSPDESDEVKTNIGKAISHLISVYGQQMQPILSALPPAHANALASFASRR

SEQ ID NO: 65668 - protein, 703 aa, Zea mays
  Clone ID: 700333159_FLI.pep
QAWRTAMDLVGSLLLSMARLLDPSGLHFVGWLVTAGSIGLAALIYALLRLQREAALYWTKATREKRAAWRRLRCPSSCHSWSEDYFHGGQPSTCCVCLSSLGSTQGVDMVHRCSVCGVAAHSNCSPRAEKDCKCVAQAGASPLLHHWSERWVELDDNPEISSSCYYCDEPCGVPFLGVSPIWRCLWCQRQIHVDCHAKLLKETGNTCDLGLLRRLIVPPQSVKEIGQGSGISGMLNSIKDGFANSTVGNRRRSRNKKRMNNHPGGKINSIPTKFSVIDSVLEGFARLKGLDGKYALAKPLSQHSVKQTYRSVIPNGRVRKYELVDLPQDSRPLLVFINGKSGGRNGPSLRRRLNMLLNPMQIFELSASQAPEVGLQLFHNVKHFRILVCGGDGTVAWVLDAIEKQNYESPPPVAILPLGTGNDLSRVMRWGGGLSSVERQGGIYALLNDVDHAAVTVLDRWNVTIKEKNGTEGECTKQIKFMTNYLGIGCDAKVAYDFHTTREEKPDKFCSQFVNKLIYAREGAKDMMDRSCSDLPWHVSLEVDGKNIEIPEDAEGVIVMNIPSYMGGVDLWQNDNDHNDDFRLQSIHDKILEVVCISGTWHLGKLQVGLSRAHRLAQGKVIRLHLHSSFPVQVDGEPWIQPPGCLEISHRGQMFMLRRTSEEPTGHAAAIMSEVLVNAECNGVIDASQKRLLLHEIALRLSS

SEQ ID NO: 65669 - protein, 361 aa, Zea mays
  Clone ID: 700335564_FLI.pep
WSYTSRRAFKMFNIVSSWNKRRRSRSLDQLNPWVYKPAELWQAKEQEHHHPPPKKRSCTMVFTLKEMEEATNLFSDRNLIGKGGFGRVYRGVLKDGQIVAVKKMELPTCKQADGEREFRVEIDILSRLDHPNLVTLIGYCADGKHRFVVYEYMPRGNLQDILNGIGEVRMDWPLRLRIALGAARALAYLHSSTAVGVPVVHRDFKSSNILLTDHYEAKISDFGLAKLLQQDQDLHTTTRVLGTFGYFDPEYALTGKLTLQSDVYAFGVVLLELLTGRRAIDLSQGPQEQNLIVGIHQVVGDRKKLRKVVDRDMPRGSYTLESVSMFAALAARCVCFDSAARPPMQDCVKELQFIMYANMKI

SEQ ID NO: 65670 - protein, 480 aa, Zea mays
  Clone ID: 700335575_FLI.pep
QTYAPSRPVRLQNFQHPIRYRNLQLPHRIEPSACKRIRPPLSYRREFNRPQSPRPMRPIRLPEPPGVDGMETPEIFSGSGTGGAAVVRRAVLIGNGSPGAENQCLGLARALGLADNLTFYRVTRPRGGINEWLHFLPISMHKFIDQILRQFFRNTRFAIVVQGRKPRVLNGASVGLSAVLEANVKKIVTVARDTYEKEGPTLVVACGWDTISYSSLIRKVASDNVFVIQIQHPRSRLDRFDLVVTPRHDYYALTASGQQEVPHLFRRWITPQEPPRSNVVLTVGALHQADSAALRLAAIAWHDELAPLPKPLLIVSIGGPTRNCKYGVDLARQLITSLYNVLDSCGSVRISFSPRTPWKVADTIFKEFAGHPKVYIWNGEEPNPHMGHLAWADAFVITADSISMLSEAGSTGKPVYVIGTEHCKWKFSAFHKTLRERGVVRPFTGLEDISNSWSYPPLNDAIEVATRVREVIAERGWTVG

SEQ ID NO: 65671 - protein, 316 aa, Zea mays
  Clone ID: 700377482_FLI.pep
GASHVSSPTLRLTPPPPPQPVAMAAVSAAPRPSMPPRLALRAHLFSSASPLPMRALPLLRSRFRSLTTAYAVKQDTALWTPAPVSAISAATDDGSVSLIAVDLSDATDLVDSYTNPGQYLLIRVPGEELKPAYMVISSPPKAGPRFEFLVKSVPGATAGRLCALRDGDVVELGAVTGKGFPLDRINPPDVAQTVLIFAAGTGISAIRSLIEFGFAAKERADVRLYYGDTSLKSMSYQERLSNWESTGIKIIPVLSQPDDSWKGERGYVQDAFFRNKNIVNPSSTGAILCGPNEMQEELTLSLVADGVSRDKILTNY

SEQ ID NO: 65672 - protein, 300 aa, Zea mays
  Clone ID: 700343143_FLI.pep
RCVCRPRGGGRSVGWPSATMAVHGGEAVSVALLFSLAFFCARLLLDRLVYKPLAVYLFNTKASKLMNNEARQAKIVKFSESIWKLTYYASVQAWVLMIIKQEPWSLDMMQYFDGWPNQPIVSSLMLFYMCQCGFYIYSIGALVAWETRRKDFAVMMSHHVITSTLIGVSYLTGFFRIGTIILALHDASDVFLETAKLCKYTEKELGASLFFGLFAISWLLLRLIYFPFWIIKASSYHSITFLRKLDEFPTTLYYILNTMLLTLLVFHMYWWKLICLMIMRQLNNKGQVTDDVRSDSEDEE

SEQ ID NO: 65673 - protein, 377 aa, Zea mays
  Clone ID: 700344012_FLI.pep
LFLPLVALGDRLRRPGAVALSYARFPGLGRSLHRRRAPTRRAGAWIRRKCCGFRRFVSLVVSGGVMKAVGYNLYDSSGTDDDLPPAQNRGLRGRVFSGNGRASAGAFPYMRANNDLESEIHRVEQDAYTGVLRAFKVQSDAISWEKESLITELRKELRVSDEEHRELLNKVNEDGSIRQMRELRQAGGIPSGLHRGNRVLYDAEPGPTTKRQRASHSIPSQSAGLQSPMMPSHSVSSAKWGPLSARGKKAKMMAPEDIRWEFDGHLSNHDGWGPSGPMLKRHMTNNGAMAGSIRGRGRLSINEPIKDYAPPQNDINRNFDYIDIPNTESVVTEVERVLANPNMPEIEKARKLLKDQEQSLLDAIARLDEASDSDSGN

SEQ ID NO: 65674 - protein, 283 aa, Zea mays
  Clone ID: 700344233_FLI.pep
RGRKSRTSRGDGIQARKRNKAENFKRVRRRSSEMAAPPPSYPAALKPEIGPDGLARDSPVIAYTEKVILEEQLQLKKYIQENYSKIRDVEKELESLTLEMKLTSGPKKAALEHLRKKIEISTEKIRLAKVKEEHAKKTWEVAAQVVKDEEDAKQKLCDDLNHLVQESAASQYARLEELKKRLESLNPIRDSVNVSGVYTAQHATLNSVPQQPTAQNPADVTGRQNIATKPASMQQQPIPAEAEKKRRPSNSARGRGGVMILPKGREGSGSGWTGAGFDVDSRT

SEQ ID NO: 65675 - protein, 345 aa, Zea mays
  Clone ID: 700344876_FLI.pep
PKLVFVLPVVLLALALQAILRPPPPKLCGSPGGPPLTSPRIKLRDGRYLAYKEDGVQRDKARYKIITVHAFDSTKDFPSPVSKELVEGLGIYLLAYDRAGYGESDPNPNRHVKSEALDIEELADQLGLGHKFYVLGASMGGYSVWGCLQYIPHRLAGAALVVPIINYWWPSFPAELSKQAFNRLIVPEQRTLWIAHNIPSLLYLWMTQRWFPSSAAAMHHPEIFSKHDMEVLQKMMAMPRTIENKSRQQGIYESIHRDLLVAFGTWEFDPMNVTNPFPQNEGSVHIWQGREDRLVLVELQRYIAKKLPWIKYHEVPEGGHMFVMVDGWTDRILKALLLGEEPLDV

SEQ ID NO: 65676 - protein, 229 aa, Zea mays
  Clone ID: 700346392_FLI.pep
STDLQMAEAEATVGRLMLYSYWRSSCSHRARIALNLKGVDYEYKAVNLLKGEQSDPEFVKLNPMKFVPALVDGSSVIGDSYAITLYLEDKYPEPPLLPQDLQKKALNHQIASIVASGIQPLHNLTVLRFIDQKVGAGESVLWTQQQIERGFTAIENLIQLKGCAGKYATGDEVQLADVFLAPQIYAAIERTKIDMSNYPTLARLHSEYMSHPAFEAALPGKQPDAPSSS

SEQ ID NO: 65677 - protein, 239 aa, Zea mays
  Clone ID: 700347172_FLI.pep
GWSIDEMKKGAMASLVPLVVALLLCPSSSLAMASGAGPAQWGKKLDPHFYDQSCPHAQHIVASIVGKAHHQDPRMAASLLRLHFHDCFVKGCDASLLLDSSGSIVSEKRSNPNRDSARGFEVIDEIKAALEAACPATVSCADILALAARDSTVMTGGPGWIVPLGRRDSRGASVQGSNNDIPAPNNTLPTIITKFKLQGLDIVDLVALLGSHTIGDSRCTSFRQRLYNQTGNGLPDFTL

SEQ ID NO: 65678 - protein, 530 aa, Zea mays
  Clone ID: 700380607_FLI.pep
DEKTEAKDSGSGWELLYCGGTSFDAMGRKVVGGAQGNLVSPTRLPPLVGVDIRFVASGCTACHCVALDAGGKCYTWGRNEKGQLGHGDTLLRNLPTVVSQLSKYKIIKACVGRNHTVVVTDDGKSLSFGHNKHGQLGTGSLRNEIESSPVSCIVAEATNVACGADFTAWLSSVEGSSILTAGLPQYGQLGHGTDNEYNAKESSVKLTYEPQPRPRAIAAFSGKTVVKVACGTNHTVAVDSNGFVYTWGFGGYGRLGHREQKDEWQPRLVEVFQKHNVLPPNAIVSAGSVSSACTAGGGQLYMWGKMKNTGDDWMYPKPVMDLSGWNIRCMASGNMHHIVGADDSCISWGVAQNGELGYGPNGQKSSANPKKVDILEGMHVTSVGCGFGLSLIVVDRANVGDRLGQLEIYDGDTGAEVEKVEVQVTKKASASTNSRANKRKKTKDVSESESEEDDDDDEDESGDDENGGVEESKGRRGRKPANRGRGRGGKKATPEAKPSGRGRGRPKKTESSAQKAGGTSGRGKRGRPRK

SEQ ID NO: 65679 - protein, 284 aa, Zea mays
  Clone ID: 700553189_FLI.pep
TLVFAVVAGGPAMSHFGRSGPPDIRDTFSLLVLNISFRTTADDLFPLFERYGKVVDVFIPRDRRTGDSRGFAFVRYKYADEAQKAIDRLDGRDVDGRNIMVQFAKYGPNAEPIRKGRVKEGVEKSQDRSRSRSPRPRHRDRDHRSQSRSRSRERHVRDRDRGYRRRSRSRSQSLSSSPDNRSHHRARDDDRRKSMSKSRSRSTSRSRSYYSASPARHSASPRKSPPPQRSPTPAKHANGKDSPLSRCVSPLPKRATSRSPGSDGKVRLMSNCLLCSLLPMHLFM

SEQ ID NO: 65680 - protein, 387 aa, Zea mays
  Clone ID: 700553289_FLI.pep
KKGKKSGVGSSVVAAAMARGGGGRSKKEDEEELRGAKRGYKEASAEGNREEEARWANVIGDIYKRRCEYVEALRWLRADYEVSVKHLPQRHLLPSCQSLGEVYLRLGRFSEALTYQKKHLQLAKESDDLVEQQRATTQLGRTYHEILLRSENDHSAIRNAKKYFKSSMKLARILKERSPSQKSDFLKELIDAYNNMGMLELELDNFEEAEKLLIQGLKICDDEEVDSYDDARTRLHHNLGNVYTELQNWKKARGHIEKDIEICRKIRHLQGEAKGFINLGELHYRVQKYDNAKLCYNKALEVARSLEDEDALIEQIHQNIETVTKAVEVFEQLKEDELKLKKLIRDTSNARGTSKERKLLLDQHAWLDSLIEKARMICAWQKHKEFS

SEQ ID NO: 65681 - protein, 291 aa, Zea mays
  Clone ID: 700611145_FLI.pep
RGAPPPTIRSLPRVSPLPPLAATHSPASATSHRRSPPSDPPRANSPPPSTRIPDELGEVLIWIFVECAMVDFVRRLASALLKCCDLDIPNRPKGLEDPERLARETVFNVNEIEALYELFKKISSAVVDDGLINKDEFQLALFKTNRKDSMFADRVFDLFDTKHNGILEFEEFARALSVFHPSAPIDDKIDFAFKLYDLKQQGFIEKQEVKQMVVATLAESGMNLSDDIIEGIIDKTFEEADTKHDGKIDKEEWRSLVLRHPSLLKNMTLPYLRDITTTFPSFVFNSQVEDA

SEQ ID NO: 65682 - protein, 382 aa, Zea mays
  Clone ID: 700348501_FLI.pep
LASRHMVGSQYDDDDDNVVGRRKTRWYAVTGGRGFMARHLVAALLRSGEWRVRVTDLAPTLALGHGETEGILSDALRDGRAVYASVDVCNLDQLAKAFEGVDVVFHTAAADPSKNNLQLHYKVNVEGTKNVIDACKICKVKRLIHTSTSAVVFDGVHGLFDADESLPYPDKFPDAYAQTKAEAEKLVIKANGINGLLTCCIRPGSIFGPGDIMMPTLDRYGWSNVTIGEGKNYDDFVYVENVVHGHLCADKTLSTIEGARTSGGKAYFITNMEPMNMWDFLYLIQEELGYKRIFKIRVPIIVIKPASYLIEWAYRAVFSHFGTCQPQILTPARIRYVTLNRTFSCNKAVEELGYKPIVTLQDGLKKAVKLYIQLRDKDLPKI

SEQ ID NO: 65683 - protein, 250 aa, Zea mays; identical to SEQ ID NO: 61157
  Clone ID: 700349418_FLI.pep

SEQ ID NO: 65684 - protein, 389 aa, Zea mays
  Clone ID: 700350350_FLI.pep
GFDVTGTRMSLPIALVVGIAGGATLLAVAAVLLALWCAARMRARRNRNSDTGSSDPSTLVEWGKGGRSSLAPDLEHQVARQFSLEDLVQATKNFSDTNIIGAGSFGLVYMGLLLDGTVVAIKRRVGAATQVFADEVRLLSEIRHRNIVTLIGYCQEGGLQMLVYEYLPNGSVCGHLYDNRKGSATRLEFKQRLSIAIGAAKGLNHLHSLDPPLIHKDFKTNNVLVDENFIAKVADAGLVRLIRGSDDAGPSRGFSNSVYQDPEVQSMTQFSESSDVYSFGVFLLELITGREAASLIPTESREYLAHWMEAHFSSNELIDPRLAGNFTAEGMKELVGLAFQCLNPSSRRRPRMRLVATELDRILETEMSMTTFMGDGTTIVTLGSQLFSS

SEQ ID NO: 65685 - protein, 310 aa, Zea mays
  Clone ID: 700350561_FLI.pep
QQQLQHHQPQLGTVPHLLAGGVAGAVSKTCTAPLARLTILFQVQGMHSDVATMRNTSIWREASRIVYEEGFRAFWKGNLVTIAHRLPYSSISFYAYERYKNLLQMLPGLEKNGGFGADVGVRLLGGGLSGITAASATYPLDLVRTRLAAQTNTAYYRGISHALYAICRDEGVRGLYKGLGATLLGVGPSIAVSFSVYETLRSHWQIERPCDSPVLISLACGSLSGIASSTFTFPLDLVRRRMQLEGAAGRARVYQTGLFGTFGHIVRTEGFRGMYRGILPEYCKVVPGVGIVFMTYEMLKAILTGLESDD

SEQ ID NO: 65686 - protein, 225 aa, Zea mays
  Clone ID: 700352425_FLI.pep
IPPLSPTRPQQAQRIDRSRRTEEEMASALSSLRYGDSLSVVGISAATAVLCEAMSWLLIYRTATYNSLRASIERHSRKLDAMKSGSTSASSGTAASSAQPASSRAKKMDRVETSLKDAARELSLAKLKSGAVVAVMLFVVFGLLNSLFEGRTVAKLPFAPIPLVQRMSHRGLPGNDPTDCSMVFLYFLCSMSIRTNLQKLLGFAPPRAAAAAGGGLFPMPDPKVN

SEQ ID NO: 65687 - protein, 238 aa, Zea mays
  Clone ID: 700381103_FLI.pep
AIIRREGEPARTAKKMLKRLLTKTKSKKKKEAASSAIPTLDRLHETLEMLEKKERFLQKKCSAEIEKAKDYTKAKNKNAAIQCLKKKKLYETQIEQLSNFQLRVHDQIIMLESAKATTDTVDALRSGSSAVKAMQQSVNVDDIEKAIEEANEQTESMREMQQALATPIGASADFDEDELEAELEELEEEEEEEGEIEDELPEPPARRSVEPSAKAAAASSRQGSDVSELTRLQAEMAL

SEQ ID NO: 65688 - protein, 631 aa, Zea mays
  Clone ID: 700381118_FLI.pep
LPSQVRSARDSGAAAPNHTSISPSQQKKNSHQWRSESTKASGSLDMERILKSARESGSLNLSNRSLREIPKEVYNNLDTGSQDEKWWEGVDLQKLILAHNNLEVLREDLRNLSSLVVLNISHNKISSLPAAIGDLPLLKSLDMSFNQINTLPEEIGLATALVKVDFSNNCLTELPPNLATCPDLSELKASNNNTSRVPDVLAGCSKLSKLDLEGNKLVALSENMFVSWTMLTELNLAKNLLTAIPGSIGALPKLIRLDMHQNKITSIPPSIKGCSSLAELYMGNNLLSSIPADIGTLSKLGILDLHSNQLKEYPVGACNLKLSFLDLSNNSLSGLPAELGKMTTLRKLLLTGNPMRTLRSSLVSGPTTTLLKYLRSRLSSDEEASGSRSTPTKDDQIAAARRLSLSSKELDLSGLGVTSVPAAAWETSDVVKLDLSKNSIEDLPNELSLCSSLQSLVLSNNKIKRWPHTVVSSLPCLSSLKLDNNPLVEISSTDLVPLSKLEVLDLSGNASALPEPSAVSALPQLQELYLRRMKLHEFPNGLLGLKLLRILDLSQNHLTTVPEGIKNFTALIELDLSDNNITALPAELGLLEANLQVLKLDGNPLRSIRRTLLERGTKAVLKYLKEKLPSE

SEQ ID NO: 65689 - protein, 602 aa, Zea mays
  Clone ID: 700381131_FLI.pep
PILHPHLCLCSSMAMAMARPCAFLLFFLVLFSYDGSGPGSSRRTRRSGVAQATQRVFLYPQAPKVSSIVSSKYRTAYHFQPPKNWINDPNGPMYYNGIYHQFYQYNPNGSLWGNIVWAHSVSTDLVNWIRLAPAIERTTPSDINGCWTGSATILKSGRPAIIYTGADTEKRQVQNVAFPKNLSDPYLREWVKPHDNPVIQPVGRGLNPGQFRDPTTGWIGPDGLWRIAVGAEVDGHSAALLYESEDFVRWDRVDHPLYSSNASAMWECPDFFAAMPGENSGLDMSAAVPDGAKHVLKMSLDGSDKYMVGVYDLKGDAFVPDTVIEDRRLWSRIDYGNYYASKSFFDSKKGRRVIWGWTNETDSSSDDVAKGWAGIHAIPRTIWLDKDSKQLLQWPVEEIESLRGKQVRHQGLELRKGDLFEIKEIDTLQADVEIDFELTSIGSADPFDPSWLLDIEKQCREAGASAHGPFGLVVLASESMEEHTSVHFRVYYRSQEKHMVLMCADLRKSSLRPELYTPAYGGFFELDLEKEKTVVSLRTLIDRSAVESFGGGGRVCIMARVYPAALVDDGGTRMYAFNNGTSTVRVPRLEAWSMRRAQVNKG

SEQ ID NO: 65690 - protein, 291 aa, Zea mays
  Clone ID: 700353167_FLI.pep
ALMSCHVVSRRAHERAVGADDRAGTPPAFLTRAFPRADCSLAQTTRQCSGFLEGLRRGLPPDAHVLQPRRPLLPLPRAVDGLQPSRRARAAQDPNLQGLCRWEYHHVDAREESEHQGVLCCYLSLPDATAQGDQRRGRPEAEGGVHGEVPEEGRGRGQEAGFGGRHRKGGRVRHLHGDERQGGAAQLQPCHVHQVLPPMAIKIAILPLLSGQPETSELRGPVDAHRLPGRGRHGDGDEGEHQASVHVRREAAPRRPGQHLLRLRFSCKIAGASCSVAAHHLCCAVLCCVVF

SEQ ID NO: 65691 - protein, 384 aa, Zea mays
  Clone ID: 700354687_FLI.pep
SPFLPRQSIRSSQRREEEMGSNAAGKPPPPPAAAVSWEFHATGPRNLTSPGWRDLIRSSWRDPSYRRIAVSCFVQAAYLLELDRQEGRAGEAALAPNWWKPFKYKLVRPLIDSRDGSIYGALLEWDQLAALADLIVAKPQGAPKVVLALRGTMLRQLTVVRDLEDDLRLFALESLRGSVRFTGALEVLKSAIHRHGSANVCVAGHSLGAGFALQVGRALAKDGTFVECHLFNPPSVSLGTGLRKIQEKASSVLKRYISRSGGGGSSSSSNVSPGPGEELQAAAARDGVGEEVMSREVKRWVPNLYVNSCDYICCFYADRSGVATVTEEKRSGMHSKLYVIAKGPSKFLEAHGLQQWWSDDSELHLAVHDSKLMYRHLKSLYVEQ

SEQ ID NO: 65692 - protein, 516 aa, Zea mays
  Clone ID: 700355912_FLI.pep
MELNSDTLLFLTTIISAAILVVCSLSRRKPSPGPKKKRPPGPWRLPLIGNLLHLATSQPHVALRDLARKHGPVMYLRLGQIDAVVISSPAAAQEVLRDKDVAFASRPNLLVADIILYGSMDMSFAPYGAYWRMLRKLCMSELLSTHKVRQLLAVRDSETISLVRKVRAAGGQSGEPVNLGRLVLSCSMAITGRATFGQLCGDELMSVVDVAVLYGGGFCAGDLFPSLSFVDVVTGLTRRLWRARRHLDGIFDKIIAECEARQRQAKTTTGTTNGDGDGLLSVLLRIRDEGETGISMTSIKAILFDMLAGGTETTSSAAEWIMSELMRNPEAMAKAQAEVRRVLDGKSPQDHEGQMDKLSYTRMVVKEGLRLHPVFPLLLPRLCRETCDVGGFEVAQGTKVIVNAWALARSPEHWKHPEEFWPERFADDTSVAAAADYVGSQFEYIPFGSGRRMCPGNTFGLAALELMVARLLYYFDWSLPDGMRPDELDMDTVVGSTMRRRNHLHLVASPCKEIES

SEQ ID NO: 65693 - protein, 332 aa, Zea mays
  Clone ID: 700382301_FLI.pep
APWAEQFRTGLPPSTAATFDPRAFFLSLSSGDWAVSYRRRPTPGAEVFVDLELPQGKLSRMGYNRHRRGRGSSSSSSRRTKQEASCDDDLGTSLPRQEEGTEDELKGSRIQLAMWDFGQCDVKRCTGRKLSRFGLLKELRVTNGFGGVVLSPVGTQCVSKEDHPIVQRKGLAVVDCSWARLSDVPFVKLRCGAPRLLPWLVAANPVNYGRPCELSCVEALSAALIICGEEDTAHLLLGKFKWGHAFLSLNRDLLKAYSQCENGAEIINVQKSWLSSNSSVPKPPVNGAEESRQNKEEGSEGDSDDDLPPLEKNMNHLNLEEDEESEEESESE

SEQ ID NO: 65694 - protein, 323 aa, Zea mays
  Clone ID: 700471854_FLI.pep
HDLRRRPPAAMSPFYLARGASKLVRRITSETSVELKILSDKWRLLLAGLIFQYIHGLAAHGVHYLHRPGPTLQDLGFMILPELGKERGYISETLFTFVFLTFVLWTFHPFILQTKRFYTVLIWRRVLAFLCASQFLRIITFYATQLPGPNYHCREGSPLARLPPPQNAAEVFLINFPTGVIYGCGDLIFSSHMIFTLVFVITYQKYGSIRFCKMLAWCIAVAQSLLIICSRKHYSVDVVVAWYTVNLVVFFVDKKLTELPDRSVGSTSVLPVSARDKDTKLKEENTRLLNGNSMDSADRRPRTQMNGKQIENESHVDSETVKT

SEQ ID NO: 65695 - protein, 413 aa, Zea mays
  Clone ID: 700472248_FLI.pep
QPPSGHHHHLGSRRRSAPRARALAMANRTDPLAKSIHGTNPQNLVEKIVRSKIYQSTYWKEQCFGLTAETLVDKAMELDHTGGTYGGNRKPTPFLCLALKMLQIQPDKDIVVEFIKNEDYKYVRVLGAFYLRLTGTIADVYQYLEPLYNDYRKIRHKLSDGQFTLTHVDEFIDELLTKDYSCDTAMPRIQKRWVLEASGTLEPRRSALEDDFEEEEEDKEEQPMEIDEPNGRENDNHRGRSLARERDRDWDHDRKHERHNRDKDYDRDRDYDRDYGRGRERHRDRDRERDRNRDRDRDRHRLRDDDYNRNRDRDRERDGRERERRDRDRGRHRSRSRSRDRRDRDREDGEYRRRRGRGSVSPRGRGEDGGPREEPKRKKEKKEKGEGNAPDPNDPEIIEMNKLRASLGLKPLK

SEQ ID NO: 65696 - protein, 302 aa, Zea mays
  Clone ID: 700442361_FLI.pep
RKSHVHNKIKISYIYNRIISLYCIKIIKYVWNTSGHRSYTVATVLAVKSNSSSSEVLLGVAVEVVAVADAEHVAVALVVADAVDVGGVLPHAAVFGAVDDVGDGAVAGNPPRRRVGARRRPVAEDHVVARRLGRLRRHPEPDGRLEGDHRVRGHQVRVVHQVLAYRVPGLLVVGLPCQLNWSASIVGRTCGLVDLLLEAVTPLELVGGTCRATGSLVGGLAEEGGELALVEFVGAGAGAEPREEVDGLDEGVVGVEAVGGALRVVAVGQHLVVHVLRDDRRHVRCRHAEQQRRRGSGARHER

SEQ ID NO: 65697 - protein, 326 aa, Zea mays
  Clone ID: 700447227_FLI.pep
SCSCLSLLQSVGGAAAMEGKEEGRIFVGGLSWQTDERKLQDAFGRFGKVVDVQIMLERHTNRHRGFGFVTFEDRRAVDSAIKEMRGQELDGRTISVNKAEPKMNTDDTRFDNGGGRDYRGGRGDGPPPGNCYECGRPGHWVRDCPSAAGGRSGRFPSKFSGGGRGDRFSGSDRFSDRYMDDRYDGGRYGYRDQVDARDKYAGGRDRYANDRYSAGGDHFDGDRYGGGPDRYAPNGYGRERERSYERDGVRGGGGYDRNDSRGGGSYDRDGPRGGKGGGYVRDGPRGGVADRYGGGGPARYDGGSYRDRPGPYDRPSRGGGRFDDRH

SEQ ID NO: 65698 - protein, 685 aa, Zea mays
  Clone ID: 700455918_FLI.pep
ALVLSSLSLLTQVPRLRLVMPPKSKASAAAEPVAVEDLFASLHRHIEAGAFKQAAKVADQVLKAAPGDEDAVRCKVVAYIKADEIDKALAAIRAAERLPIDLSYYRAYCCYRQNKLHEALELLRGQEETSAVLQLESQIFYRLGRMNDCMSSYEKLKKFKIDSMDLKINIIAALVAAGRASEVQAAMKALKVDLTTRALRDTRSFELAYNSACSLIENKKYSEAKEQLDLAKRIGKEELMVEDYGEADIEYELAPVSAQLAYVQQLQGQSQEAMQTYVNMINGQSADLSSLAVATTNLISIKGTKDTADSLKKLDRLIGTTTAPNQLHLVENLDYKLSPWQKEALYSARVLLLLHANKTEQAHELVRGLLGMFPDSVFPVLLQAAVHVKEKKIHKAEDVLSQYAEKRPENSKGLLLALAQIAANANHFQLAADSLSRIPDIQHMPATVATLVALKERLGDSNAAASVLDSAINWWKNSMTEDNKLDILTREAAAFKLSHGRDEEACLLYEELVKSHGSIEALAGLVMTSARTNLEKAEQYEKKLKPLPGLKGVNVESLEKTSGARHVEGPQDMKVDVPEEVKKQKAKKRKRKPRYPKGFDPANPGPPPDPERWLPRRERSSYRPKRKDKRAQVRGAQGAVSRETSATNVGASSKGSQTTNSSKTPAVNAEQPKTSNKSRKKKSRH

SEQ ID NO: 65699 - protein, 130 aa, Zea mays
  Clone ID: 700569965_FLI.pep
HPSALRLFLSAPPPPPAAEIPRSSPMAANSLFSRQRRPKVTRRCRRTCTSGGWSSPTMEQSSKLLLLIQEWPISLNGRAKQSRGLIKMRKGLNSLIILDAWQIWKHHNVCVFEGSSPNVQEVLHAVTTDN

SEQ ID NO: 65700 - protein, 248 aa, Zea mays
  Clone ID: 700572963_FLI.pep
VNGHCFIGQTLRAPVQQSQSHKAAMDGGGVDTATTAAWMEKHRQMYERATRHPFTVSIRDGTVDMSAFKRWLSQDYLFVREFVAFIASVLLKCCKQEDSSDMEIILGGVASISDEISWFKNEATVWGVDLASVSPLKANLEYHRFLRSLTEPEVSYAVAVTTFWTIETVYQDSFGFCIQDGNKTPPELLGTCQRWGSAGFRQYCQSLQSIVDRCLANAPADAVQSAEEAFVRVLELEIGFWDMSSSRS

SEQ ID NO: 65701 - protein, 201 aa, Zea mays
  Clone ID: 700574772_FLI.pep
YKYLEELYKKKQSDVLRFLSRVRCWEYRQLPAIVRVQHPTRVDKARRLGYKAKQGFVVYRVRVRRGGRKRPVPKGIIYGKPKSQGITQLKFQRSIRSVAEERIGRKAGNLRVLNSYWVAQDATYKYYEVILIDTFHKAVRKDPRINWITNPVHKHRELRGLTAAGKSNRGLVGKGHGYKKNTPSRRAVWKRQNTLSLRRYR

SEQ ID NO: 65702 - protein, 219 aa, Zea mays
  Clone ID: 700583807_FLI.pep
QHRLLNLFLFFFLSPAHPKRRKGRSVERRIIVCFPKMSSPSKRREMDLMKLMMSDYKVEMVNDGMQEFFVEFRGPNESIYQGGVWKVRVELPDAYPYKSPSIGFINKIYHPNVDEMSGSVCLDVINQTWSPMFDLVNVFEVFLPQLLLYPNPSDPLNGDAAALMMRDRPAYEQKVKEYCEKYAKPGDAGVTPEEQSSDEELSEDEDDSGDEEIMGKPDP

SEQ ID NO: 65703 - protein, 412 aa, Zea mays
  Clone ID: 700613228_FLI.pep
STRIPRTTATAPRHGRRRMSSSPSPAATRLDLDGNPIAPLTICMIGAGGFIGSHLCEKLMAETHHTVLAVDVYCDKIRHLVDPAPPHLAGRISFHRLNIKNDSRLEGLIKMADLTINLAAICTPADYNTRPLDTIYSNFIDALPVVKYCSENSKRLIHFSTCEVYGKTIGSFLPKDHPLRKEPEFYVLKEDESPCIFGPIVKQRWSYACAKQLIERLVFAEGAENGLDFTIVRPFNWIGPRMDFIPGVDGPSEGVPRVLACFSNNLLRREPLKLVDGGQSQRTFVYIKDAIEAVVLMIENPARANGHIFNVGNPNNEVTVRELAQMMTEVYANVSGEAPLDEPMIDVSSSQFYGEGYDDSDKRIPDMTIINKQLGWNPKTPLKDLLETTLTYQHKTYKEAVKRQMSQASAST

SEQ ID NO: 65704 - protein, 194 aa, Zea mays
  Clone ID: 700624410_FLI.pep
AVLPPLPLPPLPGLLRRLPPHRRALSSSSGSIPLPPPVMEASYKFGPYKIDAREVFHATPLSYAMVNLRPLLPGHVLVCPKREVKRFADLSSDEISDLWVTAKEVGARLEQYHKASSLTFAIQDGPQAGQTVAHVHIHLIPRKKGDFEKNDEIYDAIDVKEKELKEKLDLDIERKDRSMEEMANEANEYRALFS

SEQ ID NO: 65705 - protein, 671 aa, Zea mays
  Clone ID: 700800974_FLI.pep
CSEGLRGSQVPNKTHRGKSFSDMVRTRRRLVLLLLLLGLTVLSPLALYTSRLSVALNSIQARVFPGEITNQGRGVKADKLNALPLQTVSSLKEPVDIVFSEELTESKSQELRLPKVGAHKSRVLSEVTVADDDTSSKDNEVIEQVITLEAQDGGLVKGAGVSDEQEKNIGSLQQSSSEESSQDTMPKQTPAKVVAENSQSARTDGKTKTTVLPDMRIRNIKDQLIKAKVYLGLGSIRASSQYLKDLRQRIREVQKVLGDASKDSDLPKNAHEKVKALEQMLIKGKQMQDDCSIIVKKLRAMLHSAEEQLHAHKKQTVFLTQLAAKTLPKGLHCLPLRLANEYFSLDPVRQQFPNQQNLINPKLYHYALFSDNILATAVVVNSTVLNAKHPSDHVIHIVTDKLNYAPMRMWFLSNPPGKATIEVQNIEEFTWLNDSYSPVLKHLGSQSMIDYYFGTNRANSDSNLKYRNPKYLSILNHLRFYLPEIYPKLDKMVFLDDDIVVKKDLAGLWSINMKGKVNGAVETCGESFHRYDRYLNFSNPIITKSFDPHACVWAFGMNVFDLAEWRRQNITEIYHSWQKLNEDRSLWKLGTLPPGLVTFWNKTFPLSRSWHVLGLGYNPHVNSRDIEHAAVIHYNGNMKPWLEIGLPKFRSYWSKYLDYDQSFLRECNINP

SEQ ID NO: 65706 - protein, 369 aa, Zea mays
  Clone ID: 700802080_FLI.pep
PRLRPKHQGPSALGSKMAAPEPEAKLEAVTPSRSYELPPESESDAPASTGTQELKPWEQHAAVINLPRYDYRASGSLLLRSHSGFLITCPIKREKSATKEAIPILEEYHANCCVSEHAEPCDVKNAIKKRKLCSEASGSLEEAVTNGNSSSVSESIGSTGNTSSPQSKVNDNVDRASNLSLVKLSRSGLLFFKFPSGGVHVVEMLTEILHSLRSGKLKSPQWCHRIFPIQETCILSEEDLHATVSKLFLDFSRSKTNEDKPIKFAVAYNRRGIDETEKNSNEGSNQQTLMDREQCFKVVAAAVKSVAENSVVDLRSPEVAVLVEMLPVSGVPLGSSVAGVSVLPAELISTKPRLCVRSLVPDAKAGKKK

SEQ ID NO: 65707 - protein, 542 aa, Zea mays; identical to SEQ ID NO: 59707
  Clone ID: 700804601_FLI.pep

SEQ ID NO: 65708 - protein, 469 aa, Zea mays; identical to SEQ ID NO: 56528
  Clone ID: 700805106_FLI.pep

SEQ ID NO: 65709 - protein, 485 aa, Zea mays
  Clone ID: 700805738_FLI.pep
RPTSASTLETVPWEWEVPQVLSSRRRRPPVSEMKERSGSRAAVDERYAQWKSLIPVLYDWFANHNLVWPSLSCRWGPQFEKATYKNRQRLYLSEQTDGSVPNTLVIANCEVVKPRVAAAEHISQFNEEARSPFVKKYKTIVHPGEVNRIRELPQNSKIIATHTDSPDVLIWDVEAQPNRHAVLGASESRPDLILTGHKENAEFALAMCPAEPYVLSGGKDKSVVLWSIQDHISALGDSSSSPGASGSKQSIKTANEKESPKVDPRGIFHGHDSTVEDVQFCPSSAQEFCSVGDDACLILWDARTGTAPAVKVEKAHSGDVHCVDWNPLDVNYILTGSADNSVRMWDRRNLGSGGAGSPIHKFEGHKAAVLCVQWSPDRASVFGSSAEDGFLNVWDHEKVGKKKNSNVPAGLFFQHAGHRDKIVDFHWNSSDPWTIVSVSDDGESTGGGGTLQIWRMSDLIYRPEDEVLAELENFKAHLASCAPKN

SEQ ID NO: 65710 - protein, 378 aa, Zea mays
  Clone ID: 700422181_FLI.pep
STPASRPKIQAQITTSHPLLSRLQLFVRSPLAARLPRGRGAANSKERVSSSLHGSTELPDPSAPNPTHPVGHRLAMDLDLWISKVKEGQHLAEHELQSLCEYVKEILIEESNVQPVNSPVTVCGDIHGQFHDLMKLFATGGHVPETNYIFMGDFVDRGFNSLEVFTILLLLKARYPAHITLLRGNHESRQLTQVYGFYDECQRKYGNANAWRYCTDVFDYLTLSAIINGQVLCVHGGLSPDVRTIDQIRTIDRNCEIPHEGPFCDLMWSDPEEIETWAVSPRGAGWLFGSRVTAEFNFVNGIELVCRAHQLVQEGLKYMFQEKGLVTVWSAPNYCYRCGNVASILSFDEKMERDVKFFTETEENNQMRGPRTAVPYFL

SEQ ID NO: 65711 - protein, 130 aa, Zea mays
  Clone ID: 700427079_FLI.pep
QWRTHKHTGSSSSSPRLQLSRCWCGTGHQFTMGDSSSSSAAYIRMVHHMIEKCICFNLSKEECMDALEKHANVKPVVTSTVWKELEKENKDFFETYNKDREERKVEAETMARIEKMLSEAAASKSSDDEG

SEQ ID NO: 65712 - protein, 431 aa, Zea mays
  Clone ID: 700434468_FLI.pep
SAAGGPQVLTARFVRQVVQGRWFMVFACLLILSASGATYIFSIYSKVLKSTLGYDQRTLNTLSFFKDLGANVGVISGLINEVTPPWVVLAMGAAMNLAGYLMIYLAIDGRTARPPVWLMCIYICVGANSQSFANTGALVTCVKNFPESRGVVLGLLKGFVGLSGAIFTQLYLAIYGDDAKSLVLLIAWLPAAVTILFVHTVRIMPYPRASRRRGPSAAATSNDAFFCFLYISIALATYLLVMIVVQKQVNFSHAAFAVSAAALLLILFLPLAVVVKQEYKIQKELEESLREDPTVTVEKPATAASLQLVAAAAAAPEPAVAQSMTTGTEAKRSSCLGSCLRHMFSPPAQGEDYTILQALVSVDMLVLFLATICGVGGTLTAIDNMGQIGQSLGYPAKSINTFVSLISIWNYAGRVTAGFASEVFLARYKFP

SEQ ID NO: 65713 - protein, 266 aa, Zea mays; identical to SEQ ID NO: 59021
  Clone ID: 701160865_FLI.pep

SEQ ID NO: 65714 - protein, 194 aa, Zea mays
  Clone ID: 701163537_FLI.pep
LALASITFPVPLVHFDIPSPPTLPSRSRRYQRFQSALPSAAHRRGPAASVSPRYLHPALLEPRSHRPGVRCGGVGGPSEQALLVGAFLLRRERLPVRLAVRRAPAMSQTNWEADKMLDVYIYDYFMKRNLQATAKAFQAEGKVSSDPVAIDAPGGFLFEWWSVFWDIFIARTNEKHSDVAASYIESFNKEQITL

SEQ ID NO: 65715 - protein, 160 aa, Zea mays
  Clone ID: 701168479_FLI.pep
LHSPYLLGTLLRVLPSSAGIWGSGTATAAGPLSRGAVLELDDEPSDGLAHLLEADGADGLDAGGGNGSGGGGPRGLVDEALGADALADGLDELFGVVAGDAEDLPALLEGLERGVRGRRLLLAARLYAGLHHSRRRRHEVVVRRAQVVHSRLHPSLTPSF

SEQ ID NO: 65716 - protein, 224 aa, Zea mays
  Clone ID: 701174741_FLI.pep
PPLRPPPPRLLLNNVSCMRNAQTVLRDINLSVHDGTALVLTGANGSGKTTLLRMLAGFSRPSAGEILWNGHDITSPGVFQQYKLQLNWMSLKDAVKEKLTVLENVQWFELLEGKDGSRSGPAIELMGLGRLMNEKARMLSMGQRKRLQLARLLAIDRPIWLLDEPSVALDAEGTRLLEYIIAEHRKKGGIVFVATHLPIQIEDSMSLRLPQRFPRRKTLVDLVR

SEQ ID NO: 65717 - protein, 314 aa, Zea mays
  Clone ID: 701176976_FLI.pep
QCTLMEGAISLPRNTRIAVVTGANRGIGLEVCRQLAGNGVTVVLTAVDEELGAKAVGNLQGLALSDVLSHQLDITDASSIARLANFLKARFGKLDILVNNAAVAGVVYSQDHLDDLEPREEKFNLMDRDQRLEWLWRNCRETYHAAKECLQTNYYGTKHVIEALLPLLKASDDGRIVNISSDFGLLRHFRNEDLKQVLNDVGNLTEERLDELLDQFLRDFKVGTAEARGWPVAFAAYKESKAAVNAYSRMLAAKQPALRVNCAHPGYVKTDITLHSGLLAPEEGASNVVKVALLPDGGVTGAFFEEGNELASFV

SEQ ID NO: 65718 - protein, 196 aa, Zea mays
  Clone ID: 700930323_FLI.pep
FYSQAMYPSAPPDAYNKFSAGAPPTAPPPPAAYHQQQQQHGANMDTSRPGGGLRKWSTGLFHCMDDPGNCLITCLCPCVTFGQVADIVDKGTCPCIASGLVYGLICASTGMGCLYSCLYRSKLRAEYDLDEGECPDILVHCCCEHLALCQEYRELKNRGFDLGIGWEANMDRQRRGVAGGGAVMGAPPAIPLGMIR

SEQ ID NO: 65719 - protein, 133 aa, Zea mays
  Clone ID: 701185106_FLI.pep
IICGCSPVQSFILFEGSIVCGTANQQMTAKSPARSARPLSQKKSTARSLIPQANFGGHARQSTLQGYRAKPLLSTASNATKRVAACIGTMCGGRREARIKPTGRAPEDCSVQICVRRRAEEPIADDTAPRSLS

SEQ ID NO: 65720 - protein, 145 aa, Zea mays; identical to SEQ ID NO: 44350
  Clone ID: 701186021_FLI.pep

SEQ ID NO: 65721 - protein, 244 aa, Zea mays
  Clone ID: 701186172_FLI.pep
PPQPFGFSQIPARRHGTSPSLSRWRAMASSSSSSPAPALAGEALRQKRILSSKLYLEVPSSKAPVVYSPAYDISFLGLEKLHPFESAKWGRICRYLTREGYLDKKRMVEPLEACKEDLLVVHTEAYLNSLKCSFRVSSIVEVPPVSLVPNWIVHRKLLHPFRKQVGGSILSAKLAFERGWAINVGGGFHHCSADEGGGFCAYADISLCIHFAFVRLNISSVLIIDLDAHQGNGHEKDFANDAFR

SEQ ID NO: 65722 - protein, 278 aa, Zea mays
  Clone ID: CC-ZMPO148038C03_FLI.pep
VRITQLSATMGSLANNIMVVGVVLAALVAGGSCGPPKVPPGPNITTNYNGKWLTARATWYGQPNGAGAPDNGGACGIKNVNLPPYSGMTACGNVPIFKDGKGCGSCYEVRCKEKPECSGNPVTVYITDMNYEPIAPYHFDLSGKAFGSLAKPGLNDKIRHCGIMDVEFRRVRCKYPAGQKIVFHIEKGCNPNYLAVLVKYVADDGDIVLMEIQDKLSAEWKPMKLSWGAIWRMDTAKALKGPFSIRLTSESGKKVIAKDVIPPNWRPDAVYTSNVQFY

SEQ ID NO: 65723 - protein, 468 aa, Zea mays
  Clone ID: CC-ZMPO148062H04_FLI.pep
LSLSSSSSTNPHKERMEKKPTILMNRYELGRTLGQGTFAKVYHGRNLASGESVAIKVIDKEKVMRVGMIDQIKREISVMRLVRHPNVVQLHEVMASKSKIYFAMEYVRGGELFARVARGRLKEDAARRYFHQLVGAVDFCHSRGVYHRDLKPENLLVDEHGNLKVSDFGLSALRECQKQDGLLHTTCGTPAYVAPEIINKKGYDGAKADIWSCGVILFVLLAGYLPFHDANLVEMYRKISRADVKYPQWFSPELRRLMPKLLEPNPNNRITIEKLVEHPWFKKGYRPAVMLAQPHGSSSLKDVQVAFSNADHKDSSSKVEQPADSSLKPASLNAFDIISHSRGFDLSSLFEVDQEQKASNSRFMTQKPASAIVSKLEQIAETERFMVKKQDGLVKLQGSKQGRKGQLAIDAEIFEVTPAFHVVEVKKSAGDTLEYEMFCSKGLRPSLSDICWSSRSEENMAPSVVQPS

SEQ ID NO: 65724 - protein, 253 aa, Zea mays
  Clone ID: CC-ZMPO14820007E08_FLI.pep
EMMSESEEHGSLLDKINDKINEKIHEYKHSSSSSSSSDSDDDKKPKKSKKKKLFGRKHPLHHVLGGGKAADLVLWRNKQASGSILVGVTVIWLLFEGIGYHLLTFLCHALIVFLTIWFIWSNAASFVNRSPPKFPEVILSEVQCMKVAHVARKEINEAFYTLRNVASGKDLKTYLMTVTVLWFISIIGSCFSFLTLSYTIFLMAYTLPMLYEKYEDQVDIVGEKALIEIKKQYKVIDAKFISKIPMLSEKKQH

SEQ ID NO: 65725 - protein, 405 aa, Zea mays subsp. mexicana
  Clone ID: UC-ZMROTEOSINTE013D05_FLI.pep
LLNQSGLEQIELMDKKTKVIVCVAAAHKLLSMMAMIIHSRKRKRNARRTGITYAPMHERDRIRIEYLNTKIWRDDTTCINMIRMKRGCFFHLTKHFRERGLLQDTIHMCVEQQVAMFLNTIGHNLRNRLIGTNFGRSGETVSRCFNKVLRAIGELRGELIRPPSLDTPTKISGNYRWDPYFKDCIGAIDGTHVRATVPRDMEHAFRGRKSYATQNVMAAVDFDLRFTYVLAGWEGTTHDANVLRDALERVNGLRVPQGKFYLVDAGYGAKPGFLPPFRGVRYHLNEWGNNPVQNEKELFNLRHSSLRVTVERAFGSLKRRFKILDDASPFFPFPTQVDIVVACCIIHNWVIQDGSDDFIIQDSNWPSHSHATSLVGQASEHAAMVALRQGIADQMWTDHQNYNEN

SEQ ID NO: 65726 - protein, 124 aa, Zea mays subsp. mexicana
  Clone ID: UC-ZMROTEOSINTE032G10_FLI.pep
LRDSLLPALQPGRLEIGVEARDDRRTQKKPRGPTATACACTSNPMRSVSVSALTALHLHDWMKGCAWSGQRRPSRIPFQPYPCVGLGQRAHGHCTTGSNVEVWPHTHLPLPLIHTGLLGEFLIL

SEQ ID NO: 65727 - protein, 426 aa, Zea mays
  Clone ID: UC-ZMFLMO17160D03_FLI.pep
GAWSRRRAGRVAPCTRQPRTSLQLQGRAGAETMGSPHQGHGVDGGGRSSDEEGDAGSWRLRMDSGFSVPDRFHRQPPFYARIFGGSHGKQRKIAKYYKKQENLLKDFSEMETMNEMGGLDQNAPTEEEQKQLAKSERFAINLSNAVNLVLFVTKVVASVESASMAVIASTLDSLLDLLSGFILWFTAYKMKKPNKYNYPIGKRRMQPVGIIVFASVMGTLGFQVLIESGRQLITQEHADFKFKQELWMVISMSSVAVVKFFLMLYCRTFKNEIVRAYAQDHFFDVITNSVGLVSALLAVRYKWWMDPVGAILIALYTITTWARTVLENVGTLIGKSAPAEYLTKLTYLIWNHHEEIQHIDTVRAYTFGTHYFVEVDIVLSGDMPLSQAHDIGESLQEKLEQLPEVERAFVHVDFEFTHRPEHKAEV

SEQ ID NO: 65728 - protein, 309 aa, Zea mays
  Clone ID: UC-ZMFLB73008E05_FLI.pep
NAAPAASSSGPLLHSAQLAVAARSKQHSSKQKEEKEQREPRREARRRSSSSRRRTHRMAMRHRARSSPTSPLTPSSSARTNKILGFSVSLILINLASIMERADENLLPAVYKEVSAAFNAGPADLGYLTFVMNFLKSIASPLAGILALHYDRPIVLAIGTVFWALSTGAVGVSQRFGQVAFWRAVNGLGLAIVIPALQSFIADSYKDGTRGAGFGLLSLIGAVGGIGGSILATIMAGKDYWGFPGWRVAFMMVALVSLIIGILVYLYATDPRRIPGNRLLDEDEYERCAILFISPSWRGSLINTTMVAK

SEQ ID NO: 65729 - protein, 369 aa, Zea mays
  Clone ID: UC-ZMFLB73274H12_FLI.pep
YNSIHSTLEFENWGKRSLRRRRRRSQAATRQLRAPAMASPPRNVGTRTTSNPEIPEFLVGPAGRPVPAVGLGTASFPFVEENVRTAVLAALELGYRHLDTASLYRSERAVGDAVAEAARRGIVASREEVFVTTKMWCSQCHPDLVLPSLKESLQNLQMDYVDLYLVHWPIAAKPGKPQFPFKREDIMPMDLIGVWRAMEECHRLGLARMIGVSNFTTKKLQELLAIAKIPPSVNQVEMNPIWQQKRLAEFCKDKGIHLTAYSPLAGQSTSKVNPVMQSEVLQEVAKARGKSVAQISLRWIYEQGASVVVKSFGRDRLKENVEIFDWELTNEDRRKISQIPQHKRVTVLGILSPDGVSSVDLAELDIVEM

SEQ ID NO: 65730 - protein, 283 aa, Zea mays
  Clone ID: UC-ZMROB73002B11_FLI.pep
LCLLPLITVHSHVAAVDSDDLPVDPAGGVGAQEPHHGRHVRWLGEPPHGALARGGGHALLRFARVEHGRGHGARRHGVGRDPHPSELLGQHLCHGLHGRLAGHVRAVPGPQRPHVGGREGDDAARAAARQPPRRLPAAQERAARVHAEREVPLLGRRVRDPRVRRVLHPRRGHQHVQLRPERRLRRVEQPRHLRRVRHVRCHRHGARVAVACRRGVVEGRHELVRGGRVADEADHDAGAQGRQVRGHRRADAPGASCHDGHPAGERLVGWMRICLWEHAAAAA

SEQ ID NO: 65731 - protein, 360 aa, Zea mays
  Clone ID: UC-ZMROB73054E07_FLI.pep
QQPRDGSRGAEREKERKRERLCSLPAAERRMKKCPSELELEAFLRGREDATAAAAAAVAEQKPTHDIAALAPFGAGGVFPSSDLSAFSFADSNTLNGTGNIHNHLWSHNHNVRHPAVSTTIESQSSICAAAASPTSATNLYLKESQALGGTSGSDSDSDSLLDIEGGPCEQSTNPQDVKRMRRMVSNRESARRSRKRKQAHLADLETQVDQLRGENASLFKQLTDANQQFTTAVTDNRILKSDVEALRVKVKLAEDMVARGALSCGLGSLGLSPALNPRQACRGPDVLSVSGLDFPGADDACFTGLSPAEQLQLQSSPLQSIAASLESLDNRMASEVTSCGGPGVDVWPWDHHSNGGLSK

SEQ ID NO: 65732 - protein, 477 aa, Zea mays
  Clone ID: UC-ZMROB73080E02_FLI.pep
LVDQSRVAMMMQLGARSLVRRFSRLAAAGAPAETTSAGVPRMPAFDHVPLPYDGPSAADIARKRAEYLSPSLFHFYSKPLNIVEGKRQYLYDEHGRRYLDAFAGIATVCCGHCHPDVVDAITRQAKRLQHSTVLYLNHVIADFAEALASKLPGDLKVVFFTNSGTEANELAILMARLYTGSHDIISLRNSYHGNAAGTMGATAQKNWKFNVIQSGVHHAVNPDPYRGAFGSDAEKYVRDVQEIIEFGTTGQVAGFISEAIQGVGGIVEVSPGYLPLAYDKVRKAGGLCIADEVQAGFARVGSHFWGFETHGVVPDIVTMAKGIGNGIPLGAVVTTPEVAQVLTRRCYFNTFGGNPLCTAGGLAVLEVLEKERLQENAFVVGSYLKDRLRGLQEKHEIIGDVRGTGFMLGIELVTDRQLKTPAKDEICHAMEHMKDMGVLVGKGGFYGNVFRITPPLCFTKEDADFFVEVMDIALSKL

SEQ ID NO: 65733 - protein, 377 aa, Zea mays subsp. mexicana
  Clone ID: UC-ZMFLTEOSINTE011D09_FLI.pep
QARNPPMAHRVLLLLSLAAAATVAAAVDAEDPLIRQVVPGGDDNDLELNAESHFLSFVQRFGKSYKDADEHAYRLSVFKANLRRARRHQLLDPSAEHGITKFSDLTPAEFRRTYLGLRKSRRALLRELGESAHEAPVLPTDGLPDDFDWRDHGAVGPVKNQGSCGSCWSFSASGALEGAHYLATGKLEVLSEQQFVDCDHECDSSEPDSCDSGCNGGLMTTAFSYLQKAGGLESEKDYPYTGSDGKCKFDKSKIVASVQNFSVVSVDEAQISANLIKHGPLAIGINAAYMQTYIGGVSCPYICGRHLDHGVLLVGYGASGFAPIRLKDKPYWIIKNSWGENWGENGYYKICRGSNVRNKCGVDSMVSTVSAVHASKE

SEQ ID NO: 65734 - protein, 244 aa, Zea mays subsp. mexicana
  Clone ID: UC-ZMFLTEOSINTE014C07_FLI.pep
FSSCSLLRTALCLASIAMRALGTVAWAWLLLLQQLAGASHVVYENLEVEAATAAAVRPSIVDPLLRTGYHFQPRKNWINDPNAPLYYKGWYHLFYQYNPKGAVWGNIVWGHSVSRDLINWVALQPAIEPSIPSDRYGCWSGSATTLADGTPAIMYTGVNRPDVNYQVQNVAYPRNRSDPLLREWVKPSHNPIIVPGGGINATQFRDPTTAWRGAGDGLWRLLIGSVTEARHGVAYVYRSRDFRR

SEQ ID NO: 65735 - protein, 492 aa, Zea mays subsp. mexicana
  Clone ID: UC-ZMFLTEOSINTE015B04_FLI.pep
DEGERRSGVGGGREGAAAGREARRADAGTAGGGDADGRAVLPVQPGPEHRGDRADGVLLQALLAARRRRRQGRGRGSRAPRRAGARAGALPPAGGAAGRQPGDEAHRGADRRGRRVRGGRRRLRPRRRRRPHQARPRRARPARLLRPRRQAHPRDAPNDRAGDEVQVWGLRARPGHEPLHVRRHRRHGVRQLVGGDGARRRRAHRAAVPGPKRPEGARPARAHLPPPRVRRDPRRLRHGGALRRAGAAVPLLLLRPGPAGARARPGARRRRPGPLHHLRGAVGAGVARAHQGAGAGARAAHQAAVRRGRAAPVRAAAPAGLLRQRHRAHQRPCHGRRAAVRARVARGGAGAGRRADGHRRLHALGGGLLRGDAGPAVARVHAAHHHLVAARVPRRRLRLGRARHVGPGHAAGEGSHPVPGAREGEEEHQRAARPASHRDGRLPRAHGRDMIHSSVMTDMDGLLLYIHIRCRVLIHSSVARCYSTTVLILDLC

SEQ ID NO: 65736 - protein, 223 aa, Zea mays subsp. mexicana
  Clone ID: UC-ZMFLTEOSINTE067H04_FLI.pep
LSIRQPEICHDLAPDQEKLSSTESQLIYWDSKVSEADMDAMWKHPDVYKEWIKSGERRGNVRFSHDAKNRPYLSRVEVKAVAEIIISRHLSTRGVKPEALAALAEVCSMRFVHGVSTRTGLMGIDYPTAVWLSRDCGYRAYTLISVDDLYNPFASMYFGASYLAWLSQYEGREQSYEFIVQAYLGGPENVSLQETGPFWNQFLESLTQYQDPKKDNNNSCCIL

SEQ ID NO: 65737 - protein, 477 aa, Zea mays subsp. mexicana
  Clone ID: UC-ZMFLTEOSINTE073B07_FLI.pep
PDPQRKSTVSEGFFSPGEALMAAADPETAAALRGEVAALRMRVQELEAENQRLARIASTCTCGFKDGSVGSITAHHNVKFHQNSAMEKDLSSPFDHTVISNANEMQCNRNADDNGLPEDSSKHTKRTGRKVGILSHCPKRLVALKVMYFGQRFYGFSSEGNIEPTVESEIFKALERAKLMVANRKESCYSRCGRTDKGVSATGQVISLYLRSNIKDVGGDMLDERSEIDYVKVLNRILPRDIRVLGWCPVPADFHARFTCLSREYTYLFWKGDLDILEMQKAASKFIGEHDFRNFCKMDAANVSNYRRHITEFTISACDKRSNNDELCSMTIRGSAFLWHQVRCMVAVLFLIGQGLESPSVVDSLLDIMKTSRKPQYKMAPELPLILQSCLFDKANFMCSADASRSLTEHLNDEYRHHMLQAEIFHIASSCLPFPEPNSSETLQKKRNHIPLLSRETEPSYEERILKVKTKLADNLK

SEQ ID NO: 65738 - protein, 319 aa, Zea mays subsp. mexicana
  Clone ID: UC-ZMFLTEOSINTE110G12_FLI.pep
LTITIAASLHHQLPIAAPAPPHLPTLLTSPLRTAAPPLPPPTRAPMAATAIAVRLHPTAARHVASARRARLGAVRAQSAPAAAAAALTQDDLKRLAAVRAVEQVKSGMVLGLGTGSTAAFAVAEIGALLAAGKLEKIVGVPTSKRTFEQAQSLGIPLSTLDDNPLIDLAIDGADEVDPDLNLVKGRGGALLREKMVEAASDKFIVIVDETKLVDGLGGSGLAMPVEVVQFCWKYNLVRLQELFKEEGVEAKLRFEGDKPYVTDNSNYIVDLYFKTPIKDALAAGQEIAALEGVVDHGLFLNMASSVIIAGTDGVSVKTK

SEQ ID NO: 65739 - protein, 578 aa, Zea mays subsp. mexicana
  Clone ID: UC-ZMFLTEOSINTE45E09_FLI.pep
YPVFIHSFMDLVAEGHMQEARSFFHTFREDHEVMHSRDLQKLEGVLSPSHLEEMELARSFRKNKFKIKLCEYSYELLLQYLQKTQALVVLGVINEHITFEVSPGQPSLISDDADVVALIGTSKDLAKQINQKEVHWGLLEDSVEERMEKALAESDKIEAESKDADAEDNKKRNAEGGKQGASLKKAKKDKLVGATGKSVRTETSMVSVAPRVKPELTLPATPVEVEQSILEDLRNRAQLNSVALPSVSFYTFLNTHNGLNCSSISHDGSLVVGGFSDSSVKVWDMSKMGQPAKISRSQGENGPSQGERISTLDEGKRTYTLFQGHSGPVYSAAFSPFGDFLLSSSSDSTIRLWSTKLNANLVCYKGHNYPVWDVQFSPVGHYFASASHDRTARIWSMDKIQPLRIMAGHLSDVDCVQWHVNCNYIATGSSDKTVRLWDVQTGECIRMFIGHRSMVLSLAMSPDGRYMASGDEDGTIMIWDLSTGRCVSPLLGHSSCVWTLAFSCEGALLASGSADCTVKLWDVASSTKTLKTEDTKGSSANRLRLLKALPTKSTPVYSLRFSRRNLLFASGALSLSSS

SEQ ID NO: 65740 - protein, 254 aa, Zea mays subsp. mexicana
  Clone ID: UC-ZMFLTEOSINTE47G03_FLI.pep
LRDGPPRLVGFSSQQNISLPRNEASLAYRVAPPPVGTRAPTRPRHPMTIAMAAASLPCRRLPPAAGAEAAAFAPSSTEPRHVGQESCDRSQVSTQRTWKPWAQRGSTRTFSPSANSPRQMAQTSAATAAAPSAPHAPYTSTGMLRSARFLSPPAPPSSPAGARRAQRMRQRASELRPIAKRSANSSAARMMTMLVSKLPSLPPELLLSARCPSPSAALPGAGDPMYQLIDLACTPMGTRRYPDTAPPSSFPSSY

SEQ ID NO: 65741 - protein, 343 aa, Zea mays subsp. mexicana
  Clone ID: UC-ZMFLTEOSINTE64D01_FLI.pep
HTHTAQGRETRRDPKFPGGGLWLVIKLAPREPRTRTPAYSPNASHRPRPPARLPSSSSCPSIRRGLSLACSSLPPPPAGRSSSRPTPFRSTMAATAPNGNPTVSSLAATVPVQTVLFDIDGTLCDSDPLHHVAFQEMLLEIGYNNGVPIDEEFFIKNIAGRSDVEAAQNLFPDWELEKGLKFLEDKEAKYRSLAKERLVPVKGLAKVVQWVKDHGYKRAAVTNAPRINAELMISLLGLSDFFQAVIVGGECEQPKPAPYPYLRALKELQVSAEHSFVFEDSPAGIRAGVAAGMPVVGVATRNPEKSLVEAGAALLVKDYEDPKLWAALEEMDGEEAKLKKASE

SEQ ID NO: 65742 - protein, 245 aa, Zea mays subsp. mexicana
  Clone ID: UC-ZMFLTEOSINTE91D11_FLI.pep
APFFFRCSMSMASRPPLRRRRRLPLVPLLVLLCLSPACAAGRVPVSVYYEALCPFCSAFVVNDLSRVFRDGISSIAELRLVPFGNGRVSADGTVTCQHGEDECQLNAIEACVIRIWPDAEQHFPFIQCVEHLALTRKWDAWPSCFHETGLAYQPAIDCYISGYGRQLVLQYAAETNALQPPHRFVPWVVVNGKPLGDDYMNFEAYICSAYDGNLPKACKGKHLAIAQETKASRGDKVCPASKTIS

SEQ ID NO: 65743 - protein, 91 aa, Zea mays
  Clone ID: LIB143-004-A3_FLI.pep
MKSGKYTLGYKTVLRTLRNSKSKLVIIANNCPPLRKSEIEYYAMLAKVTVHHFHGNNVDLGTACGKYFRVCCLSIIDPGDSDIIKTTPGEQ

SEQ ID NO: 65744 - protein, 517 aa, Zea mays
  Clone ID: LIB143-041-D1_FLI.pep
PVPLRSRVGRGAPAMGPDGGGVIGAVVYGALAVLAVRLVLSYKSAAHALRRAWRWADERAQAYQHYEVPRLAADGAENPLFRKAAAYVASLPSLEDADAACVLSSAAKSNGFALRLGPGHAARDAFLGARLAWTSAGADRLVLRVRRHDRTRVLRPYLQHLESVADEMEARRRELRLYASASASGAGPSPAPRWTSAPFTHPATLDTVVMDPELKARVRADLESFLKGRGYYHRLGRVWRRSYLLYGAPGTGKSTFAAAMARFLGYDVYDIDLSRAGVGDDLRALLLDTTPRSLILVEDLDRYLRDGETAAASVLGFMDGVSSCCGEERVMVFTMSGGKDGVDPAVLRPGRLDVHIHFTMCDFEAFKALASSYLGLKDHKLYPQVEEGFQAGARLSTAELGEIMLANRGSPSRALRAVIGALQHVAPSPQPQRTLAAARPPRLTSRWSGHFDEASAATSEASGGAGGFAKDAPIREIKKLYGLIKYRSRKDAGVVPVDDSAASQNGRGSDVSYEKDR

SEQ ID NO: 65745 - protein, 184 aa, Zea mays
  Clone ID: LIB148-012-C10_FLI.pep
SAGSKQRLDLVMDGLVGLLKVRVVRGINLAYRDARGSDPYVVLRLGKKKLKTSVKKRSVNPIWQEELTLTVTDPSQPLKLEVFDKDTFSRDDPMGDAEVDVAPLMEAVSMNPREESLRNGAIIRSERPSARNCLADESHVCWRNGKFAQDMILRLRNVESGEIQLQLQWVNFPPGPAPAAATTR

SEQ ID NO: 65746 - protein, 219 aa, Zea mays
  Clone ID: LIB189-004-B10_FLI.pep
LRTKSAAAEMGAECRYEVAQAAYIKLALHALKHPATAVNGLLVGRLVEPSSSPAVVSVIDAVPLSHHPHHLPLLPTLELALTLVEDHFATQGEGLAVVGYYHANPRCDDTELPPVAKRVGDHIFRYFPRSAVLLVDNKKLEEAVKGKFSDAVIQLHTRDSSKSWRQAGSDGSSQLILKEPSTNVVLADHVTTKKWEKIVDFDDHLDDISKDWSNPGLLD

SEQ ID NO: 65747 - protein, 218 aa, Zea mays
  Clone ID: LIB189-004-E6_FLI.pep
LILPAGSGPIPNHLISSAEVRRAAERQRVIPGCMCGGTAAAARPCLSMFACHPYRTYAHVEASLLELAVLLAERAALAAAVHAAVGAGAHLEAVLRAHLGAVEAGVDALTAGEQHDERVQRPAGAAGRGAPVDDLRGLPERDARAHARHAAVVAVVEAVAEPGGPGGDGRLRLHRERRRHRAARLVVAAAAAEGDARGQRLRTFVCRLGIHGGAVEAS

SEQ ID NO: 65748 - protein, 349 aa, Zea mays
  Clone ID: LIB3060-001-B10_FLI.pep
ATCRLFSFLTSSLRSQFEGCPTLAPVGGGGEDRGLPEEAVMAATIQYNRSNPAVKRILQEVKEMQSNPSPDFMSLPLEEDIFEWQFAILGPRDSEFEGGIYHGRIQLPSDYPFKPPSFMLLTPSGRFEIQKKICLSISNYHPEHWQPSWSVRTALVALIAFMPTNPGGALGSLDYKPEDRRALAIKSREVPPKFGSPQRQKLIDEIHEQMLSKAPPIPQTLPNVPNEELAPDSCDEHADKVDEGGNTSKSMSGSSSGHPVPEAESLAAENTGEASAVEVANHQVPEASRRESIPRVPSSLQNAAIATQKPKHDRLLTLAAFGLTLAIMALVIKKFLKINGLGGFIEGKF

SEQ ID NO: 65749 - protein, 351 aa, Zea mays; identical to SEQ ID NO: 47350
  Clone ID: LIB3060-062-B5_FLI.pep

SEQ ID NO: 65750 - protein, 179 aa, Zea mays
  Clone ID: LIB3060-079-A3_FLI.pep
LRAGGRRLLAPGLRRLGLGTGASGEAGPAAAAAGVRAYHERVVDHYNNPRNVGSFDKDDPNVGTGLVGAPACGDVMKLQIRVDENSGKIVDACFKTFGCGSAIASSSVATEWVKGKPMDEVLTIKNTEIAKHLSLPPVKLHCSMLAEDAIKAAVKDYEAKKSKMGQKGEDSPSEKAAEA

SEQ ID NO: 65751 - protein, 437 aa, Zea mays
  Clone ID: LIB3060-079-H3_FLI.pep
QLATMASITVTRKSQSFVVPSSTPTPTTETLELSPIDRVPGLRHTVRSLHVFRRKDAAASAAHYDAAAAGRPAEVIRAALSRALVDYRPFAGRFVGSLYAGEASVECTDDGAWFVDAVTDCSLEDVNGLDYPLMVSEEELLPAPEEGVDPTSIPIMMQVTEFACGGFVVGLVAVHTLADGLGAAQFINAISEFARGVVKPTIAPIWARELIPNPPKMPPGPPPSFECFGFKHFVMDVAVNNIAHVKSEYFQTNGHYCSTFDVAIAKVWQARTRAIKYEPNFKVHVCFFANTRHLLTHVLPKVGGFYGNCFYPVTVTATAEVVASSRLLDVIRMIRDGKARLPLEFSRWSTGNVKVDPYQLTFKHNVLFVSDWTRLGFFEVDYGWGVPNHILPFTYADYMAVAVLGAPPSMKKGTRIMTQCVEEEHLVDFKAEMKAFF

SEQ ID NO: 65752 - protein, 201 aa, Zea mays
  Clone ID: LIB3060-082-D12_FLI.pep
HYCVEVAKLSLIIMYFMRKMVISYSLHFKLADKCVLASSGFQGDIKALQKNLAARELLYQHQHNKRMSCPAMAQLLSNTLYYKRFFPYYAFNVLGGLDSEGKGCVFTYDAVGSYERTGYSAQGTGSTLIMPVLDNQLKSPSPLLLPVRDAVTPLSESEAIDLVKDVFASATERDIYTGDKLEIVVINKAGTMREYIDLRKD

SEQ ID NO: 65753 - protein, 247 aa, Zea mays
  Clone ID: LIB3060-084-F2_FLI.pep
SLSGHTAPTDDNSRQQLGQPATAAHSRLTTNRLVHLLDLGARAAAAGRGVLVHAASAAHVFTRALVHLGDDGVAEALQLLHLVLELVRLGELVGVQPADGRVDGVLDLLLVIGRQLGRNLLVLDRVAHVVGVVLQRVLGLHLLLVLLILRLVLLSVLNHLLDLLLGETALVVGDCDLVLLPRCLVLGRHVQDAVGVDVKAHGDLWHTTGCRGDAGELELAQQVVVACPLKLYLWLVGTFVVVIFWTS

SEQ ID NO: 65754 - protein, 444 aa, Zea mays
  Clone ID: LIB3060-088-D8_FLI.pep
PLQGPCHPHKAWTLGPAGGEEDKTNAAAGMMAICSAHTTTISLRSPCTTTVSNAAAGLVQKQVIFLTSINRRSGSRRRGGGVSRTLLQVSCSADGNKPVVIGLAADSGCGKSTFMRRLTSVFGGAAEPPRGGNPDSNTLISDTTTVICLDDYHSLDRTGRKEKGVTALDPRANNFDLMYEQVKAIKQGQAVQKPIYNHVTGLLDPPELITPPKIFVIEGLHPMFDERVRDLLDFSIYLDISDEVKFAWKIQRDMAERGHSLESIKASIEARKPDFDAYIDPQKQYADAVIEVLPTQLIPNDDEGKVLRVKLIMKEGVDNFNPVYLFDEGSTISWVPCGRKLTCSYPGIKFAYGPDIYFGNEVSVLEMDGQFDRLDELIYVESHLSNLSTKFYGEVTQQMLKHADFPGSNNGTGLFQTIVGLKIRDLYEQIVAERAGAPVEAAKV

SEQ ID NO: 65755 - protein, 504 aa, Zea mays
  Clone ID: LIB3060-088-F9_FLI.pep
TPSVCQRLPAPLSLPLPSLPRKTMVADRLRLALLLSACLCSAWARPRLEPTIRLPSERAAADDAVGTRWAVLIAGSNGYYNYRHQADICHAYQIMKKGGLKDENIVVFMYDDIAHSPENPRPGVIINHPQGGDVYAGVPKDYTGREVNVDNFFAVLLGNKTALRGGSGKVVDSGPNDHIFVFYSDHGGPGVLGMPTYPYLYGDDLVDVLKKKHAAGTYKSLVFYLEACESGSIFEGLLPNDINVYATTASNAEESSWGTYCPGEFPSPPPEYDTCLGDLYSVAWMEDSDFHNLRTESLKQQYNLVKDRTAVQDTFSYGSHVMQYGSLELNVKHLFSYIGTNPANDDNTFIEDNSLPSFSKAVNQRDADLVYFWQKYRKLADSSHEKNEARRELLEVMAHRSHVDSSVELIGSLLFGSEDGPRVLKAVRAAGEPLVDDWSCLKSTVRTFEAQCGSLAQYGMKHMRSFANICNAGILPEAVSKVAAQACTSIPSNPWSSIHKGFSA

SEQ ID NO: 65756 - protein, 185 aa, Zea mays
  Clone ID: LIB3060-098-E10_FLI.pep
KRTNSIRLQIALLHPSAATGAGREIRLRALAADAAGELDVFGHDGDALGVDGAEVGVLEQADEVGLGGFLEGQDGVALEPQIRLEVLSDLTDQALEGQLPDQQLRALLVLADLAQSHRPGPVPVGLLHAAGRRRRLPRRLGGELLARGLASGGLAGGLLRTSHLLLSLAARFLPCLDGTNLRATM

SEQ ID NO: 65757 - protein, 259 aa, Zea mays
  Clone ID: LIB3061-036-F8_FLI.pep
DLYQLPTYIVKYTSNILAPMAAKIFALLALLALSASVATATIIPQCSQQYLSPVIAARFEYPSIQSYRLQEAITASILRSLALTVQQPYALLQQPSLVNLYLQRITAQQLQQRLLPTINQVVAANLAAYLQQQQFLPFNQLAGVNPAAYLQAQQLLPFNQLVGSPAAILLQQQLLPFRLQVVANIAAFLQQQQLLPFYPQVVGNINAFLQQQQLLPFYPQDVANIVAFLQQQQLLPFSQLALTNPTTLLHQPTIGGTIF

SEQ ID NO: 65758 - protein, 383 aa, Zea mays
  Clone ID: LIB3061-046-C4_FLI.pep
GRSSKDMTAMPHPRHRGAAKKPMWIIVLLSLVCVALMGAYVYPPRRYSACYFFASSVCTPFKDWLPAVARERTDEEIVSSVVIRDLLSMPMAMSKNPKIAFMFLTPGSLPFEKLWEKFLQGHDGRYSIYIHASREKPVHSSSLFVGREIHSEKVVWGRISMVDAEKRLLGNALEDVDNQFFVLLSDSCVPLHTFDYIYNYLMGTNVSFIDCFFDPGPHGTGRYTMEMLPEIEQRDFRKGAQWFAITRRHALLILADNLYYNKFKLYCKPAEGRNCIADEHYLPTLFNMVDPGGIANWSVTHVDWSEGKWHPRSYRAADVTYQLLKNITSVNENVHITSDDKKVVTQTPCMWNGTKRPCYLFARKFYPESLNNLLKLFSSYTSA

SEQ ID NO: 65759 - protein, 263 aa, Zea mays
  Clone ID: LIB3061-073-D3_FLI.pep
CYSGNTDGKPSEGKDKSPTKRSKGSLGSLNMLTGKNPSEHGKSSGASGNGVTSQSGESGSDSSSEGSEGNSHNDSHHKESGQEHDGDVRSSRNGVSRLQSEGKLNQAMAILPIPSSGPATDPTTNLNIGMDYWANTASSAPAIHGKATSTTVPGAVVPAEQWTQDEHELKKQRRKQSNRESARRSRLRKQAECEELAQRADVLKQENASLRDEVNRIRKEYEELLSRNNSLKEKLEGKQHKTDEAGLNNKLQHSGDDSQKKGN

SEQ ID NO: 65760 - protein, 251 aa, Zea mays
  Clone ID: LIB3061-094-D3_FLI.pep
SARSDPTVARCCSGRLLCVAWARPEPGGRRSLPRVSKMAAPPARARADYDYLIKLLLIGDSGVGKSCLLLRFSDGSFTTSFITTIGIDFKIRTVELDGKRVKLQIWDTAGQERFRTITTAYYRGAMGILLVYDVTDESSFNNIRNWIRNIEQHASDNVNKILVGNKADMDESKRAVPTSRGQALADEYGIKFFETSAKTNLNVEQVFFSIARDIKQRLAESDSKPEDRTISINRPEGGEASASQKSACCGS

SEQ ID NO: 65761 - protein, 252 aa, Zea mays
  Clone ID: LIB3061-098-B10_FLI.pep
YIVKYTSNILAPMGAKIFALLALLALSASAATSTFIPQCSQQYLSPVTAAGFQYPTIQSYMVQEAIQASILRSLALTLQQPYALLQQPSLVHLYLQRIAAQQLQQQLLPTINQVVAANLAAYLQQQQFLPFNQLAGVNPAIYLQAQQLLPFNQLVGSPYAFLLQQQLLPFHLQAVANIVAFLRQQHLLPFYPQVVGNINAFLQQQQLLPFYPQNVANIVAFLQQQQLLPFSQHALTNPTTLLQPPTIGGAIF

SEQ ID NO: 65762 - protein, 364 aa, Zea mays
  Clone ID: LIB3062-011-D10_FLI.pep
AARVFVGRPLHRWRASTRPPVDAPLPPMPQVESATASEAPPPQDAWLVELGSRLPQWESLRDSSKVIIPISISRVNQFDAARLDVEMSAMLKEQLVKVFSLMKPGLLFQYEPELDAFLEFLIWRFSIWADKPTPGNALMNLRYRDERAAPITGKEVRTGLEGPGLSVSQKIFYCISFVGGQYVWSRLQSFSAFRRWGDSEQRPLARRAWALMRNAEVFYRAASFFNLLLFLYGGRYKTVVERILKARLVYGSPNMNRAVSFEYMNRQLVWNEFSEMLLLLLPLLNSSSVKKFLLPFSKDKSGGSSGDEADCPICRSSPSIPFIALPCQHRYCYYCLRTRCSATTSYRCTRCDGAVVAIQRLGSG

SEQ ID NO: 65763 - protein, 584 aa, Zea mays
  Clone ID: LIB3066-011-D1_FLI.pep
SAIPREISRVRVLVLATAMATPTSTVTRGGNRHWHCTQVLPLLLLVPLCFALLVESGGIPTTLDGPFPPATRAFDRALRQGSNDVPLTDPRLAPRVQPPAPEQIALAASADADSLWVSWVTGRARVGSSNLAPLDPAAAGSEVWYGERSAADAASYPHVVTGSAEVYSQLYPYPGLLNYTSGAIHHVRLRGLRPATRYYYRCGDSSLPGGLSDEHSFTTLPATGAGCYPRRVAVVGDLGLMGNSTATVDHLARNDPSLVLMVGDMTYANQYLTTGGKGVPCFSCSFPKAPIRESYQPRWDGWGRFMEPITSKIPLMVIEGNHEIEPQGHGGEVTFASYLARFAVPSKESGSNTKFYYSFNAGGIHFIMLGAYIDYNRTGVQYSWLEKDLQRVDRRATPWVVAAWHPPWYNSYSSHYQEFECMRQEMEELLYEYQVDIVFSGHVHAYERMNRVFNYTLDPCGPIYIGIGDGGNIEKIDMDHADDPGKCPSPSDNHPEFGGLCHLNFTSGPAKGKFCWDRQPEWSAYRESSFGHGILEVLNSTYALWTWHRNQDAYAENSVGDQIYIVRQPDKCLLQPASASSLNW

SEQ ID NO: 65764 - protein, 432 aa, Zea mays
  Clone ID: LIB3066-014-D5_FLI.pep
SCQSCMISNGKPHLDTVRKKVVEISGRDEQEVMVAACPYRICPLGAHIDHQGGVVTAMTINYGVLLGFVPSNGSEVLLHSGQFEGAIRFRVDDLQKPIDKPENINWGSYAKGAVSALQNSGYDLRKGIIGYISGVKGLDSSGLSSSAAVGIAYLLALEHVNDLVISPVDNIQLDKYIENKYLGLENGILDPSAILLSRYGYLTFMDCKTASPSYVCFSELNKSQQPQGQLPFKILLAFSGLQHNLPKKRGYNTRVSECKEAARALLHASGCEDTPNILCNVDPVVYETQKCVLEENLSRRAEHYFFEMKRVTKGRDAWAHGNLQELGQLISESGRSSILNYECGSKEMIQLYEILLKAPGALGARFSGAGFRGCCLAIVESDRAEDAAAYVRAEYEKAQPELVSRIPADRRVLVCEPGDSARVILPDPHLSS

SEQ ID NO: 65765 - protein, 74 aa, Zea mays
  Clone ID: LIB3078-018-B6_FLI.pep
YCIITLGLYTRWYIRRVRYVNTAIILVITRLTRTSQRSPLYSVHTDNDYGHTVAAAAALTRTRRTPPACLHFIM

SEQ ID NO: 65766 - protein, 156 aa, Zea mays
  Clone ID: LIB3078-020-B10_FLI.pep
RASPSRSSRFTAPPLASPTAARMPFKRFVEIGRVALVNYGKDYGRLVVIVDVVDQNRALVDAPDMVRCQINFKRLSLTDIKIDIKRVPKKSTLIKAMEEADVKTKWENSSWGKKLIVQKRRAALSDFDRFKVMLARIKRGGAIRQELAKLKKASTA

SEQ ID NO: 65767 - protein, 189 aa, Zea mays
  Clone ID: LIB3079-002-G5_FLI.pep
STSSLFTAVAASKQATSSMADAAHVFLLVAVAAALAGRSDGAWCVCRPELADSALQKALDYACGAGADCKPILQSGACFAPDTVKAHCSYAVNSFYQRNSQNPQACVFSGTATLSNSDPSGNGCTYPATPSAAATTSNSSPGVYSPPTMGPTALNDNSAAASVLPVAGLTTVRLLILASCSLVALCIGA

SEQ ID NO: 65768 - protein, 135 aa, Zea mays; identical to SEQ ID NO: 38785
  Clone ID: LIB3088-050-G10_FLI.pep

SEQ ID NO: 65769 - protein, 66 aa, Zea mays
  Clone ID: LIB3115-005-C9_FLI.pep
YDYVDYAITHRIDVVTLASTACSFTASFHNYYKSITRCKESAPMASTNMASATSRFMLAAGVPTGS

SEQ ID NO: 65770 - protein, 212 aa, Zea mays
  Clone ID: LIB3150-022-D11_FLI.pep
RSTARTMRPPRGRGGGGRFGGGGGRGGGGGRFGGGGRGGRFGGGFRDEGPPAEVVEVSTFLHACEGDAVTKLTNEKVPYFNAPIYLQNKTQVGKVDEIFGPINESYFSVKMMEGIIATSYKEGDKFYIDPMKLLPLSRFLPQPKGQSQGAPRGGGRGGRGGGRGRGGSFRGGRGPPRGGGRGPRGGSRGGLEGEEGSRCSLSLMMFFFVEAS

SEQ ID NO: 65771 - protein, 363 aa, Zea mays
  Clone ID: LIB3150-032-E2_FLI.pep
YSNKGHIARLPDWFLTMRAHERAASLALACLSLAPLLVNVNPNVNVVLTACLTVYVGCYRSVKPTPPSETMSKEHAMRFPLVGSAMLLSLFLLFKFLSKDLVNAVLTAYFFILGIVALSATLLPSIKRFLPKEWNDNLIVWRAPFFHSLSVEFTKSQIVASIPGFFFCLWYASKKHWLANNVLGLAFCIQGIEMLSLGSFKTGAILLGGLFVYDIFWVFFTPVMVSVAKSFDAPIKLLFPTADAERPFSMLGLGDIVIPGIFVALALRFDVSRGTKKRYFNSAFLGYAVGMTVTIVVMNWFQAAQPALLYLVPGVIGFVAVPCLWYGEVKQLLEFDESKTESEEGSTEEEQDDDSSKGNKKVD

SEQ ID NO: 65772 - protein, 181 aa, Zea mays
  Clone ID: LIB3150-117-B8_FLI.pep
LASLPYSRRRRCRCCKRQLAVVRIVHSNAAMGRMHSRGKGISSSALPYKRTPPTWLKTAASDVEEMITKAAKKGQMPSQIGVLLRDQHGIPLVKSVTGSKILRILKAHGLAPEIPEDLYFLIKKAVAIRKHLERNRKDKDSKFRLILVESRIHRLARYYKRTKKLPPTWKYESTTASTLVA

SEQ ID NO: 65773 - protein, 296 aa, Zea mays
  Clone ID: 700356904_FLI.pep
PRTGLLPSAASPVLHSCIRSRFTPSGRPPRSFSPPSLSLRRLGRLPPPPYARSRGPRHSYSSVSSPGDARFRNDLCNNCKRPGHFARECPSVAVCHTCGLPGHIAAECSSKGTCWNCKEPGHMANSCPNEGICRNCGKSGHIARDCTAPPVPPGEVILCSNCYKPGHFREECTNEKACNNCRQSGHIARNCTNDPVCNLCNVAGHLARQCPKSDTLGERGGPPPFHGVGAPFRGVGVPFRGGLSDVICRACNQIGHASRDCMAGAFMICHNCGGRGHTAYECPSVSLIERFPPRRF

SEQ ID NO: 65774 - protein, 274 aa, Zea mays; identical to SEQ ID NO: 58813
  Clone ID: 700464936_FLI.pep

SEQ ID NO: 65775 - protein, 521 aa, Zea mays
  Clone ID: 700471169_FLI.pep
RRRCAMSMLDTFFSKGGGGGFRGAKCKTLLKLSIPRIKLLRNRRELQLRQMRRDIAKLLEAGQEATARIRVEHIIREENMMAAQEILELFCELIAVRLPIIEAQKECPIDLKEAISSVCFAAPRCADLPELMQVQMMFATKYGKEFVAAASELMPDCGVNRQIIELLSIRPPPVDAKLKLLKEIAEEHEVDWDPSETETEFLKPHEDLLNGPTYFNVSTLPLPKEKHEETVVASAAEQPDEDYESDTGLDSLDLPEVPKAAIRPPSDAPLTPDICPHVQGSQSLPHEFSDPGNLEENPTAGGAFNVIQMKSLEHLVYAPSDQSNIPDLPNEKKQFIPFASPPPVLSPSVGKAETVPSPSLSPPVKPTEPEPEILTKKIDEVTTPPVLPSDYIFTKQPEQVRTISPSESGANIDLDDVLSAAQTAAESAERAASAARAAANLAQLRISDLKKNSKVYSNYGDSVQKESHHQTEATQEPVFDHQDSFTNDTQDYVSSHVPQRSSSLEDDPYFSYPNLFSAPKP

SEQ ID NO: 65776 - protein, 705 aa, Zea mays
  Clone ID: LIB3205-339-C3_FLI.pep
SGLPASPLEVGDMAEEASPPPPPPPPKLLYIAVADGGGRRAFRYTRPVLQSTLHLMGCKPRHAFKISKRVFDVMKSEFLAQSKSDGAGKQENYPALGLGDGTDTQKMLERSDSSIPFELYKNQTTVVISREEFVSVVCDALSLYKYVGPNQKADLLLACRIKERKESVTILLCGTSGCGKSTLSSLLGSRLGITTVVSTDSIRHMMRGFADQKQNPLLYASTYHAGEYLDPIAVAQAKAKHKANKPTVVSHPNTCGGTSSDDKSQQGSSELPPRAELIGSKQMAVEGYKAQSEMVIDSLDRLITSWEEQKESVIVEGVHLSLNFVMGLMKKHPSIIPFMVYITNEEKHMERFAVRAKYMTLDPAKNRYIKYIRNIRAIQEYLCNRADKHLVPKINNTNVDQSVAAIHATAFSCLRRRAAGEQLYDLNTNTAAVVDEEYRNQRAANTLGSKGMFQLIQRQGSSRNLMALLNTDGSVTKAWHVGATDGGGENLGGNTSSGKKPDENRVLDASQIGKAEAVNLQFGPFGISAWMSDTGGTSHAGSVEDLRADGVETGGRNYSSCCSSPKTSDSTSKELMEDYSVYVSEEEEEEEADDPCDAETDEDLSDEERDMHEIDAGSVDEHSTKSDEEYEDLAMRDVMESGDWSDDEQQGVSKTKNSPTLECSIHGSGAAEDDGINGRYHHNLDLFLKMSKEVVASNRMPCASS

SEQ ID NO: 65777 - protein, 551 aa, Zea mays
  Clone ID: LIB3206-121-C7_FLI.pep
RLPPAMEKRKRILELRDRLDRTLAMPDLAEEASLRALVKKQILASSLPGSDQGDIDLIAETRAKEVSEFLEMLDTSRDGRSSKVHGLPQKEWKVKQDTDQLRVMYREGPEGTPFHTLLAEGFADGPIDVCTCVSWESTLYKKWFPQYNLPTFRIDQSGCLKKVRIGEEICMVRVKVPWPVSEREAILHYFELEYLKEDVVIVIMKTLSDLDAIDVRTHGFSRDGIPEAGDTVRIDVFGGFVLQRITKERSFFRAIANMDIKLDFVPPWLINFMSRQLIGSGHKLYQKAVSTVASHDDDYRKALRGPLYVRIREYQDSDDKAKVAATEENATEAPPDNATTQNRLSLTNTVSNSEIVEESEQNTSVTVDSLPTSQQPYVPVEQAWQVGNRPYTSPEVERALCILDTSIALLRGDDKAGNVTTLQNLLSYDASLEASTAAGSVTCQTNVLNADSLPNGHPVAAAPQDSREKASDSAAEEEDAGDENSLKNPTASTVTKSVSMTLRSAIRVHGEESLDTDGFFHQNGFSNSKESRRARKSKKRWPCCLIPTTMG

SEQ ID NO: 65778 - protein, 328 aa, Zea mays
  Clone ID: LIB3227-042-D10_FLI.pep
LTELCKSMAVSLFYYVSSFLKKIRDLGWQQRYARFCGRIIVLSVLVLLLYPFLWVWTVIGTLWFSTARGCLPEEGQKWGFLIWLLFSYCGLACIACVAIGKWLHRRHALQQRAQQGIPVSEHGVLVDMIRVPDWAFEAVGLEMRVGQDTAYHPGLYLTDAQREAVEALIQELPKFRLKAVPTDCSECPICLEEFHVGNEVRGLPCAHNFHVECIDQWLRLNVKCPRCRCSVFPNLDLSALNNLRSTSEPDHPSASASNVTTATAATRYVRSQPAGQSYLVRLQGLLLRPVRHDSVESDGEPAVGNSRLVGTEELPSILVDDGHQLPDR

SEQ ID NO: 65779 - protein, 178 aa, Zea mays
  Clone ID: LIB3236-015-E7_FLI.pep
INLSGNSIKGNIPISLGTISVVQVLDLSYNELNGSIPESLGELTSLQILNLNGNRLSGRVPASLGGRPLHRARFNFTDNAGLCGIPGLRECGPHLSVAAKIGMAFGVLLAILFLVVFAACWWKRRQNILRAKRLAAAREAPYAKSRTQFTRDVQMAKHQRTHENARSSNSEGSPHLLS

SEQ ID NO: 65780 - protein, 91 aa, Zea mays
  Clone ID: LIB3236-093-D9_FLI.pep
YGRMNCARSRGWTHFFCGERVMVNSHEIYRSICPYKVGFPACVPVASILCKYCRCTPDTNVVIEEACQPVSSTMCFTISPLQLFFNTILSL

SEQ ID NO: 65781 - protein, 170 aa, Zea mays
  Clone ID: LIB3236-094-G3_FLI.pep
VISAKTTLGEEFEGQIVAFDRPSNLLVIQEGVGRAERGERRNVRVLKANYIREFSVVSKGDDPLDPASCMLDLNSIYAREDAALRQAEIEAERIGVGVTPEAQSIFDALSKTLPVQWDKTDIVVMKEVRVRSPYLPENVNGGTAAANERVKKVIDFERKRLHSRVPGQFS

SEQ ID NO: 65782 - protein, 183 aa, Zea mays
  Clone ID: LIB3236-150-A11_FLI.pep
SVPIDLAPPHLLSSAPQLIMGGASDSNLLPPGFHFFPSDEELVVHFLRRKASLLPCQPDIVPTVCMNHHDPWELNGKALEAGSQWYFFSHAKQSRATPNGYWSSVCADETVLSGGGGCSVVVGLKKTLVFSTGEPSDGAETNWIMHEYHLLDGRKGGSSSSSSTSSIHSSSKKSHHPNTVRSS

SEQ ID NO: 65783 - protein, 298 aa, Zea mays
  Clone ID: LIB3245-008-D1_FLI.pep
KPQPAHSRTKNPTHGFSQAAPPARHLVPELRPPGGRRLRPNDPDRGEQLPLPGVAGHPGQLRARRPGGRRLLPPAALPQVLPGAGPPLVRPHLGAHGLRGRRRAAPLRHGRLRWAAPVRRARRRGARDAGAGEPPPRQRPDLVRRERGGRLQRGPVRDPARGPRQLPRPRLPQEPHRDLPRRAAAALPGRQRPRVQERLRGLPHRRAVLPQHVQQPAHLPRLQVLGVLQARVPAGLHLRARQPLAHPRVRRAARAQGHLLPLELGGLGWAGRAAPARAPPPPTSVASRGSRICGACVV

SEQ ID NO: 65784 - protein, 173 aa, Zea mays
  Clone ID: LIB3245-012-E1_FLI.pep
RRGGMEPDKAGEAAKEPTETEAGDSVDPRELVSSDDEIDYSVEPDFYDPDLDDVDERWVSRQRKGRTSDAVLSCPACFTTLCLDCQRHEKYVNQYRAMFVRNCKIKTDQVLREGKSKRKKRRGGSAGDPAAASEGESKGQSYHPVCCEVCSTEVGVLDEDEVYHFFNVIPSNS

SEQ ID NO: 65785 - protein, 300 aa, Zea mays
  Clone ID: LIB3245-092-E10_FLI.pep
RRRREQEKARHGRGEEAGPAAAGLLGEPIRAALPHRAGREGPGLRVPGAGPGEKERAAPPRQPGAQEDPRAAARRPPRLRVPRHRAVPRRGVPGGGAGAAPRRPLRARAGPLLGGLRRQEAVRLRHPAVEAQGGRPGAGARRDGRDPPHAGGRARRRALLRRRRPRLRRRRARALHVVVPRLRPLRRRQRGEGVPEAGRLGQALRRAPQRRQEPLPAREGLRLRLRDEEEAGHRVESIHRSAGGWPGVIMTNQLSSFGLSVLSRAVRRRCIFYCQRWQRRTCCLVHHIRINGYEFLVVFT

SEQ ID NO: 65786 - protein, 245 aa, Zea mays
  Clone ID: LIB3245-175-H1_FLI.pep
CRTCCRCSRTRRRTARSSRSRARGTLSDEMLELRSCSSCLFFECRKQKDLYLWMVKSPGGPSVKFLVNAVHTMEELKLTGNHLKGSRPLLTFSTNFDEQPHWKLVKEIITHIFATPKDHRKAKPFHDHVFVFSIVDGHVWFRNYQISVPHNEIDKVDKGGMDKMTLIEVGPRFCLNPIKIFGGSFGGPTWYENPYYISPNQIRALEKRQKAGKYAKKVKAKVRRKMHEMENTLEPDEFAELWKGE

SEQ ID NO: 65787 - protein, 304 aa, Zea mays
  Clone ID: LIB3245-386-F3_FLI.pep
KFAPGAGPGVSGRAVGRPVRRRDPAAAPRRAGRVPLLHPRRGRRRRDGGGRRVHDARVQGAAVRARAEPRLDGVPLRAPGGGRAAAGPAPRGLRGGAVPGLPAPPGRGRRVPARGRLPARARHLRAVAPPVPLPHAPLPRGRCLPPPRLLLRARRGRAPRRRRRRRRRRQGRLLAARAVALAQVDAGAALGVAAGVAGGGPEVGRRAGGRRGGGAVARDAGARIQEGQGVVVGAGPACGCGHGGRRAGLGMGVGAGDVGVQDVVDADLRSPSLAAAGVVNGTASLSNIDRTIFFHEFASFFLWI

SEQ ID NO: 65788 - protein, 175 aa, Zea mays; identical to SEQ ID NO: 58278
  Clone ID: LIB3245-393-C11_FLI.pep

SEQ ID NO: 65789 - protein, 148 aa, Zea mays
  Clone ID: LIB3245-408-B3_FLI.pep
QILQDASPIRFFMSIRHSTLLPWLQNGQEKTVSSLSIRFLGGGLAADFLFPMVQLLFFLAGARRRQGGGKGTGEDLGTWRRAAATTVAQLSQDKRIAGDGGSRATFSGGGYVALGSPPSPSAEFSERAVVWTKEPAAGEKSGVACPSI

SEQ ID NO: 65790 - protein, 454 aa, Zea mays
  Clone ID: LIB3245-414-D2_FLI.pep
IRQIMEELQDCNSRSLVALPGSLVLRLFRLFGQQDQSSWQKYILAYFLLVRNEYFSGESKKHSDVFCDISELDFFLYATDLDSEELELKEQKPITKAQSGGDSSGNRSNDCYFPGLHDDLSQDCLAWASRSDYPSLSCLNKRFNLLINSGYLYRLRRKYDIVEHWVYLACSLMPWEAFDPSRKRWMRLPRMPCDECFSCADKESLAVGTQLLVFGREYTGLAIWMYNLLTRSWSPCTPMNLPRCLFASGSSGEIAIVAGGCDKNGQVLRSAELYNSEIGHWETIPDMNLPRRLSSGFFMDGKFYVIGGVSSQRDSLTCGEEYNLETRTWRRILDMYPGGTSASQSPPLVAVVNNQLYAADQSTNVVKKYDKANNAWNILKPLPVRADSSNGWGLAFKACGDRLLVIGGHRGPRGEVILLHSWCPEGGEDGADWEVLSVKERAGVFVYNCAIMGC

SEQ ID NO: 65791 - protein, 318 aa, Zea mays
  Clone ID: LIB3245-415-H5_FLI.pep
TRRTGQEKQTEGGERQGKWEGRRERETGKALFLLLLLSNSVSCPCRPRPVSPVFERGKRRRRRGMGRDERFPVWEAALGAGVAAAFAAGLVGVYLSMPDSDYSFLKLPRNLEELQILTGHLENYTSDYTLQVLVGYCAVYIFMQTFMIPGTIFMSLLAGALFGQLRGLALVVFAATAGASSCYFLSKMIGKPLVFTLWPDKLSFFQRQVAKRREKLLNYMLFLRVTPTLPNTFINLASPIVDVPYHIFLLGTLIGLIPAAYVTVRAGIALGELTSLSDLYDTQSIALLFLIGVVSVTPALLGKDEAQEKPPEMAVGAS

SEQ ID NO: 65792 - protein, 443 aa, Zea mays
  Clone ID: LIB3245-447-H12_FLI.pep
PPTLCVCSLLSRVGSQLGRAEPMAVDPRQVVAGFLTLSMFVMLGNMIKHDHFSPVTEELGFEATGVVSNTRKLDNDAEMSSVDTAGVEDLMDAVEEVKPCWTKPSPKNQPSNGFVTFSLTMGPEYHISQITDAVVIARYLGATLVLPDIRGNELGNKRKFQDIYNVDKFVRSLDGVVEVIEDIPDEVSAKKPAVIRVPNRVTESFITGTIQPIFQKNKYLRLAVIFSSVSLRPKETNNKDMDATACLAMFGGLELKHEYSEVARKMLDRLQELSKKSDGKVLAIDLRTDLLEKKSCKTTRGARRKGCYSPDEVLAFLRSVGFSANTTIYLTETSWYKGLDVLKEEFPNTWYKGDIMPAENKAEFLKSSNADLARALDLEICSQSDVFVPAVAGLFYGHVTGKRIASGRTQIVVPSQSSTSTHASDFISTYISNKNHLAYACYC

SEQ ID NO: 65793 - protein, 442 aa, Zea mays
  Clone ID: LIB3245-448-E7_FLI.pep
SRDGRTHRRAPPMDDAGRPPPHAPVAVTASASASATAAPAPPQPSATAAVDRSSPDPDALYEEGMWQQMAMDSGATMQPGSYPERPGEPDCTYYLRTGLCRFGMSCRFNHPPDRNLAIASARMKGEYPERAGQPECQYYLKTGTCKFGPTCKFHHPREKAGIAGRVQLNTSGYPLRPNEKECAYYLKTGHCKYANTCKFHHPELFNVVPSSRGSPIYTSVHSSASAGPQSYTGTMPSWAFPRASFIPSPRWQSPSNYAPMIVPQGLVQMQSWNSYTGQLQSPGAQQTYGSSQQGEASTGNQGMLSPYRPSSFPVPQYALQRENVFPERPDEPECQYYMKTGDCKFGAVCKFHHPRVRSLPPPDCVLSPMGLPLRPGEELCKFYSRYGICKFGANCKFDHPTVVAPMVYAYGFSASASPASASTNVPMARRLLGSPPGSGYTS

SEQ ID NO: 65794 - protein, 302 aa, Zea mays
  Clone ID: LIB3245-475-H10_FLI.pep
TKLLHSFRFSDPAPENSSTPSMLSSSPAPSQEGAAVPSSWAEAASSAALRHYRSLAKKGKPQGRESTVLAAILLSAPQDSHSLTVLSMGTGTKCLGASMLSARGDLVHDAHAEVIARRALLRLVYSEIGRGAPPDWLVASGDAGRWRLRDGHCLHLYITQLPCGVMPVPPSQSDLPRKQLNSMNVEIGFVQRKPGRGDTTSSMSCFDKITRWSVVGIQGALLSHILEPLYLSTITIGQLPDGTPERFSIKNNIKKALDARLSSLPTELPPPFKMQKPKVFEAPVPPTEFQQIPGDVRLLTCG

SEQ ID NO: 65795 - protein, 310 aa, Zea mays
  Clone ID: LIB3245-524-A8_FLI.pep
ASSDSESDSEDVDELLGTVASVNVIEATGVAISEHLSKMKLDDDSLAVKTNSSCSAAEQHPVDSVKVHNNASVVLTKKISDLSLEWRSDLSKTDVWYASFGSNMWRPRFLCYIQGGKAEGMNIPCCGSRDTSSPKGTVWKTVPHRLLFGRSSTPCWGTGGVAFLNPEINYNEKLYVCMYKITLEQFNDILFQENRLVLEDGKDGNTVYPDSPLIGSSEIKFISTNRAVHLEPIKDSWYSNVLYLGNEDEVPILTMTCPASDIERYKSGELRLAPPSETYAATLIKGLVEGKQMDADGAASYINAAAARAL

SEQ ID NO: 65796 - protein, 292 aa, Zea mays
  Clone ID: LIB3279-020-F5_FLI.pep
RDAAATTIILVPLTTASGPSPTLQAASAMPSSAQVLLCLAAVLAAAAATTAEAHSQCLDNPPDRSIHGRQLAEAGEVVHDLPGGLRAYVSGAASSSSAVVLASDVFGYEAPLLRQIADKVAKAGYFVVVPDFLKGDYLDDKKNFTEWLEAHSPVKAAEDAKPLFAALKKEGKSVAVGGYCWGGKLSVEVGKTSDVKAVCLSHPYSVTADDMKEVKWPIEILGAQNDTTTPPKEVYRFVHVLRERHEVPYYAKIFQGVEHGFACRYNTTDPFAVKTAETALAYMVSWFNKHLN

SEQ ID NO: 65797 - protein, 156 aa, Zea mays
  Clone ID: LIB3279-177-E3_FLI.pep
EREREREGDRMPRSGISGTLRSPQIDVVIDTGNPFLNRTVDGFLKIGAVGACKVAAEETFDCLHRGDVSKRKVEHALKKMCKEGAYWGTVAGVYVGVVYGVERVRGRSDWKNAMVGGALSGALVSAASSNHGDKIVKDAITAGAVATAVEFANYLT

SEQ ID NO: 65798 - protein, 141 aa, Zea mays
  Clone ID: LIB3279-183-E12_FLI.pep
ISHHLSPQLLPTFGQAGSGKGGGQQGRAMATKVICFLVLASLLLAVAFPVSALRQQVKKGGGGGGGGGSVSGSGGGNLNPWECSPKCGSRCSKTQYRKACLTLCNKCCAKCLCVPPGFYGNKGACPCYNNWKTKEGGPKCP

SEQ ID NO: 65799 - protein, 171 aa, Zea mays
  Clone ID: LIB3279-191-E12_FLI.pep
SHVLVHFLHERDEELARGVADGLLAVAEALDGGGDEGVEVDLEVVAGDDSDDGERLEAALGDAEVGIPRQIHAVVHQRGDLGRRQPATRRDVKHLVQPLDPGQTLLGVLGARRLHSLRAPEDSGGPAAGRALGLRGAGPAARRAGSGRIVALLEHPPRSIPSARACGRRSG

SEQ ID NO: 65800 - protein, 217 aa, Zea mays
  Clone ID: LIB3279-195-G2_FLI.pep
GGNLCSAAAMYFKAHECETEYPRVRCEMSAAARLHNTTQHNNVHLVNWQSRLENQDSAYRCSGAATARHEWISLLSSSLHSSSHSSSVVCAGAIAWVGLHDERGVVEVAVPGVPAAVGVVEVHGDGGAGHGAVRVVARPALLDHGAAHLGARVVQVLRQDLVRRRRLRDAPRLLSLHETNGAACKTPERERERWWPILFRRTAWWFCLSAMIYLSIS

SEQ ID NO: 65801 - protein, 361 aa, Zea mays
  Clone ID: LIB3279-195-G6_FLI.pep
PSLLSTAAFDPPTAAASRAMEQAAMPQVPRVKLGIQGLEVSKLGFGCMGLTGTYNAPLGDEAVAAVVAHAFRRGITFFDTSDAYGPRTNETLLGKALKQLPREQVQVATKFGIGQGAAGMTVCGTPEYVRACCEASLRRLDAGYIDLYYQHRVDTTVPIEDTIGELKKLVEEGKVKYIGLSEASPDTIRRAHAVHPITAVQMEWSLWSRDIEPEIVPLCRELGIGIVAYSPIGRGFFGGRGVTQQVSSESSLQRHPRFTTESLEKNKQIYLKIEDLAKKYQCSPAQLALAWVLHQGDDVVPIPGTTKTKNLDANVDSLKVKLTAEDLKEIGSQIRAEDVAGGRQYNSYAHTSWKYADTPKK

SEQ ID NO: 65802 - protein, 223 aa, Zea mays
  Clone ID: LIB3279-195-G8_FLI.pep
IGCRVAKDMEDSSGCSSSPAVLRNKYWVLRHGRSVPNERGLIVSSLENGTKPEFGLAPQGVEQARAAGEKFRKELDEIGVPVGSVKIRYSPFSRTTETARVVAGVLGIPFEAPSCEAVLGLRERYFGPSYELLSHDKVGFLLWIQLYCFSRNERTFLSYEHLLRYLIQVQFYNMNWSVKSKWCIFIYNLRNLSPSSNLRFVRHKNVFIDIHHPCIYPFNFVSH

SEQ ID NO: 65803 - protein, 462 aa, Zea mays
  Clone ID: LIB3279-204-B11_FLI.pep
KTTRPQSSAPHPEEARSPSTWSCSHHTAAPMAARRQHRRGFPLVPLLLSLLAAAAYGRLISDGGSSAQLLSVIRLSGSSPAAGAANKAEEKCEQSYGFLPCTTTVLGNLFLVLTYGFLMYKAATYLSAGSELLLEIMGPGLVGGLLLPILGALPDALLVLVSGLSGSKEEAQSQVLIGMGLLAGSTVFLLTLLWGTCVVVGKCDLGPNREAVDVTDTKGFSLTGTGITTDVQTSYAARIMGLSVIPFIIAQFPKMLKTHHGQRLAMLLALIVSFLLVLSYCLYQVFQPWIQRRKLAYAKHKHVISGILRHAQMQSLGRLLNDDGTPNDDVIRKLFRKIDMDQSESLSRAELHALIVGINFEEVDFDRTDAVDKVMDDFDTSRNDVVEQEEFVQGMKKWLNEAKRSVPVGGAFSTKFINEYHERTRQEHNELVDRSDEAVESVENPGWCIAKAVALLLLGAAI

SEQ ID NO: 65804 - protein, 226 aa, Zea mays
  Clone ID: LIB3279-222-F1_FLI.pep
PSALALSASTRVSILRLPLALRQRAEARVPGAQFRPSTACSWARPLLPELAGAVPRAGARGTGRRTQPLFRPRALTTTSQIASCAFTLGTVAVLPFYTLMVVAPNADITKRTVESGAPYVALGLLYAYLLYLSWTPDTLRAMFASKYWLPELAGIVRMFASEMTVASAWIHLLAVDLFAARQVYHDGLRNNVETRHSVSLCLLFCPVGILAHVLTKVLAGAVARSH

SEQ ID NO: 65805 - protein, 383 aa, Zea mays
  Clone ID: LIB3279-225-C6_FLI.pep
SIREQAATSPMPSSMAKSLLLPPQFVSVSPRHPHRAGFPVLKPRRASLLAATGGDVTPAPDADNGSNTNPLVEVPRALWRRTLQPLGDYGFGKRSVWEGGVGLFMVSGAALLALALAWLRGFQLRSRFRKYNTVFEFTQACGICVGTPVRIRGVTVGSVVRVDSSLRSVDATVEVGDDKIIIPRNSVVEVNQSGLLMETLIDITPKDPLPAPSVGPLDPDCTKEGLILCDKERMKGQQGVSLDALVGIFTRLGRDMEEIGVSKSYKLAEKVASIMEEAQPLLTRIEDLAEEMQPLLSEVRDSDLLKDVETIAKGLADASVDLRRLKSSMLTPENTDLIKQSIFTLIFTLKNIESISSDISGFTGDETTRQNIKLLIKSLSRLL

SEQ ID NO: 65806 - protein, 246 aa, Zea mays
  Clone ID: LIB3332-036-F6_FLI.pep
GLRQPLCRRRKPTRSYSPFRMTKYTRNKKSSSSHSSSRFKRVSRKEMSFAVEKYAWTNATCPVCMEFPHSAVLLLCSSHGNGCRPYICASSYQHSNCLDQLVMSCRKEASEDPDAIELMCPLCRGEVKGYTLVEPARKQLNRKRRSCMEDGCSYMGTYRELCKHVQKKHPTANPRAVDPLHAYRWKRLLFRSSLHDMICSTTSEAMRRFCSHMLQIEEVVAALREGGDHRGATNDDQLIHDLLTSR

SEQ ID NO: 65807 - protein, 225 aa, Zea mays
  Clone ID: LIB3353-009-F10_FLI.pep
VTSTSRRTYPTRVSSCSSPTRCTRRCPCSSTTVSPSASHSSSCSTSTSCSPAGRSSQPTPTSAPLLASGLPTPTTRYYELARTRVYVPDSLVPIEWAAPCSQLFPAWYGMVKAQAEEERAEKAKETLAAIEHMEVAFGKCSGGNAFFGGDSIGYVDIVLGSFLFWFEAVRRVFDLEIINASKTPLLAAWAERFVGTVEAKEVVPLPTADMAVQYINKLHAPLPPP

SEQ ID NO: 65808 - protein, 286 aa, Zea mays
  Clone ID: LIB3354-005-F3_FLI.pep
PDMSSSVGGGSAGGGGVDMVSLLEKAKELDQLKKEQDEIVADINKIHKKLLASPEMVDKPVDTILLKLRGLYARAKELSENEISASNALIGLLDGLLQSGASTAQKKKIVAFYISEVGEQKKKRIKSDTDSARFSAASMRNQLDQAASLKGEQVAARVKSDDEKDEWFVVKVIHFDKETKEYEVLDEEPGDDEESTQKKYKLPMSYIIPFPKKGDPSSAPDFGQGRQVLAVYPGTTALYRATVASHRKRKSDDYILEFDDDEEDGALPQRAVPFYRVVALPEGHRQ

SEQ ID NO: 65809 - protein, 332 aa, Zea mays; identical to SEQ ID NO: 62157
  Clone ID: LIB3354-030-A6_FLI.pep

SEQ ID NO: 65810 - protein, 371 aa, Zea mays
  Clone ID: LIB3354-053-B8_FLI.pep
SRELGRRAPTACPAAAMRFSALLLIVALLCLGGGRVAAGFESIFPPYGSSFFGGPAGRFCDGRLVIDFLMEAMDMPLLNAYLDSLGTPSFRTGVNFAQAGCSITPAKPTSVSPFSFGLQIKQFFAFKNKVTKLLSEGDMHSRYIPQQDYFSEGLYTFDIGQNDLAGEFYSRTEDQVIASIPTILLEFENGLKKLYDQGARKFWIHNTGPLGCLPQNIALFGKDPSQLDELHCVAKHNRAAKLFNLQLHALCTKLRAEFDGASITYVDIHTIKYSLIANYSRYGFEHATQACCGYGGPPLNYDGNVPCGHTVSLDGKMVTAKGCSDTTEFVNWDGIHYTEAANFHIASQILTGKYSDPPFVDKMPFVIKPRF

SEQ ID NO: 65811 - protein, 167 aa, Zea mays
  Clone ID: LIB3354-066-F9_FLI.pep
ILLLLLSLSLSVCVCVCVCVCVCGCSAEEDRGEGGGGAQARAAPRHRLAHHPRWREHHHGQARQLPQPVPCTSRVRRRWKACLGNLCWAHLSCKQSSSVAFRAKNRGAGTCWRIRLYSPPKLFWESDCFSCSFKALRQSFPCQSFRRRKEGMIHAAVYLYGHLLYWK

SEQ ID NO: 65812 - protein, 305 aa, Zea mays
  Clone ID: LIB3354-071-E11_FLI.pep
CPPSNGGEHVLLAACGMKLATAGYGVFGIDYEGHGKSMGARCYIHKFESLVADCDMFFKSICDMEGYRNKSRFLYGESMGGAVALLLHRKDPTFWDGAVLVAPMCKISEKVKPHPVVVTLLTQVEEIIPKWKIVPTKDVIDSAFKDPVKREKIRKNTLIYQDKPRLKTALELLRTSMDVEDSLSEVRMPFLVLHGEADAVTDPEVSRALYERAASADKTMKLYPGMWHGLTAGEPDDNVELVFSDIVSWLDKRSRHWEPDERVRRAPPEPENKRRVTSSSSQRPGSFLCGLGCRCRQHQQQCSRM

SEQ ID NO: 65813 - protein, 222 aa, Zea mays
  Clone ID: LIB3354-072-F6_FLI.pep
AAARSRLRFPLSPPGTKPNPPARGSQAAAAAAMEPSPVGDGGSAERWRAEASRAFQHYLDRAAPHTAGRWAGTLVAAAVYALRVYYVRGFYVVTYGLGIYLLNLLIGFLSPMVDPELEALEAGPGLPTRGSEEFKPFVRRLPEFKFWYAITKAFCIAFVMTFFSVFDVPVFWPILLCYWIVLFVLTMKRQIMHMVKYKYVPFSFGKQRYGGKKRPGASASKE

SEQ ID NO: 65814 - protein, 200 aa, Zea mays
  Clone ID: LIB3354-074-B8_FLI.pep
TNARDFYKNEPIYFREGCMCLPQVEIYCTQSYFVACCMLENLAGLYVSRNTYIHTGVTEWQFKKTVNVVCYYRYLRFFPSGKFLYKISPDKVKDAVKCMHFRASKADCVFKGDYVLSEDGQIEMALLYPGHRYTLVRMHLRLRGTTVGANNRLDVLKILTTGVNATELQNWKGSILELVEGWEEDETHDPDVPAVSHSRG

SEQ ID NO: 65815 - protein, 250 aa, Zea mays
  Clone ID: LIB3354-084-B5_FLI.pep
SVSVSFKAQFLLFFCTEQPLCVTDILKDPGEASETSQSAVRDCRISSAGADADAIHSPTHRAPTREAEIKDEIGLLLLSDKPFLSRAAELIGVDVYGDLSNQCDRISKARTRNRRLYLDAAGEQLELKHRQQNILWPYARPLGRRWRSSSSAYLSLEELLRDVSDGVRNLEDGYCSGDARRGSKDSLDVKLERDLTSSADALISSVWDMGWQGLACVEAECFVRDAGEEILSLLVEEAALDMCLHCHSAM

SEQ ID NO: 65816 - protein, 300 aa, Zea mays
  Clone ID: LIB3354-088-F10_FLI.pep
PNHLITHPSGNATCCVQVRHGNPEQKLKYLPKLISGEHIGALAMSEPNSGSDVVSMKCKAEKVDGGYVLNGNKMWCTNGPSAQTLVVYAKTDLAAGSKGITAFIIEKGMPGFSTAQKLDKLGMRGSDTCELVFENCFVPCENVLGEEGKGVYVMMSGLDLERLVLAAGPIGLMQACLDVVLPYVRQREQFGRPIGEFQFIQGKMADMYTSLQSSRSFVYSVARDCDNGKVDRKDCAGVILFAAENATQVALQAIQCLGGNGYINEYPTGRLLRDAKLFEIGAGTSEVRRMIIGRELFKED

SEQ ID NO: 65817 - protein, 126 aa, Zea mays; identical to SEQ ID NO: 60856
  Clone ID: LIB3354-089-C8_FLI.pep

SEQ ID NO: 65818 - protein, 383 aa, Zea mays
  Clone ID: LIB3354-092-B4_FLI.pep
NKSGLLLVFHRMESLWKLTYLLDPASIALIATAISVAYASASRALDYGKEMERNLDFSEASITLDRSQALMIPLASSCSLLLMFYLFSSVSHLVTAFTAVASALALFFCLSPHITYLKARFNLMDPFMSRCCSKSFTRLQGLLMLFCIATVLAWLVSGHWMLNNLLGISICIAFVSHVRLPNIKICALLLACLFVYDIFWVFFSERFFGANVMVSVATQKASNPVHTVANKLSLPGLQLITKKLELPVKLVFPRNLLGGIVPGSNPGDYMMLGLGDMAIPGMLLALVLFFDNRKLKDVNVVPSDVSPLRRRNYVWYALTGYGIGLVAALAAGILSQSPQPALLYLVPSTLGPVMYLSWLRNELWELWEGSGTILNEKARLLEV

SEQ ID NO: 65819 - protein, 316 aa, Zea mays
  Clone ID: LIB3354-096-G6_FLI.pep
HDLSSTANPDCRLRLGIRALAAMDGGGGAGGAEGELTAQETALYDRQIRVWGVDAQKRLSKAHVLVCGMNGTTIEFCKNIVLAGVGSLSLMDDNVVTEEDLNANFLIPPDESIYGGRSRAQVCCESLIDFNPMVRVFVEKGDPSLIDGEFLDKFDIVVLSRASLKTKKKPGGATEQQELTYSSLQEAISVPWNSLPKKTAKLYFAMRVLEDYELSEGRSPGETTLSDIDAVLARRKDMCDKMSLNESRIPTTLVERLLAAGKKEHPPVCAILGGILGQEVIKSISCKGDPVKNFFYFDVADGKGVIEDIPPPPPAK

SEQ ID NO: 65820 - protein, 236 aa, Zea mays
  Clone ID: LIB3354-103-A2_FLI.pep
YSHHDKAFISKMEGCYWSGTITKIINEDLVEIELPAPPIGEGKCYKAKCSDLRPTLEWSLARGWMVPLSQANGKGWHAARLLQHYKSESDDDNDDNDSWDARQTVCRASNTPEEAPGPMVPAPPSATNNAPSHMYQKDAAVTSTEDLLKPSSTSKSPDPRHDAQASTQPAGTGVSMKPEPVIGVSTIKKEDSSLTEGEVDGGTEECLEKLGAIKARLKYLMQGTRLEHERSATFRG

SEQ ID NO: 65821 - protein, 180 aa, Zea mays
  Clone ID: LIB3354-112-B7_FLI.pep
SLLRTRAAIFYSSMCISSLIETGTIKPTNTIENSTSKQQQQDVILSTYSYLRASSTSSTPRWISLSLGRGVPGDERAWMKRAFSLKVPNRRPFSPWCRCTRWCVCHRSYRSHSASSDARSRSSNSMARHSSTADTTTRATRRSVLATCAILQVLATYQHRRVQWPAVLATGELDRSAAGV

SEQ ID NO: 65822 - protein, 329 aa, Zea mays
  Clone ID: LIB3354-116-G5_FLI.pep
GSVSHQASLVDLPAAAAANTIMEAGAAAAATAIYPLHRCKTIHLVPYTFSTLPACLICSSSHPYASSLTLSHTHTHQFSHVHEHHHHITQVRHAQGVHNVEGDTDHSAYMKPDFFDARITPLGWNQVDLLREHVKESGLAEKIELVICSPLSRTMQTAVGVFGGESCSNGVSVPPLMVENAGRPAVSSLNCPPFLAVEACRERLGVHPCDKRRSITEYRALFPAIDFSLIESDEDVLWVPDVRETFESLAERGMKFIDWLWTREEREIAIVTHSGLLSHTLRMYSKECHPTVTQEVSKYFANCELRSLVLVDRRSVLHLQTHPFVLAPT

SEQ ID NO: 65823 - protein, 204 aa, Zea mays
  Clone ID: LIB3354-123-A10_FLI.pep
VGERIEMAASDVEYRCFVGGLAWADKIGSESPAADGVGDAARKRPSGDVGPTPGPADKRRRPEHPSSSSAGSRDRHHHHHGRRPPSSADEKVRASHILIKHEGSRRKASWRDPEGVAISATTRDDAADLARALRDQIVSGDREFEDVAAENSDCSSAKRGGDLGSFGRGKMQKPFEKAAFALKVGEISDVVDTESGVHIIKRTG

SEQ ID NO: 65824 - protein, 355 aa, Zea mays
  Clone ID: LIB3354-126-D2_FLI.pep
NSLRTNIPSPKARSPETFRIFLPPLHLLCAKLVLFLVLLFDFGRIKMASAARLLAPFSRRGVVSVALAGVERRRPEAASLMGAPVLATVEACASIKVIPLSNQLARYSTTAFQRFGFSTSAPQQDDKETNKHTDDGVNRSVGASTGASSEANNVPGTEKAQEADSEDLDLSKEDLVKLLLEKDESLKSKDEEFKDMKDKVLRSYAEMENVLARTKRESENTKKYAIQSFSKSLLDVADNLSRASSVVKASFSKIDSSNDSDEAVTLLKTLLEGVEMTEKQLGEVFKKFGVEKFDPLNEKFDPNRHYAIFQIPDPSKPSGTVAAVVKVGYMLHDRVLRPAEVGVTEGGPTEEEPEE

SEQ ID NO: 65825 - protein, 251 aa, Zea mays
  Clone ID: LIB3356-012-G12_FLI.pep
PDSFSSLSLSRPHPSNQASQQASKSKRGEELERRRRREATARSEPRLSRRREPEMVGLVGGSTARAEHVVANAGGEAEYVRRMHRHAPTEHQCTSTLVKHIKAPVHLVWELVRRFDQPQRYKPFVRNCVVRGDQLEVGSLRDVNVKTGLPATTSTERLEQLDDDLHILGVKFVGGDHRLQNYSSIITVHPESIDGRPGTLVIESFVVDVPDGNTKDETCYFVEAVIKCNLNSLAEVSEQLAVESPTSLIDQ

SEQ ID NO: 65826 - protein, 244 aa, Zea mays
  Clone ID: LIB3357-015-D7_FLI.pep
SEAKRDGPGAAAGQPALGQRRRRRQRKLGVRGAVAGGIVRRHGVGAGVAEPVRVAEAPGLEHVRAVPEEPPPAAVPCALQRRARARVPALPRPVRQDQGAHRRLPFLRPPGAAGALPVPAPPGVGQPRRARRQAARRLRGERRAAREQPLRRARRQTVPPRGPRPSVPRQGRQLREEEEAKEGPAAPRPCRRHLLLPRRQRTPLRAPDAAATTARRSGLTSRPAPCMLLLPLYHMHYWSISLAS

SEQ ID NO: 65827 - protein, 503 aa, Zea mays
  Clone ID: LIB3357-017-D1_FLI.pep
YSLQFTAMLLSGRHHCHHKFTPSSPPAAFRSTHLRCLRPLRSLALASANPPPPPSPLPSLFPSPRRPWRWRHSASDVIEDLPPVEADGNDAVKVKKSFWAAVSLIIGTAVGPGMLGLPSATIRSGQAPSAVCILLSWAYVVSSIVLVAELSFAAMARDGVDEVSFTGLASSTLGAGPGAVVAVVYAALSFSLLVACVAGIGSLVSQLFPGVSPVLANALFPCFAGVLIAFFPFKAVDGANRALCGLMLVSITALVVTGVSVGRTSLLGSLSYACWSPGAILPAIPVTVLTLGFHVITPFICKIVGDSVYDARKAILIGGAVPLAMVLSWNAVILGLASAGGNAGFDDPIKLLLSVNPAALPAVRGFAFAALATSLIGYAVSFPKQLADTVELILQRFSQKQGSVHQANGSGGYGRNGAILTWMVLIIPIFIASFFSAVFSKALDFAGVYANCFLFGILPPVMAWIHRSQKKKRSPDSCEDILPGGNAALLILFAVAVVLAIWH

SEQ ID NO: 65828 - protein, 240 aa, Zea mays
  Clone ID: LIB3357-033-C8_FLI.pep
ISNPSVLSLAWRRQCPGLPAAQSCGASAASVPRLRLHVGRRHAVANRLEALPERLPTSGPAPTMVLTSNISVQKTLYEVLSVSEDATYDEIRAAYRSAALNTHPDKAQTTLESSSVPSTEQQEFSSVQKAWEVLRHPTSRADYDKQLQSSRQSIEIIASEIQVGDMIVESAAGALELLYPCRCGDYFSITSGELSGMGIVVTRDGEEVEELQASDSASASVVLGCGSCSLKIRLVIDGSS

SEQ ID NO: 65829 - protein, 376 aa, Zea mays
  Clone ID: LIB3357-055-F7_FLI.pep
KNGEISSHKTLASLSPFPPSHDLSSTANPDCRLRLGIRALAAMDGGGGGAGGAEGELTAQETALYDRQIRVWGVDAQKRLSKAHVLVCGMNGTTIEFCKNIVLAGVGSLSLMDDNVVTEEDLNANFLIPPDESIYGGRSRAQVCCESLIDFNPMVRVSVEKGDPSLIDGEFLDKFDIVVLSRASLKTKLLINENCRKRSKHIAFYTIDCKDSCGEIFVDLQKHSYVQKKPGGATEQQELTYSSLQEAISVPWNSLPKKTAKLYFAMRVLEDYELSEGRSPGETTLSDIDAVLARRKDMCDKMSLNESRIPTTLVERLLAAGKKEHPPVCAILGGILGQEVIKSISCKGDPVKNFFYFDVADGKGVIEDIPPPPPAK

SEQ ID NO: 65830 - protein, 378 aa, Zea mays
  Clone ID: LIB3357-056-D12_FLI.pep
RARLLRLAHGFSSREPPIVGSRSMRRPSPLNLAMVRGGSRRSNTVKTLQAPGASTSGAESSAVEMGTEKSEVYSTNMTQAMGAALTYRHELGMNYNFIRPDLIVGSCLQSPLDVDKLRKIGVKTVFCLQQDSDLEYFGVDIRAIQDYSLQFKDIVHCRAEIRDFDAFDLRLRLPAVVSKLHKLINCNGGVTYIHCTAGLGRAPAVALAYMFWILGYSLNEGHRLLQSKRACFPKLEAIKLATADILTGLSKNTITLKWEADGSSSVEISGLDIGWGQRIPLTYDEEKGAWFLEKELPEGRYEYKYVVDGKWLCNEHELITKPNADGHVNNYVQVSRDGTSDEEKELRERLTGPDPDLTDQERLMIREYLEQYADAAER

SEQ ID NO: 65831 - protein, 277 aa, Zea mays
  Clone ID: LIB3357-061-H7_FLI.pep
QSPDDGLMRVSQHPSTATVLPASLPLRESSRSQQAPTPTVLVRTKAQLLIHGHVAEPRQPLVRRGQRHRAEQRRRIAVGWFHDAAVAEPVRGAEAARLEHVRAVPAEPPAAAEPGAVQRGSRPGVPPLPGPVRQDQGARPGVPLLRPSEPAGAVPLPAPPGLGQPGRPGGPPPRRLRGERGPPGVQPLRGARRAPLPPRGPRAPGPRPRRQLREEEAQEAAAAAGRQQRRPSRPRAPAAAAAPAARRRRLLSLRCSIVASTARSLVRTYVRSPIWPV

SEQ ID NO: 65832 - protein, 394 aa, Zea mays
  Clone ID: LIB3587-205-H3_FLI.pep
RLPSAVASPRGRPTTTTSPRRRAHLAVAPVVRRRRLGIAPELLLKAPHHALAGSGRTWEAPRRPYVYLAARRQAPAPSPPPPLPVVRLRCCCSYGSSSATPVSASRSEDAIVGSVGMGPVHSDQKAKKLAIICEQRVIIPNGHGEKLVGLLHRTSSKNLVILCHGFQATKDDSILVDLADAITKEGISAFRFDFSGNGESDGEFQYGSYRKEAADLRSVVLHFSEQKYDIIALIGHSKGGNAVLLYASKYHDVPAIVNISGRFALERGMEGRLGKNFMRRINEDGYIDVKNKKGELQYRVSKASLDDRLSTDTLFSSRAISEDCRVLTIHGAKDEIVPAEDARQFAANIRNHELRIVADANHRYTGHREELASLVLGFLSSHPYQITSRLRPRL

SEQ ID NO: 65833 - protein, 394 aa, Zea mays; identical to SEQ ID NO: 56351
  Clone ID: LIB3587-223-C4_FLI.pep

SEQ ID NO: 65834 - protein, 452 aa, Zea mays; identical to SEQ ID NO: 52903
  Clone ID: LIB3587-223-D5_FLI.pep

SEQ ID NO: 65835 - protein, 455 aa, Zea mays
  Clone ID: LIB3587-227-A11_FLI.pep
EERRKMRECISVHIGQAGIQVGNACWELYCLEHGIQPDGQVPGDKTAGHHDDAFSTFFSQIGAGKHVPRAIFVDLEPTVIDEVRTGTYRQLFHPEQLISGKEDAANNFARGHYTIGKEIVDLCLDRIRKLADNCTGLQGFLVFNAVGGGTGSGLGSLLLERLSVEYGKKSKLGFTVYPSPQVSTSVVEPYNSVLSTHSLLEHTDVSILLDNEAIYDICRRSLDIERPNYSNLNRLVSQVISSLTASLRFDGALNVDVNEFQTNLVPYPRIHFMLSSYAPVISSAKAFHEQLSVAEITSSAFEPASMMVKCDPRHGKYMACCLMYRGDVVPKDVNAAVATIKTKRTIQFVDWCPTGFKCGINYQAPTVVPGADLAKVQRAVCMISNSTSVVEVFSRINSKFDLMYAKRAFVHWYVGEGMEEGEFSEAREDLAALEKDYEEVAAEGGSDDGDEEEEY

SEQ ID NO: 65836 - protein, 416 aa, Zea mays
  Clone ID: LIB3591-005-E5_FLI.pep
SRTSRAIQKAAPLTPSLRLPCPRGHVRVTSIILFALVQVIVWSRRQQTPRAGGSAMAASDLESKAKEAFVDDDFELAAELYTQAIDAGPATADLYADRAQAHIKLGNYTEAVADANKAIGLDPTMHKAYYRKGAACIKLEEYQTAKAALELGSSYAPGDSRFTRLLKECDECIAEESSQAPAKNVEAPVAATVEDKEDVANMDNTPPVVEPPSKPKYRHDYYNSATEVVLTIYAKGVPADSVVIDFGDQMLSVSIEVPGEEPYHFQPRLFSKIIPEKCKYQVLSTKVEIRLAKAEQVTWTTLDYSGRPKAIPQKISTPAETAPRPSYPSSKSKKDWDKLEAEVKKEEKEEKLEGDAALNKFFRDIYKDADEDMRRAMDKSFRESNGTVLSTNWKDVGSKTVEASPPDGMELKKWEI

SEQ ID NO: 65837 - protein, 567 aa, Zea mays
  Clone ID: LIB3591-067-A5_FLI.pep
KMAPLLAAAMNHAAAHPGLRSHLVGPNNESFSRHHLPSSSPQSSKRRCNLSFTTRSARVGSQNGVQMLSPSEIPQRDWFPSDFTFGAATSAYQIEGAWNEDGKGESNWDHFCHNHPERILDGSNSDIGANSYHMYKTDVRLLKEMGMDAYRFSISWPRILPKGTKEGGINPDGIKYYRNLINLLLENGIEPYVTIFHWDVPQALEEKYGGFLDKSHKSIVEDYTYFAKVCFDNFGDKVKNWLTFNEPQTFTSFSYGTGVFAPGRCSPGLDCAYPTGNSLVEPYTAGHNILLAHAEAVDLYNKHYKRDDTRIGLAFDVMGRVPYGTSFLDKQAEERSWDINLGWFLEPVVRGDYPFSMRSLARERLPFFKDEQKEKLAGSYNMLGLNYYTSRFSKNIDISPNYSPVLNTDDAYASQEVNGPDGKPIGPPMGNPWIYMYPEGLKDLLMIMKNKYGNPPIYITENGIGDVDTKETPLPMEAALNDYKRLDYIQRHIATLKESIDLGSNVQGYFAWSLLDNFEWFAGFTERYGIVYVDRNNNCTRYMKESAKWLKEFNTAKKPSKKILTPA

SEQ ID NO: 65838 - protein, 283 aa, Zea mays
  Clone ID: LIB3591-074-B10_FLI.pep
SLLPLRACAVGEVLLLVREASPNVQTLVGERGVETRVRTMSETGHTVQVTNLSSRVSESDLYEFFSFSGPIEHVELIRSGEYGATAYVTFKERFALETAVLLSGATIVDQPVCITYWGQPEETFNFWDRPTWEVEEEIEYTSYQSCQYNTTPQEALTVAQDIVKTMLAKGYVLSKDALAKARAFDESRGLTAAAAAKAAELSKRIGLTDRVSAGVGAMRSVDETYRVTETTKTVATATGRTAAKVVNGIVTSSYFSAGAMMLSDALTRAAKAAADLAAHGRQS

SEQ ID NO: 65839 - protein, 852 aa, Zea mays
  Clone ID: LIB3591-084-D7_FLI.pep
IAAHYPNPSNHHFSPFFYLPTLWPLLTLPRLITPIPPTRGRGVSRASAKTVARGPMAAPPQPHPQAAEERAAPAVPLPTAPAGPRPYDVAVAAAELRPVDCNLAALCDHVQAEGFGLGAFSDLVVEAAGATYRLHRLILSRSAYFRNMLHGPWREAGAPTVVLHIDDANVDSEAIAIALAYLYGQAPKLNDNNAFRVLAAASFLDLQDLCTICTDFIISELWTSNFLQYQLFAESQDYGSHGERVRNACWGYLCQSATLELREVLPKLSSQTLHALLTSDELWVPNEEKRFELALFTLLAKVTTCEIQVSGNETSLPSADRSMRKGKAPMNESGEELLMDSKLQNLKLHDNSGNEIPHNIIAISDMNGEAPKRMENDCSTGGPSGESTSYQFNENNWLSSEQTANNYFSRTFSSGVVPTEWGRPNAPLWGGRVIGRRQVRCIRGSSCLSTDEYNTFMNIFERGSLLYCNMSFDALLSVRKQLEEFGFPCKAVNDGLWLQMLLCHRVQAIVADTCRNCCLTNNSCACKQAYVSSHTHHYRQEHDRSSVSGTIGNVYLADAQGDGNGVLGPVRVNVRGAVDGLAGIGRGNSNVPGAAWAPTRYVFSRVPYGLGSRNAQQFANDESEPRIDRNGDISADGLTALVNLSQENSAAHPQAESLFETGMQTRYHSVASVSTPGGSSVQMQESKEHDWETAEDATISLDMKTPLSHFPPFRFGVEFDDVHRLADGHVKHSTEVFYAGSLWKVSVQAFNDEDPHGRRTLGLFLHRRKAELLDPLRKAHLYVDPREKVTARYQLICPSKREVMVFGCLKQAGTLLPKAPKGWGWRTAILFDELADLLQGGALRIAAVVQLV

SEQ ID NO: 65840 - protein, 596 aa, Zea mays
  Clone ID: LIB3591-088-D7_FLI.pep
RWPAHSTRGVHRRSSARLPPWWLDRHRPLPARLRQRAMYRVKSEGEGEGEGDCEMMLQEQMDSLVADDVSSGGGSPHRGVGTPLKKGPWTSAEDAILVDYVKKNGEGNWNAVQKNTGLFRCGKSCRLRWANHLRPNLKKGAFTPEEERLIIQLHAKMGNKWARMAGHLPGRTDNEIKNYWNTRIKRCQRASLPIYPASVCNQSTNEDQQLSGNFNGGENISNDLLSGNSLYLPDFTSDNFIANPEALSYAPQLSAVSISNLLGQSFASKSCSFMDQVDQAGMLKQSGCVLPALSDAIDSVLSSADHFSNDSEKLRQALGFDYLNEANASSKSIAPFGVALTGSHAFLNGNFSASRPTNGPLKMELPSLQDTESDPNSWLKYTVAPAMQPTELVDPYLQSPSATPSVKSECASPRNSGLLEELLHEAQALRSGKNQQSSVRSSSSSAGTPYETTTVVSPEFDMGQEYWEEQPSSFLSEYAHFSGNSFTESTPPVSAASPDIFQLSKISPAQSPSMGSGEQALEPKHESAASPRPENLRPDALFSGNTADPSIFNNAIAMLLGNGIDAEYKPVLGDGIVLDSSSWNNMQHAFQMAGFK

SEQ ID NO: 65841 - protein, 197 aa, Zea mays
  Clone ID: LIB3591-091-E7_FLI.pep
CGMVAGSGPLGNHSPRSGQWSVLRGRRQVHQARRVEQLHEPLVGGPRLRRREVQVLVEHGGQAPLLQLPQASDDAASPVLASLAVDEDRLVSHVKDNFERLPDRFFGDVDEWFLRRHGIQHCRTTLAPFDGELVKPDPVRAQEPRVLLRVRLRAQVHDGAQVEGEQEAEVGGVREARAEDAVVDHGEVERRLLLSLG

SEQ ID NO: 65842 - protein, 188 aa, Zea mays
  Clone ID: LIB3591-099-C1_FLI.pep
ISNVKTMIIAPTKVNWGLVHSIKLDLSLLLIGSTSSDNGYSLRRGFQITYLSGEKSENRVLFPFFLKADHALSQSAEVSPLSLPLLSGEPREQRGTSARGGRRAKNLPEPSSTSIYGWLAAKILQAGQEPRSEILPFSLFLSPHRTVSLPLPYYPVAALRGRLVGGEDAWQEGGGVRDSQREKQVALA

SEQ ID NO: 65843 - protein, 298 aa, Zea mays
  Clone ID: LIB3591-100-E5_FLI.pep
KVPNDHDVLLVSRCHQSAIPHFYCPFSVASVSSLCSHLASSPSGLSSPPRTNRQKEGRMASSQCCDNPPALNPACGEGKVVDSFGGLKAYVAGPEDSKAAVVLVADVFGFEAPIMRKIADKVASSGYFVVVPDLFHGDPYAPENVEKPFPVWIKSHTPEKGFEETKQVIGALKEKGVSAVGAAGYCWGAKVVVELAKAHEIQAAVLLHPSFVTVDDIKEVKCAISILGAEIDKMSPPELIKQFEQVLSLNSGVGHFVKIFPGVAHGWSVRYNHDDAAAVKSAEEAFADMLDWFNKNLK

SEQ ID NO: 65844 - protein, 469 aa, Zea mays; identical to SEQ ID NO: 62592
  Clone ID: LIB3591-100-E6_FLI.pep

SEQ ID NO: 65845 - protein, 430 aa, Zea mays
  Clone ID: LIB3591-100-A11_FLI.pep
LLLSAPTTTEAYDSLDPNGNITIKWDIMQWTPDGYVAVVTMFNYQQFRHIGAPGWQLGWTWAKKEVIWSMVGAQTTEQGDCSKFKGNTPHCCKKDPTIVDLLPGTPYNMQIANCCKAGVINTFNQDPANAASSFQISVGLAGTTNKTVKVPKNFTLKTPGPGYTCGRAIVGRPTKFFSADGRRVTQALMTWNVTCTYSQFLAQKTPSCCVSLSSFYNDTIVNCPTCSCGCQNPSGSNCVNEDSPNLQAAIDGPGKWTGQPLVQCTSHMCPIRIHWHVKLNYKEYWRVKITITNFNFRMNYTQWNLVAQHPNFDNITQLFSFNYKPLTPYGGGINDTAMFWGVKFYNDLLMQAGKLGNVQSELLLRKDSRTFTFEKGWAFPRRVYFNGDNCVMPSPENYPWLPNASPLTKQALTLPLLIFWVALAVLLAYA

SEQ ID NO: 65846 - protein, 844 aa, Zea mays
  Clone ID: LIB3591-108-E4_FLI.pep
AARRKATSEKDVELKPSHGHITSEDEDLDASPVEIDDALILDDDDEDVPDDEDDDHEAVLRGSLPSCVPERVHDVKLGDADDSSVASLANDNQAQPSSGSSTKNTSSRGLDTAEFRSPATFGSRGAMSFAAAAMAGLTPVGGRGIRGSRDRNGLPLGARATEHYNKLIFTAAGKQLNKHLTVYQAVQRQVVHAEDDEDRFGGSDLPDDGNHFWDDIRGDVFTITYQKADNTAEKGSVGGSASVPKSSKSDSCRTLSEKQCTSLLDSILQGELPCDLEKSNQTYNILSLLHVLEGLNQLSPRLRLQSACDDFAEGKVATLNGLYDVGAKVPSKEFINSKMTPKLARQIQDVLALCSGSLPSWCYQLTKACPFLFPFETRRQYFYSTAFGLSRALHRLQQQPGNDNNTAFEREVRIGRLQRQKVRVSRNRILDSAAKVMEMFSNQKAVLEVEYFGEVGTGLGPTLEFYTLLSRELQRVDLGLWRSHSSDNSGMQIDANADDLIRSKNHESESLTESRNIVQSPLGLFPQPWPPTAAASEGSKFFKVVEYFRLVGRVMAKALQDGRLLDLPLSTAFYKLLLGQELDLYDILSFDTEFGKTLQELQILVARKQFLDSCSSESQKIDLCFRGAPVEDLYLDFTLPGYPEYVLKEGGENAEVNICNLEEYISLVVDATVKTGIMRQVEAFKAGFNQVFDISSLQIFSPQELDYLICGRCELWEPETLPEHIKFDHGYTSKSPAIINFLEIMAEFTPEQQHAFCQFVTGAPRLPPGGLAALNPKLTIVRKHSSVANNNSNATGATESADDDLPSVMTCANYLKLPPYSTKAIMLKKLLYAINEGQGSFDLS

SEQ ID NO: 65847 - protein, 511 aa, Zea mays
  Clone ID: LIB3591-109-H8_FLI.pep
PCAVAAAAPGSARTDSTEGSAPLGLHLRRPALCLHRRCPAPSASTSGARLQEMYKSRLQELCQKRRWAPPLYEPTREGPAHAPLFRATVVVNGERFSSRDEGEKSLKEAYNLAAMAAFDNLIALPAAALAPAPAAPAPPSSETQLPYKSQLQIYAQKRGKLLPSYRPIHGGSLHAPLFKSEVTIDGQTFESPEYCHTMKEAETVAAKVALMSLPQEANPTQQLLLPSVNYKNLLQELVQKEGFPLPIYNTASDVSNYSAAFVSTVEIHGVTFHGKPGNTKKQAEMNAAKSAFEHFKNINHDAGSSGSANPLPVAATKQSVDGNTLRAKLEVNKSHLAEPSTEVEAIYSSTEVDKLPLPGPSMDIEVMDSTLEVDKLPLPERSMDVKVVNSSLKVDKLHFAEPITEAEVIHSSLQVDEPLIPKPGMSSSLENTPAVNGHSAPISPTITPTLISVPTATMPVSNDRCGCYMSTNRIQVYPRHTDMVIPEGAAVLPISDNQWVAVSLPYSMEQR

SEQ ID NO: 65848 - protein, 307 aa, Zea mays
  Clone ID: LIB3591-112-G2_FLI.pep
TKQAATARMELPVAEPGTERGEGPLIQCPYCDSEAMHKLAQILLPGLAAVCVDGTTGDPFHSPSVVAVDLRREMVDYITQRSESFIADALIESEANQEGPDAAVPDDPFEAVSVFMDDFGSTKRNIIGHVSGWLLSDSRDDKIDDLVQEMEATRFWPLERREAVAETLLKNVDLRTRFHCPEKYESEARLADHKQQCSFRPVACPYKPLQCEQGCEKRLLRRDMDRHCVTVCPMRPMKCPFGCDSSFPDRDLEKHCAQFLRPHLIKVLKAIHKKARSEDELKDLALKLEKVRLLTHTFVNELNIHCF

SEQ ID NO: 65849 - protein, 159 aa, Zea mays
  Clone ID: LIB3591-114-D6_FLI.pep
PFLGGRPLLFTDSQVIEMSSAEAKAAAKAVPESVLRKRKREEQWAADKKEKALADRKEALDSRKIIFARAKQYAQEYDAQEKELVQLKREARLKGGFYVSPEAKLLFVVRIRGINAMHPKTRKILQLLRLRQIFNGVFLKVNKATINMLRRVEPYVAYG

SEQ ID NO: 65850 - protein, 342 aa, Zea mays
  Clone ID: LIB3591-115-B7_FLI.pep
PLERAEGVRRQQGRRQGPRGRWRHDHPCHLPRPSPSGRAEVAREEVVAQLKAAAETVGFFQLVNHGVPSELLCEMLPSVRRFNEEPHEVKRPYYTRDARRKVRFNSNFDLFQSPAANWRDTLFCEAAPEPPRAEELPVAVRHVMLEYGGAVREVAARVLGLLSEALGLSPGHLAGMGCAEGLSLVCNYYPPCPEPDLTLGCSRHSDPSFLTVLLQDSHAQGGLQALLASRWLDVPPVAGALLVNVGDLLQLVSNGRFKSVEHRVVANRSRDTARVSVACFCNADIARSTRLYGPIAELIAADDSDGAGRALYRNVTVPEFLAHYDKKGLDGRPALHRFQLLQ

SEQ ID NO: 65851 - protein, 137 aa, Zea mays
  Clone ID: LIB3591-116-C11_FLI.pep
SGRPRSGHHDCLGAERQRLQHVGAAPDAAVHQHRHSPRHRLNHLFERRDGGRRIVQLLVQHLDHVPRAGFPARRQPKEHRPAHHDNDGSSVSRENRSSLEPPSASSKSSNDIKPSRFDRGGAIILHEQSAQLQNISR

SEQ ID NO: 65852 - protein, 135 aa, Zea mays
  Clone ID: LIB3591-116-G12_FLI.pep
YYASHTRSLEPTTSDRLADALNQSTSVPKMSCSLKRRYSLSAASLTSVPPYSGRRTVSPSFRATGIRLPALSRSPGPTATTLAAFSCLDVSGRRMPPAVFLGCTSFSTSTRFRDGSSLFAIAAVLLLPFFLRSKP

SEQ ID NO: 65853 - protein, 632 aa, Zea mays
  Clone ID: LIB3591-117-H4_FLI.pep
KRRRRRRRAGRGARRASAAMEVADEVVRVLGAGFDLTSDFRLRFAKASEGRRLVELGEDTRDVPLPGGGGATLRGVPRDVGVDKGDRIRFRSDVLEFNQMSELLNQKSSVQGKVPSGYFNALFELSGAWLTDAKDTKHLAFDGYFISLYNMHLKASPLVLRDEVKKAVPSKWDPVALSWFIKTYGTHIIVEMGIGGQDVICVKQSHSSTVSTADLKLHLEDLGDFLFSDGKNHSPIHRKTKDGKSTVPDVFVRIVQHSNNLHLSSYSETSTKDGLTVTCSKRGGEAYLPNHSKWLQTVPKKPDAIMFKFVPITSLLTGIPGSGYLSHAINLYLRYKPDLQDLQYFLEFQVPLQWAPMFNELVLGPQKRKGSYPSMQFRFLGPKLHVSTSQVSSSQKPVVGLRLYLEGRKCNRLAIHVQHLSSVPSMIADSMASSMSEWRESQDSDPGYIEAIQWKNYSCVCTSAVKYNPEWHKRAPGGVFIVTGAQLVSKGAWAKKVLHLRLLYTHIPNCTVQRTEWRNAPAASQKGSFLTTISTTLSSPFTQRADTHQAKHEPAVQLNSGVYPDGPPVPLRSRKLLKFVDISEVVKGPHDVPGHWLVIAAKLVKEGGKIGIHVKFALLGYEGQSQGNSFMS

SEQ ID NO: 65854 - protein, 393 aa, Zea mays; identical to SEQ ID NO: 58706
  Clone ID: LIB3591-118-C9_FLI.pep

SEQ ID NO: 65855 - protein, 255 aa, Zea mays
  Clone ID: LIB3592-012-D3_FLI.pep
ALSTAGFGSSSCLPPRVLAGPEVGLHPRDEEDLAVVDVGVNQGQRQRRRSTDHLALVVVLGSVAWADELVLGAVPRHDAAEVSAHGVDPVGGQRLVLLHHQVRGVTLEPLRERAVVGTVRVEPRLHRDVVAQLVLRVGPAAGVPGAGRDEEGAVGDDHADGGQRDGAEEEEVHQLPLLHVGDAVGGDAARRLAHNAPLGALAAHAQAKPLHRLAQQSAGPVELGGIGGGGERRGGRHGCSRRGSVGVGTIRLVFT

SEQ ID NO: 65856 - protein, 190 aa, Zea mays
  Clone ID: LIB3592-014-H1_FLI.pep
RGGPGSGKGTQCANIVEHFGFTHLSAGDLLRAEIKSGSENGTMIENMIKEGKIVPSEVTIKLLQEAMIKNENDKFLIDGFPRNEENRAAFENVTKISPAFVLFFDCSEKEMEKRLLGRNQGRVDDNIETIKKRFKTFVESSLPVIEHYNSRDKVKKIDAAKPIPEVFEDVKTIFAPYAPKVIRFHFFEQM

SEQ ID NO: 65857 - protein, 117 aa, Zea mays
  Clone ID: LIB3592-051-A3_FLI.pep
PMIWSRAPVFLSPSTMPTPRMWPTAPQASVSARVNPAGSPVCRPESRASSFSPAVALRFADGASPNRPANSISVVVVTMICVRAYAVVSDRRRSFPHVRTHQTSHVYIYTRLVAEPM

SEQ ID NO: 65858 - protein, 136 aa, Zea mays; identical to SEQ ID NO: 36723
  Clone ID: LIB3592-055-G2_FLI.pep

SEQ ID NO: 65859 - protein, 234 aa, Zea mays
  Clone ID: LIB3592-058-F5_FLI.pep
VSRDSSRCCFIAISEVFTRYTFDIRVQCQVTSSCSPPGHALQNKICYRGESRNQRTVSSNIANDIGDDHSRMRRFRCLWDELKDRAKSRTELRQLRSISITCTLELGTSSARLSFNLRPLSSVLAGMITLAPLSARTLAVSFPMPFVAPVTMAVMLLASTPAVTSSAVDAEPKPDGPRRPHGQPQSPIPDDTTSLACQQKSATACSNIAYVHRRVTCVQRLPSCWLDLDTRRGR

SEQ ID NO: 65860 - protein, 186 aa, Zea mays; identical to SEQ ID NO: 44856
  Clone ID: LIB3592-059-A9_FLI.pep

SEQ ID NO: 65861 - protein, 306 aa, Zea mays; identical to SEQ ID NO: 46382
  Clone ID: LIB3592-060-D3_FLI.pep

SEQ ID NO: 65862 - protein, 249 aa, Zea mays
  Clone ID: LIB3592-068-F6_FLI.pep
ENQGNADIGSLLGREVGLDVVHLAAADAEGLGEDVGGHGRHGAEERHGDGLRALELAVEGGDDGGGAVAPVLLEVDEAAREDEDVALGDGLGEERVGGGDEADLERALEDEDDLGGARVRVRRVLAARRVVDARHGDAQRVHARELLHVGRRHHGARRVVGVAGVPQPVEEEVVRRKVRLAREPVQLHRGGVVSRADVLQHVGVAGEGRGGEREDDGAGRGDVEVDLRHERSVDGVCRLPDLCTLASDE

SEQ ID NO: 65863 - protein, 174 aa, Zea mays
  Clone ID: LIB3592-069-D5_FLI.pep
LVEGGLAGELDVDGVDVLADAAEVLADALPAGVDLLRVDAVLGVEVLHLAVGEDAVELVGDLVLGAQPGAERQALLLARQLQEVGALPHDGGVLGSSCGATNPLGASTASSVDARSGAGPREDDDGSASCELSCRGFAAGAQAAASRWRVAAEACVDMAMGAALLGREARIERA

SEQ ID NO: 65864 - protein, 168 aa, Zea mays
  Clone ID: LIB3592-071-B8_FLI.pep
HGLPLLCRRHRPFLRRTSASPRRGQKEVLHRARLSPQGHRHRRRGNGCQRPACRRCHGPGGAAGRRRRRARLRAQPVHRQGRRHHHIQEQRRLPAQRRLRRRRGAERRRRHQDLAGGVPQRARRDLLRHPHRAGNLRLLLRAASRSRNGRQDHRQLIKLAIDRYPFMY

SEQ ID NO: 65865 - protein, 155 aa, Zea mays
  Clone ID: LIB3592-071-E1_FLI.pep
LDRRAKEGRKGSHGKRVVHADPVRHRGGAGALQLPLLAAGDRVAVRALLPAGPQRQGLHLRGRVPLHPRVLPQPALQVIFKVYDIDGKGKITFKDLLEVLRDLTGSFMSEEQREQVVTEVLEEAGYTRDYAFSLEDFIQIIDHPGLKMEVEVPID

SEQ ID NO: 65866 - protein, 433 aa, Zea mays
  Clone ID: LIB3592-071-H6_FLI.pep
RPSVQANYEQASVQTNCERPSWLPSSERHNFSTHNTFQEPMDKATKLLIYGASAHMLLSMMAMVIESRKRKRDSRRVGITYGPMEERDRMRLDYLNTKIWMSDTTCVNMLRLSRSSFFRFCKGFRDRGLLEDTIHMCVEEQVAMFLNTVGHNLRNRLVGTNYGRSGETVSRYFNKVLRAIGELRAELIRPPSLETPSKIAGNPRWDPYFKDCIGAIDGTHIRASVSIDMEPSFRGRKSYASQNVMAAVDFDLRFTYVLAGWEGSAHDALVLRDALERENGLRVPQGKFYLVDAGYGAKPGFLPPFRAVRYHLNEWGNNPVQNEKELFNLRHSSLRVTVERAFGSLKRRFKILDDATPFFPFSTQVDIVVACCIIHNWVIQDGGDELIIEESNWPIHNHATTSSGQASEHAFMVNLRQEITNQMWEDRQNHYAS

SEQ ID NO: 65867 - protein, 306 aa, Zea mays; identical to SEQ ID NO: 46382
  Clone ID: LIB3592-072-B12_FLI.pep

SEQ ID NO: 65868 - protein, 164 aa, Zea mays; identical to SEQ ID NO: 59440
  Clone ID: LIB3592-092-A11_FLI.pep

SEQ ID NO: 65869 - protein, 92 aa, Zea mays
  Clone ID: LIB3592-094-E5_FLI.pep
APGPPAAEAVPVEAGAACGRGDRVVDRRDVGVFIWETDTEGAAGPQRLRLLRGAQGRQPVPLAKSSKDRHMNEGYFSLTSCFLLIIPSNLPW

SEQ ID NO: 65870 - protein, 189 aa, Zea mays; identical to SEQ ID NO: 43384
  Clone ID: LIB3592-103-A6_FLI.pep

SEQ ID NO: 65871 - protein, 517 aa, Zea mays
  Clone ID: LIB3592-105-E4_FLI.pep
SGEHTWGAPMQPDPSGNTNAKAKLPLMAPAPSSGRPASVLPYKTANVRDHYRIGKKLGQGQFGTTYHCVGKADGAEYACKSIPKRKLLCREDYEDVYREIQIMHHLSEHPNVVRIRGAYEDALFVHIVMELCAGGELFDRIVAKGHYSERAAANLIKTIVGVVEGCHSLGVMHRDLKPENFLFASTAEEAPLKATDFGLSMFYKPGDKFSDVVGSPYYVAPEVLQKCYGPEADVWSAGVILYILLCGVPPFWAETESGIFRQIMRAKLDFESEPWPSISDSAKDLVRNMLTRDPKKRFSAHEVLCHPWIVDDAVAPDKPIDSAVLSRLKHFSAMNKLKKMALRVIAESLSEEEIGGLKELFKMIDTDNSGTITFDELKDGLKRVGSELTENEIQALMEAADIDNSGTIDYGEFIAATLHMNKLEREENLVSAFSFFDKDGSGFITIDELSQACREFGLDDVHLEDMIKDVDQNNDGQIDYSEFTAMMRKGNAGATGRRTMRNSLHLNLGELLNPSKT

SEQ ID NO: 65872 - protein, 435 aa, Zea mays
  Clone ID: LIB3593-001-F12_FLI.pep
LTILEFGGLEFGGPGIMMQQAQAHTSALAGAPSASAVAPTVAHPHDPVGGDAPPKQVAQAMERLGRAGRFIADIRLGADRLLEALFVSGDAPPYSVRQHVDRMERIIVKEDAAMRLHFQDLRALGRQLEESGVLNGALKAQGNSWGLHMPLVCPDGAVVAYAWKRQLAGQAGASAVDRTRLALKAFTDQKRRFFPHLEDEVVSHLHDGQPGDTKKSKLFTSNGYLEEKSLSEILKNLEHEVPNIKIFTYWHLDWSKRASSLASLLDDDFVDPSKELNLQNMDKSRSDALTTTIDQVAVIELLVPSIFRAVVSLHPAGSTDPDAVAFFSPTEGGSYLHARGTSVHHVFKHVKEHADKALQYFINAEPSKALPLLLRWIASYQTLFTKVCSKCRRLLMMDKSLALLLPPVHRPYHQTSNVGPDLQEAYHIGCSSYDG

SEQ ID NO: 65873 - protein, 173 aa, Zea mays
  Clone ID: LIB3594-028-E4_FLI.pep
LLRARPRKLGLGTAYLHGLKHASGEFVIIMDADLSHHPKYLPSFIRKQKETGADIVTGTRYVKNGGVHGWNLMRKLTSRGANVLAQTLLQPGASDLTGSFRLYKRDVLEDLISSCVSKGYVFQMEMIVRATRKGYHIEEVPITFVDRVFGISKLGGSEIVEYLKGLVYLLLTT

SEQ ID NO: 65874 - protein, 146 aa, Zea mays
  Clone ID: LIB3594-028-E9_FLI.pep
SHHSQASTHSPTSSRTQVSRDKTVDMARTQSAVAVAVVAAVLLLAAAATTSEAAITCGQVSSAIAPCLSYARGTGSGPSASCCSGVRNLKSAASTAADRRAACNCLKNAARGVSGLNAGNAASIPSKCGVSIPYTISTSTDCSRVN

SEQ ID NO: 65875 - protein, 128 aa, Zea mays
  Clone ID: LIB3594-031-B9_FLI.pep
VLVHPGAVGGGADGVGDADAALGGDAGGVAGVEAADAPGGVLEAVAGGAPVGGGAGGALEVPDAATAGRGGAGPRAAGVGEAGRDGGAHLPAGDGGLRGRRRRCQQQHRGHHGDRYGRLRASHVDRFV

SEQ ID NO: 65876 - protein, 633 aa, Zea mays
  Clone ID: LIB3594-032-E4_FLI.pep
FVNLLAMGMSAASHLCASSSLRALTVLFVLAALVSDVEGRHHRHVCPPYFSCGGLSNISYPFRRQGDPSGCGVQSYELVCTDTDATIRIGSGTYKVLSINSTYSYFWVVDADLDIQSSCPLPRWDYHARRTSRNRNLHWRIEFSHDFSNSNPTMWVYAYAYPDWTSRNSYRQRVEFSHDTPFSSSYMDYSGWAIFVNCSQPIENGVYRPVSCLSNSSFIYLVTGYWYEYDGYVFALGLEPSCGYLAMTPLGGPGMPVPMNTSYPDVVKFMRSGFALRFPLSYGDNIRECLAENTRAFHEEPRNSTGIREQILDILTFETLWFCVLDQLGSTNNDVKSVLIDIIVEIIPFVLWGLKSAHVICRFVLMPLAVFVFLAYKYWKTRITIDAVEKFLRMQHMLVPMRYAYTNVIAITGHFRDKLGQGGYGTVYKGVLQPGEVHVAVKMLGNSNCNGEEFISEVATIGKIHHVNVVRLIGFCSEENIRALIYEFMPRGSLDKYIFSSEKTFSWDKLNEIALGIARGLNYLHHGCDMQIVHFDIKPHNILLDSNFVPKVADFGLAKLFPKDDNFVPLSAMRGTIGYIAPEMVSRSFGVISSKSDVYSFGMLLLEMTGGRRNADPHAGSSSQAYYPSLVYK

SEQ ID NO: 65877 - protein, 188 aa, Zea mays
  Clone ID: LIB3594-036-A1_FLI.pep
STTVQYIYRSILHAAPGNTASFILFLPWLHHSCSARDVRVRSVGLLAWSSYNLADLVAVGGHADGESDGDAALAGDGGDGAHVDALDAVGEALEAAARRLAVRAGPRRAVEALDAAAARRGERAGPPRRVRDARSQRRPHLPAGDRRRSGRRQQRRRHQHGNHLRRLPAVQHSRHRRCSISRRRPQFV

SEQ ID NO: 65878 - protein, 177 aa, Zea mays
  Clone ID: LIB3594-036-G12_FLI.pep
HICSFVSSNTMEYSSTRVVCLALALAMVAVTPCAAQNSPQDFVNPHNAARAAVGVGPVSWDENVAAFARSYAAQRQGDCKLVHSGGGPNHYGENIFWGGGSAWKASDAVGLWVGEKQNYDYNSNSCAAGKVCGHYTQVVWRKSTAIGCARVVCNNGGGVFITCNYNPPGNFRGQRPY

SEQ ID NO: 65879 - protein, 307 aa, Zea mays; identical to SEQ ID NO: 47130
  Clone ID: LIB3594-042-G6_FLI.pep

SEQ ID NO: 65880 - protein, 201 aa, Zea mays
  Clone ID: LIB3594-047-C8_FLI.pep
SSRALLATRCLKPLLLPATYRCGGCRWGLIAAFPRLFLQFSFKLLSRLLEALDGLADAAADLGELLGPEHERGDAGDDGELRHAEPEEALAPERAASPGARSPGPRGYRRGHRREVASAAPGEGGRPGGHPGRRDVRAARRPRRGGGGPRWRGEGGGARVGRRDGNHHRYPHACWLLLAARSGRGRSGSRGYFCVRRWDSV

SEQ ID NO: 65881 - protein, 138 aa, Zea mays
  Clone ID: LIB3594-048-H6_FLI.pep
HSPTSSRTQVSRDKTVDMARTQSAVAVAVVAAVLLLAAAATTSEAAITCGQVSSAIAPCLSYARGTGSGPSASCCSGVRNLKSAASTAADRRAACNCLKNAARGVSGLNAGNAASIPSKCGVSIPYTISTSTDCSRVN

SEQ ID NO: 65882 - protein, 149 aa, Zea mays
  Clone ID: LIB3594-050-E4_FLI.pep
AQRAAAAMSSSSSFPNSRFPFAAGAGASGGSGSSVRPWGSSGGTSVSSSGKRIQKELLDLNASDCSAGPKGDNLYHWLSTIIGPQGSPYEGGIFFLDIVFPPDYPFKPPMVTFKTRIYHCNIDSTGKVHLDILKDGWSPAFTISKTPHL

SEQ ID NO: 65883 - protein, 147 aa, Zea mays
  Clone ID: LIB3594-050-H10_FLI.pep
CSHHSQASTHSPTSSRTQVSRDKTVDMARTQSAVAVAVVAAVLLLAAAATTSEAAITCGQVSSAIAPCLSYARGTGSGPSASCCSGVRNLKSAASTAADRRAACNCLKNAARGVSGLNAGNAASIPSKCGVSIPYTISTSTDCSRVN

SEQ ID NO: 65884 - protein, 174 aa, Zea mays
  Clone ID: LIB3594-051-C12_FLI.pep
PSWSRIWIILRRGMKQEAATSIVVTQEDVLHHYKEPPPRREDDPPALAASLSLPSSLSEDDGDAMPQPSSYAVLPRREGELVSAEELLLVPPLNFAMVDHGVYRSGFPDASNLPFLETLRLRSVLCLCPEPYPEANLEFLRAHGIKLFQFGIDGSKFWTFDTEITGTICEHTRR

SEQ ID NO: 65885 - protein, 330 aa, Zea mays
  Clone ID: LIB3594-052-B11_FLI.pep
KCPSELELEAFLRGREDATAAAAAAAVAEQKPAHDVAALAPFGAGGVFPSSDLSAFSFADSNTLNGTGNIHNHLWSHNHNVRHPAVSTTIESQSSICAAAAASPTSATNLYLKESQALGGTSGSDSDSDSLLDIEGGPCEQSTNPQDVKRMRRMVSNRESARRSRKRKQAHLADLETQVDQLRGENASLFKQLTDANQQFTTAVTDNRILKSDVEALRVKVKLAEDMVARGALSCGLGSLGLSPALNPRQACRGPDVLSVSGLDFPGADDACFTGLSPAEQLQLQSSPLQSIAASLESLDNRMASEVTSCGGPGVDVWPWDHHSNGGLSK

SEQ ID NO: 65886 - protein, 119 aa, Zea mays
  Clone ID: LIB3595-017-E2_FLI.pep
TVAMSTGRTEEAAGSAETACVTGAGGYIASWLVKLLLSRGYTVHGTVRDLSDNKTAHLKRLENASENLKLFKADVLDYDAMAGAVAGCQGVFHVATPVPSGKITDPEASFFFSVTFVYF

SEQ ID NO: 65887 - protein, 290 aa, Zea mays
  Clone ID: LIB3595-033-D6_FLI.pep
VRGEVSSTSVPHPPLPESLSPPLRSSALPFPATPTKAPKINAVAAAPCRLVFAEASSRDDMELAEAPAPVPDEDGLDERGVALHLPRLLAGVVSGALTGLFALAGALTGAVTGAVAGRASDSGGVLRGAGLGAVAGAVLSIEVLEASRAYWCSSDRLGSHGGASSMADFIEQLLRARFVQEQFTASGYASYRWQLSISYFGQDDLYDIFGDISSEGLSQESLKKLPHHVVSDHQTRDLLGEILCCPICLQDIVAGETARRLPGCSHAFHQPCVDRWLVGHGSCPVCRQRV

SEQ ID NO: 65888 - protein, 123 aa, Zea mays; identical to SEQ ID NO: 61760
  Clone ID: LIB3595-034-C4_FLI.pep

SEQ ID NO: 65889 - protein, 192 aa, Zea mays
  Clone ID: LIB3595-035-B5_FLI.pep
YIHQTAAAVTASQETTKHYQELIVAHTVDCKMYSLVSASLPPLHYIVPDHTGSDQIRSNPSGSSSSVQIVCGHHKLQGYLRFDWKLRCLLPTGVMERPIEILADLLEDVGGDLWEADLALARLREAAWGCEHVAEGVGDHGGLPVNNEFEALGADELDNACGIVVLFVLGLVVLTRRRHPATLSVCDGLVWG

SEQ ID NO: 65890 - protein, 235 aa, Zea mays
  Clone ID: LIB3595-036-D5_FLI.pep
LSQLRFLLPSFLLTLSLSFAHQLFPTCMDPSGPGPSSVIGAAGGDEAAAVALQRPAQLSRYESQKRRDWNTFLQYLRNHRPPLTLARCSGAHVIEFLRYLDQFGKTKVHAAGCAYYGQRAPPGPCPCPLRQAWGSLDALIGRLRAAYEESGRTPESNPLAARAVRIYLREVRDSQAKARGIPYEKKTKRKRAQQQATEPSTSSSDAAAGSGRARAAAAAASAAQAGGSSAAPSST

SEQ ID NO: 65891 - protein, 736 aa, Zea mays
  Clone ID: LIB3595-050-F4_FLI.pep
LTTAHCEAHRYSSAGAAAARRWISPEAPAMERSCYFPLRWESTGDQWWYASPIDWAAADGHYDIVRQLLHLDPNLLIKLTSLRRIRRLEALWDDDARFADAARNRASVARSLLLECECRNHRPAAPGAGENTLLRAGYGGWVLYAAASAGDAAFVRELLERDPLLVFGEGEYGVTDMFYAAARGGSADVFRLLLDHAMSPRCSTSCRNGEASARRSSVFRLEMMSRAVHAAARGGSVEMLRELLEESSVSTYLDIRGSTVLHAAAGRGQLQVVKYLVASFDIINSTDNHGNTALHVAAYRGHQPVVEALVAASPSTLSVVNNAGDTFLHSAVTGFRTPGFRRLDRQLELMRYLIRERTADIQKIINLRNDAGLTALHLAVVGCAHPDLVELLMATPSIDLNAEDANGMTALALLKQQLRSATSDRLIKQIVSAGGVLNSSILRTRSAIASQIKMQGGIASSPGTTFKVSDAEIFLFSGMGAAESLRPSSCSSNGKDDDPTHADADCAENRGSSEKRLSSASRAKDRLKMMLRWPRHKDKTPKKSEDSSPLGSISRLNEHGAETPAPLRQKFTKTTALNGKRTLAVKSSTPSSSSTKKKLNTKLIHGIMEAMPQLAPSTARSASPTDTFLRSSVSSTPQPLAKLKDICLDDEISMVTPPAGRLKDSDDAMEDPSCSNNSSMDDGCGAGTAESAARKHGCGNGRLINICFGAQGLTVEDSASGQQTSKMFKQQCLRVS

SEQ ID NO: 65892 - protein, 194 aa, Zea mays
  Clone ID: LIB3595-059-B11_FLI.pep
SLPPAPAISSTAVVSGPAEMGSTSSMLTQYDIEEVQDHCNHAFSQQEIVSLYHRFCQLDRNGGGFVSADEFMSVPEFAVNPLSQRLLRMLDGLNFKEFVAFLSAFSPRTSLQEKIEFIFRVYDTDCNGKVAFDDILSILRDLTGSFMTEQQRQKVLTHVLEEAGYTKNSHFTLPDFMKIIGNSELKMEVEVPID

SEQ ID NO: 65893 - protein, 177 aa, Zea mays
  Clone ID: LIB3596-021-A4_FLI.pep
STTVQYIYRSILHAAPGNTASFILFLPWLHHSCSARDVRVRSVGLLAWSSYNLADLVAVGGHADGESDGDAALAGDGGDGAHVDALDAVGEALEAAARRLAVRAGPRRAVEALDAAAARRGERAGPPRRVRDARSQRRPHLPAGDRRRSGRRQQRRRHQHGNHLRRLPAVQHSRHRR

SEQ ID NO: 65894 - protein, 257 aa, Zea mays
  Clone ID: LIB3596-021-F12_FLI.pep
ALSTAGSGSSSCLPPWVLAGPEVGLHPRDEEDLAVVDVGVNQGQRQRRRSTDHLALVVVLGSVAGADELVLSAVPRHDAAEVSAHGVDPVGGQRLVLLHHQVRGVTLEPLRERAVVGTVRVEPRLHRDVVAQLVLRVGPAAGVPGAGRDEEGAVGDDHADGGQRDGAEEEEVHQLPLLHVGDAVGGDAARRLAHNAPLGALAAHAQAKPLHRLAQRSAGPVELGGIGGGGERRGGRHGCSRRGSVGVRSRDNTAGVH

SEQ ID NO: 65895 - protein, 165 aa, Zea mays; identical to SEQ ID NO: 47592
  Clone ID: LIB3596-032-B11_FLI.pep

SEQ ID NO: 65896 - protein, 124 aa, Zea mays; identical to SEQ ID NO: 41198
  Clone ID: LIB3596-037-F12_FLI.pep

SEQ ID NO: 65897 - protein, 189 aa, Zea mays
  Clone ID: LIB3596-042-F8_FLI.pep
TIVHRSIQCVLHGNCRRRRRRCRAPHHGGRGRGRGEPARAQLVPRQRRLPGRRRHAGARPRPPPAPGLRRHGQRRVHDDLGRAGERREARQRGLGGGGRQGQARLRGPPARQGGDDGGERGPAGRHLRRRQQDGRGPARHGQPWLRLHPEGVLGQRQQPLRAELQMPGPHCQEAQGVERLLACTLQLSQ

SEQ ID NO: 65898 - protein, 144 aa, Zea mays
  Clone ID: LIB3596-044-E8_FLI.pep
HSQASTHSPTSSRTQVSRDKTVDMARTQSAVAVAVVAAVLLLAAAATTSEAAITCGQVSSAIAPCLSYARGTGSGPSASCCSGVRNLKSAASTAADRRAACNCLKNAARGVSGLNAGNAASIPSKCGVSIPYTISTSTDCSRVN

SEQ ID NO: 65899 - protein, 144 aa, Zea mays; identical to SEQ ID NO: 65898
  Clone ID: LIB3596-053-F3_FLI.pep

SEQ ID NO: 65900 - protein, 177 aa, Zea mays
  Clone ID: LIB3596-054-E10_FLI.pep
NCMLQFTIDHPATADKPKLKTTRQPPPPRAGPYWRRLPSSLLRSRHGRGAVLLDLGQEVLLPGTDDGLHRHPVLDEVEGRHRLDIVGRGNFLQLVHVHLQEHSLGELLGVLDEQWRDEAAGAAPGGREVNDHQLAGLLGLGHVGVEVGLGVAGDHDSLLGRHSSLFFFLGGIESFWC

SEQ ID NO: 65901 - protein, 172 aa, Zea mays
  Clone ID: LIB3596-057-H12_FLI.pep
MALPVAKLGTLALRTLSKPIASRLKSQAAVHPKFRNFIIAIAQANHQITTKIQRRIYGHATDVAIRPLDEQKAVQAATDLIGEAFIFSVAVAALIFEVQRNARSEARKEEARRQELEELKRREESIAKELEDLKLKLSEIEQLAKGRGLTGILNLKRVHGTEVGKAAAPLRE

SEQ ID NO: 65902 - protein, 141 aa, Zea mays
  Clone ID: LIB3596-063-D8_FLI.pep
ASTHSPTSSRTQVSRDKTVDMARTQSAVAVAVVAAVLLLAAAATTSEAAITCGQVSSAIAPCLSYARGTGSGPSASCCSGVRNLKSAASTAADRRAACNCLKNAARGVSGLNAGNAASIPSKCGVSIPYTISTSTDCSRVN

SEQ ID NO: 65903 - protein, 168 aa, Zea mays
  Clone ID: LIB3597-019-H12_FLI.pep
DGCSRSVHPGGFVRSKAASELEDAGQAVGRRGGRASPGDGPREAPQGHHRPPARHQQRRGRRQLQAGAVDAVDPDDAGDAVVVVVVDDAARRRQRVAQRLPPGEQPGHQGHGRQPLRPAAAQLPHRLRLALQRRDQEQPPLDRARWMDSEEAMFAGPCGYLKRTHALL

SEQ ID NO: 65904 - protein, 441 aa, Zea mays; identical to SEQ ID NO: 58947
  Clone ID: LIB3597-032-G9_FLI.pep

SEQ ID NO: 65905 - protein, 394 aa, Zea mays; identical to SEQ ID NO: 56351
  Clone ID: LIB3597-033-F3_FLI.pep

SEQ ID NO: 65906 - protein, 304 aa, Zea mays
  Clone ID: LIB3597-036-A2_FLI.pep
AHASPGGGSGGGGGGGGGSYHHHRSRFGDTTLTKVFVGGLAWETPSEGLRQHFDVYGEILEAVVITDRETGRSKGYGFVIFRDPDAAARAVQNPNPVIAGRRANCNIAAFGPPRAAQPRGRGGGGGGRGPHVPDQPPQGSPSPYRVPSQMTPPHQAATLFYNPQFGYWYPPDYPYQQALYNSQVLQHYYPQMYGPASPSGPAYQYMGYMPGGPSPRTGFSPMQQPMRQPFFQQPTTQMDGSFPSVPSLPPNFRLQLPPRAVSRESDDASGSQSAQPVSSTPATVTNNEEDSRPVVSDSDPNTPN

SEQ ID NO: 65907 - protein, 394 aa, Zea mays; identical to SEQ ID NO: 56351
  Clone ID: LIB3597-047-D1_FLI.pep

SEQ ID NO: 65908 - protein, 242 aa, Zea mays
  Clone ID: LIB3597-050-E11_FLI.pep
LVGYVHRGMGVALPPDAPPASAVQSRRVSLQADAAGAVVGGGGGSQGNPWRQGRARRGNVDGVHEGCLCPLEYATEIAKEADQYNGFNLILADVNSGTMVYISNRPGGDPVIQTVAPGLHVLSNAAINSPWPKAMRLGQSFKRYLTIHDDAEASLKQMVEELMMDTARPDRSMVPDTGDDPEWEYKLSSIFIDTAKEQARYGTRSMVALAAKLEGEVTFYERYLENSLWKENLIQFQMEKAQ

SEQ ID NO: 65909 - protein, 358 aa, Zea mays
  Clone ID: LIB3597-056-E3_FLI.pep
QWPNGGPGLASLRALPTDGRHPSCAAQPVWPAPFVPPLVVAIIDRLVPSAAACHLLHFGSGHDGVLGDDGGDGGGGDRGEEVRGGDSPLRGVVLVVVVERVHRHHAVGRRRHHAALRCRRRRVREVPLQVGPARAASCRLAYLRIVAQVRDVIRGVPVGGGGGGVEREHAVVLLVRAVGVVVRGRWRRRRGGVVVPRHRRHAPGPHGDGWRGLVLRGERGRVRRRGGRRRRAEDVWRGARLGAEGGEVAVGAAAVDDGGGVLARLLGRVRLLERHEAVALGAAGELVGDDDGLEDVAVALEVLAEGVLVGLPRQPAHEHLGERGVPERRRRLWQRQWLRMRRHHRHCRRLPAFLMCAA

SEQ ID NO: 65910 - protein, 212 aa, Zea mays
  Clone ID: LIB3597-056-G10_FLI.pep
YSPHMTQRHQLSSIQQPSSLVPAHQQRDATTTTASDDGEMFLRRILTGGGGLAALRAARAVKETTGIVGLEVAPNAREVLIGLYTRTLKEIEAVPKDEGYRKAVESFTNHRLQICQEEDDWKRIEDRIGCGQVEELIEEAEDELKLIAKMIEWDPWGVPDDYECEVIEDDTPIPKHVPQHRPVALPEEFFKTLDAVKSDPALQGDAPPQVKA

SEQ ID NO: 65911 - protein, 189 aa, Zea mays
  Clone ID: LIB3597-060-G4_FLI.pep
TAEKEKEKAKAKESQSGKQKEEPAAAECGDVVAADRGAPVGRGGARRARAVRAQVARVHGGAGPPRRAPPAAQPGRGGLQPVDGVRVAPAGRRPDPHLRLHRQAGVVRQGGDGVRGAGADARPRRGEEQGAPHLGHHLRDRRQPLRHQDRVPHPRGARPRLPCHRLPARARGGPQGRGHRRRRQLICSS

SEQ ID NO: 65912 - protein, 161 aa, Zea mays
  Clone ID: LIB3597-290-F6_FLI.pep
HYFLQVELERCNDTFCLPTAPRIVYGLKGSSADMFLDNAEYRKFLFQEFGVSTMDEESAAVVMVSSAPLLIQSYLHYVHPDHVCYLLLTSKINLALNSDDQTATSPGIPVIVFRGVSDLAGGEPTWSSTSLMNLASINALKVAVEFIAAVGKHSSTASVKR

SEQ ID NO: 65913 - protein, 201 aa, Zea mays; identical to SEQ ID NO: 65880
  Clone ID: LIB36-018-C7_FLI.pep

SEQ ID NO: 65914 - protein, 207 aa, Zea mays
  Clone ID: LIB3600-018-E6_FLI.pep
WGGGRRHAAGAALLLLLLDADRRGPLAGPEDGRRALVGGGGERDDGEVVAVADLDHEGVRVVEEDLVHVDAALLHAALHVRDAHLLEPPLHRHHALALEGDVVVLGVDLALILREAAGVLRLQQVDADPVVEQPGAVEVERAGAADGHEAQHVRVEAQRRLHRPAHDADVVQRRQRQHARRHRRAVVLLHQHPQPTTASSCCLPQTR

SEQ ID NO: 65915 - protein, 227 aa, Zea mays
  Clone ID: LIB3600-025-B10_FLI.pep
HLRISCHFSDYSRDSTSTYTGFPFNLYKSLNFGSPMTHAHSTTSAPARSRSLIAAQSVPPVATRSSMTSTRSPDRSMAPTRISRQSVPYSRTYFSEITSPGSFLGLRRGMNLAPIASAIAGPNTKPLASIPATASMPIPRYRSTNRSTASLNTLGRSSSVVMSLNMMPCLGKCGTTRMASEMPCSRGSAAAAGAAAGSRPTSLPTGLALVPASVRLTASQLASSPIN

SEQ ID NO: 65916 - protein, 266 aa, Zea mays
  Clone ID: LIB3600-026-C2_FLI.pep
LPYVNRLILQAPKRGGRAPVPAKKKAVVTNPLFEKRPKQFGIGGALPPKKDLHRFVKWPKVVRIQRQRRILKQRLKVPPALNQFTRTLDKNLATNLFKMLLKYRPEDKAAKKERLLKRAQAENEGKTVESKKPIVVKYGLNHVTYLIEQSKAQLVVIAHDVDPIELVVWLPALCRKMEVPYCIVKGKVRLGSIVHKKTASVLCLTTVKNEDKLEFSKILEAIKANFNDKFDEVRKKWGGGIMGSKSQAKTKAREKLLAKEAAQRMT

SEQ ID NO: 65917 - protein, 282 aa, Zea mays
  Clone ID: LIB3600-027-A12_FLI.pep
WMSSMQVTNHGIEATLMDAMMDASREFFRQPLQEKQKHSNMIDGKHFQLQGYGNDRVASEDQVLDWCDRLYLLVEPQEDRSLDLWPACLRDVLHDFTTECTRVKDCLLREMAKALDELGDDDDYFIDQFGDRADTHARFSYYPPCARPDLVFGLRPHSDGTFLSLLMLDDSVGGLQVFRDGAWYDVRTRPHTLLVNLGDQIEIISNGIFKSPVHRVVTNAEKERLSVVLFYSIDPEREIRPADKLIDENHPALYKKVKVKEYTAGLYEHFSRGKLVKETAKI

SEQ ID NO: 65918 - protein, 199 aa, Zea mays
  Clone ID: LIB3600-035-D4_FLI.pep
AMVTCTVLAFFSGGGSFLTVTVSTPFSQRAATPPVSASSGSRNLRTNDRGAAPRSNRMYRHPSPFMSSSSSRFRFPLPPFITSTRSSSSVTWMSDLERPGTSSTKAYSRGLSTMSTGAPPPPPSPWTRPWPCPCAAWLPADRRSPSAAERRSSTSGRWRRLVTAVSNSSVMALTLTYSLDLTVFAWRDLRRLPLIWLCA

SEQ ID NO: 65919 - protein, 267 aa, Zea mays
  Clone ID: LIB3600-046-F8_FLI.pep
PPQTSGPVPYRHSILNLGAEEERTGARSGRRIVAGWGRGERRRRRRRPVGMIQLLFLVLFAEGAVALLLMVKVGPLRELAMRGVDQVKTGKGPATVKTLACTLSVILMSSVASILKIQNRGLKLGTVSPMDQVLWRTHLLEASLIGYTLFLAFVIDRLHHYLRKLLTLRKTSSTSREEVEKLQMENRSLREKEEKSSSETKRLQREIARLNEGMKKLKSETEEHERKASVAEAHVDALQKQSEELLLEYDRLLEDNQILQTQLLSRG

SEQ ID NO: 65920 - protein, 217 aa, Zea mays
  Clone ID: LIB3600-050-F7_FLI.pep
SVMAAPPARARADYDYLIKLLLIGDSGVGKSCLLLRFSDGSFTTSFITTIGIDFKIRTVELDGKRIKLQIWDTAGQERFRTITTAYYRGAMGILLVYDVTDESSFNNIRNWIRNIEQHASDNVNKILVGNKADMDESKRAVPTSKGQALADEYGIKFFETSAKTNLNVEQVFFSIARDIKQRLSETDSKPEDRTIKIKAEGEAEAAAAAQNSACCGS

SEQ ID NO: 65921 - protein, 209 aa, Zea mays
  Clone ID: LIB3600-052-E6_FLI.pep
TCSCREQAMAPDLSELAAAAPARGAYLAGVGVAVLLAASFLPVAESSCVRDNSLVRDISQMPQSSYGIEGLSHITVAGALNHGMKEVEVWLQTISPGQRTPIHRHSCEEVFTVLKGKGTLLMGSSSLKYPGQPQEIPFFQNTTFSIPVNDPHQVWNSDEHEDLQVLVIISRPPAKIFLYDDWSMPHTAAVLKFPFVWDEDCFEAAKDEL

SEQ ID NO: 65922 - protein, 192 aa, Zea mays
  Clone ID: LIB3600-055-G2_FLI.pep
AHHKRARDPGRKKREKTSLSSRRPRSPTSRLLPACLPACKKEFVMASKRILKELKDLQKDPPTSCSAGPAGEDMFHWQATIMGPPDSPYAGGVFLVNIHFPPDYPFKPPKVSFKTKVFHPNINSNGSICLDILKEQWSPALTISKVLLSICSLLTDPNPDDPLVPEIAHMYKTDRPKYESTARSWTQKYAMG

SEQ ID NO: 65923 - protein, 352 aa, Zea mays
  Clone ID: LIB3601-003-D6_FLI.pep
RIPHAPAPNPASSAAAQGSMEKYELLKDIGSGNFGVARLMRNKDTKELVAMKYIPRGLKIDENVAREIINHRSLRHHNIIRFKEVVLTPTHLAIVMEYAAGGELFDRICSAGRFSEDEARYFFQQLICGVSYCHFMQICHRDLKLENTLLDGSPAPRLKICDFGYSKMADVWSCGVTLYVMLVGAYPFEDPDDPKNFRKTIGRIVSIQYQIPEYVHISQDCRQLLARIFVANPAKRITIREIRNHPWFLKNLPRELTEAAQAKYYKKDNSAPTFSDQTVEEIMKIVEEARTPPQSSTPVAGFGWAEEEEQEDGKRSDDDEQYGEDEDYDGEDEYDKQVKHVHASGDFQHLLK

SEQ ID NO: 65924 - protein, 158 aa, Zea mays
  Clone ID: LIB3601-009-B8_FLI.pep
RRRRHRHRHRLGKETEETTAMVVRIRLARFGCRNRPFYRVMAADSRSPRDGKHLEVLGYYNPLPGKDGGKRMGLKFDRVKYWLSVGAQPSDPVQSILFRAGLLPPPPLLAMARKGGPRDRRPIHPMTGRPLDLEGVAIIDNSNAPEGDTEVPTDEVAQ

SEQ ID NO: 65925 - protein, 358 aa, Zea mays
  Clone ID: LIB3606-010-G12_FLI.pep
AVASVEPGATSVAASWGVKLTADALLADLADDEFDLISLPGGMPGSSTFGECKVLEKMVKKHVEKGKLYAAICAAPAMTLGTWGLLNGLKATCYPSFIDKLPSEVHAVESRVQIDGKCMTSRGPGTAMEYSVILVEQLYGKEKAKEVAGPMVMRPQHGVEFSMKEVNSTSWNVGGTPNILVPIANGTEEMEATMIIDILRRAKANVVVASLEDKLEIVASRKVKMIADVLLDDALKEQYDLILLPGGLGGAEAYAKSDKLMDLIKKQAEANRLYGAICASPAIALEPHGLLKGKKATSYPAMWNKLADQSECNNRVIVDGNLITSQGPGTSMEFSLAIVEKLFGRERALELAKSMVFI

SEQ ID NO: 65926 - protein, 375 aa, Zea mays
  Clone ID: LIB3606-017-F8_FLI.pep
VARHHPEARAQNPRPHLASSPSPSPSQSQPTPSHATSPSAPTMSAPSDAAAASAAPAPAPTTAAASSSGGFTFKLHPLVIVNVSDHHTRVKAQAACSADSSSPSSGPGAGQPPRVFGCVIGVQRGRTVEIFNSFELVLDPVSGTLDRAFLEKKQELYKKVFPDFYVLGWYSTGSDVHDTDMQIHKALMDVNESPVYLLLNPTINLSQKDLPVTIYESELHVIDGCPQLIFVRSNYTIETVEAERISVDHVAHLKPSDGGSAATQLAAHLTGIHSAIKMLNSRVRVIHQYLVAMQKGDIPMDNSLLRQVSSLVRRLPATESQKFQDDFLMEYNDTLLMTYLAMFTNCSSTMNELVEKINTSYERPTTRRGGRGAFM

SEQ ID NO: 65927 - protein, 173 aa, Zea mays
  Clone ID: LIB3606-030-E12_FLI.pep
SRANTPLSAPPPLPPSCSAGAATATATATASQQIVTMADSKAAAAVTLRTRKFMTNRLLSRKQFVLEVIHPGRPNVSKAELKERLAKIYEVKDPNCIFVFKFRTNFGGGKSTGFGLIYDNLEAAKKFEPKYRLIRNGLATKVEKSRKQMKERKNRAKKIRGVKKTKAGDAKKK

SEQ ID NO: 65928 - protein, 773 aa, Zea mays
  Clone ID: LIB3606-031-H1_FLI.pep
PSSSSSRAARHHTRLHDLLLRARSHHRSGAVAMAGRYYQGQGGGGGTSMEVVSTPNQELALTNCAYVCPADLRRFPNALAVVADSWVFTLREHNAVASGRIALNAIQRRQAKVSAGDSVTVSSFVPPDDFKLALLTLELEYAKARANRNDELDAVVLAQQLRKRFLDQVMTLGQRVPFEFHGTNYVFTVNQALLEGQESSTPLDRGFLSSDTYIIFEAAPNSGIKVINQKEAASSKLFKHKEFNLEKLGIGGLSAEFTDIFRRAFASRVFPPQVVSKLGIKHVKGILLYGPPGTGKTLMARQIGKLLNGKDPKIVNGPEVLSKFVGETEKNVRDLFADAENEQRTRGDQSDLHVIIFDEIDAICKSRGSTRDGTGVHDSIVNQLLTKIDGVEALNNVLLIGMTNRKDLLDEALLRPGRLEVHIEINLPDENGRFQILQIHTNKMKENSFLSPDINLLELAARTKNYSGAELEGVVKSAVSYALNRQITMDDLTKPLDEESIKVTMDDFVNALHEITPAFGASTDDLERCRLRGIVDCGKAHKHIYQRAMLLVEQVKVSKGSPLVTCLLEGPAGSGKTAMAASVGIDSDFAYVKIISAETMIGFSESSKCAQICKVFEDAYKSQFSIIVLDDIERLLEYVAIGPRFSNLISQTLLVLLKRVPPKGKNLLVIGTTSEVGFLESVGMCDVFSVTYHVPKLKKEDAKKVLHHLDVFDDGDLDAAAEALDDMPIKKLYTLVEMAAQGPTGGSAEAIYAGEDKIDINHFFSILSDIIRY

SEQ ID NO: 65929 - protein, 183 aa, Zea mays
  Clone ID: LIB3606-039-B9_FLI.pep
GFAPGISSPAATARPCANDTSFSLLRSGLFDPRIPYNMLPLSLLKTAQGHPMLVELKNGETYNGHLVNCDTWMNIHLREVICTSKDGDKFWRMPECYIRGNTIKYLRVPDEVIDKVQEETSKSRSDRKPPGVGRGRGRGDVGSKPGSRGIGRGQDDGGRGSGGRGRGGVGAKGGNKGGGRGRG

SEQ ID NO: 65930 - protein, 592 aa, Zea mays
  Clone ID: LIB3606-058-A10_FLI.pep
TLYSLVSTPPSPPSLSPQAVSSLPRFLSSPPPPHPSAPNAAPTLASRHAFRSRAAMGNCCRSPAAVAREDVSSSHFPASNAKKKPHQARNGGAGGGQKRLSVLGDEGCEVVGIDDKYVLDRELGRGEFGVTYLCMDRDTKELLACKSISKRKLRTAVDVEDVRREVAIMRHLPKSPSVVSLREACEDDGAVHLVMELCEGGELFDRIVARGHYTERAAASVTRTILEVVQLCHRHGVIHRDLKPENFLFANKKENSPLKAIDFGLSIFFKPGEKFSEIVGSPYYMAPEVLKRNYGPEIDIWSAGVILYILLCGVPPFWAETEQGVAQAILRGNIDFKREPWPNVSENAKDLVRHMLEPDPKLRLTAKQVLEHHWLQNAKKAPNVPLGDIVKSRLKQFSRMNRFKRRALRVIADHLSAEEVEDIKDMFKTMDTDNDGIVSYEELKTGIAKLGSHLAESEVQMLIEAVDTNGRGALDYGEFLAVSLHLQRMANDEHLRRAFLFFDKDGNGFIEPEELREALVDDGAADSMEEVANDILQEVDTDKDGKISYEEFVAMMKTGTDWRKASRHYSRGRFNSLSMKLIKDGSVKLGVE

SEQ ID NO: 65931 - protein, 387 aa, Zea mays
  Clone ID: LIB3606-060-D3_FLI.pep
SLSHSQTKLPSAHGPTAAPPPTPAVSRAARHRGRLLRGGGGAQAVAQLLPPQLPARGADRVGRRRRQAARQPVHGCGHAAALLPRLLRQRLRRLGAGLAALLLRRRAGARRGDQPVPARGRLRRRGPRQGGAGGRVPGRRLLRRRAGASGARPRGRPGRAPVPRRAGPPRLPPLRRARRRGQPAPHQHVGASHGAPLRPQGPRAPGDGGAGRRPHRRLLPLRRVRAPHLRLPGRQPRPAAQPGVRARAAALLRGIPHRPHRLHLQRHRHAPGLRRDLLQEPAPRPRPARLRRRHLGVPAHQGLRPALRRQPHRLLRGLRRRDAEARRRRRQDGAPGRRQAPLRRARLSVAMLVVPLGRSIVVRLRIRLRDMRGSSFSVLGKWGVSGN

SEQ ID NO: 65932 - protein, 145 aa, Zea mays
  Clone ID: LIB3606-061-A3_FLI.pep
LTDDHHANNSPGLPNRLAIDNTTEHTRARMAPAIYAQDSSQRQSSLLALDLDGHMADVVLRLDVPDHLVKDLISVRIPGDGHMARQQHLAHRDGPDVQLVDGHHALHPAEPALQPGGVDLAGRALHQHFEDAAQHPDRGEQHHHR

SEQ ID NO: 65933 - protein, 492 aa, Zea mays
  Clone ID: LIB3606-061-G4_FLI.pep
MVRTMSTTAAGTPPVSVATINPKVLKCEYAVRGEIVTHAQNLQQELQKNPESLPFDEILYCNIGNPQSLGQQPVTYFREVLSLCDHPALLDKSETHALYSSDAIERAWQILEKIPGRATGAYSHSQGIKGLRDEIAAGIAARDGFHASGDNIFLTDGASPAVHMMMQLLISSESDGILCPIPQYPLYSASIALHGGSLVPYFLNEETGWGLDVDELKKQLEEARSKGITVRALVVINPGNPTGQVLVEENQKKIVEFCKNEGLVLLADEVYQENIYVEDKPFHSFKKIARSLGYTDDDLPLVSFQSVSKGYYGECGKRGGYMEITGFSPDVREQIYKVASVNLCSNVSGQILASLVMNPPKAGDESFESFMSERDGILSSLARRAKALEEAFNSLEGITCNKAEGAMYLFPRLHLPQKAIGAAQAVGTAPDAYYAKRLLEATGIVVVPGSGFGQVPGTWHFRCTILPQEDKIPAIVSRLKEFHEKFMDEFRD

SEQ ID NO: 65934 - protein, 270 aa, Zea mays
  Clone ID: LIB3607-009-D10_FLI.pep
LGRCADGAVAACFLRSQYLAELLAEHQKLGPFMQVLPICSRLLNQEIMRVSSMVHDHGFSDLDRRRFRSPSPMSSPIVRPNLHGNGFGPWNGMHQERLGFPPPGTSMDWQGAPPSPGSYIVKKIVRLEVPVDSYPNFNFVGRILGPRGNSLKRVEASTGCRVFIRGKGSIKDTEKEEKLKGKPGYEHLNEPLHILIEAELPANIVDTRLRQAQEVMEELLKPVDESQDFYKRQQLRELAMLNSTLREDSPHPGSVSPFSNGSMKRAKPSQ

SEQ ID NO: 65935 - protein, 434 aa, Zea mays
  Clone ID: LIB3607-049-C10_FLI.pep
TSPPARWSPSSSREGTVRVQTKGGVHSLPVLICWPVGHHIMQGERPGRRDDQSAVLRHVPHGPALHQQRLGHHHVPAGPGARDHGRGHQGRAQRHGLPCRRPRRRGLHRRLLPGLRPLPPLRGELLRPCGAHLQRRLLGRQRHVRRLLARAGGGQALRGARPRRAAAGRRRAAAVRGRHGVQPHEAPRHAGAPRRQPRRRRARRPRPRRRQARQGVRSPRHRRQHVAGQGGRGQGPARRRPLRRQHRRRADAGRGQVPRLRHRHRLRQALARTHPGPAQGQRQARARRRAGPARRAPLLPAHLWEEDRQREHDGRDQGDAGDARPLRPPQHHLRHRARLHGRDQRRARAPRTQRRPIPLRHRHRRRLHLKTIVHSIRCIIIIYQYRHQWQAWPLVACILLSIHIKCVSAWASVHIAPLLAANKHSYIHICSIFS

SEQ ID NO: 65936 - protein, 223 aa, Zea mays
  Clone ID: LIB3608-006-E9_FLI.pep
RGCDNAGARQLSAPHGDPLHHVLELAEVDAAVAVAVDVADHLLHSGQVPSLGQAELLEHGLQLGGRDEAVAVLIEHPERLLHVPLVVVVLGHSHRHGAEQRVPERAVEGFEVVEAEPRGAGRDVPANRGLQAGAVGAEAERVERRGHLVEGDLAVAVAVEEVEHAAQAQCVEAAVPEAERRRGLLGQRRLSDGGGGVLHRHVNSRRSVSSFLRVFCGREDTRA

SEQ ID NO: 65937 - protein, 461 aa, Zea mays
  Clone ID: LIB3608-013-D6_FLI.pep
PAALAAMRIEEVQSTSKKQRIATHTHIKGLGLDANGMAIALAAGFVGQAAAREAAGLAVDMIRQKKMAGRAVLLAGPPATGKTALALGIAQELGSKVPFCPMVGSEVYSSEVKKTEVLMENFRRAIGLRIKENKEVYEGEVTELSPEEAESTTGGYAKSISHVIISLKTVKGTKQLKLDSSIYDALIKEKVAVGDVIYIEANSGAVKRVGRCDSFATEYDLEAEEYVPIPKGEVHKKKEIVQDVTLHDLDAANAQPQGGQDILSLMGQMMKPRKTEITEKLRQEINKVVNRYIDEGIAELVPGVLFIDEVHMLDIECFSYLNRALESPLSPIVILATNRGICNVRGTDMTSPHGIPVDLLDRLVIIRTETYGPTEMIQILAIRAQVEEIDMDEESLAYLGEIGQQTSLRHAIQLISPASVVSKTNGREKICKADLEEVSGLYLDAKSSARLLQEQQERYIT

SEQ ID NO: 65938 - protein, 162 aa, Zea mays
  Clone ID: LIB3608-025-D1_FLI.pep
NGTMQYAWNGREAAQGDETERRSALEAGGHGPAAVVEDEAEIDRQVEVDAEDVALDSSAEAGGGLQVDEPLQQRAAWLRGRRAHLSLDEAQHVGAHAQLERVAGAPTERRRRGRRRRRGARTVGRAGVGYAQHHQVHGQEQRECLGRHCSITTSSQLPRGSR

SEQ ID NO: 65939 - protein, 172 aa, Zea mays; identical to SEQ ID NO: 41503
  Clone ID: LIB3608-031-E1_FLI.pep

SEQ ID NO: 65940 - protein, 349 aa, Zea mays
  Clone ID: LIB3608-033-D5_FLI.pep
SKMGGELLLALLLVSAAAAPQVLGVGNGDNHMRIIQEDIIETVNNHPSAGWTASRNPYFSNYTIAQFKHILGVKPAPQNALSNVPVKTYSRSLELPKEFDARSAWSRCSTIGNILDQGHCGSCWAFGAVECLQDRFCIHLNMSILLSVNDLLACCGFMCGDGCDGGYPIEAWRYFVQNGVVTDECDPYFDPVGCKHPGCEPAYPTPKCEKKCKEQNQVWQEKKHFSIDAYRINSDPHDIMAEVYKNGPVEVAFTVYEDFAHYKSGVYKHITGGIMGGHAVKLIGWGTSDAGEDYWLLANQWNRGWGDDGYFKIIRGKNECGIEEGVVAGMPSTKNMVPNFGGAVGRAIV

SEQ ID NO: 65941 - protein, 625 aa, Zea mays
  Clone ID: LIB3632-004-C1_FLI.pep
HSSTINITNRCSYTVWPAATPVGGGMQLEPGKTWVLQVPGNTQSGRVWARTGCSFDGPGKKSCQTGDCGGVLACTTSGQPPMTMAEFTLSDSNNMDDYFDITVVDGFNLPMDFLPVPSSKGSSGCSRGPRCAADITSQCPDELKVPGGCRSACNGSSCDASTVNSNTVFYARMCPDAYTYATDNGPVTYSCPSGTDYQIIFCPPVDLVSLSPPPTSPLSPPPTSPTATNGTSSITSSSKSKRPRIFGYVLGGSIGGFILIASLVFFFVLHRRRLHRRQEMQEEEEAEFGRLPGMPRRFTFEQLQEATDQFREKLGEGGFGSVFKGRFGEQAIAVKRLDRAGQGKREFLAEVQTIGSIHHINLVRVIGFCAEKTHRLLVYEYMPNGSLDQWIFCRQGQGDDDAPRLHWQTRHKIIAHVAKGLAYLHEECMKRVAHLDVKPQNILLDDNFDAKLSDFGLCKLIDRDKSQVVTRMRGTPGYLAPEWLTSHITEKADVYSFGVVVMEIISGRKNLDTSRSEKSFHLITLLEEKLRSDRLVDLIDMCITSDSQAQEQEAIQMMKLAMWCLQIDCKRRPKMSEVVKVLEGSISVETDIDHNFVVTNPPSFSAPRIVVMSAPPLASEVSGPR

SEQ ID NO: 65942 - protein, 394 aa, Zea mays; identical to SEQ ID NO: 56351
  Clone ID: LIB3632-018-H2_FLI.pep

SEQ ID NO: 65943 - protein, 572 aa, Zea mays
  Clone ID: LIB3632-028-E3_FLI.pep
RTLLFGSLALFSLTACSPPRAMAAAPASVGCGGAYSCETAERTREWMQALATFLGRHRPLLEAHVVNFFKDRLWELVDAEWMECLRREPVESLLKLPSGCVQEHWPATLREFVLTARSLVIPREQKAPQSLVSDIHVAPVGTVLAQGMNSKKKHEIENLAAVVHAIAKRCGAKTVVDVGSGQGYLAQALSFEYQLRVVAIDASSHHASVTIARAERIKKHYAAKCVEKQLLMVPRAVTCHVLSSDTLAAVTLDACKDDNGEHVRDTKTSTKKITQIQESTQGTPPLILAGLHACGDLSVNMLRVFVSCEQVKALVSIGCCYNLLSEDTYEDTDTCPGFPMSKAAKHSELVLGKSIRDLACQSAERWRNLTMDIALQNFDVHAFRAAFQMVLEKYFPEVSRLSPSIGRQGKALRRQRLRKVVESQMTTKKNDDFSCSTLKEQNKNTNDVHPVIHEVDTGPDDIHQNAHQKFILFKDFTLSGLGRLGCGSVEDTSLLEIWKDVQPFSEYIGPFWCLRAALGPLVETYILLDRLLYLQERSNLVEALLFPLFDPTISPRNMAVIAWKLCANSSEA

SEQ ID NO: 65944 - protein, 218 aa, Zea mays
  Clone ID: LIB3632-028-G2_FLI.pep
VHLTYMQLLGVLESLKGITSNQVASQCVLQSYTSGNAQLVNRTDVQTLSQFTAHFISDTDEDRGCNFAAYVPLEEGTPLQMAEWIKYLGTFTNSENRANAVYDAVKTNYLCLSKVAANLGTRFKPVVAWIEFTQGMWTFVKESYILQYVTDAGAEIVDATITDKRFNSSDPEDMDNFHAILCVSINHSECNITTVMLVDELTVACECVTYKRHILFWP

SEQ ID NO: 65945 - protein, 706 aa, Zea mays
  Clone ID: LIB3632-029-G11_FLI.pep
PASLLPLQPSHLRFLAPSSPAQFPEASRTRFLTLPQNDAFLRLVAWGGGMDGGGEGGSSGGRFPILQANRDPESNWEVDVAKSLEDYLLKICSGEVSGEDGAHSVNFAEAALLLQGSVQVYSRKVEYLYSLVLHALEFLSQKKQEQLENGSAQANQNNPSIIPSEEDDIFIGLDDVPVETRISLDNNVDRDDLQRKIVRPPANLLVFEGDCLDSEASELDSYLLATCDFYGDFLLLDPCDAPAVFDFLQGKHSGKENSVAHQGSAAPSKSQANIFTSPNARSVGTGRKSAPGKVLGGLDPTQENQSSTQETSPDNKHWSDPVEPSFADDVEMHPPDDIEDPVGDYSDDEDPWKPLNPHEPGNLKIRPYRRVKGSPRGVIGISKKKTLKSLFPIAKMVGVVIPEHAKSFEAQQSQEEHYGSQSPPRFEKFLRSFELGEENPNVFGDLKDDNASNTGINFDYDDPDMPNDIDIDLDVPTCPDEIIAITPKGTQDDIDTHENLDDLCRSHLNALLASIAEVEKQSEMDARVSTWKERIEIALEEQDRNPPFDIGSYGEQILDTLSSRTNNTGTASFSEIVSGRPKFEIARTFSALLQLVNGRSVDLDKGKATNELVCYTAENPFHVRLIGPNRRPEMEARFARKRVKSPLQNAGKDGESSLAQHECPNKPLRKNGKIPVKTATRLTPDGKRRRRSSAHLMQPINLESSG

SEQ ID NO: 65946 - protein, 479 aa, Zea mays
  Clone ID: LIB3632-034-H4_FLI.pep
AFQVQLPPRSRRPRPPRPAPPRYNYKGPPAGAAVPASPSSSTLSGAEILSCAPDREKPGAGVWNSDMEAAAAVVGFGLTRWQAAALSAVAGWVWAASFYDLTRRARALVQPWVTRRVHAETAAILRFQRLEHKLLDNIFSVLSCVVSVPFYTGFLPLLFWSGHGRLARQMTLLMAFCDYLGNSVKDIVSAPRPCSPPVRRVTATEDEKENAMEYGLPSSHALNTVCLTGYLLHYVLTFGEHGSVTVAAGLSLAFLLVMLVGIARIYLGMHSLTDVVAGIGFGIVILAFWLSVHDRVDAFVVSGENVATFWAGLSLLLCFAYPKPEFPTPSFEYHTAFNGVAFGIVYGIQQTYFHFHTPDAPVVFSAELPLLTFAGRVLVGIPTILAVKFCSKALSKWLLPVVCSTLGIPTVSSCYVPALRADSGSGKDRQGAGHLQRLLFSHFPRKAYDVDTGIRFVQYASLAWSVVDLVPAMFAHLNL

SEQ ID NO: 65947 - protein, 332 aa, Zea mays
  Clone ID: LIB3632-042-B12_FLI.pep
DNSGGTRETAMATGGQGKAAGYYQYPTSYAGAADEERRWWPWLVPTVLVACIAVFAAEMFVNDCPRHGSTLGGGAGCVAAGLLRRFSFQPLRENPLFGPSSATLEKMGALNWAKVVHEHQGWRLISCIWLHAGLVHLVVNMLSLLFIGIRLEQQFGFVRIGVIYLISGFGGSVLSALFLHSNYVSVGASGALFGLLGSMLSELIINWTIYSNKAAAIITLLFIIVINLAIGILPHADNFAHIGGFASGFLIGFVLLARPQFGWMERSELPQTSQPPKYKSYQYVLWVAALLLLVVGFAIILVMLFTGKNGNDSCHWCHYLNCVPTSRWKCDT

SEQ ID NO: 65948 - protein, 320 aa, Zea mays
  Clone ID: LIB3632-047-E6_FLI.pep
RARHSSPMASSTLPASPFRMSLPGLRAPDPAKVKHVSVRTPARRLPVAASAAPSGAAAAAARERRRFLERYGLNPNDFEEDAEDNPREERKDRRRRRQSGRGEQTAEAAVTPAKVEEPRETHKMLQVLGGKVRRRKLLSPKDRNVRPMMEVVRGAAFDILQSAGGSPASLRPGRWLDLYSGTGSVGIEAMSRGCSEAHFVEMDPWVISEVLKPNLECTGFLDVSHIHMLRVENFLANAEKSQGRYPSFDYISVTPPYLEVNYSTLLGQLARSPLVGKDCFILVEYPLKTDMAESCGNLVKVADRRFGRTNLLIYGPTWSE

SEQ ID NO: 65949 - protein, 380 aa, Zea mays
  Clone ID: LIB3632-054-D12_FLI.pep
SPGDAAAMSSQSSAGGPAIHHPHSNYHPYIFQHDPPLHSNSRRRRRNHDDPYQPYLPLPHAHSHGATAVVTGTVRCHVPRDPLVLSHLQERLFPTLPQHHPIAGPPPTKRARRAPDTPWDPPPPTLQPALVPVALERPPDVGHSAGALLSRDEIERRSPSRRDGIDSALEARLRASYCAYLHCLGNRLGLPQTTIATAVVFCHRFFFHRSHACHDRFLVATAALFLAAKAEETACLLNTVLRASCEVSQNQEFNLLPYMLCGQDWFEQYRESVIQAEQMILTTLDFELEVAHPYASLSSALGKLGLTHTVLFNVAWNLINEGLRSSLWLQFKPHHIAAGAAFLAAKFLHYDITFHPNFWHEFKTSPYIVQDVVQQLKELL

SEQ ID NO: 65950 - protein, 390 aa, Zea mays
  Clone ID: LIB3632-055-F4_FLI.pep
TNQSKRGGEQRPQGNRDRGGCRLAAVGEGSRSARSGAPPMTSGAGGAAAGIGGTRVPTWRERENNRRRRAIAAKIFAGLRAYGNYNLPKHCDNNEVLKALCNEAGWTVEPDGTTYRKGCKPLATERPDPIGRSASPSPCSSYQPSPRASYNPSAASSSFPSSGSSSHITLGGSNFMGGVEGSSLIPWLKNLSSSSSFASSSKFPQLHHLYFNGGSISAPVTPPSSSPTRTPRIKTDWENPSVQPPWAGANYASLPNSQPPSPGHQVAPDPAWLAGFQISSAGPSSPTYSLVAPNPFGIFKETIVSTSRMCTPGQSGTCSPVMGGAPIHHDVQMADGAPDDFAFGSSSNGNNESPGLVKAWEGERIHEECASDEHELELTLGSSKTRADPS

SEQ ID NO: 65951 - protein, 235 aa, Zea mays
  Clone ID: LIB3632-060-B1_FLI.pep
RLGFSRPAAMATEQEAENYTVEDLVALNPYNPDILNDLEKFVNEQVASQTYNLDANLSLLRLYQFEPGRMSIHIVAHILIKALMAMPAPDFSLCLFLIPEHVQMEEQFKALIVLSHYLETARFRQFWDDAANNRHILEAVPGFEQAIQSYAIHVLSLTYQKVPRHILAEAINIEGLALDKFLEYHAANSGWVIEKGGQSQVIVLPRNEFNHPQLKKNTADTVPFEHLTRIFPVLS

SEQ ID NO: 65952 - protein, 567 aa, Zea mays
  Clone ID: LIB3635-001-E8_FLI.pep
CISVSVISMIAGPNKLPPEPPHRICFIAFISSHIFILEKKTLFNHPPSSAALSSALFQVQQRLGARGHRRLPRERVSWSTKAGMKGCSERLLFLLLLLASSSLLSAVIAAQQTCPADLDSKCDGGASDDDWEGEFFPGVPKIKYEGPTSKNPLAYKWYNKEEVILGKKMKDWMRFSVAFWHTFRGTGADPFGAPTKTWPWEDGTNSLAMAKRRMRAHFEFMEKLGVDKWCFHDRDIAPDGKTLEETNSNLDEIVQLAKQLQGETNIKPLWGTAQLFMHPRYMHGAATSPEVKVYAYAAAQVKKALEVTHYLGGENYVFWGGREGYQTLLNTDMKRELDHLANFLQAAVDYKKKIGFNGTLLIEPKPQEPTKHQYDWDVATTFAFLQKYGLTGEFKINVECNHATLSGHSCHHELETARINGLLGNIDANTGDPQVGWDTDQFMTDIAEATLVMSSVVKNGGLAPGGFNFDAKLRRESTDVEDMFLVHISGMDTLARGLRNVAKLIEDGSLDDLVRKRYQSFDSDIGALIEAGKGDFETLEKKVLEWGEPTVASGKQELAEILFQSAL

SEQ ID NO: 65953 - protein, 161 aa, Zea mays; identical to SEQ ID NO: 59547
  Clone ID: LIB3637-210-B8_FLI.pep

SEQ ID NO: 65954 - protein, 358 aa, Zea mays
  Clone ID: LIB3637-232-C6_FLI.pep
SPYVPKPTQAATLTATAGGSLKHTDLDHAIHLETNIGKIKASQNHTHANATLLIAGHAHAATLGAGLVLAGGVLAVFFTRALVVAGYLVHDLAQQALLAIRAADVDLGVRRRRWRVDGRRGGGGSSVFRLLVATGKLLLDLVQQAFLLLLRCLWWGLNLRVVVLDLVDDDGVVRLHVRGRRRRREVLSLLVVSMRVHHHGRRGRLVVVALIVGLVGRQLLLDLLLKALLLLLPLDNLAVLIDHLLFLVVARRAGTGAGAVQLGEKAVLLLGGLVPLLLVVGLGHRDLLHAGRQLLLRLLLLLVLLLLVVVLVPAEKAVQESPVLHLVLLVLGLLTALVLLGVPLILHDRRKTYRWLSN

SEQ ID NO: 65955 - protein, 138 aa, Zea mays
  Clone ID: LIB3637-239-B11_FLI.pep
HQLCVDFLFPVTATRKAKDVIKSVKKCIGSRSKTTQLFTVMLLEMLLNNCGEPVHRQVIDNGLLPILVKIVKKKTDLPVREKIFLLLDATQTSLGGAKARFPQYYEAYYELVVKKVSGPMANLFTIREHHSIVLSLAS

SEQ ID NO: 65956 - protein, 162 aa, Zea mays
  Clone ID: LIB3637-241-E10_FLI.pep
KRRGSLMQDLPQPPPQPRNRARRRRGTSSPVVRKNNSFLVKQFGNGNAKVQFTKEPNNLYNIHSFKHSGLANKKTVTIQPAAKDSAVVLSTTKTKKQNAPAKLSHKSVMRKEFRKMAKAVKNQVSDNYYRPDLTKPALARLSSVYRSLQVAKSGVKKKNRQS

SEQ ID NO: 65957 - protein, 395 aa, Zea mays; identical to SEQ ID NO: 58778
  Clone ID: LIB3637-243-C11_FLI.pep

SEQ ID NO: 65958 - protein, 231 aa, Zea mays
  Clone ID: LIB3689-001-C5_FLI.pep
RGWRCASRSSSSASTRSSSPVARAPPWPSSPTTTTWWFPALREFVGGGKPVWGTCAGLIFLANKAVGQKTGGQELVGGLDCTVHRNFFGSQLQSFETELSVPKLSEKEGGNDTCRGVFIRAPAILEVGPDVEILADCPVPVDRPSITISFGEGTEEEEYSKDRVIVAVRQGNILATAFHPELTSDSRWHRFFLDMDKESPAKAFSALSLSSSSRDTEGLPKNKPFDLPIFE

SEQ ID NO: 65959 - protein, 903 aa, Zea mays
  Clone ID: LIB3689-203-E2_FLI.pep
RGSGMAAPGRRTADVSSSSPAPSPSPSTGRRLLRTQTVGNLGESIFDSEVVPSSLVEIAPILRVANEVEATNPRVAYLCRFYAFEKAHRLDPTSSGRGVRQFKTALLQRLERENDPTLKGRVHQSDAREMQRFYREYYKKYIQALQHAADKADRALLTKAYQTAAVLFEVLRAVNVSQSVEVDQAILDTHNKVEEKKKLYVPYNILPLDPESTGQAIMRYPEIQAAVYALRNTRGLPWPKDQDKKPGEKNTGKDLLDWLQAMFGFQKDNVSNQREHLVLLLANVHIMKVPKVDQQPKLDDKALDAVMKKLFKNYKKWCKYLGRKSSLWLPTIQQEVQQRKLLYMGLYLLIWGEAANLRFMPECICYIYHHMAFELYGMLAGNVSPMTGENVKPAYGGDEEAFLIKVVTPIYKVIEKEAERSKTMKSKHSHWRNYDDLNEYFWSVDCFRLGWPMRADADFFKTPKDAYLNLLNGENRSAGNTHWMGKVNFVEIRSFWHIFRSFDRMWIFLILSLQAMIIIAWNGGTPSDIFDAGVFKKVLSIFITAAILKLGQAILDLIFGWKARRNMSFAVKLRYILKLICAAAWVVILPVTYAYTWENPTGLARTIKSWLGDGQNQPSLYILAIVIYMAPNIVASMLFLFPFMRRFLESSNVKVITIIMWWSQPRLFVGRGMHEGAFSLFKYTMFWVLLLATKLTVSFYIEIKPLVQPTIDIMREPIRTFQWHEFFPHGTNNIGVVISLWAPIILVYFMDTQIWYALFSTLIGGIYGAYRRLGEIRTLGMLRSRFESLPEAFNERLIPSDANKSKGLRAAFSSRPKASGDERQKEKRAARFAQMWNVIITSFREEDLIDNREMDLLLVPYCKDHGADSRVADRIGFYKRYCDLLGVSYGDNLDCANQTPFNG

SEQ ID NO: 65960 - protein, 147 aa, Zea mays; identical to SEQ ID NO: 65883
  Clone ID: LIB3689-204-D8_FLI.pep

SEQ ID NO: 65961 - protein, 762 aa, Zea mays
  Clone ID: LIB3689-204-E9_FLI.pep
SGSNTTEPNRGRRERAREHKEARQGSRDRLQDWGRLVGKKGSSSFSSITGRLISAAILSAQFLAAADKSEEQRRCFLSPIPSASCGVVGCVATKGGSPGRGRTPAMAGVDVARHAHSPAHHAVAARDHVALRRVLEALPPARRPEEIRTEADSVAEEARAEAVSAVIDRRDVPGRETPLHLAVRLCDATATEMLMAAGADWSLQNEQGWSALQEAICAREEALARVIVRHYQPLAWAKWCRRLPRVVAAMRRMRDFYMEITFHFESSVIPFISRVAPSDTYRVWKRGANLRADMTLAGFDGFKIQRSDQTILFLGEGSEDGKVPPGSLCMINHKDKEIMNALEGAGAPASEAEVQQEVAAMSQTNIFRPGIDVTQAVLLPQLTWRRQERTEAVGPWKAKVYDMNHVLVSVKSRRVPGAMTDEEFFSSSNDNDTESEGFDDVLTEEEKKQLEAALKMDSPDAGGEDQSDSFAGPRHSCFEPREREIPIEGMSVSGNVESKHDKKGWFSNWGKRAQVSKPERVKKMAPPRSSLCVDEKVSDLLFESPSNAQTRPGRHSVDVVRADDNRRIRERDSRRYVPSAENGHRRKEGSKESEYKKGLRPVLWLSPNFPLRTEELLPLLDILANKVKAIRRLRDLLTTKLPPDTFPVKVAIPVVPTIRVLVTFTKFEELQPLEEFGTPPSSPDKSKSPAVQPPSSSWIQWIKAPYYRQMNLSTAPGPSSRVEDIHHQDPFAIPSDYVWTTPEEKKKKTQENKNRSKKGRNG

SEQ ID NO: 65962 - protein, 247 aa, Zea mays
  Clone ID: LIB3689-205-D11_FLI.pep
WSSLDCLSDGPGAAAGQPALGQRRRRRQRKLGVRGAVAGGIVRRHGVGAGVAEPVRVAEAPGLEHVRAVPEEPPPAAVPCALQRRARARVPALPRPVRQDQGAHRRLPFLRPPGAAGALPVPAPPGVGQPRRARRQAARRLRGERRAAREQPLRRARRQTVPPRGPRPSVPRQGRQLREEEEAKEGPAAPRPCRRHLLLPRRQRTPLRAPDAAATTARRSGLTSRPAPCMLLLPLYHMHYWSISLAS

SEQ ID NO: 65963 - protein, 281 aa, Zea mays; identical to SEQ ID NO: 48597
  Clone ID: LIB3689-209-F3_FLI.pep

SEQ ID NO: 65964 - protein, 417 aa, Zea mays
  Clone ID: LIB3689-209-H11_FLI.pep
TQTHREGHPSPKIDRSIATNFILATRQQLLTTGGYAFKAPDHGDDQCSHRTAHLPGDDLPALVVALAPLPEHDVGAVAHAAVVLVAVEGVEVEVDVVDHADAAEAVADVAALRPQHRLVLVAGVVGHQLDRVALALGVLDGLAGDPVDEREGRVPFLVLDAVAVAHVLDPVLVLVARVGGREAHGAVADRGAEPFVGLAVDADGGLAAAEAGRVGGAAAAPGVGLVAPGQDLPALVVALGPLPQHHGGAVVHAAVALVAVEGVEVEADVVHHADAAEALAHVAALRPQHRLVLVLRVERHQLHRVGLAEGVLDGEPSGLVDEGERRVALLVLDLGAEAHVLVPVLVLVARVGGGQHHVAVADGEAVPLVGLAEDLEGGLVHAAVRRRVLAVVAVVPEAEHLALFSALGFWGRVSGES

SEQ ID NO: 65965 - protein, 236 aa, Zea mays
  Clone ID: LIB3689-211-E2_FLI.pep
TVAFPVSSSGPRFIPSPLHSSAAPLSSFRPPPRLAFSLPERPRSIPARAASPGDRRRPRPNESVVVGRCHASCRRWADWEQTPAAASMAPKAEKKPAAKKPAEEEPAAAKAPAGKKPKAEKRLPAAKSSGKEGGDKKGKKKAKKSVETYKIYIFKVLKQVHPDIGISSKAMSIMNSFINDIFEKLAGEAAKLARYNKKPTITSREIQTSVRLVLPGELAKHAVSEGTKAVTKFTSS

SEQ ID NO: 65966 - protein, 567 aa, Zea mays
  Clone ID: LIB3689-216-C7_FLI.pep
KMAPLLAAAMNHAAAHPGLRSHLVGPNNESFSRHHLPSSSPQSSKRRCNLSFTTRSARVGSQNGVQMLSPSEIPQRDWFPSDFTFGAATSAYQIEGAWNEDGKGESNWDHFCHNHPERILDGSNSDIGANSYHMYKTDVRLLKEMGMDAYRFSISWPRILPKGTKEGGINPDGIKYYRNLINLLLENGIEPYVTIFHWDVPQALEEKYGGFLDKSHKSIVEDYTYFAKVCFDNFGDKVKNWLTFNEPQTFTSFSYGTGVFAPGRCSPGLDCAYPTGNSLVEPYTAGHNILLAHAEAVDLYNKHYKRDDTRIGLAFDVMGRVPYGTSFLDKQAEERSWDINLGWFLEPVVRGDYPFSMRSLARERLPFFKDEQKEKLAGSYNMLGLNYYTSRFSKNIDISPNYSPVLNTDDAYASQEVNGPDGKPIGPPMGNPWIYMYPEGLKDLLMIMKNKYGNPPIYITENGIGDVDTKETPLPMEDALNDYKRLDYIQRHIATLKESIDLGSNVQGYFAWSLLDNFEWFAGFTERYGIVYVDRNNNCTRYMKESAKWLKQFNAAKKPSKKILTPA

SEQ ID NO: 65967 - protein, 734 aa, Zea mays
  Clone ID: LIB3689-217-E10_FLI.pep
RSSSQSVPPPLPLLHLRPSAIPIHKARSAFLLFIYSSSLRILLASHSPVSAHACPPPRIRRRLAPPPRPNLVRAELGMRTQGEGHVEEATGFEVGIVVPRLSRAAAAGATDNCVARLVRELEGAGLLVERVRGVSAEFIKLAAPMGTLGRAAAEMHMKKLTYIGMELQFQSDQVAAFVRQTDGSLFSWRERYSCFRYLIYGIVNKTNSEVVLKFDDKEFHWKQSESLLTRLEAEGVVKLVFPLHDEIKRKQLLRNWALNWLDFTWQPIDEIYSYFGTKIATYFAFLGMYARWLFFPAVFGLATQLIDFGSLQWLVLPGFFIFVISWAVLFLQFWKRKNSALLARWGIHCSLSEYKNLDNVSFLSDSLTVEEKEFGVVSVVVEKRKFQRNEWFGVLLRIRNNAIIVLAIICLQLPFELAYAHLYEIAETEVMRYLLTAVYLVAIQYYTRIGGKVSVNLIKYENNQGEESSSASLVYKAFGLYFMQSYIGLFYHASLHRDILALRRVLIQRLIVYQVLENLIENSIPYLKYSYKKYIAVHKKKRGKESTVGRSVRLSTRVEKEYLKPSYTASIGAELEDGLFDDFLELTLQFGMIMMFACAFPLIFCFAALNNVTELRADALKLLVMLKRPVPRAAATIGAWLNIFQFLVVMAICTNCLLLVCLYDVEGKWRIEPGLAAILIMEHALLLIKFGFSHFVPEEPAWVRANRVRYVAQAQNVCSKQLLRSISKFQGKLD

SEQ ID NO: 65968 - protein, 873 aa, Zea mays
  Clone ID: LIB3689-222-E3_FLI.pep
TNSLHLLSHRAMAAASPPTSSSPPPPRAADGDGDGVGCGAARCSSPTPAQRRRTSPNHSGGSSRKSSGSRDFAGGSLLKYVNKSTLHFKKSKNRRSGSPVNWTPRKKTESYMKRKIKHLQETDGMTASLHETLGNANPHYTRMAREKIAAREAARKATDARKAAMVEASWCRILRAARIQNKNAEEVMEKAVLQATEAFEEARALGVMMYDRPDCPHKQYEVESSLHTGAQSTHKVIASFQTAFQVDMEVSAAVKKAFVQLANSPDSAKREEFKELLWKISQNPDLTEHEDKQQLVDCSNEDAIVLKLNKEHLSGSCVASDFNTTKVQESIDVVSIMLERLKALHEEELASLAVIVATSGLNAELQNERSKYHETGAVNNTSAGSLRSQARRYSTAASFIGVQGPKKEVTSELPSLDKFLVKHLSKLEREVQEAREASRKSTLVKSVTQGAHIQFTGSNAKTPESTSELSSILVKHVSKLEKEILEAKKINQRIHQVEGNCEDVKSNVQSRNKELEFNKIQPEVESNCDSKGSCESKESCIDNNDIKDNDDCVQEDKENKNCYSHQLPPSGAKGKHGGKRLTRLEAARLEALKSFCTIDGNALDAGLDKIFVKPIHRLEKEKREAREGQINVQKHPQKLGQSATVTEGLDDILVKHVSRLEREKIDYQKRNELGVGERWSNVPHDQRSNGNNVKSSDSLDQVLVKRISRLEREKLEYEKRNALEGGSDVEPKREPHCNNAAASDSLDQNLIKHVSRLDKEKIEHEKNGGMIIVKKGQTQCTNGAEGGLADVFVKRPTKLEQAKLASAAEEKPASGFNPVEERRRARQKELLDAWGGMGLGNSMKPHVSRIERDKVAWRIAEDEQKQMAAAREA

SEQ ID NO: 65969 - protein, 240 aa, Zea mays
  Clone ID: LIB3689-224-C8_FLI.pep
PTCSSTTPCTANGSTATSPSRTPRRFSSARSRSPSLASGAPPLPLLPETRIAFTCSSCELVFEPLRVYRNPEEIPWGEAGAEYVVESTGVFTDKDKAAAHLKGGAKKVVISAPSKDAPMFVVGVNEDKYTSDVNIVSNASCTTNCLAPLAKVIHDNFGIIEGLMTTVHAITATQKTVDGPSAKDWRGGRAASFNIIPSSTGAAKVYDKIHNVACNQLCNGCLHKLVKSTIDSLFCVHLAL

SEQ ID NO: 65970 - protein, 306 aa, Zea mays; identical to SEQ ID NO: 46382
  Clone ID: LIB3689-226-D10_FLI.pep

SEQ ID NO: 65971 - protein, 497 aa, Zea mays
  Clone ID: LIB3689-227-H8_FLI.pep
AESSSSSHLAMAMQAAFLAGFSQLAAQPSRDCAVAVAPTRVAVAAVGSAKVGARVGLKAGIAAPAPAAGRGVRCRASLIEPDGGQLVDLVAPEEGGRRAALRREAAELPHRLRLGRVDKEWVHVLSEGWASPLQGFMREHEFLQTLHFNAIRGQDGRMVNMSVPIVLSVGDAQRRAIQADGATRVALVDERDRPIAVLSDIEIYKHNKEERIARTWGTTAPGLPYVEEAITNAGDWLIGGDLEVIEPIKYNDGLDQYRLSPAQLREEFARRNADAVFAFQLRNPVHNGHALLMTDTRKRLLEMGYKNPVLLLHPLGGFTKADDVPLSWRMKQHEKVLEEGVLNPESTVVAIFPSPMHYAGPTEVQWHAKARINAGANFYIVGRDPAGMSHPTEKRDLYDADHGKKVLSMAPGLERLNILPFKVAAYDTKQKKMDFFDPSRKDDFLFISGTKMRTLAKNRESPPDGFMCPGGWKVLVEYYDSLVPSEGSSKLREPIAA

SEQ ID NO: 65972 - protein, 640 aa, Zea mays
  Clone ID: LIB3689-232-F5_FLI.pep
PEQSLRLASLTHWCTAMAMNVIALLGLLALASVVRTASGAGGHDYASALKKTILYFEAQRSGVLPPNQRITWRENSGLFDGKANGVDLVGGYYDAGDNVKFGLPMAFTVTMMSWGILEYGRQMAAAGELRNAMDAVKWGTDYFIKAHPEPEVLYGEVGDGDTDHGCWQRPEDMSTSRQAFRIDPQNPGSDLAGETAAAMAAASLVFRSTYPGYANLLLQHAKELFQFADKYRGKYDASITVARNYYGSFSGYGDELLWAAAWLYEATDEGCYLEYMARNGDALGGTGWSINQFGWDVKYPGVQVLAAKFLLQGRAGAHAATLQRYRQNAEFFVCSCVGKGAVNVPRTPGGMMYHQRWNNLQFVTSASFLLTVYADYATALPGSGGGALRCPAGAARPFEILAFVRSQVNYILGDNPRGTSYMVGYGASFPRQVHHRGASIVSVRTDPSFVSCQEGYSAWYPRQAGNPNVLEGAIVGGPDEYDDFADERNNYEQTEAATYNSAPLLGVLARLAGACGTGLEEYQLHPPEEATANQTSSSRLRQPSTSPIEIEQNVTRTWAMRRATYYRYSVTLTNRSRKTVRGLHLGVSELRGRLWGLDKARYGYVPPKWLPALRTGKSLRFVYVQRGTPANVRVIGYKLL

SEQ ID NO: 65973 - protein, 394 aa, Zea mays; identical to SEQ ID NO: 56351
  Clone ID: LIB3689-238-A5_FLI.pep

SEQ ID NO: 65974 - protein, 614 aa, Zea mays
  Clone ID: LIB3689-241-D7_FLI.pep
APLLGSDPVSPAAMSQPAATVAAAAQPQGRGPAGRQGGLGQSIAGIVRMAVFWYFASKFFGPKRPPADPGMLMSNLFQKGEPMDMWMYLSENEKFNDFANEDALIWHEANIPYAVWGPTSTRTRSLTYYPSEALKHNGSLYAHVYFARSGYPVDPTDPEYEQKSSFGRTHPVVAFLPKSKAGKKKSLLGDSEEPEEKTPRNKENKESEDKDEGPTEYISYWKPNVTINLVEDFTRYPNNNVPPIVAPYLNVDPVTGDYYPTVFFNEFWLLKDKLIALNETVEELPLNLEVGPFSMTKWQLFLQIEQSFQVHRSYGSMLEGEADELKRVFLEGNPYLLGLTMVVSLLHSLFDFLAFKNDIQFWNKNKSMEGLSAKSVVLNFVCQLVVFLYLLDNDTSWMILASSGVGVCIEFWKIGKAMHIEVDRSGKIPMLRFRDRESYAQNKTKEYDAIAMKYLTYVLFLLVVGFSIYSLKYEKHKSWYSWILSSMTSCVYMFGFIMMCPQLFINYKLKSVAHMPWRQMTYKFLNTIIDDLFAFVIKMPMLHRLSVFRDDVIFLIYLYQRWKYPVDKKRVNEFGFGGEDEPAAQEAVEGSDSAAAPQLTEAGSETSTEDKKTK

SEQ ID NO: 65975 - protein, 449 aa, Zea mays; identical to SEQ ID NO: 62758
  Clone ID: LIB3689-241-F7_FLI.pep

SEQ ID NO: 65976 - protein, 303 aa, Zea mays
  Clone ID: LIB3689-244-F4_FLI.pep
RQYFSQPSCKALSKPSPFHAPLRALMRVESSGGLPLPELERQQAGAKRRRRRARAAAAAAAPRTMAAPATAVQRLFEACREVFTGAGPGAVPPPAGVERIKSVLDSITAADVRLTSSMPYFRRVDPYGTPKITYLHLYKCEAFSIGIFCLPSRGVIPLHNHPGMTVFSKLLFGAMHIKSYDWAASQQDTPDVQLQAGPRLAKVKVDGILTAPHETAVLYPEDGGNMHCFTAQNACAVLDVLGPPYDDGSGRHCQYYNVRSSAISVGSTILPGGDRYEWLEESEPSRDFYLVGSTYMGPKIWDH

SEQ ID NO: 65977 - protein, 412 aa, Zea mays
  Clone ID: LIB3689-250-F2_FLI.pep
SGLPVRVLFYQHGDWSDFPEDVVNLAQQDFQLKKPITTAVFQNKHILLDFIHMICIDYEMTIDKPLAWVDDNGKRFFPDLSAGLYTSKPSQHENGEADECAVRKGNFRGSSKFMKPLSFSGILGGNQKSNPDFYNWNRVKIRYCDGSSFTGDVEAVDTAKDLRYRGFRVWRAVIDDLLTVRGMSKAQNALLSGCSAGGLAAILHCDRFHDLFPAKTKVKCFSDAGYFFDGKDISGNFYARSIYKSVVNLHGSAKNLPASCTSKPKQSPELCMFPQYVVPTMRTPLFILNAAYDSWQVKNVLAPSPADPKKTWAQCKLDIKSCSASQLTTLQNFRTDFLAALPKTQSVGMFIDSCNAHCQSGSQDTWLADGSPTVNKTQIGKAVGDWYYDREVPRQIDCPYPCNPTCKNRDDD

SEQ ID NO: 65978 - protein, 452 aa, Zea mays; identical to SEQ ID NO: 52903
  Clone ID: LIB3689-253-B8_FLI.pep

SEQ ID NO: 65979 - protein, 304 aa, Zea mays
  Clone ID: LIB3689-253-G5_FLI.pep
ICYIYDEDVSCFSGSKKIYLVCALGASKNAHLKELERAGERLQLLQADLLDYSSVASAIAGCEGVFHVACPVPSGRSSNPEVEVIGPAVVGTTNVLKACYEAKVKRVVVVSSVSAVFSNPNWPKDKVFDEDSWSDEDYCRKNEDWYYLSKTLSEREAFAFAAKSGLDVVTICPSLVFGPLMQSIVNTSSKVLLNYFKGDRETVENRLRNMVDVRDVADALVLAYENPEASGRYICSSHPLKVSDMINILKTLYPSYPYPKHFVETDGNITCSSEKLQKLGWTFRAIEETLRDSVESYKAFGILN

SEQ ID NO: 65980 - protein, 416 aa, Zea mays; identical to SEQ ID NO: 59056
  Clone ID: LIB3689-257-B6_FLI.pep

SEQ ID NO: 65981 - protein, 227 aa, Zea mays
  Clone ID: LIB3689-259-E9_FLI.pep
SAGLPLPPLVLAMASSASRFIKCVTVGDGAVGKTCMLICYTSNKFPTDYIPTVFDNFSANVVVDGTTVNLGLWDTAGQEDYNRLRPLSYRGADVFVLAFSLVSRASYENVMKKWLPELQHYAPGVPIVLAGTKLDLREDRHYLVDHPGAVPVTTAQGEELRKHIGATCYIECSSKTQQNVKAVFDAAIKVVIRPPTKQRERKKKKERRGCSIFCSRIMHARRLGCFK

SEQ ID NO: 65982 - protein, 371 aa, Zea mays
  Clone ID: LIB3689-261-G4_FLI.pep
IAAAYRCTYSTVHNTRARADELIKTAKCLATPGKGILASDESTGTIGKRLSSINLENVESNRQALRELLFTAPGVFDYLSGVILFEETLYQKTSDGKPFVDVLIAGGVVPGIKVDKGTVEIAGTDGETTTQGLDSLGARCAKYYEAGARFAKWRAVLKVGPAGQGQPSELAVRQNAEGLARYALICQENGLVPIVEPEILTDGGHDIGTCAAATERVLAALYKSLSDHKVLLEATLLKTNMVTPGSDSPKVSAEVIAEYTVAALRRTVPPAVPGVVFLSGGQSEEEATQNLDAMNKLEVLKPWTLSFSFGRALQQSTLKKWVGKKENVAAAQATFVVRCKANSEAALGKYAGSGAGDAAASESLYVKGYKY

SEQ ID NO: 65983 - protein, 170 aa, Zea mays; identical to SEQ ID NO: 42581
  Clone ID: LIB3732-005-B11_FLI.pep

SEQ ID NO: 65984 - protein, 185 aa, Zea mays
  Clone ID: LIB3732-008-A9_FLI.pep
LQFIDNGDGSSLGHHDLDELLVVDLAVAVNIGLTDHLVDLLVSQLLAEVGHDMAELSSRDETILVLVEDAKGLLKLLLGVGVLHLPCHQVQELWEVNGPIAISINLVDHVLQLCFSGVLAKGAHHSSKLLGSDAAVAILIEEAEGLLELRDLLVRELVRHGRWLRRGHAMGKKGKRWMLVLASLC

SEQ ID NO: 65985 - protein, 300 aa, Zea mays
  Clone ID: LIB3732-019-A7_FLI.pep
GEALAPSLPRTPMDPPRAVAFLLILLPVLAPVASGVPFVVLHGIGDECGNDGLSSFTKMLGEWSGSKGYCIEIGRGAWDSWLMPLQEQANTVCKKVKKMKELSEGYNIVGLSQGNLIGRAVIEYCDCGPPSGFLCILIDDLIKSEIYSDYVQAHLAPSGYLKIPTDMEDYLKGCKFLPKLNNEIPSARNTTYKERFSSLENLVLIMFEDDAVLIPRETAWFGYYPDGAFSPVLPPQETKLYTEDWIGLKTLDEAGRVKFVSVPGGHLRITRSDMKKYIVPYLTPEASSKKNIHIHRMLSL

SEQ ID NO: 65986 - protein, 411 aa, Zea mays
  Clone ID: LIB3732-024-G6_FLI.pep
HCPLPFLPSSTEKSDPRRFDPTRSYHTRNPIPFRPQQQHHRWEEEDEEGHFALRAGLRRRRRVVGLLPPCVRRLVDADVAAPPAEADQGVGHRRGQRGDGHRADHPHARPGRRDRAGGRGPGQAPRGDAGPAARGGVPAAHAPRVRHRHVRDQGLGPGHRDGRGAADPGRDEARPAPAERGAVPQDRAAAGGAVPRRAAARRVQPRGRAHLRRLEAFGLPGQPRHRIRHQPRLVQVQVPSRRAPRRQRPGRTGVHGRRARRQLGGGVVERERGGDAGAQVAAGEPPLLRRGGAGGHPPRRRRQRLRGHQPQGLHLLGHRLLRRQPRRVAAPGPAPHPPGLRPRQGVPRHPRRERRLPQPARQARPRRRPGRRRDGAHRGGGQTTAPLRQDHLGELPAPRPLMITSPSLFIN

SEQ ID NO: 65987 - protein, 200 aa, Zea mays
  Clone ID: LIB3732-025-G7_FLI.pep
CIKPQIRATQGRRSACWWCFHWTQRSDHQGRGPLECGRRRAAEEHDGLVGGAEDVEEAPGAEDAEEDEEGERVRQERGREGEGDDGGVVDAEVAEVAAQARGGLGEGVGAGESRSVQQLRPWAPVRERAPRRLGQPAHEEAEGRRGERRVGEARGGGRRGAAAGSRAGHGEQRRRCRSGGHGWCWCLSLTACFAESELGL

SEQ ID NO: 65988 - protein, 197 aa, Zea mays
  Clone ID: LIB3732-036-F5_FLI.pep
GPVFVCCVQQLAVRAEMFASRPVVHPLEVAAPAHPVQQPAPGVLMKDLPGMPGTPGGLGLRVLQLLFAAISLAVMSSTADFASVSAFCYLITTTVLQCVWSLTVAIVDIYALLVKRCLRNRRAVTLFSIGDGITWLVSLSGACAAAGITVLIDADLIMCSENPCASFQTAVAMGFMCCFSLLPSFLLNFYSIASSHG

SEQ ID NO: 65989 - protein, 595 aa, Zea mays
  Clone ID: LIB3732-050-H2_FLI.pep
SHSTGIPQSQKARQNPLGGYPSLPMATAAAAAVAAPEQPRRRKPAPGRGGVALPAGLSEEEARVRAIAEIVSAMGELSRRGEDVDLNSLKSAACRRYGLARAPKLVEMIAAVPEADRATLLPRLRAKPVRTASGIAVVAVMSKPHRCPHIATTGNICVYCPGGPDSDFEYSTQSYTGYEPTSMRAIRARYNPYVQARSRIDQLKRLGHSVDKVEFILMGGTFMSLPAEYRDYFIRNLHDALSGHTSANVEEAICYSEHSAVKCIGMTIETRPDYCLGPHLRQMLSYGCTRLEIGVQGTYEDVARDTNRGHTVAAVADCFCLAKDAGFKVVAHMMPDLPNVGVERDLESFREFFGSPAFRADGLKIYPTLVIRGTGLYELWKTGRYRNYPPELLVDIVARILSLVPPWTRVYRVQRDIPMPLVTSGVEKGNLRELALARMEDLGLKCRDVRTREAGIQDIHHKIRPDEVELVRRDYAANEGWETFLSYEDTRQDILIGLLRLRKCGRNVTCPELVGRCSIVRELHVYGTAVPVHGRDVDKLQHQGYGTLLMEEAERIARKEHRSKKLAVISGVGTRHYYRKLGYELEGPYMVKCLA

SEQ ID NO: 65990 - protein, 409 aa, Zea mays
  Clone ID: LIB3732-051-C4_FLI.pep
CIYLTGDRTIDMYSRMEPRAIRFCNSVDQKKKKKLQVVMLDDLRRLPLLAGVDDDGHQHGRHPRAQKVVLAELVVHASRAAEVHVVEPHPHQPEPEPAILIDGGELGRRGAVDALLPLLWRRGVHPAHLLLERGVEVLLDGPDALAQLLGAAEPARVLPLHGLGRGQEAEGCGRRRVGAVGAATEALHGRAASLVELDVAQHRACQRHRLAARVPDDHRRRHAQRVQRHHVRDVQLPYGAPELHLHGVVEVGVGVPDGPLGAVDQRRLGGRGRRVVEDEADAALARHGVQHLPAPVVLPVHLGPVGRDEAVAEAEMQRAAVPHAELRGEGPAGRVGHEPQALPPERLLQGLRGRRRHRRGRGGARGGAGAGAGPARAGQEVEREHGGGGHRGGSGIEEEEQSPLETRSG

SEQ ID NO: 65991 - protein, 306 aa, Zea mays; identical to SEQ ID NO: 42763
  Clone ID: LIB3732-051-F3_FLI.pep

SEQ ID NO: 65992 - protein, 211 aa, Zea mays
  Clone ID: LIB3732-055-F12_FLI.pep
NPPPPPRRRSSLSSQPPPIEPLAPAPSGGMEAGGEEFAIGVVLSAKTTLGEEFEGQIVAFDRPSNLLVIQEGVGRAESGERRNVRVLKANYIREFSVLSKGDDPLDPAGCMLDLNSIYAREDAALRQAEIEAERIGVGVTPEAQNIFDALSKTLPVQWDKTDIVVMKEVRVRSPYLPENVSGGTAAANERVKKVIDFERKRLHSRAPGQFS

SEQ ID NO: 65993 - protein, 109 aa, Zea mays
  Clone ID: LIB3898-003-G2_FLI.pep
PPRRRHRTPAAASAMGAYKYVSELWRRKQSDVMRFVQRVRCWEYRQQPAIVRLTRPTRPDKARRLGYKAKQVDLLQCRSHWRARTLTVMDLWVGEGRGWCSRAGIAIVI

SEQ ID NO: 65994 - protein, 288 aa, Zea mays
  Clone ID: LIB3898-007-H7_FLI.pep
IKPPSMHLGQLLLQLSGIPASGSNRVTVLQAFVHLLCIVMNNESNGVLVVQKFLPLLPDAYLSGFIGSIFCPNSNSFLLPTHTDNCATNFITIVELFTNHSQQSVQPKCIRFSSSTADGPFTTIRTNRVFPFWLDLVLEAMEISSHDQFARVINVIVKPPEFLDGGEGVYGADGAPPGGLLGLALRVVEPEGPGVLERVRGGRGRSAGEVGDLALLPVVVLGRGAASGARGGRPGVGLLGHGVAAVVREAFLYAGRTETETETENAGPPPRLSRFPFPLIPSVLLLSS

SEQ ID NO: 65995 - protein, 439 aa, Zea mays; identical to SEQ ID NO: 50902
  Clone ID: LIB3898-016-E4_FLI.pep

SEQ ID NO: 65996 - protein, 218 aa, Zea mays
  Clone ID: LIB3898-017-F12_FLI.pep
HKNKSGSPLIIVPDERSEKCIHLLAVLIIQTYELATSSFLMHYALRSYLEGIVPPPRIQGHSATPLMVARLHSASVTRVAANPLCTSRGQPGRSSRRPSSCASGPGGIAPSMRMLSAVHRQYAGMSASSRQHLLFSSGHGRRGPMPQVRLVTYQRQLGSGLCGMAHPGTQEVPALALAAASTESRTAAARMRRRWLLLDDDAINSPVDGLSMDFLVQF

SEQ ID NO: 65997 - protein, 261 aa, Zea mays
  Clone ID: LIB3898-022-F4_FLI.pep
QRRHYRSKDLLNTSIQHHSGKGAPLCLLGGLSGLLGRLGLLGRRLLSGLLGQEHRVDVGEDAAVGDGDAGQQLAELLVVADGQEHVARDDAGLLVVLGSVAGQLQHLGGQVLEDGGQVDGGARADALRVPALLQIPPDAADGELQPGLDGPRHRLLPRPAGLAPGRALLRLPAGSCCAGVHGRLTAAAALRDRGDGVELERLRMRERRVECVMPEGMRGWVLLKPREKGGVVAPSIRVQTRWTARSIVARTADGKLGRRSV

SEQ ID NO: 65998 - protein, 289 aa, Zea mays
  Clone ID: LIB3900-002-B4_FLI.pep
AMGAPKQKWTSEEEDALRAGVRKHGAGKWRTIQKDPEFSPVLSSRSNIDLKDKWRNLSFSASGLGSSKLRVPKITGPSSSPSSSSQPLLLPAANKFTEATLPADAEKKPQDGKTLPKYGAMIMEALLELNEPNGSDIAAIFGFIEQRYAVQPTFRRFLASKLRRLADSNKIEKIDKSYRLPDSLATRTPAPMNASAPKQKDPSKPSKVSKAIGLFSASSPALEAAMAAAVKVADAEAKAHDAHDQTMEAERIFKMAEDTESLLIIAAEIYDRCSRGEITTLVPVAQREI

SEQ ID NO: 65999 - protein, 114 aa, Zea mays
  Clone ID: LIB3900-003-C5_FLI.pep
ERQRRRRSEKMVRKAKVEFDEQPPDNFDPKNPYADPVAMLEYREHLVREKWIQIETAKIIRERLRWCYRIEGINHHQKCRHLVDQYLEATRGVGWGKDARPPELHEPKKTVKAE

SEQ ID NO: 66000 - protein, 217 aa, Zea mays
  Clone ID: LIB3900-004-E11_FLI.pep
PASCRRVLAGHRTSPLVPQASARQQRDRCHPFAESRLRPPASAAQPTTTPPCAPASVGHGCRLRSALGSRPSGLSHAARGRHGGARLHGSAPRPQPRYTRPRRTPARSAARPPACSAPPLLLLGCSVVPDPWRRRRRRLCGAAATSSFCAAFSSMASTVSFRRRRRWDRCSWLTSTSGWTSPLPASPTASLTLSATPISTALQRMLSRARHATSWSR

SEQ ID NO: 66001 - protein, 155 aa, Zea mays
  Clone ID: LIB3900-009-G8_FLI.pep
QGARSTATAAFMNSSFIGLKPAAAAAQATAAASSPMKQQVQVAPEGRRAALLGLAAVFAVTATTAGSAKAGVFDEYLEKSKANKELNDKKRLATSAANFARAYTVEFGSCQFPYNFTGCQDLAKQKKVPFLSDDLEIECEGKEKFKCGSNVFWKW

SEQ ID NO: 66002 - protein, 176 aa, Zea mays
  Clone ID: LIB3911-002-A11_FLI.pep
LSSSPSLRSLPPKSLGPPPPSSRSAGGHRPAMTSTVTTTVGCGGLPVRPLSTATRGRPRRCAVRAQAAGADASNDKSVEVMRKFSEQYARRSNTFFCADKTVTAVVIKGYSWSSSMPLHYDDKAAEVAQGFWNCPCVPMRERKECHCMLFLTPDNDFAGKDQVISFEEIKEATSKF

SEQ ID NO: 66003 - protein, 278 aa, Zea mays
  Clone ID: LIB3911-002-F1_FLI.pep
RVAAAPRSMPRLLLPAPSPRPCLNDSVRRPPLSKYRFFLPRTRRRPSPRLGVRMAEMTKVGSAGEPAEVGVSMESDPIVGGEAPSRPGWEASRWAPVEAALNRMSKWLVAGFLAFAAIWKRDAEIMWFLLGAVGNSLLSMVLKKMLNHERPAPALRSGPGMPSSHAQSIFYAATILALSLYYWLGTNYLTMILGPATMSVAAYLSWLRVSRRLHTLNQVMAGAVVGSVVGALWFVLWHSLVQEAFASSLLVRIAVVLGSSAFCVGFVIYMIRHWLKDE

SEQ ID NO: 66004 - protein, 186 aa, Zea mays
  Clone ID: LIB3912-001-F4_FLI.pep
CLCASARERESEREREGGDLAEERSKQGGKEAAARAAGCRKGNMLPPHLTENGAVMIQFGHQMPDYDSPATQSTSETSHQEASGMSEGSLNEHNNDHSGNLDGYSKSDENKMMSALSLGNPETAYAHNPKPDRTQSFAISYPYADPYYGGAVAAAYGPHAIVSDLHASSLLFHYLLPVLDDALCPL

SEQ ID NO: 66005 - protein, 268 aa, Zea mays; identical to SEQ ID NO: 64613
  Clone ID: LIB3912-020-A9_FLI.pep

SEQ ID NO: 66006 - protein, 156 aa, Zea mays
  Clone ID: LIB3912-026-F3_FLI.pep
RSTAMVRMKQVKISVKKDVDSYTIRGTNKVVHVGDCVLMRASDSDKQPYVARVEKMEADGRGSVRVQVRWYYRPEESKGGRRQFHGAKELFLSDHFDLQSAHTIEGKCVVHSFKNYTKLDNVGPEDYFSRFEYKAATGSFTPDRVAVYGAPQSFHC

SEQ ID NO: 66007 - protein, 141 aa, Zea mays
  Clone ID: LIB3912-031-A8_FLI.pep
SFSCMGFAYETAKIGVGVAYMGVMRLKLVMKSIVLIVMARVLGIYDLIIAAIISAGINPKAKPKPYFLDGYAHLSFKLACSLAGLAAGMAISIVRDTRVSLKMKSQLLKAEMKSLMKEQRQKVQYHYYRDYEGDQLTASKL

SEQ ID NO: 66008 - protein, 158 aa, Zea mays
  Clone ID: LIB3912-037-B4_FLI.pep
NYLNVSIFYLCCYSQVPVSTNHFLANSGLQQSSGCFGCAQPTPIIAVDEPTKGLRIQGRSVKRHNLSDDFWSSSPHEMENSALQSRHSMSSISTAAQPNDQHASGSSSSPNEFVNQGKLVAIYTCPEHVVPMSIYGALIYNVWLSVPCFLEFSLFRKR

SEQ ID NO: 66009 - protein, 178 aa, Zea mays
  Clone ID: LIB3912-043-D1_FLI.pep
QFAIICNRSKLNTFTFFFFAALPGTSRSSNLSGGGTGRCGGFTCHGLSLPERSLLASLGNSLQDGVRCHIALHGDLLFHDVYVVGLDAFHLAEDPLDSSNTALTGHANLEHNSLGHSARGEEGRGGSAVVVEISCRRRRRRGRTGERSIWAGREGRSWVRIYRRPVASVNTQGKARPS

SEQ ID NO: 66010 - protein, 173 aa, Zea mays
  Clone ID: LIB3912-048-H2_FLI.pep
PSILFPLLASLPRRIPPPSTVPVPVPFRRASSPEMANARSGVAVNDECMLKFGELQSKRLHRFLTFKMDDKFKEIVVDQVGDRATSYEDFTNSLPENDCRYAIYDFDFVTAEDVQKSRIFYILWSPSSAKVKSKMLYASSNQKFKSGLNGIQVELQATDASEISLDEIKDRAR

SEQ ID NO: 66011 - protein, 225 aa, Zea mays
  Clone ID: LIB3912-052-F4_FLI.pep
SIHYSSRVAAFLLVAEAAVHVAVAPGALRRQRLRLQRPPLQERAAAPLRPGRRHRLRHLRLRLQHLHLQARHLLLQREDVGDAAVDGVAQPGLRLVGDGGRRLAPVGGGHLLQQLGRVAGAEHLVDGRELRRPVLGAEVGSEHALRRALAPQELAGATRGPRRAATAAGGSHGRQRLPDAVVARSLPHVRRLSSLCLQGGYSYYLQKQEKLSQLLLTPVTYCKLR

SEQ ID NO: 66012 - protein, 445 aa, Zea mays
  Clone ID: LIB3912-055-G9_FLI.pep
HTPMPPPPLARRLLLQPLPRGARALHTTPAPRRGPGVLACRLASRAVVRFAGPEAARFLHSLLTNDLLSAFSAAGASSPQRYAPTPNAPARGPAAPAYAALLTPQGRFLYDLFLYRPPPRSQMLDRTGSAPETGEAPEGHPHPQEVLADVDAAEVDDLVACFKRYRLRSKVEIDNVSENFACWQRFGHDVVHTEPSTQEPEAQSIGWGQGVDHAGESAAQGNGHGWQWLKDPRLDYLGYRGIFPADTIPPLVESDKEADERHYQLWRIENGVAEGSTEIPKGEAIPLEYNLAGLNAISFEKGCYIGQELIARTHHRGVIRKRLMPMKFVDGNGQGRRSRLGGRGRGFRQEGRGSEHRSGLPRDGPATARRSTETGLGPPRRRQQGREGPGDQAGLVASRVDAGASGTARSRLTAAELYVVLDPKHKPCLSSVSRLLEEDPNKPHS

SEQ ID NO: 66013 - protein, 163 aa, Zea mays
  Clone ID: LIB3912-056-D6_FLI.pep
CSRSVHPGGFVRSKAASELEDAGQAVGRRGGRASPGDGPGEAPQGHHRPPARHQQRRGRRQLQAGAVDAVDPDDAGDAVVVVVVDDAARRRQRVAQRLPPGEQPGHQGHGRQPLRPAAAQLPHRLRLALQRRDQEQPPLDRARWTVKRPGVSVRPCLLVLVVI

SEQ ID NO: 66014 - protein, 210 aa, Zea mays
  Clone ID: LIB3918-003-D6_FLI.pep
PLHCWMKHGPLSRGAPSLVIIFILLTTLFIILVIDLRLGLVRLLFIFLLFLLGRSLLSCSALALVVGSDGLVVLELELVSLGYIGSLVRLAQGFPPVASSFPHRSDRLVLRVLLLELLAKFLHEHEESAGSPLRLVGVLAGLPFPALGGLLRPLALHRQLGIGLGGALGFGPLHGGFERRHGAQRSDPRLAEGIPVAGGRIGVESRAKLP

SEQ ID NO: 66015 - protein, 239 aa, Zea mays
  Clone ID: LIB3957-004-F11_FLI.pep
KEQQHIKSYWWHNLTEGLERARRQLWHEQEEVAGEQHRECSTGGRRRGGHAASGGRLQRAGVGRRRRVVLGWSGSGALVAAGTEDGGVFGARGNMQELSAVGDVGAGGAAGVGEREREGGVDLDAQVGVVLVLDEHAEALGALPQHLAQAAAAVGRRRAGLPLHVLQARRQAHQLVRALRLVRVHVAARHGRHGDGRGRGQRQHRSPPRHRRRACVMCALARASSLRCGLRFKCGCVTC

SEQ ID NO: 66016 - protein, 98 aa, Zea mays; identical to SEQ ID NO: 46718
  Clone ID: LIB3957-026-E7_FLI.pep

SEQ ID NO: 66017 - protein, 73 aa, Zea mays
  Clone ID: LIB3958-004-C8_FLI.pep
AYLQQQILLPFSQLAAANRASFLTQQQLLPFYQQFAANPATLLQLQQLLPFVQLALTDRAASYQQHIIGGALF

SEQ ID NO: 66018 - protein, 161 aa, Zea mays
  Clone ID: LIB3958-005-G5_FLI.pep
GTMGWKAAEKLIRHWKVLRGDNVMIIRGKDKGESGLIKRVIRSQNRVIVEGKNLVKKHIKQGEGHTGGIFSVEAPLHVSNVQVVDPVTGKPCKIGYKYLEDGTKVRYARGMYASGVVIPRPEILKERRKPRPTSPGPKDTPIELAQEKTYDEKAGIGMPDL

SEQ ID NO: 66019 - protein, 183 aa, Zea mays
  Clone ID: LIB3958-011-F5_FLI.pep
SRLTSIFSDKKFKGCLNSLMDADATTSNIQRFLFRAVSYMDMESGFLSVESFLKALSSMQRQPKMDSLQDLSILELYILVCMHRLESKEQTSYNFTSIMKEYRSIQDAYKTSDKYASTVCFRAFEHLLDRELISFGDNRWRNQALEYRPVKLLISSRELAESLKLNTTCPAVLQKLFDRERYM

SEQ ID NO: 66020 - protein, 115 aa, Zea mays
  Clone ID: LIB3958-019-B1_FLI.pep
HTLLQIQRHFFTVGGREMVLRRAATECPKKVAGLKDLVNLPTQLREFAGGRSQMSHISFFLSVWSYIKDNKLQDPTNKNIVKCDEKLKTVLLGRSKVQLSELPMIVKLHFPKLPK

SEQ ID NO: 66021 - protein, 275 aa, Zea mays
  Clone ID: LIB3959-003-A7_FLI.pep
EVKAGASAMADEEHPERREEASELAPFDPTKKKKKKKVVIQEPSDEVDKVAEKTESLAVAEPAELNFTGMKKKKKKQVDLDSSIDDLGDGEDTQGDQVVEEQGDGIVLGGGPTYPWEGTDRDYKYEELLDRVFNILRENNPDLAGDRRRTVMRPPQVLREGTKKTVFVNFMDLCKTMHRQPEHVMMFLLAEMGTSGSLDGQQRLVIKGRFAPKNFEAILRRYINEYVICNGCKSPDTILSKENRLFFLRCEQCGSSRSVAPIKAGFVAQVGRRKA

SEQ ID NO: 66022 - protein, 301 aa, Zea mays
  Clone ID: LIB3959-013-H10_FLI.pep
SREACFCFTSKLMSVEELTMVGSVEGREAPEVDLAFLRPLAGRVRSHGRRCEERAARVHHGVLHALRRLEEGLDVRERGEVRVGVARQVHVHVVVVRRAVAQASVPAGLRGANARRRRRVAVAARRSGAGATAGRVGRRRGGAGLQLRRAACGAATGGGGGGGDALDGLGRHGGGGGDVEGEVHGEVEVGGGGALEAEQGGVVGARGGLGGGVGAEPYPRLLAGRPDLRHPRAPAPHPHALVLPLGAALHRRLRIAAGAAVDRRVLEMRALHHVPCRAAPGSGALAAIQSSMRARDVDGEE

SEQ ID NO: 66023 - protein, 183 aa, Zea mays
  Clone ID: LIB3959-014-H4_FLI.pep
SLVCSPRARGGAKDIQPTTSSMATAAAAATAMCSVPGPSGSMRRRAFCTWIKADAPRVASSSLARPPRFVRASAAAVHRVKLVGPDGSESELEVAEDTYVLDAAEEAGLELPYSCRAGSCATCAGKLASGEVDQSEGSFLDDAQRAEGYVLTCVSYPRADCVIYTHKESRRRKCTRVLLVRST

SEQ ID NO: 66024 - protein, 360 aa, Zea mays
  Clone ID: LIB3959-016-E11_FLI.pep
TKLKSNSNTWPLQASSFKFIHSTTQVLNLCSLVINLVVQGNLGWALMQKENYTEAEGAYRRALLIGPDNNKMCNLGICLMKQGRVLEAKDVLKQVRPAGVDGLRGADSHLKAYERAQEMLRDLETKLVGRPRADQLDTNWLYDALLLGSSSSIWQPQPCIDHLLPPPAPASIPALAPAPRDHFADENAGLSKKLAALQANMLNVDAQPFYSLRVPPLAAKPHNTLPQQKPHSTLPQQQQQKKKPAPVHDPLGNLKRTRSSNCMDKAGAVVDKAQSIDENSGRRKSLSAEDRWPELPDHSAFDEALVADILGPVFDDKPTAAGTNGHGKLPASCDTSPAAKEKISKRLRIFQDITKTVNNF

SEQ ID NO: 66025 - protein, 187 aa, Zea mays; identical to SEQ ID NO: 41065
  Clone ID: LIB3959-018-B7_FLI.pep

SEQ ID NO: 66026 - protein, 333 aa, Zea mays
  Clone ID: LIB3960-010-G9_FLI.pep
VASGSQTRNQGCSPPSPCSPLGSPPAAAETSSSPATPDPTKAALGGGPLSGGVVDTSAPMANGGAAAGKLTVAETFSNLREQGKSAFIPFITAGDPDLVTTSKALKILNSCGSDVIEVGVPYSDPLADGPVIQASATRALKKGTTLDSVIEMLKGVTPELSCPIVLFTYYNPILKRGVGNFMSTIKQAGIHGLVVPDLPLEETALLRSEAIMHNIELVLLTTPTTPTDRMKGIAQASEGFLYLVSAVGVTGARSNVNLRVEHLLREIKKVTDKPVAVGFGVSTPEHVKQIVGWGADGVIVGSAIVKQLCEAATPEEGLERLEEYARSMKAAMP

SEQ ID NO: 66027 - protein, 341 aa, Zea mays
  Clone ID: LIB3960-015-G10_FLI.pep
ITDYFFLSFPHLQTHIIRLWVFWISEARDNLKFLQGWFARFPQYKGRDLYITGESYAGHYVPQLAQRMVEFNKKEKLFNLKGIALGNPVLEFSTDFNSRAEFFWSHGLISDSTYNIFTTVCNYSRYVSEYYRGSLSTACDRVMSQVARETSRFVDKYDVTLDVCISSVLMQSQVLVPQQGSRELDVCVEDETMRYLNRKDVQQAMHARLDGVQRWTVCSSVLEYKQLDLQIPTVNTVGALVKAGIPALVYSGDQDSVIPLTGSRTLVGRLAARLRLNATAPYRAWFQGKQVGGWTQVFGGGALSFATVRGASHEAPFSQPERSLGLFRAFLAGQQLPESFQ

SEQ ID NO: 66028 - protein, 193 aa, Zea mays
  Clone ID: LIB3960-020-D9_FLI.pep
GSEGGGSAAAMFLRISRLGARLLRESGAETRAGNLLSSPGILYQAHLNQHSTRVRNVLFSTATSGDQDESSQAKDKISVTFVNKDGSEKTIRVPVGMSMLEAAHENDIELEGACEGSLACSTCHVIVMDVNYYNKLEDPADEENDMLDLAFGLTETSRLGCQVIAKPELDGIRLALPVATRNFAVDGYVPKPH

SEQ ID NO: 66029 - protein, 282 aa, Zea mays
  Clone ID: LIB3960-020-G11_FLI.pep
ERGREMERAAPVRSSHTSTAGLLAWPHPDGAGSLPARRPNQPTEEFRNVVFGGQLTEGADGLNKTKRKTGSSPKGKETTGTGISKAESAAAAVATASRDRQASQITFSQDGTVPTRKATSVAGVARQRELSHTVESEGDSKMKRQVSSTKSKELSGHDIFADHEDPKPNRSRRSDYGSSAAQSPVKNANVSSFSFGEADIDSTVKTAKKKGSSNLSTDLNGKTMPKKDSASAEKQPPNRARPKGMSGSSNFADGKASTSTTGDHEGRRTRQPPGGDSSILLG

SEQ ID NO: 66030 - protein, 551 aa, Zea mays
  Clone ID: LIB3960-021-F9_FLI.pep
HSAAQALSSATPPEMVAATATATAMATAASPLLNGTRIPARLRHRGLSVRCAAVAGGAAEAPASTGARLSADCVVVGGGISGLCTAQALATRHGVGDVLVTEARARPGGNITTVERPEEGYLWEEGPNSFQPSDPVLTMAVDSGLKDDLVFGDPNAPRFVLWEGKLRPVPSKPADLPFFDLMSIPGKLRAGLGALGIRPPPPGREESVEEFVRRNLGAEVFERLIEPFCSGVYAGDPSKLSMKAAFGKVWRLEETGGSIIGGTIKTIQERSKNPKPPRDARLPKPKGQTVASFRKGLAMLPNAITSSLGSKVKLSWKLTSITKSDDKGYVLEYETPEGVVSVQAKSVIMTIPSYVASNILRPLSSDAADALSRFYYPPVAAVTVSYPKEAIRKECLIDGELQGFGQLHPRSQGVETLGTIYSSSLFPNRAPDGRVLLLNYIGGATNTGIVSKTESELVEAVDRDLRKMLINSTAVDPLVLGVRVWPQAIPQFLVGHLDLLEAAKAALDRGGYDGLFLGGNYVAGVALGRCVEGAYESASQISDFLTKYAYK

SEQ ID NO: 66031 - protein, 386 aa, Zea mays
  Clone ID: LIB3960-022-C10_FLI.pep
EGKGESSTRRPGSFPPSPLRPRLPRPAPPTPPSRRRTMSTSPAAADVSPLPPTAAADEAARATETVVVDERVASHVDPFLVEALDNPRHRLMVLRMELDIQNFMQNPQLQEFEFQNFPTSYLRCAAHRVAQHYGLETIVADSLVEGSVSRIVARKTAESRYPAIFLSEVPSNQARNDHETAEKLKFVIYQRPKAFQNGSADSRNKSGVPKTVDERIEEYNKARARIFNGSISADSDAASIMGTLSTGKDEPVNVDPSVDETKVSTMNSRSRVAVFKDTEKDRSDPDYDRNYKRYVRSSVPGFNLSPGVFNFVVPQFMQYDIGYVQSPGMSTNQHTMYFGQPDLTIGSSGAAVYRHWPTPTMMYPHCYDNVSPMMSQVPLYQSFNHD

SEQ ID NO: 66032 - protein, 507 aa, Zea mays; identical to SEQ ID NO: 54390
  Clone ID: LIB3960-024-H5_FLI.pep

SEQ ID NO: 66033 - protein, 168 aa, Zea mays
  Clone ID: LIB3969-003-E8_FLI.pep
SVPPTMPAAMAAAAAQRLLAASTKIIGVGRNYIAHAKELGNPVPKEPVLFLKPTSSFLHAGVATAAVEIPEPLESLHHEVELAVVISRRGRDVPEASAMDFVGGYALALDMTARDLQSVAKSAGLPWTLAKGQDTFTPISAVVPKSAVTNPDDLELWLKVSQMCTEFV

SEQ ID NO: 66034 - protein, 145 aa, Zea mays; identical to SEQ ID NO: 53346
  Clone ID: LIB3969-003-F12_FLI.pep

SEQ ID NO: 66035 - protein, 432 aa, Zea mays
  Clone ID: LIB3969-005-A11_FLI.pep
LVVVETYSQEKKRKKHSCPPRLQAASLQPPIQPRSLPPPRRSGGGGRGPRALLSTPPTRGLTRGSTRWPAGAMAEAEREQRPLPEVEQSVTSIPEDHEATCWGCGLRLVFASYSPIYKCGWCGAVTQSNSQTARKPDSIWFSHWRRLRDRLFVAVLVLFMLFVICGGVRAVYPVVFSVSKFCGVFHCTVAAVLAVCTVTSYCLASLKCAGAPTDIRWGSYPVVGKGDLENYTFCTYCNKPKPPRAHHCRSCKMCVVDMDHHCPFIGNCVGASNHQVFVVFLISVVISCSYVAGMTIYASYQIWPSIEFPDLASSSRHSMSSWKTVLEMITTVAGSAFFLSARGLVLVYLAFASSSVNAGIAVLLCQQLSYIYQGNTYLNRLSSAPNALQHGERGLQNIVRFFGCPYPVSRVVLRLRYSNAAKLQDDSGSKLL

SEQ ID NO: 66036 - protein, 248 aa, Zea mays
  Clone ID: LIB3969-007-B8_FLI.pep
PDPAPPAARTRTPRPQAGTGGRAPGSRRERKGGMAAPPARARADYDYLIKLLLIGDSGVGKSCLLLRFSDGSFTTSFITTIGIDFKIRTIELDGKRIKLQIWDTAGQERFRTITTAYYRGAMGILLVYDVTDESSFNNIRNWIRNIEQHASDNVNKILVGNKADMDESKRAVPTAKGQALADEYGIKFFETSAKTNLNVEQVFFSIARDIKQRLAETDSKPEDKAIKINKPDQGSEAPAAQRSACCGS

SEQ ID NO: 66037 - protein, 212 aa, Zea mays
  Clone ID: LIB4071-007-A8_FLI.pep
LYGVELKACRSVLLPMHVSSPCMMILTNPVPSSMSGCWLLAACRPGQDPQEVRQAHRRDAAACRDGVGAAAALLQDGDGVASGAGVRVLDGGRVPGGARSGPGRRRGARRRGGGAGHLPQHRGRAPHHAGRPRGELHQRKPLAAAAQPAGLRLAPVLRPAVSDPDPMTHVGLLLAPSWLAPASSISLPFRLLGPVHAVLALVFHFSRFLSSN

SEQ ID NO: 66038 - protein, 220 aa, Zea mays
  Clone ID: LIB4071-009-B6_FLI.pep
YHKNKSGSPLIIVPDERSEKCIHLLAVLIIQTYELATSSFLMHYALRSYLEGIVPPPRIQGHSATPLMVARLHSASVTRVAANPLCTSRGQPGRSSRRPSSCASGPGGIAPSMRMLSAVHRQYAGMSASSRQHLLFSSGHGRRGPMPQVRLVTYQRQLGSGLCGMAHPGTQEVPALALAAASTESRTAAARMRRRWLLLDDDAINSPVDGLSMDFLVQFA

SEQ ID NO: 66039 - protein, 217 aa, Zea mays
  Clone ID: LIB4071-010-B6_FLI.pep
NKSGSPLIIVPDERSEKCIHLLAVLIIQTYELATSSFLMHYALRSYLEGIVPPPRIQGHSATPLMVARLHSASVTRVAANPLCTSRGQPGRSSRRPSSCASGPGGIAPSMRMLSAVHRQYAGMSASSRQHLLFSSGHGRRGPMPQVRLVTYQRQLGSGLCGMAHPGTQEVPALALAAASTESRTAAARMRRRWLLLDDDAINSPVDGLSMDFLVQFA

SEQ ID NO: 66040 - protein, 276 aa, Zea mays
  Clone ID: LIB4073-002-C3_FLI.pep
WANDTVHKPSYTSLDNDPNQPATMAGGAHQQVVVVLAMVALMVTAAEGFISKKTWSAIRRADRDGPFVGLVVPNTYEMDPVLSSPDFKPSNNIPILDVQGRRFRFGTIGSQNVVMVMTGLSMLNAGLTTQLLLSLFRVKGIVHWGIAGNANEDLQIGDVTIPESWAHLSLWNWQRHGDGAARLSATRPPRSLTSRPRTPSTSCSSSCPSLAAVASRSRPTVWPKTCNVRRARRQIDDAEQSRRGTIQFRLVRFLFKIISHPRINLYRYCKPIFGNK

SEQ ID NO: 66041 - protein, 308 aa, Zea mays
  Clone ID: LIB4073-003-G10_FLI.pep
RGKEQYQFNDAMEWNHSNPIFLLFIPVMLHSSHGIESMNESNRFASLVILKLKSRIDCPAVEPDLPGGTRERGDVAEPDHGRGEVRREGVGVGAVEPDQRVERPVVEELLVRVQQAGAGHQAPVVAVVELVRSERVERRERVVARAVRERRVPPAQRHRPARAAEQVDGVAGGEGEDVGAGDGGGAGGLDLRLDGVDEVEAGGGGAGVGAGALLAGRRGRVVQQQRGVAAIDEAVVEEEAEHGGAGAGVVRDGLRHGLAHDAFHGGAGRRVEPRRELRARAARERGGDQQRRQEQQPPRHHNPTVLEL

SEQ ID NO: 66042 - protein, 275 aa, Zea mays
  Clone ID: LIB4073-007-C11_FLI.pep
SASPLMAMLLLASTLAPRVPVTRGSGSGTSAAHPAYADATAYGLAAASALEAGLEEYGGGRIVDITHAYRPELPFPGRDGLGAVTRLTESMANGSVNNVSELRMVVHSGTHVDAPGHMVQEHFVAGLGVDKLDLDVLNGPALLIDVPRDTNITAQAMESLNITQGIRRVLFRTLNTDRKLMWTKEIDTSFVGFTEDGAQWLVDNTDIKLVGIDYLSVAAFDHLISAHLVFLNRRDIIPIEGLKLDHVKTGVYMLHCLPLRLIGCDGSPIRCILIK

SEQ ID NO: 66043 - protein, 213 aa, Zea mays
  Clone ID: LIB4073-007-H9_FLI.pep
LISTLGYTLSQYVTLASTTAPAFRCFQEAAGPRHSGINDGITHTGGINDGSYLSCLRCLGPAIVLQREGQGQQQDGQGELQERGPGAGARRRGLLGPAGGVLGDDGVGELGRDGSRVDLADAVLRHQLLGGVGVADVLEIGGGVLSDARQQDLVAARVLLHERRDVVHLAGDDEPAILAIAVLPHLLERVNLASRHGDLASPSGDEDPTETDE

SEQ ID NO: 66044 - protein, 126 aa, Zea mays
  Clone ID: LIB4073-009-E12_FLI.pep
TAMGAAGDEKAAAAAGTGATAAEGEGAVDSKDLQQQSKALDKLTDHVEDRQLDSSRVQSAMAALASSKEADWNAMRLREKELAAVKINPTDVEIIANELELDKKIAERTLREHKGDAVAAVRFLLH

SEQ ID NO: 66045 - protein, 180 aa, Zea mays
  Clone ID: LIB4073-014-E11_FLI.pep
TCERARVPRAAGAMLVYQDLLSGDELLSDSFQYKEIFDGVLWEVEGKWVVKGAVDVDIGANPSAEGGEDEGVDDQTERVVDIVDTFRLQEQPTFDKKTFVTNIKRYIKNLTGKLEPEKADEFKKGIEGATKFLLSKLKDLQFFVGESMHDDGSLVFAYYKEGATDPTFLYFAHGLKEIKC

SEQ ID NO: 66046 - protein, 298 aa, Zea mays
  Clone ID: LIB4073-014-F6_FLI.pep
ITVRHFRTKLHGAAMHAVQAYSFFFFPCYMHVGRSIHHITRKSTQGQDQTTEANSSRQHGHGRRRGTLRFIHQGAAPASRIGTGRCRPAVSASIGIRRSAGRAAVGRLDGHRRRRLVGLLGDSGSSGTDLGDGDGEHAGVHGGPDAVDGGVFGEVEPAEEAGAAALDVVPPVADALLPGHAALAGDDEHVALVHLHRDLLLPHAGRERGAEHVGPRRVPALDVRVGERRRVAGQPRVGGHRRAEDAERVPHPRVQSQRVQQPYQRHPRELEKLSFSIEILASSLFVPWLGSPPKQIDV

SEQ ID NO: 66047 - protein, 106 aa, Zea mays
  Clone ID: LIB4073-017-D8_FLI.pep
ETLRSGSRSLLLELLHLGDVIIHCLFLRFTFNSLPCIPFGPVLLVEYARTVGIHISNSGLLVQSVEDQLVLIARALRQGLCLFSVLLKFLLQTHGLVSGFVFLRPL

SEQ ID NO: 66048 - protein, 228 aa, Zea mays
  Clone ID: LIB4073-019-D7_FLI.pep
TSLAAHAKAGGGCLYKERVTTGEADLCTLQTSPSARPGQTSQVAASSSGQSSRSPPRSTRRRRDSMGGGTAAEPPAWMAAAARRWLENAGATVEDAPGRAFNALPLSGVRVSLAERGRALCSLRVPPQLTDAEGNWHTGAIAAAADDVCAAAIMSVEGIIKVSVHYDISYFTPAKLHEEVEMDGRVVEQKGRMTAVTVEIRKKESGELVAIGRQWMTASRPKGSQSKI

SEQ ID NO: 66049 - protein, 210 aa, Zea mays
  Clone ID: LIB4073-022-G4_FLI.pep
TPMYVSQLGFSTPSTRQQVLPTNSRSEAAALVLAPNLLDSTDLFLAHGRHHGQEDVLSFIISTLDLGLQSFITGKLGVILSVATLSQKADKSIFRNVNQLILNTVNMWNVTVVRRRNNILKLLSSENVNSNKVALGMAMLPSLGSGDLNNLAGTVLDDDVAVLADGAGLLRVRLGGAGVGLGLEVVLLGVRHLRESFRDPAEKLGEEFFA

SEQ ID NO: 66050 - protein, 178 aa, Zea mays
  Clone ID: LIB4073-022-G9_FLI.pep
TIQPFAKSKRTDPDQRTRTGPPTKTMATKDPAATGGEPAIGIPYHPAPGAQGHYYYAPPPNPYAAGMPPPNAIYAGAPKGVPLQQTMFRDTPAPFHCQACGEAAVSSVRSKPSLASVVACMMPFMLGVCFLCPSMDCLWHKYHYCPSCGEKVGEFRKSDPCLVVDAARWSEPSFAVPA

SEQ ID NO: 66051 - protein, 171 aa, Zea mays
  Clone ID: LIB4073-023-E4_FLI.pep
GEGGMEAAGAASPPTEPPPTHPAVAPLAFLLGKWRGEGEGSFPTISSFRYGEELLFSHHPSKPVISYTQKTWKAASGVPMHAESGYWRPRPDGSVDVVIAQSTGLAEVQKGSYDAEKKTVTLQSELVGNASKVKQITRTFQVADGELSYVVQMATITTSLQPHLRALLKRI

SEQ ID NO: 66052 - protein, 452 aa, Zea mays
  Clone ID: LIB4073-024-A6_FLI.pep
QFPSAMGKEKTHINIVVIGHVDSGKSTTTGHLIYKLGGIDKRVIERFEKEAAEMNKRSFKYAWVLDKLKAERERGITIDIALWKFETTKYYCTVIDAPGHRDFIKNMITGTSQADCAVLIIDSTTGGFEAGISKDGQTREHALLAFTLGVKQMICCCNKMDATTPKYSKARYDEIVKEVSSYLKKVGYNPDKIHFVPISGFEGDNMIERSTNLDWYKGPTLLEALDLINEPKRPSDKPLRLPLQDVYKIGGIGTVPVGRVETGIIKPGMVVTFGPSGLTTEVKSVEMHHEALQEALPGDNVGFNVKNVAVKDLKRGYVASNSKDDPAKEAASFTSQVIIMNHPGQIGNGYAPVLDCHTSHIAVKFAELVTKIDRRSGKELEKEPKFLKNGDAGMVKMVPTKPMVVETFSEYPPLGRFAVRDMRQTVAVGVIKSVEKKDPTGAKVTKAAAKKK

SEQ ID NO: 66053 - protein, 208 aa, Zea mays
  Clone ID: LIB4073-024-B8_FLI.pep
ETLDLVELVRLHHWISLGNGIPSSSPIVELAVVLVGVAVQCTVQVPTPAVESCKSNPLPASAAPVRPYLPFGDHRRPLARSSNISGLHVHCLQLDWSSSDHCVASNNWFHDSIVAIDDAVDRGGSQLGLLLLHYHLLVALGAHVHGSCAAEEAAVIDAKDGSLRCLASSLLVLHGFLNLDETALFAIPLRRSPRGRRGGEGRGIAGRE

SEQ ID NO: 66054 - protein, 412 aa, Zea mays
  Clone ID: LIB4073-024-C10_FLI.pep
KVRSRRPVLPPSPPPVPKANSFEVVMADQANQPTVLHKLGGQFHLSSSFSEGVRARNICPSVSSYERSFATRNYMTQSLFSPSMSVTGGINVPVMRTPLFANAPAEKGGKNFMIDFMMGGVSAAVSKTAAAPIERVKLLIQNQDEMIKSGRLSEPYKGIGDCFKRTIKDEGFSSLWRGNTANVIRYFPTQALNFAFKDYFKRLFNFKKDKDGYWKWFAGNLASGGAAGASSLFFVYSLDYARTRLANDAKAAKGGGDRQFNGLVDVYRKTLKSDGIAGLYRGFNISCVGIIVYRGLYFGLYDSIKPVVLTGNLQDNFFASFALGWLITNGAGLASYPIDTVRRRMMMTSGEAVKYKSSLDAFQQILKKEGPKSLFKGAGANILRAIAGAGVLSGYDQLQILFFGKKYGSGGA

SEQ ID NO: 66055 - protein, 337 aa, Zea mays
  Clone ID: LIB4073-024-F1_FLI.pep
SLEARAMWNSIYRFLCGLCAPSSSEHGLHGAHPAVAALGRDILSFQSTSQVPDELSRHVVSSKKAQANWYKKLLVAWKKARPPPKTPEEAAAFVVQTLKNHQKADVEGLLSFYGLPHPNAAAGTPAAPPPPKKPQGAKFELHTLPIDPKSVADGDTVNVYVDTADPREAGSVPREVQKAAAERAKARAAKNYQKADALQKIIVDAGYRPVPNARGEEVLAKKYRIRLRGIDAPESAMPYGKEAKEALLKLVQGKSLKVYVYDEDRYGRCVGDIYCDGVFVQEQMLKKGFAWHYTAYDQRPELAKWEKQAQTGRKGLWASSKPQKPWEWRKDKRNGTA

SEQ ID NO: 66056 - protein, 159 aa, Zea mays; identical to SEQ ID NO: 62305
  Clone ID: LIB4074-001-D7_FLI.pep

SEQ ID NO: 66057 - protein, 159 aa, Zea mays; identical to SEQ ID NO: 62305
  Clone ID: LIB4074-002-H7_FLI.pep

SEQ ID NO: 66058 - protein, 153 aa, Zea mays; identical to SEQ ID NO: 44881
  Clone ID: LIB4074-003-D11_FLI.pep

SEQ ID NO: 66059 - protein, 191 aa, Zea mays
  Clone ID: LIB4074-012-H9_FLI.pep
CGLVVARTWKCNQTIICITHSLIIVCVHMHAREANALSSALEAGGHGPAAVVEDEAEIDRQVEVDAEDLALDGGAEADGGLQVDETLQQRAARLRGRHAHLRLDEAQHVGAHAKLERVAGAPAERRRRGRGRRRRRGGRGRGRAVGRAGAGYAQHHQVHGQEQRKRLGRHCSSRSQASSYHDRDLSSQSSR

SEQ ID NO: 66060 - protein, 171 aa, Zea mays
  Clone ID: LIB4074-021-D1_FLI.pep
RTTSKAFVLLYCRSDGFYLKFICINFLFIYFQRNVLFSTATSGDQDESSQAKDKISVTFVNKDGSEKTIRVPVGMSMLEAAHENDIELEGACEGSLACSTCHVIVMDVNYYNKLEDPADEENDMLDLAFGLTETSRLGCQVIAKPELDGIRLALPVATRNFAVDGYVPKPH

SEQ ID NO: 66061 - protein, 141 aa, Zea mays
  Clone ID: LIB4074-021-H5_FLI.pep
AEQQEDAAGGGGRAGGGGAAGFVRFGGDHLRAGGVVAGAVHPVRDGEGQRAPRVVLQRRQEPQQRGADQRGPPGGVPLPQEPRQQRQERQHGHRRHHPRQVRRLRRIPHQHVHRLQQDQLSYDDQANKPTERTRTPRALHE

SEQ ID NO: 66062 - protein, 156 aa, Zea mays
  Clone ID: LIB4074-024-D12_FLI.pep
AYMGGCIGNLSRSQSLPDSKPKRSLRKKYQDSSTGNRRRWQSGLEAMEKNVSISVSLEGNISSIPNSIANDSKTSMENRLDTSFINHAAEAWAEMRRQWVGRQAEVLRKTPREPVISWSTTYDDLLSTSERFPQRIPLSEMVDFLVDIWHEEGLYD

SEQ ID NO: 66063 - protein, 279 aa, Zea mays; identical to SEQ ID NO: 64393
  Clone ID: LIB4148-005-C10_FLI.pep

SEQ ID NO: 66064 - protein, 330 aa, Zea mays
  Clone ID: LIB4171-003-H1_FLI.pep
VMRDRETGHGRGFGFVEFEEEAAAGTALGDGEKLKHFLCGRMVDVKRARTRAPRNQGEQHSQPQQAEQGRGQGNQDNQSPAGNGTADCGNSVSYDSKKVFIGGLRDNITEKEFRAYFETFGTVTDVVVIYDSATSRSRGFGFVTFDSEEAVGKVMRQSFHDLNGTKVEAKIAIPKDEQYYRNRGGHGARPFGGRDPAAPGYGGFMYQTYNARSGPYNGYMPQPAPTHPYFPAPYFAAGGYPYGSGYPGQGVMPNIPGMGPRRGPPAYGTYPQMYPVYNIIHRAGYGGPATSFQHEINGGGDYKKDQTNVDMQQVDNTASVATKLENMKLG

SEQ ID NO: 66065 - protein, 268 aa, Zea mays
  Clone ID: LIB4171-003-H6_FLI.pep
CRNYLQTSFCSSSSMWSIPQEYCSWDSAGRAWVNTPISFAAVHRLDRLVSGLLIFAKNADRAECFRQQIEAGLLQKEYVAKVVGVFPDGEQTVDANVNFNAREGRSTVEISGGAGEEPNGKQALTRFQRICTDGTHSIVLCKPVTGRTHQIRVHLKQAGYPIANDELYLSGNFCPRSTKGTNASKKIAPSDPDSSAADHGSKDAGTDVEFDIDPMCTNCPNLAPVGYDRDEEGLWLHCVRYTGPDWSYECPYPDWAFLGSVSTKKMKS

SEQ ID NO: 66066 - protein, 177 aa, Zea mays
  Clone ID: LIB4171-006-H12_FLI.pep
KMEVATATEASAPAASGGAAGQGHPFPWLDAAISEPYYFLHLLAFFSYFAARSAALSADDGGELHDRLLRREIQAVLVFLVLFVVKIVKEETWEAVIADSLLYAKGLLLAVTLVIDWWLAFAYFLGFLVIYAVAQQPPYDGLGHSNHLTPLQLESLLTEEPTSRFWLVFLYMFLMEF

SEQ ID NO: 66067 - protein, 426 aa, Zea mays
  Clone ID: LIB4171-011-F6_FLI.pep
VSAAMVRGSLGKLASRALSVAGRWQHQQLRRLNIHEYQGAELMGKYGINVPRGAAAGSVHEVKDALKNMFPSEKEIVVKSQILAGGRGLGTFKSGLQGGVHIVKAEEAELIASKMLGQILITKQTGPEGKIVSKVYLCEKLSLTNEMYFAITLDRKTAGPLIIACSKGGTSIEDLAEKYPDMIIKVPIDVFKGITDEDAAKVVDGLALKAADRQSSIEQIKKLYELFCKCDCTLLEINPLAETADNKLVAADAKLNFDDNAAFRQKEIFALRDTTQEDPREVAAAKADLNYIGLDGEIGCMVNGAGLAMATMDIIKLHGGTPANFLDVGGSASEGQVVEAFKILTSDDRVKAILVNIFGGIMKCDVIASGIVNAAKQVDLKVPVVVRLEGTNVDQGKRILKESGMTLITAEDLDDAAEKAVKASVK

SEQ ID NO: 66068 - protein, 518 aa, Zea mays
  Clone ID: LIB4171-033-B9_FLI.pep
SCFANHPRSPFPPMGCFQSKVAGPLPPNDAAALPADKPADPEAANGGADGEGDGDDKEAVKRAVPVFREFALAELRAATKGFSADLIVSESGEKAPNAVYRGRLDGGRLIAVKRFSRLSWPDPQQFLAEAAGVGKVRHRRLVNLIGCCAEGDERLLVAEYMPNDTLSKHLFHWDKQPLPWEMRLRVAYFIAQALDHCNAENRKIYHDLNAYRVLFDEEGDPRLSSFGLMKNSRDGKSYSTNLAYTPPEFLRTGRVIPESVIYSYGTVLLDLLSGKHIPPSHALDLIRGKNILLLMDSSLEGQYANEDASKLVDLASKCLQFESRDRPNIKYLLSSVGPLQNQKEVASHVFMGITKATSVLPTICSPLRKACAGMDLSAVHDILLKTGYKDDEGAENELSFQEWTQQVQEMLNTKKFGDIAFRDKDFKTAIDYYSKLVAMMSTPSATVFVRRSFSYLMNGQAELALRDAMQAQVCMPEWPTAFYLQALALSKLGMETDAQDMLNDGATFEAKKQNGWRS

SEQ ID NO: 66069 - protein, 373 aa, Zea mays
  Clone ID: LIB4171-034-B7_FLI.pep
AQGDLARVSRIGLRHPPPPPRPAPPKERRMEAPGSPYASSPESAPKRAPRSPPQQQPPSEEGDDKEKPIHLRFLVSNASAGCIIGKGGSTINDFQSQSGARIQLSRSHEFFPGTNDRIIMVSGLFGEVMKAMELILEKLLAEGEEFNEAEARPKVRLVVPNSSCGGIIGKGGATIKSFIEESHAGIKISPQDNNYVGLHDRLVTVTGTFDNQMNAIDLILKKLSEDVHYPANLSSPFPYAGLTFPSYPGVPVGYMIPQVPYNNAVNYGPNNGYGGRYQNNKPSTPMRSPASNEAQESLTIGIADEHIGAVVGRAGRNITEIIQASGARIKISDRGDFISGTSDRKVTITGTSEAIRTAESMIMQRVSASSERL

SEQ ID NO: 66070 - protein, 390 aa, Zea mays
  Clone ID: LIB4171-034-E6_FLI.pep
EPPPHNPGRGGRRPIRIHHPKLPFCLLFIHLHKDNQGRKAMVLFELDPDIIRWGLHHLLPAPAGYSPHCRTQTTPTTPCTAFARPPHQPIGDMGTSSSVEIKVEHVDGVDNDAIIAQALQEELSNVAFAEASGPTSAADNQQHSAVLTQQWLRPRAVHVEPASQEAGTREEPFSTCSSPGDDNNVQDSQQCLIELMDNFSVIDGEVGKRLNNMVPVPHVPKTNGEIPSVDEAISDHQRLLDRLVVYGLVDLKVKGDGNCQFRALSDQFYRTPEHHRFVRQQVVKQLESHPEIYAGYVPMDYREYLKKMSKSGEWGDHVTLQAAADSYGVKIFILTSFRDTCYIEILPVVEKSRRVICLSFWAEVHYNSIYPEGELPVLEFDNKRKRWWPF

SEQ ID NO: 66071 - protein, 513 aa, Zea mays; identical to SEQ ID NO: 46548
  Clone ID: LIB4171-040-A3_FLI.pep

SEQ ID NO: 66072 - protein, 468 aa, Zea mays
  Clone ID: LIB4171-050-H10_FLI.pep
AGPPALTAASLPLRYCSSPPHSPAGAAAAAARSYPTSASGGGTAGGKGKMFGRAPKKSDNTKYYEILGVPKSASQDDLKKAYRKAAIKNHPDKGGDPEKFKELAQAYEVLSDPEKREIYDQYGEDALKEGMGGGGSHVDPFDIFSSFFGPSFGGGGGSSRGRRQRRGEDVVHPLKVSLEDLYNGTSKKLSLSRNVICSKCKGKGSKSGASMRCPGCQGSGMKVTIRQLGPSMIQQMQQPCNECKGTGESINEKDRCPGCKGEKVIQEKKVLEVHVEKGMQHNQKITFPGEADEAPDTVTGDIVFVLQQKDHSKFKRKGEDLFYEHTLSLTEALCGFQFVLTHLDNRQLLIKSDPGEVVKPDQFKAINDEGMPIYQRPFMKGKLYIHFTVEFPDSLAPEQCKALETVLPPRPSSKLTDMEIDECEETTMHDVNNIEEEMRRKQAHAAQEAYEEDDEMPGGAQRVQCAQQ

SEQ ID NO: 66073 - protein, 213 aa, Zea mays; identical to SEQ ID NO: 40534
  Clone ID: LIB4172-028-H4_FLI.pep

SEQ ID NO: 66074 - protein, 310 aa, Zea mays
  Clone ID: LIB4185-001-F5_FLI.pep
KELPSSNTRRLRHSASQPPPGSSSSRWLPTNQLARSKPNLAATIIYSTGRVSGRPPVLHSHSPIDEGRRGGRGGARARGRDRRKRRRRREAGGRRGGAVRGVQAAAAAVRGRLRLRALLPARGAAQVRQRAQGLRRQQCQQAAPGDPGAAPRGRGEQPGVRGQRARQGPGVRLRGRRLVAAAAGGGAAGAAGAGAGRGGPPQDEQRLRPAPPQGGRRGQQQQLRRLAVVHVLAQDGCGSGGGAGRAMQGHYAGAAGAGHGRGPARHGRRRPLLVLLANRAARSTQARLFLADFSRAIESGAVFGSQMVVR

SEQ ID NO: 66075 - protein, 101 aa, Zea mays
  Clone ID: LIB4185-002-D1_FLI.pep
GPSSRPPHRRSLAPRRQENSRMPATPTIIGALLGLGTQMYSNALRKLPYMRHPWEHVLGMGLGAVFVNQLVKFDEKLKEDLDKMLERARLANEQRYIDDDE

SEQ ID NO: 66076 - protein, 274 aa, Zea mays
  Clone ID: LIB4185-002-G10_FLI.pep
SLHNIANMQIILELTRCRGRNSRGGLHKCAPCTAMPNNKIVAANMEEKGAGGKAAVPHDELPRFTIFLIPNRREPPLDLVELVCLHHRISLGNGVPGSSPVVELAVVLVGVAVECAVQVPTPAVESRKSNPLPAGAAPVRPYLPPFGDRRHPLAGSGNISGLLHVHCLQLNLGNSYYRVAASNNRLHDGVAAVHDAVDRGGSQLGLILLRYHLLVALGAHVHGRRAAEEATVIDAEDGSLGGLAPSLLVLHGFLNSDETALFAIPLRRSPRGRR

SEQ ID NO: 66077 - protein, 390 aa, Zea mays
  Clone ID: LIB4185-004-E5_FLI.pep
RLVAMATASAACHGGGIVYYKVLPMSMFLLLLRGLVQPVAAAACSVDAIYSFGDSIADTGNLLREGPVGFFASIGSYPYGQTLRKPTGRCSDGLLIIDYFAMALNLSLVSPYLDKGADFASGANFAVAGATALDRAVLLQSGIMAPPASVPLSSQLDWFKAHLNATACPSLQDCAKKLAGALFLVGEIGGNDYNYGFLQGFRSIEAMKAYVPQVINAIMDVAKEVIELGATQIVIPGNFPIGCSPSYLSLFAASGDLDDRGCLRSYNAFAQHHNEQLQAAIDGLRKANTDVTVVYADYYGAFMHLLDHASLLGFEQGALLQACCGAGGAYNFNMNSMCGAPGTTTCADPARRVSWDGIHLTQQAYRAIALSLLMEGFAQPDDAVQEIWSC

SEQ ID NO: 66078 - protein, 146 aa, Zea mays; identical to SEQ ID NO: 65874
  Clone ID: LIB4185-008-A10_FLI.pep

SEQ ID NO: 66079 - protein, 123 aa, Zea mays
  Clone ID: LIB4185-009-G5_FLI.pep
LYLPTSASKMKLVRFLMKLNNETVTIELKNGTVVHGTITGVDISMNTHLKTVKLTLKGKNPVTLDHLSVRGNNIRYYILPDSLNLETLLVEETPRVKPKKPTSGKPLGRGRGRGRGRGRGRGR

SEQ ID NO: 66080 - protein, 147 aa, Zea mays
  Clone ID: LIB4185-010-G6_FLI.pep
DVCRQCSCSSSSFPAAARAWVSVSSKRRPVRGAIIMAAVETVVLKVAMSCEGCAGAVRRVLSKMEGVETFDIDLKEQKVTVKGNVKPEDVFQTVSKSGKRTSYWEGEATAPDAAAAPEAEAAPSTAAEAPPPAAPAAPEITPAKADA

SEQ ID NO: 66081 - protein, 153 aa, Zea mays
  Clone ID: LIB4185-015-B1_FLI.pep
KGPPPPPYYVMGLPESYYNRLFPRQTVHLFHSSYCLHWRSQEPEGLEAWRKPCLNEDNIYIARSRTTTPSVAKLFQEQFQKDFSLFLKLRHEELVHGGRMVLVFLGRKNEDAYSGDLNQLFALVATALQSLVLKVSYISCIYMYVNFSCNFFA

SEQ ID NO: 66082 - protein, 124 aa, Zea mays; identical to SEQ ID NO: 41198
  Clone ID: LIB4185-015-E6_FLI.pep

SEQ ID NO: 66083 - protein, 218 aa, Zea mays
  Clone ID: LIB4185-016-E2_FLI.pep
YCVIDNMVKHNIRPICSVNKHGSTTKQKYSTTLSMKLTSSNTSVLDLLLGPQLVAVTTLLLAAVDSPRVQPCIAFAADHLVLVVLASERLQRGLNDATAEPEHEVERRLLLDVIVRKGAAILQLLPGKDQPLLVRRDPFLVLDLGLDIVDGVAALDLEGDGLPCQRLHEDLHLVGPGRSPGCCDCCDGGFSSPRNRTAAAARAVFLYVVAEAVLGLVE

SEQ ID NO: 66084 - protein, 279 aa, Zea mays; identical to SEQ ID NO: 37620
  Clone ID: LIB4185-019-A4_FLI.pep

SEQ ID NO: 66085 - protein, 255 aa, Zea mays
  Clone ID: LIB4185-020-G3_FLI.pep
MVSLLPRAPSLAFLAKSASSQRPPAPSMSSPFSAASVAAGSEAAAGTRKLPVLLFDVMDTLVRDPFYHHIPGFFQMSMKELLEAKHPTAWSEFEKGLIDENELAKKFFKDGRSFDLQGLKECMVRAYEYIDGVEDILCCLKKNNYEMHAFTNYPVWYQLIEDKLKLSKYLSWTFCSCRTGKRKPSPEFYLQAADQLNVDPASCVFIDDRMINIEAALSVGMVGLQFKSAEALQKDLCALGVELSPLVCEGEAQVQ

SEQ ID NO: 66086 - protein, 227 aa, Zea mays
  Clone ID: LIB4185-021-H10_FLI.pep
RQRHPSRQKPRRPRNLGTVAPLSLSLKSCCWSPLPSLRPPTMDEAQVVESKDGTISVASAFAGYQEAVQDRDHKFLTKAVEEAYRGVDCGDGGPFGAVVVCNDEVVVSCHNMVLKHTDPTAHAEVTAIREACKKLGKIELSDCEIYASCEPCPMCFGAVHLSRIKRLVYGAKAEAAIAIGFDDFIADALRGTGFYQKANLEIKKADGNGALIAEQVFEKTKEKFQMY

SEQ ID NO: 66087 - protein, 215 aa, Zea mays
  Clone ID: LIB4185-026-B6_FLI.pep
PKQSSQQMAVPGGRNGLRDEDDDMAQHAEAFGGVSDDEDVPPHLRALANAAQSGDVTALVAALDNHDGSIDVPVEDGDTLLHLACLYGHLPCVQLLLERGASLECQDEEGAIPLHDACAGGFTELVQYILNFAANKDGCVVRMLNTIDSEGDTPLHHAARGEHLDVVKLLLQAGASPKKENTYGQTPADMADQDTEVRTLLTAKQIEASTHMSDD

SEQ ID NO: 66088 - protein, 183 aa, Zea mays
  Clone ID: LIB4185-035-C11_FLI.pep
QPHPAAAGENQRHLRLGRPPPEKCAVAKMQIFVKTLTGKTITLEVESSDTIDNVKAKIQDKEGIPPDQQRLIFAGKQLEDGRTLADYNIQKESTLHLVLRLRGGAKKRKKKTYTKPKKIKHKHKKVKLAVLQFYKVDDATGKVTRLRKECPNAECGAGVFMANHFDRHYCGKCGLTYVYNQQA

SEQ ID NO: 66089 - protein, 277 aa, Zea mays
  Clone ID: LIB4185-035-C3_FLI.pep
ETEEACDPLHSLHPVHHSLVQEVTHQTGKGKHHQRRRERTPSLSSRTARSYPVSPFSGLGESEMASSASRFIKCVTVGDGAVGKTCMLICYTSNKFPTDYIPTVFDNFSANVVVDGTTVNLGLWDTAGQEDYNRLRPLSYRGADVFVLAFSLVSRASYENIMKKWIPELQHYARGVPVVLVGTKFDLREDKHYLMDHPGLVPVTTAQGEELRRQIGAMYYIECSSKTQQNVKAVFDAAIKVVIQPPTKLREKKKKKSRKGCSMVNILSGRKMLCFKS

SEQ ID NO: 66090 - protein, 276 aa, Zea mays
  Clone ID: LIB4185-036-A11_FLI.pep
GERPQQTRDRRERASKPSIVTSLCFSLSSLLVFCKKPVTVSVSLIPFHHSAGLPLPPLVLAMASSASRFIKCVTVGDGAVGKTCMLICYTSNKFPTDYIPTVFDNFSANVVVDGTTVNLGLWDTAGQEDYNRLRPLSYRGADVFVLAFSLVSRASYENVMKKWLPELQHYAPGVPIVLAGTKLDLREDRHYLVDHPGAVPVTTAQGEELRKHIGATCYIECSSKTQQNVKAVFDAAIKVVIRPPTKQRERKKKKERRGCSIFCSRIMHARRLGCFK

SEQ ID NO: 66091 - protein, 162 aa, Zea mays
  Clone ID: LIB4185-040-F3_FLI.pep
ACISKCYHAYQLNGTRDTSTRAQLAMATGNSSRGIQVPIVISRHNTAQHTQGLYFLSSTDLCYKRASVVGAGSIAGIGLHHERRVVEVAVPRVPAIGGIVEVHGDGGARHQVVRVVARPALLDHAAAHLGARVVEVQRQDIVGRRRLGNAPRFLCSSSSNTS

SEQ ID NO: 66092 - protein, 252 aa, Zea mays
  Clone ID: LIB4185-040-F6_FLI.pep
PLVGSRKKKTDGNAHAIYVHRRRPAIARSPLKTALVILARRRRRTLLRSPPPIIAGTPRRPPRPIRPRPRPPAAAGAGEETQDSQTAPTILSKKKKRPRVERWVYYLQERVGRAGRRRVEDGEREVLLDDADVEVDDAGGGDVDLDVVDGEPHEEVLRGDAGDVGDLAGADDPGDGGVVAEADLEARRAGRVQPGLERPRGGVVPERRDPRRQQAPRQLVRAEHLVRRLRRRRRRRRHGAVRGQRRRQGHRH

SEQ ID NO: 66093 - protein, 140 aa, Zea mays
  Clone ID: LIB4185-045-F11_FLI.pep
SSVLSNMRIFRGLGLEYDMSGLTGNTMDSHRLITHAGHQGYDKQNALVEELFLNYHCQGKYIGDKQVLLDAARKVGIEGAEELLEDPTKGVHEVQEELKKYSSDISGVPHFVINNKYQLSGGQPPNEFMRAFEMAAKDGA

SEQ ID NO: 66094 - protein, 212 aa, Zea mays
  Clone ID: LIB4185-050-A1_FLI.pep
HSCYRQIDNIHRSQQAAAPNYSKRREHRRESCKRRPRSLGRGELGDGLGALGDGVLGELPGKDEAHGGLDLTGGDGRLLVIARELGGLSSELLEDIVNEGVHDGHGLGGDANVRVHLLQHLEDVDLVGLHALLALLLAPLALAAFLGSGLASGDPLLRLRLLPGGRLLGRGLLLRRLLRRGFLLGLGRHRCGASWGFGCEGGIGWEEMRGDV

SEQ ID NO: 66095 - protein, 88 aa, Zea mays
  Clone ID: LIB4302-011-C1_FLI.pep
HFPSAMGKEKTHINIVVIGHVDSGKSTTTGHLIYKLGGIDKRVIERFEKEAAEMNKRSFKYAWVLDKLKAERERGITIDIALWKFETT

SEQ ID NO: 66096 - protein, 91 aa, Zea mays
  Clone ID: LIB4302-016-D8_FLI.pep
SSLTPTTNMGASLLGAEITTFLAPPFRCAAALSLSVKTPVDSTTYSAPASPHGISSGFLMPKTVTGFSPKRSVLESLRVMSLCFHWPCTVS

SEQ ID NO: 66097 - protein, 212 aa, Zea mays
  Clone ID: LIB4303-001-C10_FLI.pep
IRQEELQCTPIENKLRDQIRGNATLEKSLTCQHSYFTVQSNPIEPAVLTDPKKHDYRTTKQPATTTTTIRTQEGSQTSTTDPRHLDRQLPTPNLAAEAIESAALAFEGVHDVHSGDGFATGVLRVGHSVADDILEKDLEHAAGLLVDQPGDALHATPPRQPPDRRLRDPLDVVAQHLPVTLRAAGCRSPPLRTGGWMVLRSCEEETSAEVPA

SEQ ID NO: 66098 - protein, 257 aa, Zea mays
  Clone ID: LIB4315-005-C7_FLI.pep
RHCDFARDKTSQITPARSPMASSCQNVEIPGKPTETGTALLETATGTIQGFAPLSQIHQHLCAFHFYADDMGRQVEAHHFCAHLNEDVRQCLIFDGPGAGARLIGVEYIVSETVFLTLPDAEKPLWHTHEFEVKGGVLFMPGVPGVVERRDLEKVCKTYGKTIHFWQVDRGDALPLGLPQIMMVLTREGQLRQDLADCVEKKFGVSFQKERENRAYMSGPEHGIHPLANATGKGLRTEIREVDLPASTTAGAGRVFT

SEQ ID NO: 66099 - protein, 189 aa, Zea mays; identical to SEQ ID NO: 62612
  Clone ID: LIB4315-012-E11_FLI.pep

SEQ ID NO: 66100 - protein, 153 aa, Zea mays
  Clone ID: LIB4315-023-C1_FLI.pep
QAAADTHLILEFRVEGPFYLAHAVALCLAIFPLSSSLAAPTTLSTTFPSFMSTNVGIASTLNSSAIDFISSTSTFRNITFGSFLAISSKIGEMKRHGPHHVAVKSITTRFVLLPASSILVLHCSWLWIAITFPSSAMSLASFSRLRASSVLLL

SEQ ID NO: 66101 - protein, 176 aa, Zea mays; identical to SEQ ID NO: 37650
  Clone ID: LIB4315-023-E10_FLI.pep

SEQ ID NO: 66102 - protein, 176 aa, Zea mays
  Clone ID: LIB4315-023-B9_FLI.pep
KSPKPPTPFLSPSAAAAHAGNKRHGRLHLCVPQQRRRVDRQAALRRDRGFRRYPIRAAAPPRRCRLRGRLCLRRPVVLLHGHPQLRRVPGDRRCCRWWCNDGERRWRRRCCCIWWCCCRGSQGGEEGRGEGRERRRHGILPVRLELCVSSGSQKWWFGPVAVVNFAVLSVNLKNSW

SEQ ID NO: 66103 - protein, 416 aa, Zea mays
  Clone ID: LIB4315-024-C10_FLI.pep
ENQIPRINQFKIFNRAPPEWSGKNFVERLGGRRHGRGGDRLLLLELELLLHQLVLGLLLALGEVEVALHLAAVHLGEGDGFFQYGLLPLPHRQRPHPRVRRRVLERRDRQPAALPVHHRLVVRVLEPPVAHEVAVVAEVDDEGAGDGLDGNPGLAAVAGGLKAADEVLQEEGDGAGVGVALEAQGEVRLGAARVEVDHHLLVHVNARLGERLRFQAHRLRQHAQQLARQSHESLAVSLHHRAPPRRLLRPPPVVPRLHRVREVGHYLPPVLHRLTLQVAGDDEAALLAPGHVVPELVLGGQREELAREACHVGDEVGVDAVVDHLEDAPSLAGRRHAVPDLGPARAVDAVERDHRHRIAEAVVRHLGPLVLVPHEGRAQRGLPPRRRREERLVAHRRHRSALRGSSACVAAGVCLV

SEQ ID NO: 66104 - protein, 502 aa, Zea mays
  Clone ID: LIB4315-042-A12_FLI.pep
MERKHVCHCHAMPSTYLGEEVYPDGPELLADLWVSERVGESPHESVLSVGVPGPVPLPWLLEVHGAVVVVVVVRAARRVDGQHQVVWSQPVALRVGVGEHPALQHLVVRVVDPWHHQPRAERQLLVLVEEVVHVPVQHQPPHGAERQQVLRPRLGVVQRVEVVLLLRVRLHHLHVQRPLREAPRRDGVVQVLRRVAVVPSPDQRRLLVRQDAPHAARRLPVELDVLRLPRRAHERVRVHAEPFHVAVVGRHAHVVEEEEEGVQALGEVRQEVEHAPVLLHVGPRVGLERVDHVGELDAVADEEDGEVVAQQVPVALAGVELHGEPARVADRLRGPPLVDHRREAHDHGRPHAGRAQEVGARQRRHVVGALEEALGGGPARVHHALRDALAREVRHLLDQVVVLQQDGTARPHSQRLVVVPHRSASVRRRHRRVVATGRTELQRKAKSTQHNTKSYSATNLKSKIDMTEEEEEDYTELTLVGSIVIQLASYLLNQSSVQCWSG

SEQ ID NO: 66105 - protein, 419 aa, Zea mays
  Clone ID: LIB4315-045-D9_FLI.pep
RAPRPRRRRRRPPPPTADYRRRRNAAGSVSTAISRLTPPRSEAAAMAIPLVLVVLPLGLLFLLSGLIVNTIQAILFVTIRPFSKSLYRRINRFLAELLWLQLVWVVDWWAGVKVQLHADEETYRSMGKEHALVISNHRSDIDWLIGWILAQRSGCLGSTLAVMKKSSKFLPVIGWSMWFAEYLFLERSWAKDEKTLKWGLQRLKDFPRPFWLALFVEGTRFTPAKLLAAQEYAASQGLPAPRNVLIPRTKGFVSAVSIMRDFVPAIYDTTVIVPKDSPQPTMLRILKGQSSVIHVRMKRHAMSEMPKSDDDVSKWCKDIFVTKDALLDKHLATGTFDEEIRPIGRPVKSLLVTLFWSCLLLFGAIEFFKWTQLLSTWRGVAFTAAGMALVTGVMHVFVMFSQAERSSSAKAARNRVKKE

SEQ ID NO: 66106 - protein, 452 aa, Zea mays; identical to SEQ ID NO: 44998
  Clone ID: LIB4569-006-F10_FLI.pep

SEQ ID NO: 66107 - protein, 452 aa, Zea mays
  Clone ID: LIB4569-007-H5_FLI.pep
ASPSTMGKEKSHINIVVIGHVDSGKSTTTGHLIYKLGGIDKRVIERFEKEAAEMNKRSFKYAWVLDKLKAERERGITIDIALWKFETTKYYCTVIDAPGHRDFIKNMITGTSQADCAVLIIDSTTGGFEAGISKDGQTREHALLAFTLGVKQMICCCNKMDATTPKYSKARYDEIVKEVSSYLKKVGYNPDKIAFVPISGFEGDNMIERSTNLDWYKGPTLLEALDQITEPKRPSDKPLRLPLQDVYKIGGIGTVPVGRVETGVIKPGMVVTFGPTGLTTEVKSVEMHHEALQEALPGDNVGFNVKNVAVKDLKRGFVASNSKDDPAKEAASFTSQVIIMNHPGQIGNGYAPVLDCHTSHIAVKFAELITKIDRRSGKELEKEPKFLKNGDAGMVKMIPTKPMVVETFSQYPPLGRFAVRDMRQAVAVGVIKSVEKKDPTGAKVTKAAAKKK

SEQ ID NO: 66108 - protein, 452 aa, Zea mays
  Clone ID: LIB4569-008-D12_FLI.pep
ASSSAMGKEKSHINIVVIGHVDSGKSTTTGHLIYKLGGIDKRVIERFEKEAAEMNKRSFKYAWVLDKLKAERERGITIDIALWKFETTKYYCTVIDAPGHRDFIKNMITGTSQADCAVLIIDSTTGGFEAGISKDGQTREHALLAFTLGVKQMICCCNKMDATTPKYSKARYDEIVKEVSFYLKKVGYNPDKIAFVPISGFEGDNMIERSTNLDWYKGPTLLEALDQITEPKRPSDKPLRLPLQDVYKIGGIGTVPVGRVETGVIKPGMVVTFGPTGLTTEVKSVEMHHEALQEALPGDNVGFNVKNVAVKDLKRGFVASNSKDDPAKEAASFTSQVIIMNHPGQIGNGYAPVLDCHTSHIAVKFAELITKIDRRSGKELEKEPKFLKNGDAGMVKMIPTKPMVVETFSQYPPLGRFAVRDMRQTVAVGVIKSVEKKDPTGAKVTKAAAKKK

SEQ ID NO: 66109 - protein, 433 aa, Zea mays
  Clone ID: LIB4569-008-E6_FLI.pep
GTRSTSRRIPSHYHPSRRPPIRSGSSNPGAVMATKRSVGTLGEADLKGKKVFVRADLNVPLDDAQKITDDTRIRASVPTIKFLLEKGAKVILASHLGRPKGVTPKYSLKPLVPRLSELLGVEVVMANDCIGEEVEKLAAALPEGGVLLLENVRFYKEEEKNEPEFAKKLASVADLYVNDAFGTAHRAHASTEGVTKYLKPAVAGFLMQKELDYLVGAVANPKKPFAAIVGGSKVSSKIGVIESLLAKVDILILGGGMIYTFYKAQGYSVGKSLVEEDKLELATSLIEKAKAKGVSLLLPTDIVVADKFAADAESKIVPATAIPDDWMGLDVGPDATKTFNEALDTTKTVIWNGPMGVFEFEKFAAGTEAIAKKLAELTTTKGVTTIIGGGDSVAAVEKAGLADKMSHISTGGGASLELLEGKTLPGVLALDDA

SEQ ID NO: 66110 - protein, 422 aa, Zea mays
  Clone ID: LIB4569-010-E10_FLI.pep
PGSHSPRRASESSEPPARPPPSPPPVPKANSFQVAMADQANQPTVLHKLGGQFHLRSIISEGVRARNICPSVSSYERRFATRNYMTQSLWGPSMSVSGGINVPVMQTPLCANAPAEKGGKNFMIDFMMGGVSAAVSKTAAAPIERVKLLIQNQDEMIKSGRLSEPYKGIVDCFKRTIKDEGFSSLWRGNTANVIRYFPTQALNFAFKDYFKRLFNFKKDRDGYWKWFAGNLASGGAAGASSLFFVYSLDYARTRLANDAKAAKGGGERQFNGLVDVYRKTLKSDGIAGLYRGFNISCVGIIVYRGLYFGLYDSIKPVVLTGNLQDNFFASFALGWLITNGAGLASYPIDTVRRRMMMTSGEAVKYKSSLDAFQQILKKEGPKSLFKGAGANILRAIAGAGVLSGYDQLQILFFGKKYGSGGA

SEQ ID NO: 66111 - protein, 280 aa, Zea mays
  Clone ID: LIB4569-012-D8_FLI.pep
RGRPGFRRRRQQLLLALGGRRERERERERDLVERLVGGPRTKMLAVFSGQVVEVPAELVAAGSRTPSPKTKASQLVGRFLAASEPAVSVQLGDHGHLAYSHTNQALLRPRSFAAKDEVFCLFEGVLDNLGRLSQQHGLSSKGANEVLLVIEAYKTLRDRAPYPASFMLAQLTGSYAFVLFDKSTNSLLVASDPEGRVPLFWGITADGCVAFSDDIDMLKGSCGKSLAPFPQGCFYSNALGGLKCYENPKHKVTAVPADEEEICGATFKVVEGSTVLTALH

SEQ ID NO: 66112 - protein, 164 aa, Zea mays
  Clone ID: LIB4570-002-C8_FLI.pep
HLSLKDIRRPMATLKDAAARKSILATIRLVVPAGAARPAPPVGPALGFYRLNLMAFCKDFNARTQKYKAETPMQVTLTAYKDSTFEFVVKSPSVSWFLKKAAGIETASTRPSHVNVSSLTLRHVYEIAKLKQADPFCKHISLEALCKSIIGTANSMGIAIVKDL

SEQ ID NO: 66113 - protein, 200 aa, Zea mays
  Clone ID: LIB4570-004-A10_FLI.pep
KLNCKMASAELSREENVYMAKLAEQAERYEEMVEFMEKVAKTVDSEKLLESHLVPSSTAPESKVFYLKMKGDYYRYLAEFKTGAERKDAAENTMVAYKAAQDIALAELAPTHPIRLGLALNFSVFYYEILNSPDRACSLAKQAFDEAISELDTLSEESYKDSTLIMQLLRDNLTLWTSDISEDPAEEIREAPKHDSSEGQ

SEQ ID NO: 66114 - protein, 256 aa, Zea mays
  Clone ID: LIB4570-005-H11_FLI.pep
IEAGRDSVVVVSSFCLLWGEGERESERDLVERLARWSSNEDVGGVQRAGGGGAGGAGGGGQPDAVAQDEGVAAGGALPGRLRAGRVRAARRPRPPRLLPHQPGAPPPQVVRGEGRGVLPVRGGAGQPGSSEPAARAVKQGRQRGAPRHRGLQDAARPRPTRPASCSPSSPAPTPSSSSTSPPTPCSSHPTPRAGCRSSGGSPPTAASPSPTTSTCSKAHAASRSRRSRKAASTPTPSEGSSATRTPLSRWWKGLLS

SEQ ID NO: 66115 - protein, 485 aa, Zea mays
  Clone ID: LIB4570-006-E1_FLI.pep
EEEMALTRIGLAGLAVMGQNLALNIAEKGFPISVYNRTTSKVDETVQRAKAEGNLPVYGFHDPASFVNSIQKPRVVIMLVKAGAPVDQTIATLAAHLEQGDCIIDGGNEWYENTERREKAMEERGVLYLGMGVSGGEEGARNGPSLMPGGSFDAYKYVEDIVLKVAAQVPDSGPCVTYIGKGGSGNFVKMVHNGIEYGDMQLISEAYDVLKSVGKLTNSELHQVFSEWNKGELLSFLIEITADIFGIKDEHGDGYLVDKVLDKTGMKGTGKWTVQQAAELSVAAPTIEASLDSRFLSGLKDERVEASKIFQGDYYSTGSPVDRAQLVEDVRQALYASKICSYAQGMNIIKAKSAEKGWGLNLGELARIWKGGCIIRAIFLDRIKKAYDRNPGLASLLVDPEFAQEIMDRQAAWRRVVCLAINNGVSTPGMSASLAYFDSYRRDRLPANLVQAQRDYFGAHTYERVDMPGSFHTEWFKIARNISNN

SEQ ID NO: 66116 - protein, 563 aa, Zea mays
  Clone ID: LIB4570-007-A5_FLI.pep
GKHPLFLSSWCHCIGIFVFVVDMGMLASALSSFNKKSTLLQMLTSLAKTVGRIPASWGRHAWSIGSEDPRRAVHALKAGTALTLVSLLYILEPFFQGIGKNAMWAVMTVVVVLEFTAGATICKGLNRGLGTVLAGCLALLIELVAAGTGKVLRAFIVGASVFIVGFAATYTRFFPAIKKSYDYGVLIFLLTFNLITVSSYRQQDVVSLTRDRLSTIAIGCAICLFMSLLVLPNWSGEDLHSSTVGKFQGLATSIEACVNEYFRDQDEGDDVLGKQEARASIQIGYRAVLDSKSSDETLAHYASWEPRHSMHCYSYPWQKYVKLGSVLRHFAYTVAALHGCLESEVQTPPSVRSLFRGPCTRVAREVAKVLQELAASIKHHRRCAPDVLSDHLHEALQDLNSAIRSQPRLFLGSKHACAANKRVLLMELNSGSGKLSASRAALRSFKTDATALSETRNARSDQPPPPSDRSERSGGLLRPTLSKIAITSLEFSEALPFAAFASPLVEMVVRLELVIEEVKNLERVANFRELATGHNHLIVDLGSKEKTRNSNAAALHPVSAAAE

SEQ ID NO: 66117 - protein, 116 aa, Zea mays
  Clone ID: LIB4570-008-F7_FLI.pep
NGFVSSDEEASNTGCRYNECLCSVVEIRLSPRKDAAANQRGNCNHSTSYCGVLCSQQYSFSDGGVGLLLLGGPNQETPASHALSLSLSLSLSLSLSTLLASSGRRSVGGSSPRPAS

SEQ ID NO: 66118 - protein, 420 aa, Zea mays
  Clone ID: LIB4570-010-H1_FLI.pep
RDSPRRASESSEPPARPPPSPPPVPKANSFQVAMADQANQPTVLHKLGGQFHLRSIISEGVRARNICPSVSSYERRFATRNYMTQSLWGPSMSVSGGINVPVMQTPLCANAPAEKGGKNFMIDFMMGGVSAAVSKTAAAPIERVKLLIQNQDEMIKSGRLSEPYKGIVDCFKRTIKDEGFSSLWRGNTANVIRYFPTQALIFAFKDYFKRLFNFKKDRDGYWKWFAGNLASGGAAGASSLFFVYSLDYARTRLANDAKAAKGGGERQFNGLVDVYRKTLKSDGIAGLYRGFNISCVGIIVYRGLYFGLYDSIKPVVLTGNLQDNFFASFALGWLITNGAGLASYPIDTVRRRMMMTSGEAVKYKSSLDAFQQILKKEGPKSLFKGAGANILRAIAGAGVLSGYDQLQILFFGKKYGSGGA

SEQ ID NO: 66119 - protein, 305 aa, Zea mays
  Clone ID: LIB4571-001-D11_FLI.pep
LEAGRDSSPSAAVAAQFPHPIPTLRSTDPYMMGEAKENDVYEEELLDYEEDDDKTVDGSAAKPTGEVAKKGYVGIHSSGFRDFLLKPELLRAIQDCGFEHPSEVQHECIPQAILGMDVICQAKSGMGKTAVFVLSSLQQIDPVAGQVAALVLCHTRELAYQICHEFERFSKYLTEVKVAVFYGGVHIRKHKDLLKNECPHIVVGTPGRILALARDKDLSLKNVRHFILDECDKMLESLDMRRDVQEIFKMTPHDKQVMMFSATLSKEIRPVCKKFMQDVMPCSLLQLSFPKSSYFIPIAPVVVLL

SEQ ID NO: 66120 - protein, 365 aa, Zea mays
  Clone ID: LIB4571-002-C12_FLI.pep
PSMKDSQDIQSTTELQSPVQGTNEVQSQQPNSMAADAPAGNSGSLSVASNDNKKVSREDIELVQNLIERCLQLYMNKGEVVRTLSTRARIEPGFTTLVWQKLEEENSEFFRAYYIRLKLKRQIILFNHLLQRQYNLMKYPAPPNIPLAPIQNGIHHMPVSNLPMGYPVLQQPIMPAPGQPHMDPMACGLSSGHVVNGIPAPGSYHPMRMNSGNDMVLDNGAPEAPHAGATGSAMSSEMAVSPSSAASSNHAPFTPSDIPGMTMDVSALDSAFGCDVGNPESLQLGPDGSSRDSIRSLGQLWNFSLSDLTADLTSLGADLDVLENYTGTPFLPSDSDILLDSPDQDDIVEYFADAINGSPSDEEKP

SEQ ID NO: 66121 - protein, 241 aa, Zea mays
  Clone ID: LIB4571-003-A6_FLI.pep
KDNTVPMASLDAVRGDLALLILYLNKAEARDKICRAIQYGSKFISNGEPGPAQNVDKSTSLARKVFRLCKFVNDLHALISPPAKGTPLPLILLGKSKNAMLSTFLFLDQIVWAGRTGIYKNKERAEFLGRIAFYCFLGSNTCTAIIELAELQRLSTSMKKLEKELKHQELYKNEQYRMKLHKSNERLLALVKSSLDIVVAVGLLQLAPKKVTPRVTGAFGFASPLIACYQLLPSPPAKQSK

SEQ ID NO: 66122 - protein, 221 aa, Zea mays
  Clone ID: LIB4571-005-A2_FLI.pep
PDMIQWKLLIYVCKEFFPNLSIGFKDPRVRLHVGDAVDFLRNSPEGKYDAIIVDSSDPIGPAQALVEKPFIQTIARALKPGGVLCNLAESMWLHTHLIQDMLAICRQTFKGAVHHAWTSVPTYPSGVIGFLLCAKEGRAVNFLTPVNPIEKIEGTAKAGRELRFYNSEIHRAAFVLPTFVRRELEAYTTPSASAENEKPKESVSEPQKIKILSNNAILTAT

SEQ ID NO: 66123 - protein, 281 aa, Zea mays
  Clone ID: LIB4571-005-C6_FLI.pep
DRRKGKLAASLSRGDGAGGGGVVPADAHHHALLPHRRCRHHRRLHPRRSLICALYVRPLAGPAVQIISPYHLYLNPKLVVQHYEIWRLVTNFLYFRKMDLDFLFHMFFLARYCKLLEENSFRGRTADFFYMLLFGATVLTGIVLIGGMIPYISETFARILFLSNSLTFMMVYVWSKHNPFIHMSFLGLFTFTAAYLPWVLLGFSILVGSSTWVDLLGMIAGHVYYFLEDVYPRMTGRRPLRTPSFIKALFADDNVVVAQPPNAGIGAGARFGAIGVDPQAQ

SEQ ID NO: 66124 - protein, 377 aa, Zea mays
  Clone ID: LIB4571-005-D6_FLI.pep
GMAEEDVQPLVCDNGTGMVKAGFAGDDAPRAVFPSIVGRPRHTGVMVGMGQKDAYVGDEAQSKRGILTLKYPIEHGIVGNWDDMEKIWHHTFYNELRVAPEEHPILLTEAPLNPKANREKMTQIMFETFNCPAMYVAIQAVLSLYASGRTTGIVLDSGDGVSHTVPIYEGYTLPHAILRLDLAGRDLTDNLMKILTERGYSFTTTAEREIVRDIKEKLAYVALDYEQELETARTSSSVEKSYELPDGQVITIGAERFRCPEVLFQPSFIGMESAGIHEATYNSIMKCDVDIRKDLYGNVVLSGGSTMFPGIGDRMSKEITALAPSSMKVKVVAPPERKYSVWIGGSILASLSTFQQMWISKEEYDESGPGIVHMKCF

SEQ ID NO: 66125 - protein, 382 aa, Zea mays
  Clone ID: LIB4571-005-E12_FLI.pep
LEAGRELLKPPTFSVTHELTTPDLPPLAMDLDARHRHTPDSSSSPHAASDMGLPLAGAAYQPYVSELLSFSIERLHKEPELLRVDAERVRRQMQEVAVENYGAFIAASEALSFVRAQLESFDGHLEAMIEEIPNLTSGCTEFVESAQQILEERKLNQTLLANHTTLLDLLEIPPLMDTCIRNGNYDEALDLEAFVSKISKLHPDLPVVQGLAAEVKKTVQSLISQLLQKLRSNIQLPECLRIVAHLRRIGVFSESELRLQFLRCREAWLSGILEDLDQRNVYDYLKGMVTCHRVHLFDVVNQYRAIFNNDKSGNDENSEGGLLFSWAMQQVSNHLATLQVMLPSITEGGSLSNILEQCMYCAMGLGLVGLDFRGLLPPIFEE

SEQ ID NO: 66126 - protein, 244 aa, Zea mays
  Clone ID: LIB4571-006-F10_FLI.pep
SRRFVRVDVTSPPGGQGCLTAVSRRAPFPRRTGRAPDGSGGDDLRGLAGMTGKKRKAEAARLEETDQALYGAFRGAANSLSQLYTLAMGAQKASFNAGERHAMEKLYEWILRQHENGLRLTVADVASRIQLEIQYGGDNASASPRPQYPSQSTAPTVHIPNTSNQQPSPSLFAPGNPGLTQSKNSMVFSNALSSPIRRSLQPYHLEQDGDTGYFVNGASRDMDPTASNDSSMDMHSDSPVHDSY

SEQ ID NO: 66127 - protein, 245 aa, Zea mays
  Clone ID: LIB4571-007-A8_FLI.pep
AVRLCAVAASALSQPAPPSPVRRELNRIESMGSSSNTNTSGGASDKEEKKKEDKIKGKDSSGPSFKENERVLAYHGPLLYEAKVQRIENHEDEWRYFVHYLGWNKNWDEWVANDRLLELTEENVRKQQELDKNQVVDKTMKSGRSTQHKPKVSNADAKADKDDTKSLISVKGKKRKSQLGTEIQDKEKRSSHSLLVLQFPLPLKKQLVDDWEFVTQMGKQAQVASSLAHSEKDFATPFSFRRKTL

SEQ ID NO: 66128 - protein, 367 aa, Zea mays
  Clone ID: LIB4571-007-F10_FLI.pep
STAVARPPPNLLPSCLVLCFFGFQERRPLLLEKQTIGTPSCVFQIRLMAMEGPVLCRPAMQAKSPAAALVNNSLTRFGQLGTISKYRNVSRFISPISQPSTKNIGPCCSFSSSSDGNGYMAGNFSDSDEDYVNSTVLEAVEVRSGSEGYVIKMRDGKNLRCVHNNSQGRNIPESAPQPAIVLRIEDGSETLLPIIVLEMPSVLLMAAIRNVHIARPTIYQVVKEMIDKMGYEVKLVRVNKRIQEAYCAELCLTKIDDSTDSITFDLRPSDAINIAVRCKVPVQVHRSLAYSDGIRPVEPARMAVAAGLSDGLLFTELDRPDGQASVEAQEFGLVKNMLIAAVEEKYKDAASWKDKLMRLRSKRKNWA

SEQ ID NO: 66129 - protein, 295 aa, Zea mays
  Clone ID: LIB4571-010-E10_FLI.pep
SLHNIANMQIILELTRCRGRNSRGGLHKCAPCTAMPNNKIVAANMEEKGAGGKAAVPHDELPRFTIFLIPNRREPPLDLVELVCLHHRISLGNGVPGSSPVVELAVVLVGVAVECAVQVPTPAVESRKSNPLPAGAAPVRPYLPPFGDRRHPLAGSGNISGLLHVHCLQLNLGNSYYRVAASNNRLHDGVAAVHDAVDRGGSQLGLILLRYHLLVALGAHVHGRRAAEEATVIDAEDGSLGGLAPSLPVLHGFLNSDETALFAIPLRRSPRGRRGGEGRGIAGNSVGFEMGPGRP

SEQ ID NO: 66130 - protein, 125 aa, Zea mays
  Clone ID: LIB4572-002-D9_FLI.pep
VEKQSCTLYWIMFRYTVILISSCSALRDRRFPPIQSKELPTLECTVSILTDYEIAEDYLDWEVGKHGLIIEFTAPDSNTKHSATYLPEVAGHEGENFLFHRCDVHLSFLQSSLVSRIIAGDNKKK

SEQ ID NO: 66131 - protein, 298 aa, Zea mays
  Clone ID: LIB4572-006-G9_FLI.pep
VAEGRNRTWIASPVSLGGCNVCPKLLVMSSLDSGSNGLTGYVTLMSLMEELISLEMKAFHVRASARVDKFSKSDIIVSPSILSANFAKLGDQVKAVEVAGCDWIHVDVMDGRFVPNITIGPLVVDALRPVTDLPLDVHLMIVEPEQRVPDFIKAGADIVSVHCEQTSTIHLHRTVNQIKSLGAKAGVVLNPATPLTAIDYVLDVVDLVLIMSVNPGFGGQSFIESQVKKIAELRRLCAEKGVNPWIEVDGGVGPKNAYKVIEAGANAIVAGSAVFGAPDYAEAIKGIKTSQRPLAVAA

SEQ ID NO: 66132 - protein, 263 aa, Zea mays
  Clone ID: LIB4572-007-E9_FLI.pep
CLIDTLSLQFSELLNSCARLLVEDRKMSSLHATRAELGLVVLYLNKAEARDKICRAIQYGSKFVSNGQPGTAQEVDRSTTLARKVFRLLKWVNDLHALISPPAKGTPLTLVLLGKSKNALLSTFLFLDQFVWLGRTGIVKNKEATDRVARLSLYCWMASSACAGLVELGELKRLSRSMRKLARELRDTDKYENEQYQDKMRQSDERLLALVKAAMDVVVAVGLLQLAPKKVTPRVTGAFGFVTSLISCYQQLPSRAPVAKVKV

SEQ ID NO: 66133 - protein, 256 aa, Zea mays
  Clone ID: LIB4572-012-B7_FLI.pep
ELRLARSGNWQVGTREAIRSAKPQQSLMSPPPPSLVVLPLLLPLFLAAVSHATANAAGAGAPPPVPTPWPEQFHAVVFTNLTESGGRLQLIDLYYDWPRGRNLNLIRDQLSSDPLYDVEWTNGTSYFFDSGSCRTMRFPVGILPPDWLAAGAVYLGREHVDGFDCHLWTKVDFVWYYEEVATGRPVRWNFFNGSIHSIYTFFRLMMEHRGFLAIRTRLGCFDLTNACDFVLQFVGMQSKFLGTLPSFVLLMQHYNG

SEQ ID NO: 66134 - protein, 171 aa, Zea mays
  Clone ID: LIB4572-012-C4_FLI.pep
RARHGLPLLCRRHRPFLRRTSASPRRGQKEVLHRARLSPQGHRHRRRGNGCQRPACRRCHGPGGAAGRRRRRARLRAQPVHRQGRRHHHIQEQRRLPAQRRLRRRRGAERRRRHQDLAGGVPQRARRDLLRHPHRAGNLRLLLRAASRSRNGRQDHRQLIKLAIDRYPFMY

SEQ ID NO: 66135 - protein, 373 aa, Zea mays
  Clone ID: LIB4573-001-E9_FLI.pep
RDPKHIPSHPIHYHPSRRPPIRSGSSNPGAVMATKRSVGTLGEADLKGKKVFVRADLNVPLDDAQKITDDTRIRASVPTIKFLLEKGAKVILASHLGRPKGVTPKYSLKPLVPRLSELLGVEVVMANDCIGEEVEKLAAALPEGGVLLLENVRFYKEEEKNEPEFAKKLASVADLYVNDAFGTAHRAHASTEGVTKYLKPAVAGFLMQKELDYLVGAVANPKKPFAAIVGGSKVSSKIGVIESLLAKVDILILGGGMIYTFYKAQGYSVGKSLVEEDKLELATSLIEKAKAKGVSLLLPTDIVVADKFAADAESKIVPATAIPDDWMGLDVGPDATKTFNEALDTTKTVIWNGPMGVFEFEKFAAGTEAMPRS

SEQ ID NO: 66136 - protein, 595 aa, Zea mays
  Clone ID: LIB4573-004-F5_FLI.pep
PCPVPSVSVPIGSTRPSSPINSPSHPSLEGPASSQLPPICLFGFGPIASHPFPLHWSLLPPSTADPVPARGTMAGKGEEVYVAAIDQGTTSTRFIVYDRHAKPVASHQLEFKQHYPEAGWVEHDPMEIIETVKVCMKEAVGKAKDGKHNVVAGLKAIGITNQRETTVMWSKSTGRPLYNAIVWMDARTSPVCRRLENELSGGRTHFVETCGLPISTYFSALKLLWLMENVDAVKDAVRTGDALFGTIDTWLIWNLTGGVAGGQHVTDCSNASRTMLMNLKTLDWDKPTLAVLGVPVEILPKIISNSEKIGVVAKEFPFAGVPISGCLGDQHAAMLGQLCQKGEAKSTYGTGAFILLNTGEEPTQSSHGLLSTIAYKLGPAAPTNYALEGSIAIAGAAVQWLRDSLGIIQSAAEIEKLAETVPDSGGVYFVPAFNGLFAPWWRDDARGICIGITRFTNKGHIARAVLESMCFQVNDVLSSMHKDAGEAGEVKSAEGEFLLRVDGGATVNNLLMQIQADLLGSPVVRPADIETTALGAAYAAGLAAGVWTKEKVFAGLHKENTTVFRPKLDEAHRKKRADSWYKAVSRSFDLADLSL

SEQ ID NO: 66137 - protein, 326 aa, Zea mays
  Clone ID: LIB4573-005-D8_FLI.pep
PPTPSQSVNPQSTHSLRIAGSKFGLGLSIHHSPRKEISVNRISLGKLCVGNMGKPLIYEILEKPASSSVIGICSLIWWLIQKRGIGYADVGLSYEAAVDSGQYWRVITSAFSHVSVVHLVFNMSALWSLGAVEQLGQIGLGVEYYLHYTLVLVVLSGLLVLGFYHVMIQRFKVEYFRRVTAVGYSCVVFGWMTILAAKQPSSKLNIFGVLSLPISFAPFESLIFTSIMVPQASFIGHLSGIIVGYSIAWGLVHGMNNYWAVTMLGWTALVFVLSLKRTGSMELSFIEIEPVTDPSLPSVGVVATRNGRSRTLQMDALSGRRVADIV

SEQ ID NO: 66138 - protein, 393 aa, Zea mays
  Clone ID: LIB4573-005-H11_FLI.pep
GFRWSLRRRRAPSSVEMADGEDIQPLVCDNGTGMVKAGFAGDDAPRAVFPSIVGRPRHTGVMVGMGQRDAYVGDEAQSKRGILTLKYPIEHGIVSNWDDMEKIWHHTFYNELRVAPEEHPVLLTEAPLNPKANREKMTQIMFETFNVPAMYVAIQAVLSLYASGRTTGIVLDSGDGVSHTVPIYEGYALPHAILRLDLAGRDLTDSLMKILTERGYSFTTSAEREIVRDIKEKLAYIALDYEQELETAKNSSSVEKSYELPDGQVITIGAERFRCPEVLFQPSMIGMEAAGIHETTYNSIMKCDVDIRKDLYGNIVLSGGSTMFPGIADRMSKEITSLAPSSMKIKVVAPPERKYSVWIGGSILASLSTFQQMWISKEEYDESGPAIVHRKCF

SEQ ID NO: 66139 - protein, 281 aa, Zea mays; identical to SEQ ID NO: 59202
  Clone ID: LIB4573-008-D1_FLI.pep

SEQ ID NO: 66140 - protein, 576 aa, Zea mays
  Clone ID: LIB4573-008-E4_FLI.pep
GSLCSFETETPQHASLSADLAAAEMLRRGVLLLAAILIAVAHSPLAYASEAEHKYKTEEPVKLWVNKVLGGNELIDSQIDIKFIKNVDKGAICTIELDVQKVQQFANAIENSYWFELFIDDLPLWGFVGETDKNNEKKHYLYTHKNIVVKYNGNRIIHVNLTQESPKLLEAGKKLDMTYSVKWVQTNVAFARRFEVYLDYPFFEHQIHWFSIFNSFMMVIFLTGLVSMILMRTLRNDYAKYAREDDDLESLERDVNEESGWKLVHGDVFRPPRGQVFLSALVGIGTQLAALILLVIVLAIVVMLYVGRGAIITTFIVCYALTSFISGYVSGGLYSRNGGKNWIKAMILTASLFPFLCFSIGLLLNTIAIFYRSLAAIPFGTMVVMFILWAFISFPLVLLGTVVGRNWSGAPNNPCRVKTIPRPIPEKKWYLTPSVISLMGGLLPFGSIFIEMYFVFTSFWNYKVYYVYGFMLLVFVILIIVTVCVTIVGTYFLLNAENYHWQWTSFFSAASTALYVYLYSIYYYHVKTKMSGFFQTSFYFGYTLMFCLGLGILCGAVGYLGSTLFVRRIYRNIKCD

SEQ ID NO: 66141 - protein, 452 aa, Zea mays
  Clone ID: LIB4573-008-H3_FLI.pep
ASPSTMGKEKSHINIVAIGHVDSGKSTTTGHLIYKLGGIDKRVIERFEKEAAEMNKRSFKYAWVLDKLKAERERGITIDIALWKFETTKYYCTVIDAPGHRDFIKNMITGTSQADCAVLIIDSTTGGFEAGISKDGQTREHALLAFTLGVKQMICCCNKMDATTPKYSKARYDEIVKEVSSYLKKVGYNPDKIAFVPISGFEGDNMIERSTNLDWYKGLTLLEALDQITEPKRPSDKPLRLPLQDVYKIGGIGTVPVGRVETGVIKPGMVVTFGPTGLTTEVKSVEMHHEALQEALPGDNVGFNVKNVAVKDLKRGFVASNSKDDPAKEAASFTSQVIIMNHPGQIGNGYAPVLDCHTSHIAVKFAELITKIDRRSGKELEKEPKFLKNGDAGMVKMIPTKPMVVETFSQYPPLGRFAVRDMRQTVAVGVIKSVEKKDPTGAKVTKAAAKKK

SEQ ID NO: 66142 - protein, 329 aa, Zea mays
  Clone ID: LIB4573-009-G10_FLI.pep
SRPARTGLRPVPPPASPKGSTAEPPLAFPAARPDRTAGEAAAPPDLASASPPRPDQRPPSEDAGRRLRIPERALGISYQDTITNFRLWKIFPSVFAFQSTPELMFGLYLLYYFRVFERQIGSNKYSVFCLFTITASSLLEILSLVILKDTNYISTLASGPYGLIFASFVPFFLDIPITSRFRIFGLNFSDKSFIYLAGFQLLLSSWKRSLIPGIFGLVAGSLYRLNVLGIRKMKLPQVISSFFARYFAPSPGSTSRPSRSLVGNTPSHRGRAVQNQPSTGFAPIMEPPESSVAMLVSMGFDGNNARQALVRARNDINVATNILLEAQSH

SEQ ID NO: 66143 - protein, 110 aa, Zea mays
  Clone ID: LIB4573-011-G3_FLI.pep
KMNGSSGSQGHHVSGEKKQVCHVSRPILNNGPKHRPLTPMRRCRGVACVVIILSTAFLLVVYLAPITTFAVRLFSVHYSRKATSFLFGMWLSLWPFLFEKINKTKVVFSG

SEQ ID NO: 66144 - protein, 162 aa, Zea mays
  Clone ID: LIB4574-001-H8_FLI.pep
QIHVTWKLQVSHDPQILLMKAHAATSSIGSATVIIAMLEKTGTLKIASVGDCGLKVIRKGQVMFSISPQEHYFDCPYQISSEAEGQTYKDALVCSVNLMEGDIIVSGSDGLFDNIFDQEIVSIISESPSVDEAAKALAELARENTRWMSDSIHPTQWRPGVG

SEQ ID NO: 66145 - protein, 211 aa, Zea mays
  Clone ID: LIB4574-006-C12_FLI.pep
GKILPRVSLICMKQSIVILLLDLANMEISLNQWKDLTYDISRKIMRGIALALGGAIDAFEGDTAGDPFWVLRLIGYPVDIPEEQRTDTGCGAHTDYGLLTLVNQDDDICALEVQNRSGEWIYATPIPGTFVCNIGDMLKVWTNGIYQPTLHRVVNNSQHYRVSVAFFYESNFDAAVEPVEFCREKTGGAAKYEKVVYGEHLVQKVLTNFVM

SEQ ID NO: 66146 - protein, 420 aa, Zea mays
  Clone ID: LIB4574-006-D10_FLI.pep
RDSPRRASESSEPPARPPPSPPPVPKANSFQVAMADQANQPTVLHKLGGQFHLRSIISEGVRARNICPSVSSYERRFATRNYMTQSLWGPSMSVSGGINVPVMQTPLCANAPAEKGGKNFMIDFMMGGVSAAVSKTAAAPIERVKLLIQNQDEMIKSGRLSEPYKGIVDCFKRTIKDEGFSSLWRGNTANVIRYFPTQALNFAFKDYFKRLFNFKKDRDGYWKWFAGNLASGGAAGASSLFFVYSLDYARTRLANDAKAAKGGGERQFNGLVDVYRKTLKSDGIAGLYRGFNISCVGIIVYRGLYFGLYDSIKPVVLTGNLQDNFFASFALGWLITNGAGLASYPIDTVRRRMMMTSGEAVKYKSSLDAFQQILKKEGPKSLFKGAGANILRAIAGAGVLSGYDQLQILFFGKKYGSGGA

SEQ ID NO: 66147 - protein, 321 aa, Zea mays
  Clone ID: LIB4574-008-D8_FLI.pep
SLHTVLLAINTSVSTSCREGVGRRNRATGAMGTVLDSHFLALTAIVTVGYQLLFFIITALLRFDKVTDFAGSTNFIIIAILTLALKGAWHFRQIVLTVLVTIWGLRLGLFLLMRILQWGEDRRFDKMRDNLGKLAVFWIFQAVWVWSVSLPVTVVNASDRNPSIEARDIIGWIIWLVGICVEATADQQKLVLKNSPSNRGKWCDAGLWKYSRHPNYFGEIFLWWGVFVASTPVISDAEWLVILGPIFLTLLLLFVSGIPLLESSADKRYGRLEEYRAYKNTTSPLIPLPPAVYGSLPAWFKVAFLLELPLYNPGPGGDPIS

SEQ ID NO: 66148 - protein, 383 aa, Zea mays
  Clone ID: LIB4574-012-F10_FLI.pep
ECPSPAPPRPKQTRIRPTNRLPRSAAMASSQANLDKMQLRQGYRNVWHTDMTNAIQADFPYCCLALWCGPCVSYMLRKRALYNDMSRYVCCAGYMPCSGKCGESRCPEFCLATEVFLCFGNSAASTRFLLQDEFNIQTTQCDNCIIGFMLCLQQVACIFSIVAAIVGSEELSEASQILNCLSDLVYWTVCACMQTQHKVEMDKRDGKFSPQPMAVPPVQQMTRIDQPMPPPAGYAPQPAYGQPYGGYPSPPGQGYPPPPGQGYPPAGYSQGGAYPPPAQGYPQGGGYPPPGQGYPQGQGGAYPPPGSYPPQGSYPPAEGSYPAQGSYHPAQGSYPAQGSYSPAQGPYPAQGSYPPPPAQGSYPPAQGSYPAQGSYPPQAYPGK

SEQ ID NO: 66149 - protein, 565 aa, Zea mays
  Clone ID: LIB4602-003-F4_FLI.pep
RGRAPSSMSLAGSALEAALLAVGRGLDAAGDHRLLYCKGDGRLVALEDRARDLPLPDGGVLPSVPHDVEVEQCRRDLERIRPFPSGSGPSSAAADGPFVCSFDKMAEYFNRKSCLSETVPLGSFNSLFSFTGSWKNDAATTKALAIDGYSLPLFRVKIRNSELTLLESVKRRIPNVWDPSALASFIENYGTHIIISVTVGGKDEVYIKQHSLSQLSELEFKNYAREIGRERFADVENKSNASSINYSEKDMTVIFRRRGGCDLVQSFSDWRGTVASAPDVIGITFLSIVSLVDDIPGKKHLARAVELYLTYKPPIEELQYFLDFRVPLVWAPAPPGIAGHHRKEPVCPSLQFSLMGPKLFISTEQISVGRRPVVGLKLILEGAKQNRLAIHLQHLGSLPKIFLPHWDSYITIGPPKWQGPEEQDSRWFEPIKWKNFAHVSTAPIEYTETNITDLSGVYIVTGAQLGVWDFGAKSVLHLKLLFSRVPGCTIRRSVWDHSPSSSSVHRTDESSSSSSDNAKLLKIVDLTETFKGPQDAPGHWLITGAKLGVEKGRIVVRAKYSLLNY

SEQ ID NO: 66150 - protein, 344 aa, Zea mays; identical to SEQ ID NO: 51046
  Clone ID: LIB4602-007-C6_FLI.pep

SEQ ID NO: 66151 - protein, 496 aa, Zea mays
  Clone ID: LIB4602-007-C9_FLI.pep
PCSSSFSVMLRLKALTSLLLLLLLALCSGVHLCDARSRTTRGGSGAAPSASAAAIGRKGKARSSGSSHRQSGEGSRSPTEGDPVQGDGSQAPAQDTVFSVLEFGAKGDGVTDDTQAFEAAWAAACKVEASTVLVPSGLEFVVGPISFSGPYCKPNILFQLDGTILAQTSARAWGSAGLLQWLEFTKLTGIAVQGSGVINGRGQDWWTYADPNDADDESVEMLLPQTKPTALRFYGSSNVTVAGITIVNSSQCHLKFDSCEGVMVHDLTVSSPEDSPNTDGIHLQNSRGVDIHHATLACGDDCISIQTGCSDVNIHSVNCGPGHGISIGGLGRFNTKACVSNVTVRDVKMFRTTTGVRIKTWQGGSGLVQGVRFSNIQVTEVQTPIMIDQFYCDRATCRNQTSAVAVSGVQYEDVRGTFTVRPAHLACSDSSPCSGITLAGIQLQPLPLPQHRRLSYDPFCWQAFGELYTPTVPPIPCLQIGRPAAGNSVLSDGDLC

SEQ ID NO: 66152 - protein, 371 aa, Zea mays
  Clone ID: LIB4602-009-A7_FLI.pep
LLSSIRSSLPLLPGSPSPPSLHVPFHARGGAVGTTTSTSIRAHLAVVLLLLLPLLPGRALSCSSSSCCWCQGREGGAEVALMGLAGDGSADTANLSNSENGRFSYGVASSPGKRASMEDFYEARIDDVDGEKVGMFGVYDGHGGVRAAEYVKQHLFSNLIKHPKFITDTKAAIAETYNRTDSEFLKADSTQTRDAGSTASTAIIVGDRLLVANVGDSRAVISKGGQAIAVSRDHKPDQTDERQRIEDAGGFVMWAGTWRVGGVLAVSRAFGDKLLKPYVVADPEIKEEVVDSSLEFLILASDGLWDVVTNEEAVAMVKPIQDPQEAANKLLEEASRRGSSDNITVIIVRFIDGTTGEKSGDDKETTNDQHS

SEQ ID NO: 66153 - protein, 293 aa, Zea mays
  Clone ID: LIB4603-002-A4_FLI.pep
QLSDWIFVGDFGAALQIKREISSWAVRLTDQPTAWIGDLSATPPPHFSFSASHLPATGSKAIKRLLPQSHFHSHPPTRTAAGSSTMWSAATAAAARAVSVSPVPAPSLLSGRRGGSRGGRGSVSVRSTVWDFVGGDLVRPDLGKWLDDVEKHKALAIYPPHEGGYEGRYLNRLRYQGYYFLDLSARGLGDPETTLTKVHPVCPPSLGRQPVARWYFPPEVDYRLSLLHPDAKGLVVWIIEAKVLSKAELQFLAMLPDIRPKVRVIAECGNWRSFVWKPLKQIAGLEPDPDAEE

SEQ ID NO: 66154 - protein, 279 aa, Zea mays
  Clone ID: LIB4603-006-E11_FLI.pep
GPRFRLLSSMSLLSKLRLITVDVTGTLIAYKGHLGDYYCMAAKSAGMPCPDYNRMHEGFKLAYTEMARQYPCFGFAAKMPNIEWWRTCVKNSFVKAGYDYDEETFEKVFRRIYSAFGSSAPYSAFPDSQPFLRWAREKGLTVGIVSNAEYRYKDVILPALGLNQSSEWDFGVFSGVVGVEKPDPRIYKIALEMAGNVAPEEALHIGDSMRKDYTPARSIGMHALLLDRFKTADAESWRQSGATVLPDLVATQEWLTKDQNDEQEETVAARVLKRMSEKL

SEQ ID NO: 66155 - protein, 407 aa, Zea mays
  Clone ID: LIB4603-007-H6_FLI.pep
RAAAQEVGRASEKKAMAAESFLFTSESVNEGHPDKLCDQVSDAVLDACLAQDPDSKVACETCTKTNMVMVFGEITTKASVDYEKIARDTCREIGFTSDDVGLDADRCKVLVNIEQQSPDIAQGVHGHFTKRPEEIGAGDQGHMFGYATDETPELMPLSHVLATKLGARLTEVRKDGTCAWLRPDGKTQVTVEYVNEGGAMVPVRVHTVLISTQHDETVTNDEIAADLKEHVIKPVIPERYLDEKTIFHLNPSGRFVIGGPHGDAGLTGRKIIIDTYGGWGAHGGGAFSGKDPTKVDRSGAYVARQAAKSIVASGLARRCLVQVSYAIGVPEPLSVFVDSYGTGTIPDKEILKIVKENFDFRPGMITINLDLKKGGNRFIKTAAYGHFGRDDADFTWEVVKPLKKASA

SEQ ID NO: 66156 - protein, 432 aa, Zea mays
  Clone ID: LIB4605-001-D3_FLI.pep
TRSTSRRIPSHYHPSRRPPIRSGSSNPGAVMATKRSVGTLGEADLKGKKVFVRADLNVPLDDAQKITDDTRIRASVPTIKFLLEKGAKVILASHLGRPKGVTPKYSLKPLVPRLSELLGVEVVMANDCIGEEVEKLAAALPEGGVLLLENVRFYKEEEKNEPEFAKKLASVADLYVNDAFGTAHRAHASTEGVTKYLKPAVAGFLMQKELDYLVGAVANPKKPFAAIVGGSKVSSKIGVIESLLAKVDILILGGGMIYTFYKAQGYSVGKSLVEEDKLELATSLIEKAKAKGVSLLLPTDIVVADKFAADAESKIVPATAIPDDWMGLDVGPDATKTFNEALDTTKTVIWNGPMGVFEFEKFAAGTEAIAKKLAELTTTMGVTTIIGGGDSVAAVEKAGLADKMSHISTGGGASLELLEGKTLPGVLALDDA

SEQ ID NO: 66157 - protein, 240 aa, Zea mays
  Clone ID: LIB4605-005-A11_FLI.pep
KMAPHPQEDKSDRHSSGAGASREQERRPSKAWGILIFGLIGVTTASFAITQVRKSMDWFYTQSTSSWTWRYTSNNSSRGSFSEEAKKRYYQRMQQEYEEEQERVQRIRHMQSVFNRERNKFGRGYESWRENGPPRGYNYIPRDDWYWQTDTSHSEHKNRRTYTPAGPRVYPMSHHYAVLGLDRSRATPYTDAEVKTAFRTKAMEVHPDQNQNDRDAAEEKFKEVVKSYEAIKSERKNGVS

SEQ ID NO: 66158 - protein, 355 aa, Zea mays
  Clone ID: LIB4605-006-H2_FLI.pep
LAPIWYEMAGKMKELDGASPAKIFIGGLSKDTSMSTFKEHFGKYGDIIDAVIMKDRYTQKPRGFGFITFADPTVVDRVIEDEHVINGKPVEIKRTIPKGAAPLKDFKTKKIFVGGLPSALKEDEFKEFFSKFGKVVEHEIIRDHATNRSRGFGFIVFDAEKAVDDLLHKKGNMIDLNGSQVEIKKAEPKKPSNQPPRSLDSEPRGRPYADSYDGFGSSYNYGGSFGPYRSPRSFGARPSSYSSAYGPGDYGSGYATYGGALVGYREPSLYSSRYGSTYGGSLGGGYGGVSYDGGLAGAYERDAGGYGGSSYGRSYDSSWANTGDGFGTGGLYGARTGYGGSGGSGAAGRYHPYGR

SEQ ID NO: 66159 - protein, 422 aa, Zea mays
  Clone ID: LIB4605-009-G1_FLI.pep
PGSHSSRRASESSEPPARPPPSPPPVPKANSFQVAMADQANQPTVLHKLGGQFHLRSIISEGVRARNICPSVSSYERRFATRNYMTQSLWGPSMSVSGGINVPVMQTPLCANAPAEKGGKNFMIDFMMGGVSAAVSKTAAAPIERVKLLIQNQDEMIKSGRLSEPYKGIVDCFKRTIKDEGFSSLWRGNTANVIRYFPTQALNFAFKDYFKRLFNFKKDRDGYWKWFAGNLASGGAAGASSLFFVYSLDYARTRLANDAKAAKGGGERQFNGLVDVYRKTLKSDGIAGLYRGFNISCVGIIVYRGLYFGLYDSIKPVVLTGNLQDNFFASFALGWLITNGAGLASYPIDTVRRRMMMTSGEAVKYKSSLDAFQQILKKEGPKSLFKGASANILRAIAGAGVLSGYDQLQILFFGKKYGSGGA

SEQ ID NO: 66160 - protein, 153 aa, Zea mays; identical to SEQ ID NO: 48136
  Clone ID: LIB4605-009-C9_FLI.pep

SEQ ID NO: 66161 - protein, 291 aa, Zea mays
  Clone ID: LIB4605-010-D2_FLI.pep
FLRYERQKLHQILIGKDREHTLLLFVIIFLHLSTAGAVLLSEEEDLELVIARKHTSTSNGTKNVSTSTLEQGLGPFLLKNLLERVQGALVLDSLTRCHHHPSADGIDGVRCKTSTISDQPTQSETGKEIVLEVAGKDNWLDGIIEPKVQTTINNDSNTGDVKSTVKPSNTIRLECLAVDIDKPIELPFTSSLGSLRVISQPCSRVVQGVHKKQRGSTSSTTRGQVASKPLPIAIPILLEVEQPLEVVLKCKVQSLSREVTNNISSVTPPQGRETFILNGTFEAVNNTLVRL

SEQ ID NO: 66162 - protein, 476 aa, Zea mays
  Clone ID: LIB4605-010-E10_FLI.pep
RGRPGSPTRRRLLRFCRLRLQFGLSPLQAMGKEESHINIVVIGHVDSGKSTTTGHLIYKLGGIDKRVIERFEKEAAEMNKRSFKYAWVLDKLKAERERGITIDIALWKFETTKYYCTVIDAPGHRDFIKNMITGTSQADCAVLIIDSTTGGFEAGISKDGQTREHALLAFTLGVKQMICCCNKMDATTPKYSKARYDEIVKEVSSYLKKVGYNPDKIAFVPISGFEGDNMIERSTNLDWYKGPTLLEALDQITEPKRPSDKPLRLPLQDVYKIGGIGTVPVGRVETGVIKPGMVVTFGPTGLTTEVKSVEMHHEALQEALPGDNVGFNVKNVAVKDLKRGFVASNSKDDPAKEAASFTSQVIIMNHPGQIGNGYAPVLDCHTSHIAVKFAELITKIDRRSGKELEKEPKFLKNGDAGMVKMIPTKPMVVETFSQYPPLGRFAVRDMRQTVAVGVIKSVEKKDPTGAKVTKAAAKKK

SEQ ID NO: 66163 - protein, 258 aa, Zea mays
  Clone ID: LIB4605-011-F2_FLI.pep
LEAGRENSVSNSRVLLLSDPELRRPQHQARPPSRVTEMALPNQGTVDYPSFKLVIVDDGGTGKTTFVKRHLTGEFEKKYEPTIGVEVHPLDFTTNCGKIRFYCWDTAGQEKFGGLRDGYYIHGQCAIIMFDVTSRLTYKNVPTWHRDLCRVCENIPIVLCGNKVDVKNRQVKAKQVTFHRKKNLQYYEISAKSNYDFEKPFLYLARKLAGDPNLHFVEAVALKPPEVTIDMAMQQQHEAELAAAAAQPLPDDDDDLIE

SEQ ID NO: 66164 - protein, 455 aa, Zea mays; identical to SEQ ID NO: 40951
  Clone ID: LIB4605-011-D5_FLI.pep

SEQ ID NO: 66165 - protein, 394 aa, Zea mays; identical to SEQ ID NO: 58959
  Clone ID: LIB4605-011-E6_FLI.pep

SEQ ID NO: 66166 - protein, 252 aa, Zea mays
  Clone ID: LIB4605-011-E9_FLI.pep
SRPAGLSRVFDFSRRRCSSHIPREDACSSPIDTMAVFSDLHTADGLKSLEAHLAGKTYVPGDSITKDDIKVFAAVPSKPGAEFPNAARWYETVSAAVASRFPGKAVGVNLPAGSAPAAAAPADEAEDDDDLDLFGDETEEDKKAADERAAAAKASSKKKESGKSSVLMDVKPWDDETDMKKLEEAVRSVQMEGLTWGASKLVPVGYGIKKMTIMLTIVDDLVSIDTLIEDHLTQEPINEYVQSCGIVAFNKI

SEQ ID NO: 66167 - protein, 454 aa, Zea mays
  Clone ID: LIB4606-001-F2_FLI.pep
SPHSIAEQAHGAPHTSLPLPSRLLSSPLLGGSGTDPPPLCSLLPPESLLLSVLSICAATVSLVRSHPSVDQWLTVRISSHLCVTMALEWSSPCFSLQAGFAGDDAPRAVFPSIVGRPRHTGVMVGMGQKDAYVGDEAQSKRGILTLKYPIEHGIVNNWDDMEKIWHHTFYNELRVAPEEHPVLLTEAPLNPKANREKMTQIMFETFNAPAMYVAIQAVLSLYASGRTTGIVLDSGDGVTHTVPIYEGYALPHAILRLDLAGRDLTDCLMKILTERGYSFTATAEREIVRDIKEKLAFVALDYEQELETAKSSSSVEKSYELPDGQVITIGAERFRCPEVLLQPSLIGMEAPGIHETTYNSIMKCDVDIRKDLYGNIVLSGGTTMFPGIADRMSKEITALAPSSMKVKVVAPPERKYSVWIGGSILASLSTFQQMWISKDEYDESGPAIVHRKCF

SEQ ID NO: 66168 - protein, 363 aa, Zea mays; identical to SEQ ID NO: 42242
  Clone ID: LIB4606-002-E10_FLI.pep

SEQ ID NO: 66169 - protein, 228 aa, Zea mays
  Clone ID: LIB4606-002-H7_FLI.pep
AELLLPLNLLGSGERSMGRGKIEIKRIENSTNRQVTFSKRRAGLVKKAREIGVLCDAEVGVVIFSSGGKLYDYCSPRTSLSRILEKYQTNSGKILWGEKHKNLSAEIDRVKKENDNMQIQLRHLKGEDLNSLQPRELIAIEEGLQNGQTNMREKQMDYWRMHKTNGKMLEDEHKILTFRMHQQAVDLSGGMRELETGYHQVQHDRDFISQMPFTFRVQPNHPNLQEDE

SEQ ID NO: 66170 - protein, 420 aa, Zea mays
  Clone ID: LIB4606-006-G5_FLI.pep
RDSPRRASESSEPPARPPPSPPPVPKANSFQVAMADQANQPTVLHKLGGQFHLRSIISEGVRARNICPSVSSYERRFATRNYMTQSLWGPSMSVSGGINVPVMQTPLCANAPAEKGGKNFMIDFMMGGVSAAVSKTAAAPIERVKLLIQNQDEMIKSGRLSEPYKGIVDCFKRTIKDEGFSSLWRGNTANVIRYFPTQALNFAFKDYFKRLFNFKKDRDGYWKWFAGNLASGGAAGASSLFFVYSLDYARTRLANDAKAAKGGGERQFNGLVDVYRKTLKSGGIAGLYRGFNISCVGIIVYRGLYFGLYDSIKPVVLTGNLQDNFFASFALGWLITNGAGLASYPIDTVRRRMMMTSGEAVKYKSSLDAFQQILKKEGPKSLFKGAGASILRAIAGAGVLSGYDQLQILFFGKKYGSGGA

SEQ ID NO: 66171 - protein, 413 aa, Zea mays
  Clone ID: LIB4606-006-G7_FLI.pep
SESSEPPARPPPSPPPVPKANSFQVAMADQANQPTVLHKLGGQFHLRSIISEGVRARNICPSVSSYERRFATRNYMTQSLWGPSMSVSGGINVPVMQTPLCANAPAEKGGKNFMIDFMMGGVSAAVSKTAAAPIERVKLLIQNQDEMIKSGRLSEPYKGIVDCFKRTIKDEGFSSLWRGNTANVIRYFPTQALNFAFKDYFKRLFSFKKDRDGYWKWFAGNLASGGAAGASSLFFVYSLDYARTRLANDAKAAKGGGERQFNGLVDVYRKTLKSDGIAGLYRGFNISCVGIIVYRGLYFGLYDSIKPVVLTGNLQDNFFASFALGWLITNGAGLASYPIDTVRRRMMMTSGEAVKYKSSLDAFQQILKKEGPKSLFKGAGANILRAIAGAGVLSGYDQLQILFFGKKYGSGGA

SEQ ID NO: 66172 - protein, 231 aa, Zea mays
  Clone ID: LIB4606-006-H9_FLI.pep
GVMAVSFANLSSEAGLKKLDEYLLTRSYITGYQASKDDLAVYTSFSPAPSSKYINVARWFNHIDALVRLSGITAEGQGVKVESSAVPSAPTPDVAEAQAPVAEEDDDDDVDLFGEETEDEKKAAEERAAAAKASGKKKESGKSSVLLDVKPWDDETDMAKLEEAVRSVQMEGLLWGASKLVPVGYGIKKLQIMMTIVDDLVSVDTLIEDYLCAEPVNEYVQSCDIVAFNKI

SEQ ID NO: 66173 - protein, 418 aa, Zea mays
  Clone ID: LIB4606-007-A12_FLI.pep
SPRRASESSEPPARPPPSPPPVPKANSFQVAMADQANQPTVLHKLGGQFHLRSIISEGVRARNICPSVSSYERRFATRNYMTQSLWGPSMSVSGGINVPVMQTPLCANAPAEKGGKNFMIDSMMGGVSAAVSKTAAAPIERVKLLIQNQDEMIKSGRLSEPYKGIVDCFKRTIKDEGFSSLWRGNTANVIRYFPTQALNFAFKDYFKRLFNFKKDRDGYWKWFAGNLASGGAAGASSLFFVYSLDYAGTRLANDAKAAKGGGERQFNGLVDVYRKTLKSDGIAGLYRGFNISCVGIIVYRGLYFGLYDSIKPVVLTGNLQDNFFASFALGWLITNGAGLASYPIDTVRRRMMMTSGEAVKYKSSLDAFQQILKKEGPKSLFKGAGANILRAIAGAGVLSGYDQLQILFFGKKYGSGGA

SEQ ID NO: 66174 - protein, 420 aa, Zea mays
  Clone ID: LIB4606-007-B5_FLI.pep
SHSPRRASESSEPPARPPPSPPPVPKANSFQVAMADQANQPTVLHKLGGQFHLRSIISEGVRARNICPSVSSYERRFATRNYMTQSLWGPSMSVSGGINVPVMQTPLCANAPAEKGGKNFMINFMMGGVSAAVSKTAAAPIERVKLLIQNQDEMIKSGRLSEPYKGIVDCFKRTIKDEGFSSLWRGNTANVIRYFPTQALNFAFKDYFKRLFNFKKDRDGYWKWFAGNLASGGAAGASSLFFVYSLDYARTRLANDAKAAKGGGERQFNGLVDVYRKTLKSDGIAGLYRGFNISCVGIIVYRGLYFGLYDSIKPVVLTGNLQDNFFASFALGWLITNGAGLASYPIDTVRRRMMMTSGEAVKYKSSLDAFRQILKKEGPKSLFKGAGANILRAIAGAGVLSGYDQLQILFFGKKYGSGGA

SEQ ID NO: 66175 - protein, 449 aa, Zea mays
  Clone ID: LIB4606-008-A10_FLI.pep
CNPPNWAYYFNYYTSAVLEFGGLEFGGPGIMMQQAQAHTSALAGAPSASAVAPTVAHPHDPVGGDAPPKQVAQAMERLGRAGRFIADIRLGADRLLEALFVSGDAPPYSVRQHVDRMERIIVKEDAAMRLHFQDLRALGRQLEESGVLNGALKAQGNSWGLHMPLVCPDGAVVAYAWKRQLAGQAGASAVDRTRLALKAFTDQKRRFFPHLEDEVVSHLHDGQPGDTKKSKLFTSNGYLEEKSLSEILKNLEHEVPNIKIFTYWHLDWSKRASSLASLLDDDFVDPSKELNLQNMDKSRSDALTTTIDQVAVIELLVPSIFRAVVSLHPAGSTDPDAVAFFSPTEGGSYLHARGTSVHHVFKHVKEHADKALQYFINAEPSKALPLLLRWIASYQTLFTKVCSKCRRLLMMDKSLALLLPPVHRPYHQTSNVGPDLQEAYHIGCSSYDG

SEQ ID NO: 66176 - protein, 363 aa, Zea mays
  Clone ID: LIB4606-008-D11_FLI.pep
PPSRRASIMSAYCGKYKDELIKNAAYIGTPGRGILAADESTGTIGKRLSSINVENVEENRRALRELLFCCPGALQYISGVILFEETLYQKTKDGKPFVDVLKEGGVLPGIKVDKGTIEVVGTDKETTTQGHDDLGKRCAKYYEAGARFAKWRAVLKIGPNEPSQLAIDLNAQGLARYAIICQENGLVPIVEPEILVDGPHDIDRCAYVTETVLAACYKALNEHHVLLEGTLLKPNMVTPGSDSKKVTPEVIAEYTVRTLQRTVPAAVPAVVFLSGGQSEEEATRNLNAMNKLSTKKPWSLSFSFGRALQASTLKAWAGKVENLEKARAAFLARCKANSEATLGTYKGDAAADTESLHVKDYKY

SEQ ID NO: 66177 - protein, 452 aa, Zea mays
  Clone ID: LIB4606-010-D7_FLI.pep
ASPSTMGKEKSHINIVVIGHVDSGKSTTTGHLIYKLGGIDKRVIERFEKEAAEMNKRSFKYAWVLDKLKAERERGITIDIALWKFETTKYYCTVIDAPGHRDFIKNMITGTSQADCAVLIIDSTTGGFEAGISKDGQTREHALLAFTLGVKQMICCRNKMDATTPKYSKARYDEIVKEVSSYLKKVGYNPDKIAFVPISGFEGDNMIERSTNLDWYKGPTLLEALDQITEPKRPSDKPLRLPLQDVYKIGGIGTVPVGRVETGVIKPGMVVTFGPTGLTTEVKSVEMHHEALQEALPGDNVGFNVKNVAVKDLKRGFVASNSKDDPAKEAASFTSQVIIMNHPGQIGNGYAPVLDCHTSHIAVKFAELITKIDRRSGKELEKEPKFLKNGDAGMVKMIPTKPMVVETFSQYPPLGRFAVRDMRQTVAVGVIKSVEKKDPTGAKVTKAAAKKK

SEQ ID NO: 66178 - protein, 422 aa, Zea mays
  Clone ID: LIB4606-011-E12_FLI.pep
RASHSPRRASESSEPPARPPPSPPPVPKANSFQVAMADQANQPTVLHKLGGQFHLRSIISEGVRARNICPSVSSYERRFATRNYMTQSLWGPSMSVSGGINVPVMQTPLCANAPAEKGGKNFMIDFMMGGVSAAVSKTAAAPIERVKLLIQNQDEMIKSGRLSEPYKGIVDCFKRTIKDEGFSSLWRGNTANVIRYFPTQALNFAFKDYFKRLFNFKKDRDGYWKWFAGNLASGGAAGASSLFFVYSLDYARTRLANDAKAAKGGGERQFNGLVDVYRKTLKSDGIAGLYRGFNISCVGIIVYRGLYFGLYDSIKPVVLTGNLQDNFFASFALGWLITNGAGLASYPIDTVRRRMMMTSGEAVKYKSSLDAFQQILKKEGPKSLFKGAGANILRAIAGAGVLSGYDQLQILFFGKKYGSGGA

SEQ ID NO: 66179 - protein, 455 aa, Zea mays
  Clone ID: LIB4606-011-F8_FLI.pep
EERRKMRECISVHIGQAGIQVGNACWELYCLEHGIQPDGQVPGDKTAGHHDDAFSTFFSQTGAGKHVPRAIFVDLEPTVIDEVRTGTYRQLFHPEQLISGKEDAANNFARGHYTIGKEIVDLCLDRIRKLADNCTGLQGFLVFNAVGGGTGSGLGSLLLERLSVEYGKKSKLGFTVYPSPQVSTSVVEPYNSVLSTHSLLEHTDVSILLDNEAIYDICRRSLDIEGPNYSNLNRLVSQVISSLTASLRFDGALNVDVNEFQTNLVPYPRIHFMLSSYAPVISSAKAFHEQLSVAEITSSAFEPASMMVKCDPRHGKYMACCLMYRGDVVPKDVNAAVATIKTKRTIQFVDWCPTGFKCGINYQAPTVVPGADLAKVQRAVCMISNSTSVVEVFSRINSKFDLMYAKRAFVHWYVGEGMEEGEFSEAREDLAALEKDYEEVAAEGGSDDGDEEEEY

SEQ ID NO: 66180 - protein, 423 aa, Zea mays
  Clone ID: LIB4606-011-G11_FLI.pep
RAPSHSPRRASESSEPPARPPPSPPPVPKANSFQVAMADQANQPTVLHKLGGQFHLRSIISEGVRARNICPSVSSYERRFATRNYMTQSLWGPSMSVSGGINVPVMQTPLCANAPAEKGGKNFMIDFMMGGVSAAVSKTAAAPIERVKLLIQNQDEMIKSGRLSEPYKGIVDCFKRTIKDEGFSSLWRGNTANVIRYFPTQALNFAFKDYFKRLFNFKKDRDGYWKWFAGNLASGGAAGASSLFFVYSLDYARTRLANDAKAAKGGGERQFNGLVDVYRKTLKSDGIAGLYRGFNISCVGIIVYRGLYFGLYDSIKPVVLTGNLQDNFFASFALGWLITNGAGLASYPIDTVRRRMMMTSGEAVKYKSSLDAFQQILKKEGPKSLFKGAGANILRAIAGAGVLSGYDQLQILFFGKKYGSGGA

SEQ ID NO: 66181 - protein, 442 aa, Zea mays
  Clone ID: LIB4606-011-H5_FLI.pep
SHSPRRASESSEPPARPPPSPPPVPKANSFQVAMADQANQPTVLHKLGGQFHLRSIISEGVRARNICPSVSSYERRFATRNYMTQSLWGPSMSVSGGINVPVMQTPLCANAPAEKGGKNFMIDFMMGGVSAAVSKTAAAPIERVKLLIQNQDEMIKSGRLSEPYKGIVDCFKRTIKDEGFSSLWRGNTANVIRYFPTQALNFAFKDYFKRLFNFKKDRDGYWKWFAGNLASGGAAGASSLFFVYSLDYARTRLANDAKAAKGGGERQFNGLVDVYRKTLKSDGIAGLYRGFNISCVGIIVYRGLYFGLYDSIKPVVLTGNLQDNFFASFALGWLITNGAGLASYPIDTVRRRMMMTSGEAVKYKSSLDAFQQILKKEGPKSLFKGAGANILRAIAGAGVLLAMTSSRSSSSERSTAPAVLKWRNMMTNKSSVCSRSFPIRIW

SEQ ID NO: 66182 - protein, 455 aa, Zea mays
  Clone ID: LIB4606-012-D8_FLI.pep
EERRKMRECISVHIGQAGIQVGNACWELYCLEHGIQPDGQVPGDKTAGHHDDAFSTFFSQTGAGKHVPRAIFVDLEPTVIDEVRTGTYHQLFHPEQLISGKEDAANNFARGHYTIGKEIVDLCLDHIRKLADNCTGLQGFLVFNAVGGGTGSGLGSLLLERLSVEYGKKSKLGFTVYPSPQVSTSVVEPYNSVLSTHSLLEHTDVSILLDNEAIYDICRRSLDIERPNYSNLNRLVSQVISSLTASLRFDGALNVDVNEFQTNLVPYPRIHFMLSSYAPVISSAKAFHEQLSVAEITSSAFEPASMMVKCDPRHGKYMACCLMYRGDVVPKDVNAAVATIKTKRTIQFVDWCPTGFKCGINYQAPTVVPGADLAKVQRAVCMISNSTSVVEVFSRINSKFDLMYAKRAFVHWYVGEGMEEGEFSEAREDLAALEKDYEEVAAEGGSDDGDEEEEY

SEQ ID NO: 66183 - protein, 137 aa, Zea mays
  Clone ID: LIB4665-001-C8_FLI.pep
EGWNRERPYTMADFSKESCPSVKNILLLDSEGKRVAVKYFSDDWPTNASKLAYEKSVFTKTLKTNARTEAEITLFDGYIVVYKFVHDLHFFVTAGDDENELILASVLHGFSDSVGLLLRLSIFCYYCIYICLCMWLF

SEQ ID NO: 66184 - protein, 178 aa, Zea mays
  Clone ID: LIB4666-007-B8_FLI.pep
PQDFMFLSRCLRWRLGPLAADPPCQLNVLWHDGHTLSMDGAQVGVLKQANKVCLSSLLEGKHRMALETQISFEVLCNFPDEPLEGQLPDQQLSALLILADLTEGNSSRAVAVRLLHSTSGGGRLTGSLGGKLLPGSLPSRGLASSLLGTSHLSRFFGLSARFESGGRRARNGRPEKPG

SEQ ID NO: 66185 - protein, 179 aa, Zea mays
  Clone ID: LIB4666-007-C3_FLI.pep
PQDFMFLSRCLRWRLGPLAADPPCQLNVLWHDGHTLSMDGAQVGVLKQANKVCLSSLLEGKHRMALETQISFEVLCNFPDEPLEGQLPDQQLSALLILADLTEGNSSRAVAVRLLHSTSGGGRLTGSLGGKLLPGSLPSRGLASSLLGTSHLSRFFGLSARFESGGRRARNGRPDPAGL

SEQ ID NO: 66186 - protein, 280 aa, Zea mays
  Clone ID: LIB4666-007-F5_FLI.pep
VHDAPSSRLLFQLRSQEAQKSDQKPPRGGADAEFLLHPASTARMFLTRTEYDRGVNTFSPEGRLFQVEYAIEAIKLGSTAIGLKTKDGVVLAVEKRVTSPLLEPSSVEKIMEIDEHIGCAMSGLIADARTLVEHARVETQNHRFSYGEPMTVESSTQAICDLALRFGEGDEESMSRPFGVSLLIAGHDENGPSLYYTDPSGTFWQCNAKAIGSGSEGADSSLQEQYNKELALEEAETIAPSILKQVMEEKVTPNNVDIAKVAPKYHLYTPAEVEAVIARL

SEQ ID NO: 66187 - protein, 165 aa, Zea mays
  Clone ID: LIB4666-009-E5_FLI.pep
PGKKSSDFRRASPSRSSRFTAPPLASPTAARMPFKRFVEIGRVALVNYGKDYGRLVVIVDVVDQNRALVDAPDMVRCQINFKRLSLTDIKIDIKRVPKKSTLIKAMEEADVKTKWENSSWGKKLIVQKRRAALSDFDRFKVMLARIKRGGAIRQELAKLKKASTA

SEQ ID NO: 66188 - protein, 272 aa, Zea mays
  Clone ID: LIB4666-014-H2_FLI.pep
REQQRATAAIKPSASTGGSPNSVSNSRVLLLSDPELRRPQHQARPPSRVTEMALPNQGTVDYPSFKLVIVGDGGTGKTTFVKRHLTGEFEKKYEPTIGVEVHPLDFTTNCGKIRFYCWDTAGQEKFGGLRDGYYIHGQCAIIMFDVTSRLTYKNVPTWHRDLCRVCENIPIVLCGNKVDVKNRQVKTKQVTFHRKKNLQYYEISAKSNYNFEKPFLYLARKLAGDPNLHFVEAVALKPPEVTIDMAMQQQHEAELAAAAAQPLPDDDDDLIE

SEQ ID NO: 66189 - protein, 254 aa, Zea mays
  Clone ID: LIB4666-015-E5_FLI.pep
RENSVSNSRVLLLSDPELRRPQHQARPPSRVTEMALPNQGTVDYPSFKLVIVGDGGTGKTTFVKRHLTGEFEKKYEPTIGVEVHPLDFTTNCGKIRFYCWDTAGQEKFGGLRDGYYIHGQCAIIMFDVTSRLTYKNVPTWHRDLCRVCENIPIVLCGNKVDVKNRQVKAKQVTFHRKKNLQYYEISAKSNYNFEKPFLYLARKLAGDPNLHFVEAVALKPPEVTIDMAMQQQHEAELAAAAAQPLPDDDDDLIE

SEQ ID NO: 66190 - protein, 251 aa, Zea mays
  Clone ID: LIB4666-016-H6_FLI.pep
RALCLSRFFDFSRRRCSSHIPREDACSSPIDTMAVFSDLHTADGLKSLEAHLAGKTYVSGDSITKDDIKVFAAVPSKPGAEFPNAARWYETVSAAVASRFPGKAVGVNLPAGSAPAAAAPADEAEDDDDLDLFGDETEEDKKAADERAAAAKASSKKKESGKSSVLMDVKPWDDETDMKKLEEAVRSVQMEGLTWGASKLVPVGYGIKKMTIMLTIVDDLVSIDTLIEDHLTQEPINEYVQSCDIVAFNKI

SEQ ID NO: 66191 - protein, 250 aa, Zea mays
  Clone ID: LIB4666-018-B10_FLI.pep
RAFSRVLLLSDPELRRPQHQARPPSRVTEMALPNQGTVDYPSFKLVIVGDGGTGKTTFVKRHLTGEFEKKYEPTIGVEVHPLDFTTNCGKIRFYCWDTAGQEKFGGLRDGYYIHGQCAIIMFDVTSRLTYKNVPTWHRDLCRVCENIPIVLCGNKVDVKNRQVKAKQVTFHRKKNLQYYEISAKSNYNFEKPFLYLARKLAGDPNLHFVEAVALKPPEVTIDMAMQQQHEAELAAAAAQPLPDDDDDLIE

SEQ ID NO: 66192 - protein, 117 aa, Zea mays; identical to SEQ ID NO: 59829
  Clone ID: LIB4666-018-C1_FLI.pep

SEQ ID NO: 66193 - protein, 184 aa, Zea mays
  Clone ID: LIB4666-023-E12_FLI.pep
ASGSHMVKERSLGASTLFNRLEFLQLLEVLPWLLPDLSFVELLDFAILHFNSEIVHRASNHLCLGLHKLLEPQKSIGLLVVLIDGEAGELLEVKVVLVPRHVLDAARQRPGVVGHGILLCVAGGRYGEGKQYEQGSHERDDSMFAHLDWRIGAEIYSRRRSRETTGRGYDERSVNAIMPSRPAS

SEQ ID NO: 66194 - protein, 254 aa, Zea mays; identical to SEQ ID NO: 66189
  Clone ID: LIB4666-025-E7_FLI.pep

SEQ ID NO: 66195 - protein, 142 aa, Zea mays
  Clone ID: LIB4666-025-H10_FLI.pep
YHPTSLLKTLASAAAAADSSFSIPSQSAAVAPSGMAPKKDKAPPPSSKPAKSGGGKQKKKKWSKGKLKEKVNNAVLFDQATYDKLLSEVPKYKQITPSILSERLRINGSLARRAIKDLMARGLIRLVSVHSSQQIYTRATNT

SEQ ID NO: 66196 - protein, 255 aa, Zea mays
  Clone ID: LIB4666-028-G9_FLI.pep
PGPNSVSNSRVLLLSDPELRRPQHQARPPSRVTEMALPNQGTVDYPSFKLVIVGDGGTGKTTFVKRHLTGEFEKKYEPTIGVEVHPLDFTTNCGKIRFYCWDTAGQEKFGGLRDGYYIHGQCAIIMFDVTSRLTYKNVPTWHRDLCRVCENIPIVLCGNKVDVRNRQVRAKQVTFHRKKNLQYYEISAKSNYNFEKPFLYLARKLAGDPNLHFVEAVALKPPEATIDMAMQQQHEAELAAAAAQPLPDDDDDLIE

SEQ ID NO: 66197 - protein, 203 aa, Zea mays
  Clone ID: LIB4666-030-F7_FLI.pep
GSGRSRRSHPVKIKRGNGQEPPQMDSGSDSDGAPEELTAVQGVAKHEEISKVEKDSVLRVTREGKERRKRWAQRRTSSKPDKKAPKEVEDEDTKKSEEHEEINTMPGMLPTSVIEILAAREKQTFASDSEEENVKQKVQRRKKRMKTDGPETILLKDVRSTQHVKNALDFLEHRKNRVPRSNAVLKNASKALRLLSSKGNFLS

SEQ ID NO: 66198 - protein, 254 aa, Zea mays
  Clone ID: LIB4667-001-F1_FLI.pep
PGNSVSNSRVLLLSDPELRRPQHQARPPSRVTEMALPNQGTVDYPSFKLVIVGDGGTGKTTFVKRHLTGEFEKKYEPTIGVEVHPLDFTTNCGKIRFYCWDTAGQEKFGGLRDGYYIHGQCAIIMFDVTSRLTYKNVPTWHRDLCRVCENIPIVLCGNKVDVKNRQVKAKQVTFHRKKNLQYYEISAKSNYNFEKPFLYLARKLAGDPNLHFVEAVALKPPEVTIDMAMQQQHEAELAAAAAQPLPDDDDDLIE

SEQ ID NO: 66199 - protein, 179 aa, Zea mays
  Clone ID: LIB4667-005-B7_FLI.pep
PQDFMFLSRCLRWRLGPLAADPPCQLNVLWHDGHTLSMDGAQVGVLKQANKVCLSSLLEGKHRMALETQISFEVLCNFPDEPLEGQLPDQQLSALLILADLTEGNSSRAVAVRLLHSTSGGGRLTGSLGGKLLPGSLPSRGLASSLLGTSHLSRFFGLSARFESGGRRARNGRPEKTRP

SEQ ID NO: 66200 - protein, 278 aa, Zea mays
  Clone ID: LIB4667-007-B12_FLI.pep
RSRVPEPRFPKHAQHTNTHRAQLRGDLPAAGEMSRGTGAGYDRHITIFSPEGRLYQVEYAFKAVKSAGVTSIGVRGADSVCVVTQKKVPDKLLDQTSVTHLFPITKYVGLLATGLTADARSLVSQARNEAAEFRFKWGYEMPVDVLAKWIADKAQVYTQHAYMRPLGVVAMVLGYDEEKNAQLFKCDPAGHFFGHKATSAGLKEQEAINFLEKKMKDDPKFTYDETVQIAISALQSVLQEDFKATEIEVGVVRKDDRVFRALTTEEIDQHLTAISERD

SEQ ID NO: 66201 - protein, 112 aa, Zea mays
  Clone ID: LIB4667-007-H10_FLI.pep
HWIVPNIRGIAVSLDVYSPFKSRQISMPCTNIFGLKMLKLRVYVESIASLHDGEIWSGTSSECWQLRIQKRAWRRSVGREGGSGGRPAVADCRGIVRAKTTRGEQENATRGH

SEQ ID NO: 66202 - protein, 336 aa, Zea mays; identical to SEQ ID NO: 58958
  Clone ID: LIB4667-012-B12_FLI.pep

SEQ ID NO: 66203 - protein, 213 aa, Zea mays
  Clone ID: LIB4667-016-B1_FLI.pep
SWINMRRGYSYSPSPPRGYRRRARSPSPHDHYGGRGRDLPTSLLVRNLRRDCRPEDLRRPFGQFGRVKDIYLPRDYYTGDPRGFGFVQYYDPADAADAKYYMDGQVVLGRQITVVFAEENRKKPQEMRARDRVRSHSYDDRRYSRSRSPRYYRGRSPSRSQSYSRSPPQNPRHRLRERSYSGSPVDSRSRSGSPYEDGYRRSSRRERSLSVSG

SEQ ID NO: 66204 - protein, 226 aa, Zea mays
  Clone ID: LIB4667-017-A10_FLI.pep
AVQAELMATSEPVQESLVVHYSQPSRPRVLLAASGSVAAIKFESLCRSLSEWADVRAVATTSSLHFVDRSSLPSGIVLYTDDDEWSTWKKIGDEVLHIELRKWADVMVIAPLSANTLAKIAGGLCDNLLTCIVRAWDYSKPLFVAPAMNTLMWNNPFTERHLHTINQLGIALIPPVTKRLACGDYGNGAMAETSQIHTSVRLACKTQPHDASSSLAGPVSNNRPSS

SEQ ID NO: 66205 - protein, 145 aa, Zea mays
  Clone ID: LIB4667-017-B4_FLI.pep
IKAKDVPQQWHKEPEHHKFLKKTFSLLFSTTQGGEQNEAPQLLLLGGARNAASGLVKHGVDLVAVLHLQLIRGLLAAKPAAIKQECNGIHVHRLAVAIGVHQLLQLGGPLYAKEHLIAILSLDLKVDVGAALRGLLILLAGSRHR

SEQ ID NO: 66206 - protein, 157 aa, Zea mays
  Clone ID: LIB4667-020-B4_FLI.pep
SRPAGIFLSSPLSRASLSHLVLPHRPTRPSVHGLTGVPLPRSPHSPRIPSVVSWDKTVRLYDADANVLKREFMHPGAILDCCFHDDSSGFSAGADHTIRRLVLSSSKEDVLGRHDGPVRCVEYSYAADTFISMDLLLDFFSSVSFSSARYFCSLMQL

SEQ ID NO: 66207 - protein, 337 aa, Zea mays
  Clone ID: LIB4667-025-D12_FLI.pep
GSARPLTSRSEKSAASPRASEAHTTMQGGSSGIVYGGLKYQARCIADVRADASSTTFLAGTLSLKEENEVHLIRLSPAESELVCDGVFYHPNEIWDLKSCPFDHRVFSTVYTSGEGFGASVWKIPELNGQSNSPRLEQLFELSGHTGKIRRVIWWPLGKHDKLISIDDRNISLWNVDMSNKSAKVISQGSADMLPNLSGGAWDPHNHNSIASISDSSLHLWDLRSMEKSSAIEHAHIRDVDYNPKKQHVIATTEDDFGIRLWDLRMFKLPLKDLPGHSHCPSGSPNRQEEPLLNSYTDYEDSIYGIAWSSHDPSLFASLSYDGRVVLESVKPYLQRK

SEQ ID NO: 66208 - protein, 302 aa, Zea mays
  Clone ID: LIB4667-026-F3_FLI.pep
LSRERDGSRRILLPPIPSGSRQVASSRPVVSPPPLSSARRQPPPAMEALRKAEAELTVYVHPSNAKRVRHAVSRQLSALLFTYVDRFDGVLLMHEVSFLIGKDKEGKPIYERSDRNDQIAEPVSYGKIMNGLVPYFSVQVHATLLLFSPQPDMILEGMVEMLGKESIHAIVLGVFSVAIMSEDIKFKFKWKSDGGKFVSLTDKKHVIERGTMIRFSVKRVDTEMSCHITGSLIPPHTGCMRWLSVHDPKYASELKSGESRSRDTSIKIEQNEQEHRILKNEDGMVKSERPYKSRKRVRHIEK

SEQ ID NO: 66209 - protein, 364 aa, Zea mays
  Clone ID: LIB4667-028-D5_FLI.pep
SPSQVMAGPAPDRAALTVGPGMDMPIMHDSDRYELVRDIGSGNFGVARLMRDRRTSELVAVKYIERGEKIDENVQREIINHRSLKHPNIIRFKEVILTPTHLAIVMEYASGGELFERICKNVRFSEDEARYFFQQLISGQVCHRDLKLENTLLDGSDAPRLKVCDFGYSKSSVLHSQPKSTVGTPAYIAPEVLLKKEYDGKIADVWSCGVTLYVMVVGAYPFEDPEEPKNFRKTIQRILNVQYAIPDNVNISPECRHLISRIFVGDPATRITIPEIRNHSWFLKNLPADLMDDDSMSNQYEEPDQPMQTMDQIMQILTEATIPPACSRSINVLADGLDMDDDMDDLDSDSDLDVDSSGEIVYAM

SEQ ID NO: 66210 - protein, 199 aa, Zea mays
  Clone ID: LIB4668-004-B7_FLI.pep
GRPGGGDQLVNCSTTSRLLHLRKTGRRAAKVRRKSVGMRRNSPPTASGNRLAVIASHLSLPPLGSPAAISGEKEAALATDLNSTPTIFDKIIRKEIPSEVVYEDEKVLACRDISPQAPTHIIIIAKVKYGLSRLSKAEEGHVELLGNLLYAAKVVAEQEGLADGFRIVMDDGPRGSQSVYHRHLHVHLLGGRQMNWPPG

SEQ ID NO: 66211 - protein, 170 aa, Zea mays
  Clone ID: LIB4668-005-C6_FLI.pep
CRTSRSRHLNPGTERGDAAAPLLRRREMATVPGDLIWQVVRKNNSFLVKQFGNGNAKVQFTKEPNNLYNIHSFKHSGLANKKTVTIQPAAKDSAVVLSTTKTKKQNAPAKLSHKSVMRKEFRKMAKAVKNQVSDNYYRPDLTKPALARLSSVYRSLQVAKSGVKKKNRQS

SEQ ID NO: 66212 - protein, 155 aa, Zea mays
  Clone ID: LIB4668-012-H12_FLI.pep
EAHSHTPPPRSLLPSPFFHLIRRRGTPCSSLAMARIKVHELRGKSKTDLQAQLKELKSELSLLRVAKVTGGAPNKLSKIKIVRTSIARVLTVISQKQKSALREAYKKKKLLPLDLRPKKTRAIRRRLTKHQLSLKTEREKKREKYFPMRKYAIKA

SEQ ID NO: 66213 - protein, 378 aa, Zea mays
  Clone ID: LIB4698-001-E4_FLI.pep
FTMGSSGADTPSKEQQPPATSGAAIPPVYPDWSSFQAYPPIPPHGFFPSPVASSPQGHPFMWGAQAMIPPYGTPPPYVMYPPGVYAHPSMPPGAHPFTPYAITSPNGNADATGTTAAAGNTDGKPSEGKDKSPTKRSKGSLGSLNMLTGKNPSEHGKSSGASGNGVTSQSGESGSDSSSEGSEGNSHNDSHHRESGQEHDGDVRSSRNGVSRLQSEGKLNQAMAILPIPSSGPATDPTTNLNIGMDYWANTASSAPAIHGKATSTTVPGAVVPAEQWTQDEHELKKQRRKQSNRESARRSRLRKQAECEELAQRADVLKQENASLRDEVNRIRKEYEELLSRNNSLKEKLEGKQHKTDEAGLNNKLQHSGDDSQKKGN

SEQ ID NO: 66214 - protein, 452 aa, Zea mays; identical to SEQ ID NO: 47560
  Clone ID: LIB4698-005-H6_FLI.pep

SEQ ID NO: 66215 - protein, 261 aa, Zea mays
  Clone ID: LIB4700-005-E3_FLI.pep
PGFRRRRQQLLLALGGRRERERERDLVERLARWSSNEDVGGVQRAGGGGAGGAGGGGQPDAVAQDEGVAAGGALPGHLAYSHTNQALLRPRSFAAKDEVFCLFEGVLDNLGRLSQQHGLSSKGANEVLLVIEAYKTLRDRAPYPASFMLAQLTGSYAFVLFDKSTNSLLVASDPEGRVPLFWGITADGCVAFSDDIDMLKGSCGKSLAPFPQGCFYSNALGGLKCYENPKHKVTAVPADEEEICGATFKVVEGSTVLTALH

SEQ ID NO: 66216 - protein, 512 aa, Zea mays; identical to SEQ ID NO: 39621
  Clone ID: LIB4701-002-D6_FLI.pep

SEQ ID NO: 66217 - protein, 330 aa, Zea mays
  Clone ID: LIB4701-003-G11_FLI.pep
GSAVTGSSDITHRFFPSSSATPLVAFPSRRYMNFGRHLLLAAVFALLLAVCASAASRGAGSFDPSRVVQLSWRPRAFLHKGFLSDAECDHLIALAKDKLEKSMVADNESGKSVQSEVRTSSGMFLERKQDEVVTRIEERISAWTFLPPENGESIQILHYQNGEKYEPHYDYFHDKKNQALGGHRIATVLMYLSNVEKGGETIFPNAEGKLLQPKDNTWSDCARNGYAVKPVKGDALLFFSLHPDATTDSDSLHGSCPVIEGQKWSATKWIHVRSFDLPVKQPGSSDGCEDDNILCPQWAAVGECAKNPNYMVGTKEAPGFCRKSCKVCAE

SEQ ID NO: 66218 - protein, 346 aa, Zea mays
  Clone ID: LIB4701-004-E9_FLI.pep
LRRATPVPAAGAAHRGGRVPLRRRPDAVRAEPGVHRGRVLPARRVRRGARPRRAESGAGRPASGGRPEGQPRRGDEAHRRGVWPAGSWPHQVPEPLSCSCIGSTTVLMCILNFGLCARAYRAIQRTVGGIPRPLIDLSAHNFARVMDEAFGTRLDPPFDPYVNSLNFLLASYVIPYLGINGYVGTNPIVDGYQTKKLLAGLLGVEAAQDAVFRARLFERLGEAVPPYGNITVAEFTDRVSALRNRLGRCGVKDEGLTVPRRQGAEGAICTNVLSADTDSLSYARTLAELLSILYLTGDERVPGGFYPEGANGRIARSFLASHMETSQCKLPEAISALRSVLRVLRA

SEQ ID NO: 66219 - protein, 455 aa, Zea mays; identical to SEQ ID NO: 40951
  Clone ID: LIB4701-006-C4_FLI.pep

SEQ ID NO: 66220 - protein, 278 aa, Zea mays
  Clone ID: LIB4702-003-C5_FLI.pep
ITSIVNNCRQIHSLLVARQSNGSSSIRRAESAQIATAMGRGKVVLQRIENKISRQVTFAKRRNGLLKKAYELSILCDAEVALVLFSHAGRLYQFSSSSDLLKTLERYQRHIYASADAAVPSCDEMQNNYQEYVKLKAQVEVLQHSQRNLLGEELAPLSPSELDQLESQVDKTLKQIRSRKTQVLLDELCDLKRKEQMLQDANRVLKRKLHEFEAEAASPPQLAWQGGGGMLSHDPPQPEHFFVALESNAPLQPTYHTMDMNQQPEPAPGGCYPPAWMA

SEQ ID NO: 66221 - protein, 180 aa, Zea mays
  Clone ID: LIB4702-004-D12_FLI.pep
ARYGSLVSMTLCLDSFVTLSSVANNLFLYSFPCELRFRGETWIVFGSGAGNMTYLRRVIDPVACCLSVTLLPLCYLIPPLSLLAMTACLRQVPSRGRWIRIACRKQNDRRSPTLLCCPVATVLKLPISNQTDQVIAYHIYVSAVYPFPLHLCFFILTKHYLKGISSILLVVSIFFLFILA

SEQ ID NO: 66222 - protein, 450 aa, Zea mays; identical to SEQ ID NO: 46482
  Clone ID: LIB4702-005-A4_FLI.pep

SEQ ID NO: 66223 - protein, 393 aa, Zea mays
  Clone ID: LIB4702-005-H6_FLI.pep
PSLKSTPSTRPPHSPSSLFTIPPQNTSCDPRSLRRASIMSAYCGKYADELIKNAAYIGTPGKGILAADESTGTIGKRLSSINVENVEENRRALRELLFCCPGALQYISGVILFEETLYQKTKDGKPFVDVLKEGGVLPGIKVDKGTIEVVGTDKETTTQGHNDLGKRCAKYYEAGARFAKWRAVLKIGPNEPSQLAIDLNAQGLARYAIICQENGLVPIVEPEILVDGPHDIDRCAYVTETVLAACYKALNEHHVLLEGTLLKPNMVTPGSDSKKVTPEVIAQYTVRTLQRTVPAAVPAVVFLSGGQSEEEATLNLNAMNKLSTKKPWALSFSFGRALQASTLKAWAGKVENVEKARAAFLARCKANSEATLGTYKGDAAADTESLHVKDYKY

SEQ ID NO: 66224 - protein, 518 aa, Zea mays
  Clone ID: LIB4702-006-B10_FLI.pep
GSAFLRNISARVRRRTKLVFSFLDKKLLDHSVNQTYGSLARNLTFVRSVASGILVPKDYIWPVTADNYLLPSTSIVTEAHEAGLEIYASGFVNDKAVPFNYSYDPLAEYLNFVGDGGFSVDGVLSDYPITASEAIGCFANLNSSKTDHVTGKPLVISHNGASGDYPDCTDLAYHSAVDDGADVIDCPVQVTSDGVLMCMSSINLLDTTNVQRTPFATPSLVPSILINVILSSLINLSSLPQNAAFIAKSLGIDMVDSVTAALSAAGFSNQTTKEVLIRSTDSAVLVKLKQQKTRCKLVYTLPLGIGDASKPSLKDIKAFAEAVVVDRTSVFALSYDFIMGQNRIVRDLQAAGLAVYAQVFRNEYVAHPFDFLGDPTVEINYYVQTFNLSGMITDFPKTVRRYKENTCTALGKDMPKYMRPVEAGSLADFLRSFQTQPPSVAPMPALNSSSVEEPPLPTAAPRNVPPGGGAPADAAGTAGGAAPSDASSGGAPPSDARHTATGSSGMLLVVLVSAALLI

SEQ ID NO: 66225 - protein, 480 aa, Zea mays
  Clone ID: LIB4703-005-A12_FLI.pep
HNTSILCHLYSTSILVKQTMVSETNQSKNVCVIGAGPSGLVAARELKREGHKVVVLEQNHDIGGQWLYNPNVQEEDPLGRDPWLKVHSSIYESLRLMSPREVMGFTDFPFLVKKGRDPRRFPSHRELLLYLKDFCEWFELRDMIKFNTKVHYVGPLNYGVPSEDLKWVVRSKDKNSEEEVEQVFDAVVVATGHYSNPRLPCIQGMAIWKRKQMHSHIYRSPEPFRGEIVVVVGNSFSGQEISMELVKVVKELHLSSKSLDIYEGLSKVISKHENFHLRPQIETLREDGTVIFNDGSSIIADTILYCTGYTYSFPFLDTKGMVVVDDNRVGPLYEHTFPPALAPSLSLVGIPRRILGLPFFESQGKWVAQLLSGKKALPSYEEMMKSIKEFYHSKEEAGIPKHYTHEIEGFDYCDKYAENVGLPKLQEWRKDLCVSAVVNLFINLETYRDSWNDDIDEKLQEALRSPYFTQLGVEPEDPSL

SEQ ID NO: 66226 - protein, 461 aa, Zea mays
  Clone ID: LIB4703-006-D4_FLI.pep
RNQVQMGSILSATSTTAKSMDQHEASGTDPNKRVKISTYEYGSNPRIIPTLPDELSLQIPARSPRIHYLNLKLVCRAWKAAIIGYELSQLRRELGVSEEWVYVLTKAEAYKLHWYALDPVFQKWQRLPPMPSFVNQEESNRTASSAFWMWNVVGSSIRIADYVRGLFWRRNSLDQMPFCGCSVGVADGYLYVIGGFSKAVALNRVCRYDPFLNLWQEVSPMMTGRAFCKAAFLNGKLYVVGGVSRGRNGLLPLRSAEAFDPKTGLWSDLPEMPFARAQVLPTAFLVDVLKPIATGMAPYKGKLYVPQSLYSWPFFFDIGGEIYDPDLNAWSTMPDGLGDGWPARQAGTKLGVVIDDRLYTLEPSSSLDSGKIKRYDSEGDAWVTITPQVPVNDFTGAEAPYLLAGLGGRLHVITKAANNTLQVMQAVVQNNSVSEENVVWTTVASRNFGTAELVSCQVLDV

SEQ ID NO: 66227 - protein, 395 aa, Zea mays
  Clone ID: LIB4704-004-C7_FLI.pep
PGETTPAAANPNPVLRPAALSLLVPFYRGNDERQSLPPYGRCPGLLRSLRRRRALPGNNSMALVAPRPGMELANIQHHPNQAPGPGGKQRTSSLEAPIMPLTGHQSAIYCMKFNPAGTVIASGSHDKDIFLWYVHGECKNFMVLRGHKNAILDLQWTTDGTQIISASPDKTVRVWDVETGKQVKKMAEHSSFVNSCCPARKWPPLVVSGSDDGTAKLWDLRQRGAIQTLPDKYQITAVSFSEAADKVFTGGLDNDVKWWDLRKNETTEYLKGHQDMITGMQLSPDGSYLLTNAMDNELKIWDLRPYAPENRNIKTLTGHQHNFEKNLLKCSWSPDNRKVTAGSADRMVYIWDTTSRRILYKLPGHNGSVNETAFHPTEPIIGSCGSDKQIYLGEL

SEQ ID NO: 66228 - protein, 440 aa, Zea mays
  Clone ID: LIB4705-002-C9_FLI.pep
RPPPPPRRKQFPRLPNRLAIDNTTEHTRARMAPAIYAQDSSQRQSSLLALDLDGHMADVVLRLDVPDHLVKDLISVRIPGDGHMARQQHLAHRDGPDVQLVDGHHALHPAEPALQPGGVDFAGRALHQHFEDAAQHPDRGEQHHHREDERADEVDDLPLRLVPDDRPAHHDPDALDGVPEHVEVCAVHVDVPPRLLTSSASRLGTLMLDQRLLNIVIVMMVVVVGCDSDSASMAVLVVMDTALFLLLVVVVGMAIVRIPMAVAMVMRMSMSMAVAVPVVMAQQHGHENVDGQPERRHGEHERPPHVAALADEPHDGLVHQYAGEQPDELDGDEGAEDLHPEEPVRLPRRRLPPGGPEREQRDGERRHVRQEVRRVGQDGQAVRLDAPHHLHRHEYDAEDHRDYQLPHRRRPLPGVLRGVAGVGEVAGCALAELAPCRSRS

SEQ ID NO: 66229 - protein, 184 aa, Zea mays
  Clone ID: LIB4717-001-C2_FLI.pep
MLDRLADKANRGKQLRLLVVDIGEAALAAVVAVEVVGHEDARAALCVGALLAEAGHLACGVVHLIELQHGELHLLVLVLDLLGLGVRLLLTLLGAAAEAEHQVEGGLLLDVVVGKGATVLELLAGEDEPLLVRGDALLVLDLGLHIVDGVRGLHLQSDGLPRQSLHKDLHLWRRCGGPPAAAPM

SEQ ID NO: 66230 - protein, 201 aa, Zea mays
  Clone ID: LIB4717-002-A4_FLI.pep
ADKANRGKQLRLLVVGIGEAALAAVVAVEVVGHEDARAALCVGALLAEAGHLASGVVHLIELQHGELNLLVLVFDLLGLGVRLLLTLLGAAAEAEHQVECGLLLDVVVGEGATVLELLAGEDEPLLVRGDALLVLDLGLHIVDGVRGLHLQSDGLPRQSLHKDLHLWRRCGGAACGGAYVGFGCCRMGWRLARTPRPTAPR

SEQ ID NO: 66231 - protein, 332 aa, Zea mays; identical to SEQ ID NO: 60033
  Clone ID: LIB4719-001-G2_FLI.pep

SEQ ID NO: 66232 - protein, 262 aa, Zea mays
  Clone ID: LIB4719-002-C1_FLI.pep
LEAGREATKTKWRTLLCTSFLLPPPLLLPNRLDFIKIILKLEPTSRQRKKSKKTGSQPIQGLNRTGKSCRLRWVNYLHPGLKRGRMSPHEERLILELHARWGNRWSRIARRLPGRTDNEIKNYWRTHMRKKAQERKRNMSPSSSSSSLTCQSGYPDTPSTIGVEGQELHGGSGCITSILKGTPPDMDGYPMDQIWMEIEAPQMPSEESFVGGNHNVCSSLATPLPPPTVWEYYPDACWKVDDEIKMATQYQFGYSEGVGPCF

SEQ ID NO: 66233 - protein, 266 aa, Zea mays
  Clone ID: LIB4719-003-H8_FLI.pep
LEAGPAYAPSRRRTMSTSPAAADVSPLPPTAAADEAARATETVVVDERVASHVDPFLVEALDNPRHRLMVLRMELDIQNFMQNPQLQEFEFQNFPTSYLRCAAHRVAQHYGLETIVADSLVEGSVSRIVARKTAESRPKAFQNGSADSRNKSGVPKTVDERIEEYNKARARIFNGSISADSDAASIMGTLSTGKDEPVNVDPSVDEIKVSTMNSRSRVAVFKDTEKDRSDPDYDRNYKSLCSMALVMCNLLACPQTSILCTLASLI

SEQ ID NO: 66234 - protein, 230 aa, Zea mays
  Clone ID: LIB4719-003-H9_FLI.pep
PLHCWMKHGPLSRGAPSLVIIFILLTTLFIILVIDLRLGLVRLLFIFLLFLLGRSPLSCSALALVVGSDGLVVLELELVSLGYIGSLVRLAQGFPPVASSFPHRSDRLVLRVLLLELLAKFLHEHEESAGSPLRLVGVLAGLPFPALGGLLRPLALHRQLGIGLGGALGFGPLHGGFERRHGAQRSDPRLAEGIPVAGGRIGVESRAKLPLAARGEREGGKGKGRRRALP

SEQ ID NO: 66235 - protein, 316 aa, Zea mays
  Clone ID: LIB4719-004-C11_FLI.pep
MAQPSVILATASYDHTIRFWEAKSGRCYRTIQYPDSQVNRLEITPDKRFLAAAGNPHIRLFDVNSNSPQPVISYDSHTSNAMAVGFHCDGNWMYSGSEDGTVRIWDLRTGTCQREYESRAAVNTVVLHPNQKELISGDQNGNIRVWDLAANSCSCELVPEVDTAVRSLTVMWDGSMVVAANNRGTCYVWRLLKGTQTITCFEPLHKLQAHDGYILKCLLSPEFCDPNRYLATASSDRTVKIWNVDSFKLERTLVGHQRWVWDCVFSVDGAYLITASSDTTARLWTMSTGEAIRVYQGHHKATVCCALHDGAESAPS

SEQ ID NO: 66236 - protein, 149 aa, Zea mays
  Clone ID: LIB4719-004-C9_FLI.pep
SPLSSPSPRSRLPRGPLNRTPPPCSHRRQCLSPDRPSLYPDRVPVGLPPPPPYYRCRGLHRRRAPARQMELGDKAVGFLLTLTSLTLFTYYTFWVIILPFVDSDHFVHKYFLPQEYAILIPVLAGVVLLSFLSVFVGLVMLKSKKKKMA

SEQ ID NO: 66237 - protein, 177 aa, Zea mays
  Clone ID: LIB4719-006-B2_FLI.pep
PQDFMFLSRCLRWRLGPLAADPPCQLNVLWHDGHTLSMDGAQVGVLKQANKVCLSSLLEGKHRMALETQISFEVLCNFPDEPLEGQLPDQQLSALLILADLTEGNSSRAVAVRLLHSTSGGGKLTGSLGGKLLPGSLPSRGLASSLLGTSHLSRFFGLSARFESGGRRARNGRPENR

SEQ ID NO: 66238 - protein, 430 aa, Zea mays
  Clone ID: LIB4719-006-F12_FLI.pep
PGHRHTNTSRRRQRASLLSHASRQGRERDRRSPSRRRWCGCPPSSSEICLVTDLSDKMVKICCIGAGYVGGPTMAVIALKCPDIEVVVVDISKPRIEAWNSDTLPIYEPGLDDVVKQCRGRNLFFSTDVEKHVAEADIIFVSVNTPTKTRGLGAGKAADLTYWESAARMIADVSKSDKIVVEKSTVPVKTAEAIEKILTHNSKDTRIGPKFLNASVGFGGSCFQKDILNLVYICECNGLPEVANYWKQVIKINDYQKSRFVNRVVSSMFNTVAGKKIAVLGFAFKKDTGDTRETPAIDVCKGLLGDKAQISIYDPQVTEDQIQRDLAMNKFDWDHPMHLQPTSPAAVKQVSCVWDAYEATKGAHGLCILTEWDEFKTLDYQKIFDNMQKPAFVFDGRNIVDSEKLREIGFIVYSIGKPLDAWLKDMPAVA

SEQ ID NO: 66239 - protein, 216 aa, Zea mays
  Clone ID: LIB4719-007-A4_FLI.pep
EPPLDLVELVCLHHRISLGNGVPGSSPVVELAAVLVGVAVERAVQVPTPAVESREPNPLPAGAAPVRPYLPPFGDRRHPLAGSGNISGLLHVHCLQLDLGNSYYRVAASNNRLHDGVAAVHDAVDRGGSQLGLILLRYHLLVALRAHVHGRRAAEEATVIDAEDGSLGGLAPSLLVLHGFLNSDETALFAIPLRRSPRGRRGGEGRGIAGNSVGFE

SEQ ID NO: 66240 - protein, 257 aa, Zea mays
  Clone ID: LIB4719-009-E11_FLI.pep
SRPAGPAGMCSPRPPLGRILRLAVAVAACACFPSPVSGIRKGIGFIQPIVCRSTVQGRHLISDDNGYVCSALSINPWSHCCPTTGDRFSCQGCELDLQCCNSYEYCVSFCLNPSKIKKEDVLKLKVAKPVTAGTYTNVFDFCMGRCRHSSASVVHENAYASDFHHCFSVQQNSSGSTESSSVSKLLGINVVVGRPRESCSLVCKVRGQSCVPSRLSVLNKCEIIQEHAYTCRWMSGSHVMVRTIIPGGSVHAPEKGK

SEQ ID NO: 66241 - protein, 390 aa, Zea mays
  Clone ID: LIB4719-016-A7_FLI.pep
REVQSAAAEHSPSSLFTIPPQNTSCDPRSLRRASIMSAYCGKYADELIKNAAYIGTPGKGILAADESTGTIGKRLSSINVENVEENRRALRELLFCCPGALQYISGVILFEETLYQKTKDGKPFVDVLKEGGVLPGIKVDKGTIEVVGTDKETTTQGHDDLGKRCAKYYEAGARFAKWRAVLKIGPNEPSQLAIDLNAQGLARYAIICQENGLVPIVEPEILVDGPHDIDRCAYVTETVLAACYKALNEHHVLLEGTLLKPNMVTPGSDSKKVTPEVIAQYTVRTLQRTVPAAVPAVVFLSGGQSEEEATLNLNAMNKLSTKKPWALSFSFGRALQASTLKAWAGKVENVEKARAAFLARCKANSEATLGTYKGDAAADTESLHVKDYKY

SEQ ID NO: 66242 - protein, 227 aa, Zea mays
  Clone ID: LIB4719-020-G7_FLI.pep
VAKAAISLSDRLYSCFPSPLLYLHAGLNRTGKSCRLRWVNYLHPGLKRGRMSPHEERLILELHARWGNRWSRIARRLPGRTDNEIKNYWRTHMRKKAQERKRNMSPSSSSSSLTYQSGYPDTPSTIGVEGQELHGGSGCITSILKGTPPDMDGYPMDQIWMEIEAPQMPSEESFVGGNHNVCSSLATPLPPPTVWEYYPDACWKVDDEIKMATQFQFGYSEGVGPCF

SEQ ID NO: 66243 - protein, 270 aa, Zea mays
  Clone ID: LIB4719-021-E4_FLI.pep
VDGEKKTQRERETEGRHRNSESPPRRSHHHRGLRPVRLRRSFCSRMSTESGELLGIDPVDLRFPFELNKQISCTLQLTNKTDKQVAFKVKTTSPKKYCVRPNNGMVAPRSKADVAVTMQAQRDAPPDMHCKDKFLVQSAIVAKETMPKEVTGDMFTKDSGNIVDEVKLKVVYTAPSSSQSEGFEDGNLGSLSYQEETKEPKESEKIISEPFALISKLMEEKNSAVELNNKLRQELDLLRRDISRQHGGFSLVLVLVVAILGILLGFLMKR

SEQ ID NO: 66244 - protein, 250 aa, Zea mays
  Clone ID: LIB4719-022-B10_FLI.pep
IKLRAIHDKLRPPLRSPPSYSDPKERTQGESTMTEGGRPNRPDQRDLGELSAVSDLDHLGGGAVAGAHLLDGLDDVHALDDLAEDDVLAVEPRGRDGADEELGAVGVGPGVGHGEHTGGGVLAHELLVGELLAVDRLAAGAVAAGEVAALAHELGDDAVEGGALVVERLPGLAHALLARAQRAEVLRGLGHLVGVQLHHDPARWGAADGHVEEDARVRHRDRELGFGDIFPSLYECDLICGTEGRTGAVP

SEQ ID NO: 66245 - protein, 338 aa, Zea mays
  Clone ID: LIB4719-022-B7_FLI.pep
RERERERETKTKTKTKAKEHRSPYIPSRRGRETEKVVRREEDAAGEKGDMERPAPVRKSHTSTADLLVWPEGAPQELPAGSTPPSNRRPHQPSEALRKVVFGGQVTEAEAESLNKRKPCSAPKWKEMTGSGIFAAGGEGEEDESANVSATSVRTAPKNYQAISTISHISFAEEESISPKKPTSIAEVAKQRELSGTLLSEDDSKMKRQISDLKSKELSGHDIFAPPEDPRPRNSENGSTSQTPGKNAHVSNFKFGEADEDSAVKTAKKIPTKKFTDLAGNIFKGDDEAPGTAEKHHLSTAKLKEMTGSDIFADGEAPSRDYLGGIRKPPGGESSIALV

SEQ ID NO: 66246 - protein, 316 aa, Zea mays
  Clone ID: LIB4719-024-D1_FLI.pep
GAQAMIPPYGTPPPYVMYPPGVYAHPSMPPGAHPFTPYAITSPNGNADATGTTVAAGNTDGKPSEGKDKSPTKRSKGSLGSLNMLTGKNPSEHGKSSGASGNGVTSQSGESGSDSSSEGSEGNSHNDSHHKESGQEHDGDVRSSRNGVSRLQSEGKLNQAMAILPIPSSGPATDPTTNLNIGMDYWANTASSAPAIHGKATSTTVPGAVVPAEQWTQDEHELKKQRRKQSNRESARRSRLRKQAECEELAQRADVLKQENASLRDEVNRIRKEYEELLSRNNSLKEKLEGKQHKTDEAGLNNKLQHSGDDSQKKGN

SEQ ID NO: 66247 - protein, 280 aa, Zea mays
  Clone ID: LIB4720-001-C2_FLI.pep
LCRQPRPRPRGALTCARRGTLVCGLCAPLPPRPSPRQNSGRSRDRAALLRRPDREDWTRIRSPSRGRGARAMAPAVVSALAKYKLVFLGDQSVGKTSIITRFMYDKFDTTYQATIGIDFLSKAMYLEDRTVRLQLWDTAGQERFRSLIPSYIRDSSVAVVVYDVSNRQSFLNTSKWIDEVRTERGGDVIIVLVGNKTDLVDKRQVSTEEGESKAKELNVMFIETSAKAGFNIKPLFRKIAAALPGMETLSAKQEDMVDVNLKSTSSQSNSQQQEGSGCAC

SEQ ID NO: 66248 - protein, 165 aa, Zea mays
  Clone ID: LIB4720-002-F3_FLI.pep
ELYHACETLKIPHEQVEVLDHPKLQDGFHEKWDHELVSELVMEHVQLWVIDMIVTFDSYGVSGHPNHRDVHYGICKFLHANRQGNVEAWELASLNILRKYSGPVDIWLSSLISVSRSKQSIYTLVNSSPPRSYEAMAAHRSQWVWFRRVFVMLSSYTYINMLQKI

SEQ ID NO: 66249 - protein, 382 aa, Zea mays
  Clone ID: LIB4720-004-B9_FLI.pep
GNSPFALFTIPPQNTSCDPRSLRRASIMSAYCGKYADELIKNAAYIGTPGKGILAADESTGTIGKRLSSINVENVEENRRALRELLFCCPGALQYISGVILFEETLYQKTKDGKPFVDVLKEGGVLPCIKVDKGTIEVVGTDKETTTQGHDDLGKRCAKYYEAGARFAKWRAVLKIGPNEPSQLAIDLNAQGLARYAIICQENGLVPIVEPEILVDGPHDIDRCAYVTETVLAACYKALNEHHVLLEGTLLKPNMVTPGSDSKKVTPEVIAQYTVRTLQRTVPAAVPAVVFLSGGQSEEEATLNLNAMNKLSTKKPWALSFSFGRALQASTLKAWAGKVENVEKARAAFLARCKANSEATLGTYKGDAAADTESLHVKDYKY

SEQ ID NO: 66250 - protein, 145 aa, Zea mays; identical to SEQ ID NO: 53346
  Clone ID: LIB4720-005-B10_FLI.pep

SEQ ID NO: 66251 - protein, 405 aa, Zea mays
  Clone ID: LIB4720-012-A3_FLI.pep
RPPPSPPPVPKANSFQVPMADQANQPTVLHKLGGQFHLRSIISEGVRARNICPSVSSYERRFATRNYMTQSLLGPSMSVSGGINVPVMRTPLCANAPAEKGGKNFMIDFMMGGVSAAVSKTAAAPIERVKLLIQNQDEMIKSGRLSEPYKGIVDCFKRTIKDEGFSSLWRGNTANVIRYFPTQALNFAFKDYFKRLFNFKKDRDGYWKWFAGNLASGGAAGASSLFFVYSLDYARTRLANDAKAAKGGGERQFNGLVDVYRKTLKSDGIAGLYRGFNISCVGIIVYRGLYFGLYDSIKPVVLTGNLQDNFFASFALGWLITNGAGLASYPIDTVRRRMMMTSGEAVKYKSSLDAFQQILKKEGPKSLFKGAGANILRAIAGAGVLSGYDQLQILFFGKKYGSRGA

SEQ ID NO: 66252 - protein, 149 aa, Zea mays
  Clone ID: LIB4720-012-D8_FLI.pep
GLIFCSLHRRRGVRVDNGMARSVSYVSAAKLVSMARGNPRLAIIDVRDEERSYQAHIAGSHHFASGSFEARMPELVRAASGKDTLVFHCALSQVRGPTCARMFSDYLSETKEDSGIKNIMVLERGFNGWEVSGQPVCSCTDAHCKGTCS

SEQ ID NO: 66253 - protein, 385 aa, Zea mays
  Clone ID: LIB4720-014-E4_FLI.pep
PSNPIQTRQARNPPMAHRVLLLLSLASAAAVAAAVDAEDPLIRQVVPGGDDNDLELNAESHFLSFVQRFGKSYKDADEHAYRLSVFKANLRRARRHQLLDPSAEHGVTKFSDLTPAEFRRTYLGLRKSRRALLRELGESAHEAPVLPTDGLPDDFDWRDHGAVGPVKNQGSCGSCWSFSASGALEGAHYLATGKLEVLSEQQFVDCDHECDSSEPDSCDSGCNGGLMTTAFSYLQKAGGLESEKDYPYTGSDGKCKFDKSKIVASVQNFSVVSVDEAQISANLIKHGPLAIGINAAYMQTYIGGVSCPYICGRHLDHGVLLVGYGASGFAPIRLKDKPYWIIKNSWGENWGENGYYKICRGSNVRNKCGVDSMVSTVSAVHASKE

SEQ ID NO: 66254 - protein, 365 aa, Zea mays
  Clone ID: LIB4721-006-G4_FLI.pep
RNNPAAIMSRRLYQHAAVMSAWAPAAYTLVLLLHLLAGAVVTAKTNNGVDPGPRQQEPSMPVDSSGDEALSALTWMATGSEASKAAEAVVDWHKHDSKRMLHAVYRVGDLDRTIKYYTECFGMKLLRKRDVPDEKYTNAFLGFGPENTNFAVELTYNYGVDKYDIGTGFGHFAIANDDVYKLAENIKSKGGKITREPGPVKGGSTVIAFAQDPDGYMFELIQRADTPEPLCQVMLRVGDLERSIKFYEKALGMKLLRKKDVPDYKYTIAMLGYADEDKTTVLELTYNYGVTEYSKGNAYAQVAIGTNDVYKSAEAVDLATKELGGKILRQPGPLPGINTKIASFVDPDGWKVVLVDNTDFLKELH

SEQ ID NO: 66255 - protein, 212 aa, Zea mays
  Clone ID: LIB4721-017-G1_FLI.pep
LNRSVEAGPDPLVSGGARLADGADGPALGRAVGCGEERGEVGVEVDDAADVVVELPDEADVAGEVAGHLGLVVVVDLADQEAVLVQQRLHLHEAGLERVQHLGVHAADAEPGQRRLAVAALHGTRTAAAGRRPRTSLGNSALFVSSRAESAMGGEAAEVRRMWVHLLQESKPLGHGRTVYNTSICYKIRCTCRIFPARARKTRHGSISEPAG

SEQ ID NO: 66256 - protein, 298 aa, Zea mays
  Clone ID: LIB4721-018-A8_FLI.pep
GQTNRDPRIRGRGGEGRGGMEFLQGQRLETTLAVAGAVVAVAAGSAYLFLRSRKPRGCLDPENFKEFKLVEKRQLSHNVAKFKFALPTPTSVLGLPIGQHISCRGQDASGEEVIKPYTPTTLDSDVGSFELVIKMYPQGRMSHHFREMKVGDYMSVKGPKGRFKYLPGQVRAFGMVAGGSGITPMFQVTRAILENPKDNTKVHLIYANVTYEDILLKEELDGMAKNYPDRFKIYYVLNQPPEVWDGGVGFVSKEMIQTHCPAPAADIQVLRCGPPPMNKAMAAHLDDLGYTKEMQFQF

SEQ ID NO: 66257 - protein, 280 aa, Zea mays
  Clone ID: LIB4721-020-A8_FLI.pep
PRHPDPAAAVNRHAPILPQQTQHKQTGRDSDPLVTHPRYPLSLGFLSHHQPPSRLSPPPPALGRRDEGRREAPAGRGGKRSSRAGGEMFLWDWFYGVLASLGLWQKEAKILFLGLDNAGKTTLLHMLKDERLVQHQPTQHPTSEELSIGKIKFKAFDLGGHQIARRVWKDYYAKVDAVVYLVDAYDKERFAESKKELDALLSDDSLANVPFLILGNKIDIPYAASEEELRYHLGLSNFTTGKGKVNLGDSNVRPLEVFMCSVVRKMGYGDGFKWVSQYIK

SEQ ID NO: 66258 - protein, 154 aa, Zea mays
  Clone ID: LIB4722-002-F9_FLI.pep
LFYMLLFGATVLTGIVLIGGMIPYISETFARILFLSNSLTFMMVYVWSKHNPFIHMSFLGLFTFTAAYLPWVLLGFSILVGSSTWVDLLGMIAGHVYYFLEDVYPRMTGRRPLKTPSFIKALFADDNVVVAQPPNAGIGAGARFGAIGVDPQAQ

SEQ ID NO: 66259 - protein, 165 aa, Zea mays
  Clone ID: LIB4725-002-G5_FLI.pep
AQPSSCRRCTGSALPSPFGDRRHPLAGSGNISGLLHVHCLQLDLGNSYYRVAASNNRLHDGVAAVHDAVDRGGSQLGLILLRYHLLVALRAHVHGRRAAEEATVIDAEDGSLGGLAPSLLVLHGFLNSDEAALFAIPLRRSPRGRRGGEGRGIAGNSVGFPAGLE

SEQ ID NO: 66260 - protein, 150 aa, Zea mays; identical to SEQ ID NO: 46166
  Clone ID: LIB4725-005-C3_FLI.pep

SEQ ID NO: 66261 - protein, 261 aa, Zea mays
  Clone ID: LIB4725-006-A7_FLI.pep
WVAMRLIHGQGHQRANNETEEARKKIRKFKESAWECVYFLSGELLSLSVTYNEPWFTNTRYFWVGPGEQVWPDQKIKLKLKAVYMYAAGFYTYSIFALMFWETRRSDFGVSMSHHVATVVLIVLSYVFRFARVGSIVLAIHDASDVFLEVGKMSKYSHCDWLANVSFLFFVISWVLLRLTYFPFWILRSTSYEVLLTLDKKKHNFDGPIYYYVFNSLLFSLLVLHIYWWVLIYRMLVRQIKTRNVGDDVRSDSEGEDDHED

SEQ ID NO: 66262 - protein, 474 aa, Zea mays
  Clone ID: LIB4725-006-F3_FLI.pep
PSPLAAANPAPSPRLVAMGTRNLTRNRAASMATASTTLLLSLAFLAFAWAASPSPDAEAISRFQEYLRIDTAQPAPDYAAAVAFLRKQAAEAGLEARTLELVAGKPLLLLRWPGRRPSLPSILLNSHTDVVPSEPNKWDHPPFSAALDEPSGRIYARGSQDMKCVGMQYLEAIRRLRSAGFVPDRNIYITFVPDEEIGGHGGVEPFVSSKEFKDMNVALVLDEGLASPGEEYRVFYAERSPWWLTIKATGAPGHGAKLYDGSAMENLMKSVEAIRRFRTSQFDLVKSGEKAEGDVVSVNFAYLKAGTPTPTGFVVNLQPSEAEVGLDIRIPPSAHVEALERRLVEEWAPPSRNLTFEFKQKMSVLDNFGKPAMTAADSTNPWWTLLEEAVKSADGKLGKPEIFPASTDARYFRKIGLPAFGFSPMANTPILLHDHNEFLSKDEYLKGIGIYESIIRALATHEDGGKDDESRAEL

SEQ ID NO: 66263 - protein, 182 aa, Zea mays
  Clone ID: LIB4725-012-E7_FLI.pep
PASPLPRHPSSARALSLSLSLSVSLSLVPLSLSDDRWAAAADAALSQVLRLLLVSSPARSTQQDKATGCWNMDQQGMHDHEGVHVVGFEVPPSPDSSYDNPVPGNEDEGREPPLMPPHLQHTLLSFPPSQDESSPLPQPQTVVLNHLYIEKENTRSMVALGITHRFKAKFVTVVLYKPVLRR

SEQ ID NO: 66264 - protein, 118 aa, Zea mays
  Clone ID: LIB4725-014-G10_FLI.pep
QKLHVSEEQNHLEAKFIILLKHNVPFSLFDRSALAAFKNRVLYANVSYDRILPCKNRFLNYWLPPPKLSLLLFLFFVFLIFLVPDMVGWRTSSLRREKNLIKVAVPPELIPLTAYLSH

SEQ ID NO: 66265 - protein, 346 aa, Zea mays
  Clone ID: LIB4725-015-H7_FLI.pep
SRPAGFHSQLGCPTLASVDGGGGEDRGFPEEAVMETMAKYNRSNPAVKRILQEVKEMQCNPSPDFMALPLEEDIFEWQFAILGPRDSEFEGGIYHGRIQLPSDYPFKPPSFMLLTPSGRFEIQKKICLSISNYHPEHWQPSWSVRTALVALIAFMPTNPGGALGSLDYKKEDRRALGIKSREAPPKFGSPERQKLIDEIHEQMLSKAPPVPQTLPNVPNEESNELPASDPSGEHADKVDEGDNTSGSVSDSSSGLPVPESESGVTENTGETSAVEVANHHVPEASHRENIPRVSSSHQNPAVAIQKPKHDRLLTLAAFGLTLAIMALVIKKFLKINGLGGFIEGKF

SEQ ID NO: 66266 - protein, 182 aa, Zea mays
  Clone ID: LIB4725-017-C10_FLI.pep
EGEDMGAEEDAAARRERLRALRAAKDLLSTPDGAPTPSTDGEHQNGNHEMAEEPELPGHQDAPGEAAKEDGSPTEEAEEVEDDGELPAMKFRNYLPHDEQLRGGKLAPVSLPKFEDPISAETAEPKEVENLFGNIAPKNPNWDLKRDVQKRIDKLERRTQKALAEIACECSYMFNLQMLHLF

SEQ ID NO: 66267 - protein, 455 aa, Zea mays; identical to SEQ ID NO: 40951
  Clone ID: LIB4725-021-D6_FLI.pep

SEQ ID NO: 66268 - protein, 232 aa, Zea mays
  Clone ID: LIB4725-023-B3_FLI.pep
RATAVYNLPDTNRREPPLDLVELVCLHHRISLGNGVPGSSPVVELAVVLVGVAVERAVQVPTPAVESREPNPLPAGAAPVRPYLPPFGDRRHPLAGSGNISGLLHVHCLQLDLGNSYYRVAASNNRLHDGVAAVHDAVDRGGSQLGLILLRYHLLVALRAHVHGRRAAEEATVIDAEDGSLGGLAPSLLVLHGFLNSDETALFAIPLRRSPRGRRGGEGRGIAGNSVGFEIP

SEQ ID NO: 66269 - protein, 430 aa, Zea mays
  Clone ID: LIB4725-024-A8_FLI.pep
VTPGFTPALLAVVFSGTSKGGTNVRAACLPADMGSSLKYRSGLCLIVAVVLIWVISAEVTQGIFTKYRHPFAVTYLGASLMVIYLPLSFLKDFIYNSLRRHSRNTSASKIASKSSFGGSAPLKNGEFQKMLEMESQKTIVVNCPDVSIPVVEETKPLICGITEMDDGLFKDKQLSTKEIATYGLYLCPLWFVTEYLSNAALARTSVASTTVLSSTSGLFTLFIGVLLGQDSINAAKIIAVFISMAGVVMTTVGQTWASDESEAGKSGFTQRTLLGDMFGLMSAIAYGLFTVLLKKFCGEEGEKVDVQKLFGYLGLFTLVALWWIVWPLTALGVEPKFSMPHSAKVDEVVVANSLIGSVLSDYFWALSVVWTTPLVATLGMSLTIPIAMVADMIIHGRHYSAVYILGSVQVFSGFVTANLADRFSRSLGLS

SEQ ID NO: 66270 - protein, 231 aa, Zea mays
  Clone ID: LIB4725-024-E5_FLI.pep
IMQHILTFDAYVVGKENAPGIVVLQEWWGVDYEIKNHAIHISQLGGGYKALIPDLYRGKVALDVAEAQHLMEGLDWQGAAKDIQASVKWLKSNGSPKVGVTGYCMGGALSIASGVLVPEVDAVVAFYGTPSSELADPSKAKAPIQAHFGEHDSFVGFSDVTAAKSLEEKLKSSGIPYEVHIYPGCSHAFMNTSPEALKRKKGMGLTDENQEAVDLAWSRFSSWMGRFLGSA

SEQ ID NO: 66271 - protein, 346 aa, Zea mays
  Clone ID: LIB4725-024-G9_FLI.pep
MEALVVRQLGDPTLPPGGEASPFAAVSGDHPVPEISSPTAVRVRVAATSLNFATFLQVQGKYQERPPLPFVPGSDYSGVVDVVGPGVRGLRPGDRVCSFTGLGSFADFIVAEEKQLFLVPDGCDLVTAGALPVAFGTSHLALVHRAQLKAGQVLLVLGAAGGVGASAVQIGKVCGAVVIAVARGAEKSDYLKSIGADHVIDSSKDNVIESAKSFLKARGLKGVDVLYDPVGGKLTQDSLKLLNWGAQILVIGFASGDVPVIRANIALVKNWTVHGLYRGSYLTHRPQVLIDSLNELLSWLSKGLITVQISHCYRLVEVHLAFSALRDRKAVGKVMIVMGSSAVPRL

SEQ ID NO: 66272 - protein, 131 aa, Zea mays
  Clone ID: LIB4726-002-D5_FLI.pep
SPYSTPLCFLEAAKLNPSSPHSALGPAAAAACRVYSHVTSGCLCLIWRPHTNLRRLRAGTRVPAGRGGHPAVAAPEAVPQARGRGLRRRGGLCRRAVRGREAAAPRAHRRSVSRKRVRCLPRRPCVVLPPP

SEQ ID NO: 66273 - protein, 215 aa, Zea mays
  Clone ID: LIB4726-002-H12_FLI.pep
ADRRFLFLRADKDNLCLYGLPNGSWEVSPPAEEVPPELPEPALGINFARDGMQRRDWLTLVAVHSDSWLISVAFFYGARLNGNDRKRLFSMMSDLPSVLEAFADRKQDRDRSGVDSSGKSRHSSKRGKDGHAKSSRAAAPAAKEYDEDDDEEDEEEHTETFCGSCGGLYNASEFWIGCDICERWFHGKCVRITPAKADHIKHYKCPDCSSKKMRQ

SEQ ID NO: 66274 - protein, 455 aa, Zea mays; identical to SEQ ID NO: 40951
  Clone ID: LIB4726-003-D5_FLI.pep

SEQ ID NO: 66275 - protein, 159 aa, Zea mays
  Clone ID: LIB4726-006-D4_FLI.pep
ASPKRNQRRAAFCELRQKLSADPGRHILRRHDHHRNVLERGGPLHSLEQIVSCHAWHAVVSDDEIHVDLLVVRRGRRRRRRVPQPQQLQRLAPGIHRGHLVGRGLEQHLDEFPVDEAVVHREDMEARLGIRHRHGGVGWDEQRAPTAAFPLVGLLGLAR

SEQ ID NO: 66276 - protein, 264 aa, Zea mays
  Clone ID: LIB4726-010-D10_FLI.pep
ATSSKMDKSIPVVSKIFCSGTPTMLMIRMRPIVVNGGGFVVTDLSHNIVFVVDGCGILGSKGELMVKDGEGEPILFISKKGGIVQALSTRNKWNVYSMDYQGKNKLVFSLTDPKLCTAQGAPIRIHIEPKRHCKNWDFEIGGSFADRDCTIVDCTRKIVAQVCHAFIIPYTSAFVVNYICRFLVLSLIKGIPELIQVMINRCYSMRAENKKVYFYISIDMVHFWLKKCITVPRDSATLLCTCVCKYLYESVEVYRQYYIHATSI

SEQ ID NO: 66277 - protein, 218 aa, Zea mays
  Clone ID: LIB4726-012-A7_FLI.pep
PLSHSTPTFTCSCREQAMAPDLSELAAAAAARGAYLAGVGVAVLLAASFLPVAESSCVRDNSLVRDISQMPQSSYGIEGLSHITVAGALNHGMKEVEVWLQTISPGQRTPIHRHSCEEVFTVLKGKGTLLMGSSSLKYPGQPQEIPFFQNTTFSIPVNDPHQVWNSDEHEDLQVLVIISRPPAKIFLYDDWSMPHTAAVLKFPFVWDEDCFEAAKDEL

SEQ ID NO: 66278 - protein, 233 aa, Zea mays
  Clone ID: LIB4726-013-C11_FLI.pep
GVEASTEGVLGGYGCVNDADVKGSDAFLRPLLADRFGTAKRHLVALDCGSGIGRVTKNFLLGHFNEVDLVEPVSHFLEAAQENLTGCMDQGEDSHKAANFYCVPLQDFTPEEGRYDVIWIQWCIGQLPDDDFISFFNRAKVGLKPDGFFVLKENIARNGFVLDKVDNSVTRSDAYFRDLFKRCGLYILSVKDQKELPKGLFAVKMYALVTSQPKIQNSGKRRRPRNSPRMIRS

SEQ ID NO: 66279 - protein, 442 aa, Zea mays
  Clone ID: LIB4726-014-G3_FLI.pep
QGREQPSGFPLATGREPSPSSHASKRRRGLRGESMADRFIPNDFPDFVAEAEASDGEGHRPAGHRGLLSLPYTRLSDHFVRAARRLKDKVVEETWVKAGRKVTDYTLYTGSLGTALLLFKSFQVTGDRGDLALAADIVRACDDASRGLPFLTFICGRAGVCALGAVIAKHCDDQLRVTQYLSSFDEITITEKVPNELLYGRAGYLWACLFLNKHLSEKTIPLDHINSVAKDIINEGRGFASKGSSPLMYEWHGKKYWGAAHGLAGIMHVLMHTELKPDEQDDVKNTLRYMIKNKFPSGNYPSSEGNESDHLVHWCHGAPGVALTLAKAYEVFHDDYFEQSAAEAAEVVWNRGLLKRVGICHGVSGNAYAFLSLYRLTGNVEYLYRAKAFACFLLEKADQLIAEGAMHGGDRPFSLFEGKAGMSYLLLDMVDPSESRFPAYEL

SEQ ID NO: 66280 - protein, 350 aa, Zea mays
  Clone ID: LIB4726-017-E7_FLI.pep
RGPAGTSLLPGPSRRARPKHTLTRGPTFSLVASLLCASSSSLAHRRQGTQEKSRGGQMRRDLASSFATAASSSSAADALRGWWDDVNESPQWQDAAFFSLAAAYALVSAVALIQLVRIQRRVPEFGWTTQKVFHLMNFLVNGVRALVFGFHVHVFLLRAKVYKLVLLDLPGLLFFSTYTLLVLFWAEIYHQARSPPTDKLRPAYIAVNTIIYVVQVCIWIYLGINDNAVVELASKIFIVAVSFVALLGFSVYGGRLFVLLRRFPIESKGRQKKLYEVGTVTAICVTCFLIRCVVVALSAFDADVSLEVLDHPVLDFFYYMLAEILPSALVLFVLRKLPPKRVSAQYHPIN

SEQ ID NO: 66281 - protein, 340 aa, Zea mays
  Clone ID: LIB4726-020-A11_FLI.pep
VANGRAIRRASSPSSIGGRGMSGAASVERVKDRDIGLDKFVLREARGSSVEVYLYGGQVTFWKNNFGQQLLFVSNKLGNHGVLEQHGFARNRFWSVDESPPPFPVATSNCHVDLILKSSPEDLKIWPHSYEFRLRVALTPRGDLILTSRIKNISSDSKPFQFTFAYHTYFSVSDISEVRVEGLETLDYLDNLQSKKRFTEQGDAVVFESEVDKVYLSAPPKVVIIDHEKKRTFVLRKEGLPDVVVWNPWDKKDEEYKSMLCVGAAAIEKPVTLKPGEEWIGKQEISAVPSSYSSGQLDPELIRRMHNIKFTRDCIDPTFQTSLCFFFNSEAALGLESSPC

SEQ ID NO: 66282 - protein, 216 aa, Zea mays
  Clone ID: LIB4726-021-H2_FLI.pep
RLEFSRPAVMATEQAAENYTVEDLVALNPYNPDILNDLEKFVNERFEPERMSIQIVAHILIKALMAMPAPDFSLCLFLIPEHVQMEEQFKVLIVLSHYLETARFSQFWDEAAKNRHISEAVPGFEQAIQSYAIHVLSLTYQKVPRPILVEAINIEGLALDKFLEYHAANSGWVIEKGGQSQVIVLPRNEFNHPELKKNTADILPFEHVTRIFPVLG

SEQ ID NO: 66283 - protein, 287 aa, Zea mays
  Clone ID: LIB4726-021-H6_FLI.pep
ANMQIILELTRCRGRNSRGGLHKCAPCTAMPNNKIVAANMEEKGAGGKAAVPHDELPRFTIFLIPNRREPPLDLVELVCLHHRISLGNGVPGSSPVVELAVVLVGVAVECAVQVPTPAVESRKSNPLPAGAAPVRPYLPPFGDRRHPLAGSGNISGLLHVHCLQLNLGNSYYRVAASNNRLHDGVAAVHDAVDRGGSQLGLILLRYHLLVALGAHVHGRRAAEEATVIDAEDGSLGGLAPSLLVLHGFLNSDETALFAIPLRRSPRGRRGGEGRGIAGNSVGFEMGP

SEQ ID NO: 66284 - protein, 103 aa, Zea mays
  Clone ID: LIB4727-006-G2_FLI.pep
SLSFQPLFVLLHVIVLMLIVYGCVSNLGGFRNMVDKRTALENLDLILLCLDEIVDGGIVLETEGREIAEKVSGHGSEGASSAEQTLVNALTQAREHLAKSLLM

SEQ ID NO: 66285 - protein, 266 aa, Zea mays
  Clone ID: LIB4727-009-C3_FLI.pep
YRKAGFMSGGTPAASSSLRAALSYCVRQVRAYDYHHYLCLLHLAPAVRKAAFTFRAFNIQTARAMDVVSDPRTGLMRLLWWKEAVDKVFGNKLVEHLVAHALSSVIADHKVSKHWLKRSVEARINDTNREEGTIPGTSAELERYAEDTQSTILYMTLQAGGIQSTVADHAASHIGKASGLLLLLKALPHHVNKQGTVHYIPASVAEECGLLITREGGRSEVRAGVRLPDVVFKVTSVAEAHLHKARELASSVPKEAIPVLLPALPA

SEQ ID NO: 66286 - protein, 292 aa, Zea mays
  Clone ID: LIB4727-015-B7_FLI.pep
ERSQDLGFLRSSPRMDPNPRAPLLLAIVVLALGVSVVASAEDDASGVSLGRRAGGFLHGLKKDALAEGDHGVALDEVGPGLFDALFASLSMILVSEIGDETFIIAALMAMRHPKSIVLSGALSALYVMTVLSTGLGRIVPNLISRKHTNGAATVLYLFFGLRLLYIAWKSDPKGSQKKEMEEVEEKLESGQGKSTIRRFFARFCTPIFLEAFILTFLAEWGDRSQIATIALATHKNAIGVAVGASLGHTVCTSLAVVGGSMLASKISQRTVATIGGVLFLGFSVSSYFYPPL

SEQ ID NO: 66287 - protein, 252 aa, Zea mays
  Clone ID: LIB4727-017-E3_FLI.pep
PGPAAAYTYVNGRRHQRGGKQSSGSGGHRSRRGEQEHDGDVGRDVQEHRRRAEAAADGDGDRVRGAEPDRDQRGRLRRRCRRVQGRHGGAAGALRLLLRLLDLHRQLRGRRRQGQVRPRHAPGPPPIQRRRVRGGLPAGRRQHRGVLLPVAQGPAEEGGHGAPRRRRRRRQRRLRPLPLHAPRDRVPAVQARGERARRVAVARGADESRGRELHWFRAKLFVSINTYLCAYVMRVSVYVCVTFSHACFHRLT

SEQ ID NO: 66288 - protein, 184 aa, Zea mays
  Clone ID: LIB4727-017-G11_FLI.pep
EKGSKGERKKKEIDGGGRRREQRRGRGRVLPALLRGTQGQVRARVPRVRVPPRRQAPLRQQLQLQERHHDPQGGLRLALRPPRGQEDYPGVRYHEGGRQQLARARPHRPPGARDRHGQRAHFIHHFQDRLSRRCPVQQGPGGPPDLLLPCPGSEVFRVLAHQPSLQDQANPVLSSIPSLHVAGL

SEQ ID NO: 66289 - protein, 180 aa, Zea mays
  Clone ID: LIB4727-017-G4_FLI.pep
KWQICAEHFKMLKTRKMREAELAAQRAKRTKTVMRVRFPDGYILEADFIPSERIHSLVDLLLKVLARPDLPFYLYTVPPKKRILDTSQDFYTAGFVPGANVHFSYDLPEDSLLNADDLKAGPFLREEILSLDGLSLLLKPASQPDDSRMNSSSLQSDASQSVPVPTTTNKKPGRPKWPKR

SEQ ID NO: 66290 - protein, 408 aa, Zea mays
  Clone ID: LIB4727-022-A7_FLI.pep
FSSRAQTLNLNLSPAAAATTSTATPPPPSRSPLPAPSTSSRIEAMSSDDEVREEKELDLSSNDVVTKYKAAAEILNNALKIVVSQCKPKVKIVDLCEKGDSFIREQTGNVYKNAKRKIERGIAFPTCVSVNDTVCHFSPLATDDAVLEENDMVKIDMGCHIDGFIAVVAHTHVITNGPVTGRAGDVLAAAYDCKIVEGVLSHQLKQFVIDGNKVVLSVSNADTKVDDAEFEENEVYAIDIVTSTGEGKPKLLDEKQTTIYKRAVDKNYHLKMKASRFIFSEISQKFPIMPFTARALEEKRARLGLVECMNHELLQPYPVLHEKPGDLVAHIKFTVLLMPNGSDKITSHPLQELKPTKSIEDNAEIKAWLALGTKSKKKGGGKKKKGKKGDAAEADPMEEATNGATSQE

SEQ ID NO: 66291 - protein, 497 aa, Zea mays
  Clone ID: LIB4727-022-D5_FLI.pep
VFTNAGANSRPSPTDLQFPIPPTDRPSRQSRSLPKASRAVVWEERRKMRECISVHIGQAGIQVGNACWELYCLEHGIQPDGQVPGDKTAGHHDDAFSTFFSQTGAGKHVPRAIFVDLEPTVIDEVRTGTYRQLFHPEQLISGKEDAANNFARGHYTIGKEIVDLCLDRIRKLADNCTGLQGFLVFNAVGGGTGSGLGSLLLERLSVEYGKKSKLGFTVYPSPQVSTSVVEPYNSVLSTHSLLEHTDVSILLDNEAIYDICRRSLDIERPNYSNLNRLVSQVISSLTASLRFDGALNVDVNEFQTNLVPYPRIHFMLSSYAPVISSAKAFHEQLSVAEITSSAFEPASMMVKCDPRHGKYMACCLMYRGDVVPKDVNAAVATIKTKRTIQFVDWCPTGFKCGINYQAPTVVPGADLAKVQRAVCMISNSTSVVEVFSRINSKFDLMYAKRAFVHWYVGEGMEEGEFSEAREDLAALEKDYEEVAAEGGSDDGDEEEEY

SEQ ID NO: 66292 - protein, 187 aa, Zea mays
  Clone ID: LIB4727-023-A2_FLI.pep
HDVHTFQLKRLEPPGFSFQIVNTNLDEVSPRARRRSALLTWQHIASLPPNLPVIYCGGFNTQKESMTGRFLLGRSREHGVVGDMRDAWPNARVRKNVSLIHTYHGFKGEKQGALEFLKLIFRALCLCWDRQTQDLHIDWILFRGRPLVPALCEVINDNIDGVYPSSHFPIFAEFLLPRSVRLAETPS

SEQ ID NO: 66293 - protein, 255 aa, Zea mays
  Clone ID: LIB4728-003-G12_FLI.pep
SEAGRALCLSRVCDFNRRRCSSHIPREDACSSPIDTMAVFSDLHTADGLKSLEAHLAGKTYVSGDSITKDDIKVFAAVPSKPGAEFPNAARWYETVSAAVASRFPGKSVGVNLPAGSAPAAAAPADEAEDDDDLDLFGDETEEDKKAADERAAAAKASSKKKESGKSSVLMDVKPWDDETDMKKLEEAVRSVLMEGLTWGASKLVPVGYGIKKMTIMLTIVDDLVSIDTLIEDHLTQEPINEYVQSCDIVAFNKI

SEQ ID NO: 66294 - protein, 231 aa, Zea mays; identical to SEQ ID NO: 43391
  Clone ID: LIB4728-004-H10_FLI.pep

SEQ ID NO: 66295 - protein, 162 aa, Zea mays
  Clone ID: LIB4728-006-A8_FLI.pep
PAGKKILGSTQPHAAASLSAPLSIFHLIRRRGTPCSSLAMARIKVHELRGKSKTDLQAQLKELKSELSLLRVAKVTGGAPNKLSKIKIVRTSIARVLTVISQKQKSALREAYKKKKLLPLDLRPKKTRAIRRRLTKYQLSLKTEREKKREKSFPMRKYAIKA

SEQ ID NO: 66296 - protein, 219 aa, Zea mays
  Clone ID: LIB4728-007-F11_FLI.pep
RGRPGPPPLDVSLAISSSTPDWRTRHHEGADRCPCSPGARCERRLQYKRRLWLPDTTVSSTASVLYAASVLSAAAAAAAAMAIPHSTTAAKPVPAVRILRRRQRRQPVPGPVRRVPEAPVQPGGDALRLATVPGAAAAVLPPDQAGGAAAPVPGDIRCGPAVLPAAAAAGRARGADGGPGSAAADGDVRSAAAAARSLPLQRSCRRCLLLRKLCTVVIM

SEQ ID NO: 66297 - protein, 363 aa, Zea mays; identical to SEQ ID NO: 42242
  Clone ID: LIB4728-008-C4_FLI.pep

SEQ ID NO: 66298 - protein, 239 aa, Zea mays
  Clone ID: LIB4728-009-E3_FLI.pep
SLIIGMVGSLIFPTPNVDPKAENPNEMVTAGVLSSLQNFLRKCLIAILSYGPMQLMEEKINELLENRSVINKINCKTNFWGNLDLLYEPVRLAAEKLTASTAGNTGLVFSICMPYNSTSEIVNAVSQVCAERMEMFQSEHIGECNGHAANNGVRSEISVADLDRHMYSAECPDPDIVIRTSGETRLSNFLLWQTTFSYLQNPDPLWPEFSFRHLVWAVLQYQRVYPALEHNRKLAKKQL

SEQ ID NO: 66299 - protein, 231 aa, Zea mays; identical to SEQ ID NO: 43391
  Clone ID: LIB4728-010-B7_FLI.pep

SEQ ID NO: 66300 - protein, 240 aa, Zea mays
  Clone ID: LIB4728-010-B8_FLI.pep
RLRSRGEMAQAVEEWYRQMPIITRSYLTAAVVTTVGCTLEHYEIWRLVTNFLYFRKMDLDFLFHMFFLARYCKLLEENSFRGRTADFFYMLLFGATVLTGIVLIGGMIPYISETFARILFLSNSLTFMMVYVWSKHNPFIHMSFLGLFTFTAAYLPWVLLGFSILVGSSTWVDLLGMIAGHVYYFLEDVYPRMTGRRPLKTPSFIKALFADDNVVVAQPPNAGIGAGARFGAIGVDPQAQ

SEQ ID NO: 66301 - protein, 359 aa, Zea mays
  Clone ID: LIB4728-011-B11_FLI.pep
PAGTRPSHTSAPGLCRRRHRSLARQPAWARSTDSDSARPASCTGRRGRGLRECDGGNAGAASASASAGGGRGDDALPRRRPHSRRVRRRRRRLAERARHVLRRQRRFGHHGRRLRVRQPVQPGVRREQLGAEHGAVQRGAPLRRVLRDQVRGAARVAVVPAREALHPGHGHQLLPAQLRAPLRRRRLVQPAPPALRPRHAHVPPHRRVPRRHRARLLPPGAVPQVRRGAVHHQRLPVLQPGVDHERGRRGGRGAREREGGQHRVAAHVQELGPELAVQRHPRRPGALLPRHRQRPPHLHLLERRPEHLAVRPDLRGQELQGLMHGMGWDGMRLGRRSQNSFLSFFLSFFLYVIITTHSC

SEQ ID NO: 66302 - protein, 212 aa, Zea mays
  Clone ID: LIB4728-017-D8_FLI.pep
GIRIDQHYHFKYAESEQPATRRLVHQARTAKSHEQVGPRSLERGPQLPGRRPDLAVHERELDLTVVELLSVVPLAELEVHRRSLDDLDAGGPHAVARGHLVVHLLHSAIQGRVAVLLVHVVVSGSALVAQPDAVVLDCRRVTLKDLVDGQDLAVALLNLLQLPQEVPELALGADLVGGPELHAVDLGVLIAGRRERAPHHLVLMEPEGHHFR

SEQ ID NO: 66303 - protein, 459 aa, Zea mays
  Clone ID: LIB4728-017-F1_FLI.pep
AHNTIAMVTFKAHRSDPELVTPASPTPQGSKTLSDVDSQIPLWFYATVIEFFRPRNAVDGHDTQAVVDVAEAIREALAKALVYYYPIAGRLREVSKGKLAVECSGEGVVFVDAHADVRLDELGEPLLPPYPCIEELVCDIGDAKDVVGRPLMFMQVTRFKCGGFAIGVSICHNMADAFGVIQFLKCVTDLARGDEHPAVLPVWDRELLTARNPPDPTSLPFVQESHESSPVQPMAMDKMVGCYFLFGPREIAALRSQVTEPATNFELITAAMWMCRAEAIALALGCGSAGSQQQRASSSLLITMNVRGKAKLTPPLPRGFYGNGFVFVEAELRGATRSLGGTVELVQKAKRGMTEEYVKSMVDLFSLGGAAPYAQGWTFVVSDITRIGEDELDLGWAERVAGGVPIVGNDDATKMVSYQMRCKNADGEDCVVASMYLPEPAMNKFKEKILILATSKLAT

SEQ ID NO: 66304 - protein, 249 aa, Zea mays
  Clone ID: LIB4728-020-G12_FLI.pep
GRPARVCDFNRRRCSSHIPREDACSSPIDTMAVFSDLHTADGLKSLEAHLAGKTYVSGDSITKDDIKVFAAVPSKPGAEFPNAARWYETVSAAVASRFPGKSVGVNLPAGSAPAAAAPADEAEDDDDLDLFGDETEEDKKAADERAAAAKASSKKKESGKSSVLMDVKPWDDETDMKKLEEAVRSVQMEGLTWGASKLVPVGYGIKKMTIMLTIVDDLVSIDTLIEDHLTQEPINEYVQSCDIVAFNKI

SEQ ID NO: 66305 - protein, 216 aa, Zea mays
  Clone ID: LIB4728-022-D7_FLI.pep
RGRPGPPPLDVSLAISSSTPDWRTRHHEGADRCPCSPGARCERRLQYKRRLWLPDTTVSSTASVLYAASVLSAAAAAAAAMAIPHSTTAAKPVPAVRILRRRQPVPGPVRRVPEAPVQPGGDALRLATVPGAAAAVLPPDQAGGAAAPVPGDIRCGPAVLPAAAAAGRARGADGGPGSAAADGDVRSAAAAARSLPLQRSCRRCLLLRKLCTVVIM

SEQ ID NO: 66306 - protein, 363 aa, Zea mays; identical to SEQ ID NO: 42242
  Clone ID: LIB4729-001-H6_FLI.pep

SEQ ID NO: 66307 - protein, 133 aa, Zea mays
  Clone ID: LIB4729-003-H7_FLI.pep
PAGRNRQGDRSGEQGSGRAGDIIVIQGFSIGSDGDQGGGEEKAAENVYIKKVEQEKLEKLARKGPSSGEQPSSTTGSAASDVKADAGPTESASASVSTDKNKNYAVLAGAVAALGGLGWYLLLKPKKSEEVVD

SEQ ID NO: 66308 - protein, 203 aa, Zea mays
  Clone ID: LIB4729-004-C4_FLI.pep
PAGAIRNSQPFPVARSEAPPATSDVRRGGGERRGAQDRRRVPQGQVPDELRGGDHPGAQVRADPAARVVGVGPVVAGVAGVREVAAVREAIQPLQEPRRRAPGPRDAEPLRPRRVRALHARQPLPRHQRRGHRARPLPQVRRQVRRRPRGREDREDAQRPLPRQEVRVEREPPGSVSPLFSSFLLGVASIQRGGEFNIKTMYC

SEQ ID NO: 66309 - protein, 155 aa, Zea mays
  Clone ID: LIB4729-006-H11_FLI.pep
YPTWVTNLALDLLKTMREIEECRISGTILVIGEYHGRFVLHALTNKKLKVLQLAKEKLGCTLDTLFELIRFLWLQHSSEILDVFFYVRDKCFLSKGGCSCRRNVSTISTTFTAVSSTLSSSPPSADGLAPMSTSTGPWVTHFPSTSHRTPFSSSL

SEQ ID NO: 66310 - protein, 243 aa, Zea mays
  Clone ID: LIB4729-008-A7_FLI.pep
IKLRAIHDKLRPPLRSPPSYSDPKERTQGESTMTEGGRPNRPDQRDLGELSAVSDLDHLGGGAVAGAHLLDGLDDVHALDDLAEDDVLAVEPRGRDGADEELGAVGVGPGVGHGEHTGGGVLAHELLVGELLAVDGLAAGAVAAGEVAALAHELGDDAVEGGALVVERLPGLAHALLARAQRAEVLRGLGHLVGVQLHHDPARRGAADGHVEEDARVRHRDRELGFGDIFPSLYECDLISRPA

SEQ ID NO: 66311 - protein, 172 aa, Zea mays; identical to SEQ ID NO: 41503
  Clone ID: LIB4729-008-G6_FLI.pep

SEQ ID NO: 66312 - protein, 202 aa, Zea mays
  Clone ID: LIB4729-010-A10_FLI.pep
GRPGKTLKKKRPSKTPPPPLMLSAVRCGALRRWRPPPHLLPRILSSSFGTSPARPQVGALLELPEVEKVLRDVRAGDVRVFPVGESGLHGGACADYMVVATGRSDWHVRNIAQALLYKIKQKQKGSDRILMPSVEGQQAGKWVVIDSGSIIIHALEERAREYYDLESIWSKEVSPNTSIQELETSLVKTRRRNLSQKPMKSI

SEQ ID NO: 66313 - protein, 205 aa, Zea mays
  Clone ID: LIB4729-010-F8_FLI.pep
PLAAMSPAAATTTFVAISIAVPNPTAPSRGRVRLPLGGVPAAPRRAVASMAVSAPRSGAATSFLERRESERALHFVKYQGLGNDFIMVDNRDSSVPKVTPEEAAKLCDRNFGIGADGVIFVMPGVNGADYTMRIFNSDGSEPEMCGNGVRCFARFIAEIENLQGTNRFTIHTGAGKIVPEIQSDGQVKVDMGEPILSGLDIPQNC

SEQ ID NO: 66314 - protein, 145 aa, Zea mays; identical to SEQ ID NO: 53346
  Clone ID: LIB4729-011-C2_FLI.pep

SEQ ID NO: 66315 - protein, 274 aa, Zea mays
  Clone ID: LIB4729-011-D1_FLI.pep
AGREQQQATAAIKPSASTGGSPNSVSNSRVLLLSDPELRRPQHQARPPSRVTEMALPNQGTVDYPSFKLVIVGDGGTGKTTFVKRHLTGEFEKKYEPTIGVEVHPLDFTTNCGKIRFYCWDTAGQEKFGGLRDGYYIHGQCAIIMFDVTSRLTYKNVPTWHRDLCRVCENIPIVLCGNKVDVKNRQVKAKQVTFHRKKNLQYYEISAKSNYNFEKPFLYLARKLAGDPNLHFVEAVALKPPEVTIDMAMQQQHEAELAAAAAQPLPDDDDDLIE

SEQ ID NO: 66316 - protein, 231 aa, Zea mays; identical to SEQ ID NO: 43391
  Clone ID: LIB4729-011-D2_FLI.pep

SEQ ID NO: 66317 - protein, 345 aa, Zea mays
  Clone ID: LIB4729-013-B8_FLI.pep
RGRPGPPQPFPFSACLLLQCCLPLALPLAQQQAAVMPGDHGSKGDISFAGRFTASAIAACFAEICTIPLDTAKVRLQLQKNVVAAAASGDAAPALPKYRGLLGTAATIAREEGAAALWKGIVPGLHRQCIYGGLRIGLYEPVKSFYVGKDHVGDVPLSKKIAAGFTTGAIAISIANPTDLVKVRLQAEGKLAPGVPRRYTGAMDAYSKIARQEGVAALWTGPGPNVARNAIINAAELASYDQVKQSILKLPGFKDDVVTHLFAGLGAGFFAVCVGSPVDVVKSRMMGDSAYKSTLDCFVKTLKNDGPLAFYKGFLPNFARLGSWNVIMFLTLEQVQKLFVRKATS

SEQ ID NO: 66318 - protein, 489 aa, Zea mays
  Clone ID: LIB4729-013-C2_FLI.pep
PGRLQHSREAMAGPPLLSFLFFFLLCVALAWSEAYGASGGYGLGVNYGRVADDIPSPWRSVELLRAAGAGSVKIYDANPGVLRALAGTRWPVSIMVPNQIIPDLAASAAAADRWVAENLVPYYPATRVKFLLVGNEILSDLSIANSTWPHLVPAMENIHRSLRKRGISSVKIGTTLAMGALADGAFPRPPSAAAFRADIAETVVRPLLHFLNGTNSYYFVDAYPYFVWADNNLTVSLDYALFQGGRTRYVDPGTGLTYTNLLDEMLDAVVIAMAKLGYGHVKLAIAETGWPNGCDYNQIGGNVHNAAIYNRNLAARMAKNPGTPVRPGAKMPVFVFSLYNEDLKPGPGTERHWGLYYANGTAVYEIDLTGRRPLGSYPPLPAPENNIPYKGPIWCVLSAAASNKLNETAVGNALSYACGQGNGTCDAIQPGKTCYTPNTTAAHASYAFNSYWQQFEKTGATCYFNNLAEQTTKDPSHGSCRFPSSLGSP

SEQ ID NO: 66319 - protein, 432 aa, Zea mays
  Clone ID: LIB4729-014-B6_FLI.pep
TRSTSRRIPSHYHPSRRPPIRSGSSNPGAVMATKRSVGTLGEADLKGKKVFVRADLNVPLDDAQKITDDTRIRASVPTIKFLLEKGAKVILASHLGRPKGVTPKYSLKPLVPRLSELLGVEVVMANDCIGEEVEKLAAALPEGGVLLLENVRFYKEEEKNEPEFAKKLASVADLYVNDAFGTAHRAHASTEGVTKYLKPAVAGFLMQKELDYLVGAVANPKKPFAAIVGGSKVSSKIGVIESLLAKVDILILGGGMIYTFYKAQGYSVGKSLVEEDKLELATSLIEKAKAKGVSLLLPTDIVVADKFAADAESKIVPATAIPDDWMGLDVGPDATKTFNEALDTTKTVIWNGPMGVLEFEKFAAGTEAIAKKLAELTTTKGVTTIIGGGDSVAAVEKAGLADKMSHISTGGGASLELFEGKTLPGVLALDDA

SEQ ID NO: 66320 - protein, 340 aa, Zea mays
  Clone ID: LIB4729-014-G9_FLI.pep
AITTAFKARLPTEPKVLSSTQSLFKKYRGTQALIICTKPMETSKSPQSSKNSHIVVPSDSNGPRFDNDGFSSEAASNQMVVFNSEAGDKEQDELGENRLQKSIITRGISPSIGAFTVQCAKCFKWRLIPTKEKYEEIRERIIEEPFVCKRAREWRPDVTCNDPEDISQDGSRLWAIDKPNIAQPPRGWERQIRIRGEGGTKFADVYYTSPTGRKLRSLVEVDRFLQENPEYGAQGVTLAQFSFQIPRPLRQDYVKKKPKLINPSDEASMVASKSFQPEEVKPIAWAVATKHEGDASEEASLTDEAPTSEVMLARKRKAGSSLSVEPNHLSDELEPKLEDA

SEQ ID NO: 66321 - protein, 205 aa, Zea mays
  Clone ID: LIB4729-015-H1_FLI.pep
LGRGQAAPNQREHPDQTPKSIAMAMKPAAAAPPTPAAAHSVFVYGSLMADEVVRTILKRVPPAAPALLPNYHRFNIKGRIYPAILPVESKRVAGRVIMGVTDEELQLLDAFEDVEYTRTRVEISLADSSENMLADTYVWSDAEDLNLYGEWDFEEWKKLHMKDFLAMTNGFMHELEQPESKTRVETYQEFMQQQEQPAPGTQVEG

SEQ ID NO: 66322 - protein, 160 aa, Zea mays
  Clone ID: LIB4729-015-H12_FLI.pep
NSQDLLGNGAGFLKSLLLLTAEVEFVGVVIHATSIFIHFLGTLLMKFFQQAKDAACDLAALLEALLRIRVLLLAVEEGDVLRAAPDCDVLRRCHQHRRSRDRLPQSVYGRAARRHRCGRGGFAGAPGLGDLGKEVGEAEARRPHLDGKGGRDGLTTPGRP

SEQ ID NO: 66323 - protein, 223 aa, Zea mays
  Clone ID: LIB4729-017-D1_FLI.pep
SYLAVAAQRTMEWLSWRTVCCLSVLCTVLFLRPVEGIRFVIDREECFSHNVEYEGDTVHVSFVVIKADTPWHYSEEGVDLVVKDPNGAQVRDSRDKTSDKFEFIVQKRGVHRFCFTNKSPYHETIDFDVHVGHFSYFEQHAKDEHFAPLFEQIAKLDEALYNIQFEQHWLEAQTDRQAILNENMSRRAVHKALFESAALIAASVIQVYLLRRLFERKLGTSRV

SEQ ID NO: 66324 - protein, 425 aa, Zea mays
  Clone ID: LIB4729-018-H2_FLI.pep
GDPFPPRRRSHRAASLPRRRKMAASARPLVTVRALEGDMATDSAGVPLADVLRAPIRPDIVRFVHKLLSCNSRQPYAVSRRAGHQTSAESWGTGRAVSRIPRVPGGGTHRAGQGAFGNMCRGGRMFAPTKIWRRWHRRVNIHLRRVAIASALSATAVPSLVLARGHRVESVPELPLVVSDSAESIEKTAQAINILKQLGAYADAEKAKDSVGIRPGKGKMRNRRYINRKGPLVVYGTEGSKVVKAFRNLPGVDVANVERLNLLDLAPGGHLGRFVIWTECAFKKLDEVYGTFNAPSAKKKGFVLPRPKMANADLSRLINSDEVQSVVKPINKDVKRREPRKNPLKNMAAVLKLNPYLGTARKMAALAEAARVKARKQKLDSKRTKLSPEEASKVKAAGKAWYKTMVSDSDYTEFENFTKWLGVTQ

SEQ ID NO: 66325 - protein, 197 aa, Zea mays
  Clone ID: LIB4729-026-F3_FLI.pep
SEMSQSQRPGTEAVEGNLPPLTDLAFQSFISRKPEVILSVATVSQKAHKSIFSDVNQLILSAINMGNITVVRRRNNILKLLSSENVNANKVALGMPMLPSLGSGDLNNLAGTSLDDDVAVLADGAGLLRVGLGGAGVGLGLELVLLVRHLRESYRDPVEKYERRFAGRIRDREARALRFGFCQIFIRGRRPMGRVFP

SEQ ID NO: 66326 - protein, 438 aa, Zea mays
  Clone ID: LIB4729-026-G7_FLI.pep
LAAPATVPPEVRGCDRGMDTLPEGVVQHILSQLSNARDVAGCAAVARCWRDCVAFLPSLYFPRGAFEALAGGPASAVAFADDAIGRMVDAAARLEELVVYCPFSASLLPHWLAARAATLRVLELRMDSAAADKSGHLNLDSIGVAAGLEELRLWGLTMTRAPAWGRMERLRVLEIVSAILVDAAVNDVLAACPNLTDLSLLGCQCDGEAVISLASLERCRLDFLGSGNSSLRFAAPRVESLEVQGFSFIYLQGGNRLKHLTISKNTGSVHHVEMGKLPELDQLSLRGVQWSWGAISSVLQCASEVKHLVMKVEFSGDYDTLQPFPEIDLVEFFNSHPKLRKFEVHGAMFAALSQENSLKNLDSRFVIPFLEQVVVTVRSSLNAKQKLNTLKSVVRYSVRLRRMIIRISQMKNCHAAGDDFFEEICKFTYMNSGTVCIE

SEQ ID NO: 66327 - protein, 316 aa, Zea mays
  Clone ID: LIB4729-028-B3_FLI.pep
PAGEEPFGIWTRPREMKPAADHRPTAVLLTGALDETVRAWLPDDLAALGSPTRGHALGVVSLAAHPAGSLAAAVSLDSFIRVFDVDTGASVATLEAPPSEIWGVQFHPKGNALAAAGGGSGSVKLWDTEKWKAITSLAVPRPEGARPDKTGSGKFVLSVAWSPDGRLLACGSMDGTIAVYDAVRMKFLHHLEGHHMPVRSMVFSPVDPHVLFTACDDCHVHIYDAREKGLVGAMSGHASWVLSIDASPDGLAVATGSSDRTVRLWDLNMRTSVQTMSNHSDQVWAVAFRPPGGAGVRAGRLASASDDKSVSLYDYS

SEQ ID NO: 66328 - protein, 196 aa, Zea mays
  Clone ID: LIB4729-029-F8_FLI.pep
PGPSSSSQRRRSLSRSLPYSRSAHRRRRSGSQRRRQRLTLAPSPPVLRTPAGDPAYYTGYPKDLGRSRIIPFTSERQFVQLLHEGRPVVVAFTIKCTYTQHLDKVLEEAAAKFYPHIKFVRVECPKYPGFCLTRQRNEYPFVEVFYNPEQAASPGKSVDPNITKYSVKVLPFNYDQSVYGFREYFKKRGFKYSETN

SEQ ID NO: 66329 - protein, 160 aa, Zea mays
  Clone ID: LIB4729-029-G7_FLI.pep
VWLHAVLLLLIIFIAVTLHDTTLRRLCTAQAQASTSVDVYCVLLSTTRVQFWQAKRLFEELCLARLLAPAVAEVAVAGGPPAVLLDALVAAEAVGDAGERVVLALAHAHPGLRHHRRPAVVVREQEQRQEERAHGRPGLDELHRRPAWIGSVLLRTGPET

SEQ ID NO: 66330 - protein, 402 aa, Zea mays
  Clone ID: LIB4729-030-A2_FLI.pep
GSPLHHRSCMTMERSQPQHQQSPPSPSSSSSCVSADTVLVPPGKRRRRAATAKANKRARKDPSDPPPAAGERSSVYRGVTRHRWTGRFEAHLWDKHYLAALHNKKKGRQVYLGAYDGEEAAARAYDLAALKYWGPEALLNFPVEDYSSEMPEMEAASREEYLASLRRRSSGFSRGVSKYRGVARHHHDGRWEARIGRVLGNKYLYLGTFDTQEEAAKAYDLAAIEYRGANAVTNFDISCYLDHPLFLAQLQQEQPQVVPALDQEPQADQREPETTAQEPVSSQAKTPADDNAEPDDIAEPLITVDNSVEESLWSPCMDYELDTMSRSNFGSSINLSEWFTDADFDSDLGCLFDGRSAVDGGSKGGVGVADFSLFEAGDGQLKDVLSDMEEGIQPPTIISVCN

SEQ ID NO: 66331 - protein, 509 aa, Zea mays
  Clone ID: LIB4729-032-D1_FLI.pep
RPVKVSRKMWKQLLSKLPRKSPACGDSGQCSNGTGIQRTSSCGSIPPGRPASAIRRMSSAVFPSSVVAGIEPLVSFKDVPNSEKQNLFVSKLSLCCVVFDFSDPNKSSVEKDIKRQALLDLIEFVESTNARFSEAAIAACSRMCAINLFRAFPPSCRSGSSGGGEGDEEEPMFDPAWCHLQLVYELLLKFIGSSSLDAKVGKKHFDHSFIVKLLNLLDSEDPRERDCLKTILHRVYGKFMVHRPFIRKAVSNIFYQFVFETDRHNGIAELLEVFGSVISGFALPLKEEHKIFLWRVLIPLHKPKSVGVYLQQLTYCVTQFLEKDPKLASSVIIGLLRYWPITNCQKEVMFLSEIEEILESTSQAEFQKCMVPLFRRIAHCITSSHFQVAGRALFVWNNDHIISLIAQNRQVIMPLVVPALEQNIQNHWNQAVLNLTVNVKKMLSEMDDDLFSSCLAKYKDEEEKRASLEAKRRLTWEKLESAAAFQPVTGHTAVLVGHRPSANLIATMI

SEQ ID NO: 66332 - protein, 433 aa, Zea mays; identical to SEQ ID NO: 66109
  Clone ID: LIB4729-032-E1_FLI.pep

SEQ ID NO: 66333 - protein, 452 aa, Zea mays
  Clone ID: LIB4729-032-G5_FLI.pep
ASSSAMGKEKSHINIVVIGHVDSGKSTTTGHLIYKLGGIDKRVIERFEKEAAEMNKRSFKYAWVLDKLKAERERGITIDIALWKFETTKYYCTVIDAPGHRDFIKNMITGTSQADCAVLIIDSTTGGFEAGISKDGQTREHALLAFTLGVKQMICCCNKMDATTPKYPKARYDEIVKEVSSYLKKVGYNPDKIAYVPISGFEGDNMIERSTNLDWYKGPTLLEALDQITEPKRPSDKPLRLPLQDVYKIGGIGTVPVGRVETGVIKPGMVVTFGPTGLTTEVKSVEMHHEALQEALPGDNVGFNVKNVAVKDLKRGFVASNSKDDPAKEAASFTSQVIIMNHPGQIGNGYAPVLDCHTSHIAVKFAELITKIDRRSGKELEKEPKFLKNGDAGMVKMIPTKPMVVETFSQYPPLGRFAVRDMRQTVAVGVIKSVEKKDPTGAKVTKAAAKKK

SEQ ID NO: 66334 - protein, 116 aa, Zea mays
  Clone ID: LIB4729-032-H10_FLI.pep
KKKKKIPAAAATCSPLPLLSPFVRSRPGTKMVLQNDIDLLNPPAELEKLKHKKKRLVQSPNSFFMDVKCQGCFSITTVFSHSQTVVVCPGCQTVLCQPTGGKARLTEGCSFRRKGD

SEQ ID NO: 66335 - protein, 674 aa, Zea mays
  Clone ID: LIB4729-033-E1_FLI.pep
GISCPHFPLPASLCSPDPSSLSAPPRHLVAAPAHRLSSAVERASSGEAMEEEIRKEFQSNGFSIGGAGPEDAAQILSTLLTYCINYKMSPADLVSNWEVYYLNRQLDGLKLESSYLDGFLSHLQNEVKDRIIKEEANLHIYSSNDVDMLLSNSHVDEAAFHDTPGYEQEKAPEGSSISELTPRASDRPSSSRVAKTNADRITPFATRVNKFTQQYVLNADNAVSVPSKNAEITEDEIIRRVQPSQRCYLQVQRSQPEPGCRFMYDRMEDRFNYLEDRIRKSASLFSASGFCGQPADATLASEEKMFAVGTVACDGEGHLNEKSILLQGSVEHSRGQCVRLDLKDLDHFSLFPGQVVGIEGHNPSGHCFVASKLFDSIPVSVDAQLPSAKKQAIDNESNQNSDAGTLSRALSSIIAAGPYTTTDNMLFEPLQELLSYACRKPPQLLILMGPFIDSDHPDIKKGTIDQSFHDIFHFEVLRKIQDFTQYLGNTVRVILIPSVRDAHHDFVFPQPAFDLNLLEDTTHQITSLANPCLFGSNEINFGCCTVDILKQLSGQEISRKPPGGKPGDRIGRLASHILKQQSYYPLYPPAPGVPLDLSLAKEALEIPSAPDVLLLPSDLAPFVKVLSLGEGSDDDRRFICVNPGRLAKGIGGGTFVELYYNEGIDKTNASIIRI

SEQ ID NO: 66336 - protein, 455 aa, Zea mays; identical to SEQ ID NO: 40951
  Clone ID: LIB4729-034-B8_FLI.pep

SEQ ID NO: 66337 - protein, 145 aa, Zea mays; identical to SEQ ID NO: 53346
  Clone ID: LIB4729-034-G3_FLI.pep

SEQ ID NO: 66338 - protein, 178 aa, Zea mays
  Clone ID: LIB4729-035-A12_FLI.pep
REPSAGAADPSPSLPSLAPTPTRRDGPEEGQGPAAVVEAGQVRWWQAKEEEVEQGKAKGEGKQRGAVRPGYLRQAALGGAQVQANHPFHPLRASEDQRLPCSEGHQGLDGAWPHSDGLGPLKPADLHQGNQYIRMGKRSKMHCLPSLQEELVFRTVAIFVKSCQCYVTGDEFQVTATF

SEQ ID NO: 66339 - protein, 721 aa, Zea mays
  Clone ID: LIB4729-035-B12_FLI.pep
LHPPPHLHPRGGGGRHRHRLSPPFVVVSLCMEASAGSSPPHSQKNPPEHGGDMGGAPAEEIEGEAADDFMFAEDTFPSLPDFPCLSSPSSSTFSSNSSSNSSSAYTNTAGRAGGEPSEPASAGEGFDALDDIDQLLDFASLSMPWDSEPFPGVSMMLENAMSAPPQPVGDGMSEEKAVPEGTTGGEEACMDASEGEELPRFFMEWLTSNRENISAEDLRGIRLRRSTIEAAAARLGGGRQGTMQLLKLILTWVQNHHLQRKRPRDVMEEEAGLHGQLPSPVANPPGYEFPAGGQDMAAGGGTSWMPHQQAFTPPAAYGGDAVYPSAAGQQYSFHQGPSTSSVVVNSQPFSPPPVGDMHGANMAWPQQYVPFPPPGASTGSYPMPQPFSPGFGGQYAGAGAGHLSVAPQRMAGVEASATKEARKKRMARQRRLSCLQQQRSQQLSLGQIQASVHLQEPSPRSTHSGPVTPSAGGWGFWSPSSQQQVQNPLSKSNSSRAPPPSLEAAAVAPQTKPAPAGARQDDIHHRLAAASDKRQGAKADKNLRFLLQKVLKQSDVGSLGRIVLPKKEAEVHLPELKTRDGISIPMEDIGTSRVWNMRYRFWPNNKSRMYLLENTGEFVRSNELQEGDFIVIYSDVKSGKYLIRGVKVRPPPAQEQGSGSSAGGKHRPLCPAGPERAAAAGAPEDAVVDGVSGACKGRSPEGVRRVRQQGAGAMSQMAVSI

SEQ ID NO: 66340 - protein, 762 aa, Zea mays
  Clone ID: LIB4729-036-A1_FLI.pep
PVPSVRTPSISLLATTGRPSLLPYAVFGLFVVDERHKVPTIFKKKRSMEAALSFSKDSPPISIICAAKLVGLPLTINHSLAAGSAPTLQFASGESLHGVNPIILCIARGASIASLSGKNDIEFGHVVEWLEYAPTFLSGSEFENACLFVDGFLASRTFLVGHGLTIADIAVWSNLAGIGQRWESLRKSKKYQNLVRWFNSIDSEYKEALNEVVAAFVGKRGIGKSPAPSLKEKVHDSKDPSAPEVDLPGAKVGKVCVRFAPEPSGYLHIGHAKAALLNKYFAERYQGRLIVRFDDTNPSKESNEFVENLLKDIETLGIKYDAVTYTSDYFPKLMEMAESLIKQGKAYIDDTPKEQMRKERMDGIESRCRNNTVEENLSLWKEMVNGTERGMQCCVRGKLDMQDPNKSLRDPVYYRCNTDPHHRVGSKYKVYPTYDFACPFVDALEGVTHALRSSEYHDRNAQYYRILQDMGLRRVEIYEFSRLNMVYTLLSKRKLLWFVQNKKVEDWTDPRFPTVQGIVRRGLKVEALIQFILQQGASKNLNLMEWDKLWTINKKIIDPVCARHTAVLKDQRVIFTLTNGPEEPFVRILPRHKKFEGAGKKATTFANRIWLDYADAAAINKGEEVTLMDWGNAIVKEIKVESGVITELVGELHLEGSVKTTKLKITWLADIEELVPLSLVEFDYLISKKKLEEDEDFLDNLNPCTRREIPALGDANMRNIKRGEIIQLERKGYYRCDAPFIRSSKPVVLFAIPDGRQQASLS

SEQ ID NO: 66341 - protein, 120 aa, Zea mays
  Clone ID: LIB4729-036-C8_FLI.pep
IGKARDAENSKGEEEKRGKKQMAESPSKIESMRKWVVEHKLRAVGCLWLGGISSSIAYNWSRPNMKTSVKIIHARLHAQALTLAALVGSACVEYYDQKYGSSGPKVDKYTSQYLAHSHKD

SEQ ID NO: 66342 - protein, 170 aa, Zea mays
  Clone ID: LIB4729-037-A5_FLI.pep
RAKLSTSISSEQAPQPNRLGALAADAARELDVLGHDGDALGVDGTEVGVLEEAHQVGLGGLLQRGDGGGLEPEVRLEVLRDLADQTLERELADQQLRALLVLADLAQRADLRAAFVASCFRGALPPVDLRAVCFVRAIGEGWGQGGRGGFALFWGSEFGRGVGLWLRGGR

SEQ ID NO: 66343 - protein, 231 aa, Zea mays; identical to SEQ ID NO: 43391
  Clone ID: LIB4729-038-H3_FLI.pep

SEQ ID NO: 66344 - protein, 234 aa, Zea mays
  Clone ID: LIB4729-040-E11_FLI.pep
QRTTCSRTHTHTSTFVPSAAYASPHTGNKVLLNIRSLRTVSLCLLRGLGGLLERLCLLAPATGRLLRRLLGQQNRVDIGEHTAVSDGHAAQQLPKLLVVPDRQKHVARNNASLLVVPGSITGELQNLSGEVFEDSGEVDGGAGADTLRVAALLQVAPDAADGELETGLHGPRHRLLPWPADLAPGRSLLPLTPCSGAGGVHGRISASIGLSGTRRKCSGVGTNAELRVDYVILC

SEQ ID NO: 66345 - protein, 460 aa, Zea mays
  Clone ID: LIB4729-040-F10_FLI.pep
REQPRSIGKSRWAMAGQEHRCRRIVLFPLPFQGHISPMLQLAELLHARGLAVTVLHTGFNAPDATRHPELTFVPIHESSFPDEVTSLGTDIVTQLLALNAACEAPFREALASLLRGGQDVACAVVDGQCYSALRAAHRLGVPALVLRTDSAATFSSMLAYPRLRDAGFVPVKEERLDEPVPDLERLRARDLIRVDGSDTDALCGFIARVADAVRASASGVVINTFERMEASELAKIQRELSRPAFAVGPLHLLSQAPAEQSLHAPDRGCLAWLDDHPPRSVLYVSLGSVACVDRGAFVEMAWGQARSGVSFLWVVRPGLVGGVPEVPPLPDGFSEEVRNRGKIVSWAPQREVLAHAATAAFWTHCGWNSTLESVCEGVPMLVQPCFADQMVNARYVTHEWGVGLEVGEEIERGRVAMAVTKLMTGEDAAQMRGRAYHLKILASAATSLPIDSLIHYISSL

SEQ ID NO: 66346 - protein, 434 aa, Zea mays
  Clone ID: LIB4729-042-D8_FLI.pep
PGTRSTSRRIPSHYHPSRRPPIRSGSSNPGAVMATKRSVGTLGEADLKGKKVFVRADLNVPLDDAQKITDDTRIRASVPTIKFLLEKGAKVILASHLGRPKGVTPKYSLKPLVPRLSELLGVEVVMANDCIGEEVEKLAAALPEGGVLLLENVRFYKEEEKNEPEFAKKLASVADLYVNDAFGTAHRAHASTEGVTKYLKPAVAGFLMQKELDYLVGAVANPKKPFAAIVGGSKVSSKIGVIESLLAKVDILILGGGMIYTFYKAQGYSVGKSLVEEDKLELATSLIEKAKAKGVSLLLPTDIVVADKFAADAESKIVPATAIPDDWMGLDVGPDATKTFNEALDTTKTVIWNGPMGVFEFEKFAAGTEAIAKKLAELTTTKGVTTIIGGGDSVAAVEKAGLADKMSHISTGGGASLELLEGKTLPGVLALDDA

SEQ ID NO: 66347 - protein, 314 aa, Zea mays
  Clone ID: LIB4729-042-E3_FLI.pep
RRLQVLLSISSHTDTTDGDVPFATQRNARWIWDAAHGRMELASVGEGVEDGAHVEGERGGDEADEARGGLGGGAVGGAAQRAEADLHDHDHGRHEEDAADDGSDGGGEHAEAEHAGVDVGARRVVRVLGVDEVERQLQALRHQAGEEEGREGHHLQHQQRPRHARAGVAPRVPRQAPQLPRGRQRQPHEHGHREQRVHVHHAVQRRHVHARRVRAQRRRELPLVPVVRVGVPAAVAVLLRSGMDGDRARNIRFLHPSMEGARGRDLLVHGGMRLDQAEARGSWTADFAGQPWGWDGGKNEMEELRIVQLTKDPG

SEQ ID NO: 66348 - protein, 198 aa, Zea mays
  Clone ID: LIB4729-046-D9_FLI.pep
NLRKESPNLAHLEAFEARNPSSSASPPLPPMAPGLQRFTDIADDGTPQLDAASGEELVRVDRTVAVALGPRSPESPGTLFVTTRRVIWLSEAEKGKGYAVDFLAISLHAVSRDLEAYPSPCIYTQIEAAVGAEEEAGESNPEANELELSRVSEMRLILADPGQLDALFDVLCHCAELNPDPNAECNGENGWIRGENNV

SEQ ID NO: 66349 - protein, 145 aa, Zea mays; identical to SEQ ID NO: 53346
  Clone ID: LIB4729-047-F1_FLI.pep

SEQ ID NO: 66350 - protein, 363 aa, Zea mays
  Clone ID: LIB4729-047-H9_FLI.pep
PPSRRASIMSAYCGKYKDELIKNAAYIGTPGKGILVADESTGTIGKRLSSINVENVEENRRALRELLFCCPGALQYISGVILFEETLYQKTKDGKPFVDVLKEGGVLPGIKVDKGTIEVVGTDKETTTQGHDDLGKRCAKYYEAGARFAKWRAVLKIGPNEPSQLAIDLNAQGLARYAIICQENGLVPIVEPEILVDGPHDIDRCAYVTETVLAACYKALNEHHVLLEGTLLKPNMVTPGSDSKKVTPEVIAEYTVRTLQRTVPAAVPAVVFLSGGQSEEEATRNLNAMNKLSTKKPWSLSFSFGRALQASTLKAWAGKVENLEKARAAFLARCKANSEATLGTYKGDAAADTESLHVRDYKY

SEQ ID NO: 66351 - protein, 429 aa, Zea mays; identical to SEQ ID NO: 45748
  Clone ID: LIB4729-049-A2_FLI.pep

SEQ ID NO: 66352 - protein, 327 aa, Zea mays
  Clone ID: LIB4729-049-G12_FLI.pep
RVEGACRGEQRKQAIVNRLYLSSLCKPVGHHSKACEAGEMGKEVDVSTLEAGGVRDRDYADPPPAPLIDIDELGKWSLYRAVIAEFVATLLFLYITVATVIGYKHQTDASASGPDAACGGVGILGIAWAFGGMIFILVYCTAGISGGHINPAVTFGLFLARKVSLVRALLYMAAQSLGAVCGVALVKGFQSGFYARYGGGANEVSAGYSTGTGLAAEIIGTFVLVYTVFSATDPKRNARDSHVPVLAPLPIGFAVFMVHLATIPITGTGINPARSLGAAVVYNNSKAWSDQWIFWVGPFIGAAIAALYHQIVLRASARGYGSFRSNA

SEQ ID NO: 66353 - protein, 548 aa, Zea mays
  Clone ID: LIB4729-050-C1_FLI.pep
PGPSHNRTVPLKPQPAMAIAADSAADQDPNPIPNEAAGESVELPAYTDHGEPNADLADVDYEDEEELDGVTAEAAARDKVEAVFQRLSEAPVGIRVHDIIIKGNTKTRDALIEAEVVGLIRSAVTVQDLVRTANIAAVRLRLLDVFDSVHVLLDAGPPELPGTTNVIIQVVEAANPIDGSVGCFSKPEARSWTVEGSVRWRNIFGYGDIWDASGAYGWDQSSEISIGVSLPRFRSIPTPSTARASLLSHDWLKFSSYKERLLGLSFGLLSDMHHDLSYNLTWRTLTDPSQSASKSITRQLGHNLLSALRYTYTIDQRDSHLRPTKGYAFVSTSQVSGLWGSKGLRFFRQEFDIRGAVPLGFYNAALNAGISAGVILPLGRGFMESPSSVPDRFFLGGHSSPVISLCSLTSLLGFKTRGVGPTELRRIVPSESVTNESTASPGWDYLGGDFAVSAFADLSFDLPLKLFQDAGIHGHAFLSAGNLAKLSEGEFRNFSFSKFGRTFRSSAGVGIILPTKLLRAEINYRYILKQFERDRGKTGIQFSFSSPM

SEQ ID NO: 66354 - protein, 646 aa, Zea mays
  Clone ID: LIB4729-053-C9_FLI.pep
DSMDQYEVLEQIGKGAFGSALLVRHKLERKKYVLKKIRLARQTDRTRRSAHQEMQLIANVRNPFIVEHKDSWVDKGCYVCIVIGYCEGGDMAEAIKRANDTHFSEEKLCQWLVQLLMALDYLHAHHILHRDVKCSNIFLTRDQNIRLGDFGLAKILTADDLASSIVGTPSYMCPELLADIPYGTKSDIWSLGCCMYEMAALKPAFRAFDMQNLINKITKSIVSPLPTRYSGAFRRLVRSMLRRSPEHRPSAAELLKHPHLEPYVLQLHLKSHLSRSIVPVHQSPSEKRMTFAAEPVCRSKGRRNSLGSERMIAAFSKPSPDRSSVSSIRSVKDEYTATQSVRELSVDDSMVEVASKPVASRTSDVMRTPKATPWKMMTTLRNRLEAPQASYDHTEFSRTPVDKRNSRVARRASLPLPVFETPKQRSSMSVLEQLESPDVSVNSPRIDRIAEFPLASCEDPLFSTVKPPTPASASASATPPFVDRSITKDKCTAQTLRSAARDGGNGRSEDGGGLSSGRTTTTAASSGGTSGSLQPKGRFDTTSYQQRAEALEGLLEFSAQLLQQERYEELGVLLRPFGPDEMVSPRETAIWLTKSFKEAMATGLQRWPPCTGMDGSGIQDRPSALQAVDGRMASPVLACVGQVGRL

SEQ ID NO: 66355 - protein, 212 aa, Zea mays; identical to SEQ ID NO: 63896
  Clone ID: LIB4729-053-D12_FLI.pep

SEQ ID NO: 66356 - protein, 529 aa, Zea mays
  Clone ID: LIB4729-053-G10_FLI.pep
ERGATRGEKKDNRLGMASSFNNKTSHWPSMFRSKHAAEPWQAQPDISSSPPSLLSGGGSSSTTTIGRCLKHPLSGYSGGEERTPDPKPRWNPRPEQIRILEAIFNSGMVNPPRDEIPRIRMRLQEYGQVGDANVFYWFQNRKSRSKNKLRTGQLGLGLARAPGCGAAAAPVTLQPLIPNQFQLLASPAQAPASSSSSSSDRFSGSSKSAAQPMSATAAAMDFPGPLGAACAQMYYQAHPVAPVSAPPAHKVQDPVASDEPVFQPWPQGYFLSAAEVASILGGQYRHNVPVQQQPPAALPAGAFLGLYNEATEPTVTGHRTCAWGPAGLGQFWPVGGADHHQHHKHNTTAATNTVARDAAHEHATTLGLLQYGFEASAAMETASAAVPLAASPGTAASVATAGLTSLPASTNAVVVNYDLLQGLAVPGSGSGAVGVSTGGAPPVAVAAAPTAAQEGVVVALCITDSVTGKSVAHNVAAARLDVRAQFGEAAVLLRAVGDRGGLDLVPVPVDALGCTVEPLQHGAFYYVLV

SEQ ID NO: 66357 - protein, 172 aa, Zea mays; identical to SEQ ID NO: 41503
  Clone ID: LIB4729-054-C1_FLI.pep

SEQ ID NO: 66358 - protein, 229 aa, Zea mays
  Clone ID: LIB4729-056-D6_FLI.pep
GIMTEQQEGVSKSSSSSISSSTQESEEELTIGTLITEVTNTTNSAKSLGKRLSHLDSIPHTPRVNGKIPDFNNATIDHESLLERLGTYGLAEYQIEGDGNCQFRALADQIFRNPDYHKHVRKAVVKQLKEFRKHYEGYVPMEYKVYLKKMKRSGEWGDHVTLQAAADRFAAKICLLTSFRDTCLVEIVPRDATPTREFWLSFWCEVHYNSLYAVEDLPTRKTKKKHWLF

SEQ ID NO: 66359 - protein, 254 aa, Zea mays; identical to SEQ ID NO: 66198
  Clone ID: LIB4729-056-E1_FLI.pep

SEQ ID NO: 66360 - protein, 251 aa, Zea mays
  Clone ID: LIB4729-056-G4_FLI.pep
GLSLPAFLLRLALAGGQAHRRRAMDASYRRAGTGSGSAPRSVEDIYKDYRSRRSAILRALTHDVEEFYALCDPEKENLCLYGYANEAWEVALPAEEVPTELPEPALGINFAFYYAARLNRSDRKRLFGMMNDLPTVFEVVSSGVKQSKERDRSGTDNGGRNKLSVKQTSEPRLENNAREPDEGYDEDDSNHSETLCGTCGGIYSADEFWIGCDVCEKWYHGKCVKITPAKAESIKQYKCPSCCNSKRPRPI

SEQ ID NO: 66361 - protein, 190 aa, Zea mays
  Clone ID: LIB4729-057-F8_FLI.pep
TAKQIFSSWQRHVNELCSCFLQVRDEISTLLRLLQPREDHLGSRNVLFRVKQVLIQSVFFPDYSLVFVSRRVGVACSGTRLSPKKTVQVWTLLVAGALVDRVALRALGLKDLLAGFRVPGGSLRERRHRRTQRSEPRRRRGRGQPQLPLCPLPLDLRRIRREGPRLFCRPLEPGVGAWSSRKYGTAPKKG

SEQ ID NO: 66362 - protein, 178 aa, Zea mays
  Clone ID: LIB4729-058-B4_FLI.pep
PQAFMFLSRCLRWRLGPLAADPPCQLNVLWHDGHTLSMDGAQVGVLKQANKVCLSSLLEGKHRMALETQISFEVLCNFPDEPLEGQLPDQQLSALLILADLTEGNSSRAVAVRLLHSTSGGGRLTGSLGGKLLPGSLPSRGLASSLLGTSHLSRFFGLSARFESGGRRARNGRPEKSR

SEQ ID NO: 66363 - protein, 288 aa, Zea mays
  Clone ID: LIB4729-058-F7_FLI.pep
PGTLNTAEIRFGASGGKAGTVSSTMLPGRHPARRADTTGTGPLLPDATRAVVAEFVATAMFVFAAEGSVYGLWKLYKDTATPGGLLAVAIAHTLALVAAVAVASNASGGHVNPAVTFGLLVGRRISFGRAAVYWLAQMLGAVVASLLLTLVSGGTRPVGFGLVRGVHERHALLLEAVMTFGLMYAVYATAVDHRSRGGAVAIAPLAIGFVLGANILAGGPFDGAAMNPARAFGPALVGWSWRHHWVYWVGPLIGAGLAGGLYEFVMVEQEPEAPLAAVPRMPVASEDY

SEQ ID NO: 66364 - protein, 278 aa, Zea mays
  Clone ID: LIB4729-058-H11_FLI.pep
GAAMASDVPMTPELEQIDGEIHDIFRALQNGFQKMDKIKDSNRQAKQLEDLTVKMKECKRLIKEFDRILKDEESNNPPEINKQLNDRKQSMIKELNSYVTLRKTYQSSLGNNNKRVELFDMGAGSSEPAAEDNIQMASAMTNQQLIDAGRNQMDQTDQAIERSKMVVAQTVETGAQTAATLTQQTEQMKRIGNELDTVHFSLKKASQLVKEIGRQVATDKCIMAFLFLIVLGVIAIIVVKIVHPNNKNIRDIPGLAPPAQNYQIHNRRLLWAEASIGL

SEQ ID NO: 66365 - protein, 216 aa, Zea mays
  Clone ID: LIB4729-059-C11_FLI.pep
SESPNPIPLPPLRLRRWRRTEPEPGALTNPRRQAAAGMVYYALLVGAELDGLTNLQPRHGCDDPNFPYYLKPKVSCNHNEQKLSISPTPRKKRSMASEQGVVIACHSKAEFDAHMTKAQEAGKLVVIDFTAAWCGPCRAIAPLFVEHAKKFTQVVFLKVDVDEVKEVTAAYEVEAMPTFHFVKNGKTVATIVGARKDELLAQIEKHAAPAPASASA

SEQ ID NO: 66366 - protein, 237 aa, Zea mays
  Clone ID: LIB4729-060-A3_FLI.pep
IPVLPAAAATNRAGAAAMAAAVESVVVVHNVAKRHNVGTLARSATAFGVAEVVVVGRRDVSAFGSHGATSHLRFRHFVSLALARAYLKDERGCDICGVEITDDAQPVTAHPFRRSTAFLFGNEGTGLSQKECEICDFFVYIPQYGGGTASLNVTVAASIVLHHFGVWAGFTERGREGNKFVVAERPQGHSRGLYCTDSVEAVVEERKMRKENACDVLEENGSSHPQESNGLDLMFAD

SEQ ID NO: 66367 - protein, 507 aa, Zea mays
  Clone ID: LIB4729-061-C10_FLI.pep
VSRGRHSSSSSSQLFSSSRRPEVSSTRAPSSSTPHSQPHLLSFVRGVRFDAGGGMAASARDSTDAAERVVDDHDGWASDAEMDVEMDVVEGDADRRDGGADGDDEYLLLTRIRDTSAAEARAGKDIQGIPWERIHIARQDYRKARLEQYKNYENFPQSGELMDKLCKQVEKSSKYYEFQHNTRSVKPSILHFQLRNLLWATSKHDVYFMSNSTVSHWSSLSHKLSEVLDFSGHVAPAEKYPGSLLEGFSGVQVSTLAVNEGLVVAGGFQGELIGKDVEGCSVKFCMRTTLSDNAITNAIDMHRSISGSLHITVSNNDCGVREYDMERYQLVNHYRYNWPVNHTSVSPDKKLLAVVGDDRDALLVDSRNGKVTSTLVGHLDYSFATAWHPDSRTFATGNQDKTCRIWDTRNLSTSLAVLRGNIGAIRCIRYSSDGRFLVFSEPADFVHVYSVAADYKKRQEIDFFGEVSGITLSPDDESLFIGVCDRVYASLLQYRMIRGFDYLDSYV

SEQ ID NO: 66368 - protein, 875 aa, Zea mays
  Clone ID: LIB4729-061-F11_FLI.pep
PGFHSVLCPRPGEALSPPPRTPTDRHNPPPLACLVPAMPEIKCGAAEKVKPAASPEAEKPADIAGNISYHAQYSPHFSPFAFGPEQAFYATAESVRDHLIQRWNETYLHFHKTDPKQTYYLSMEYLQGRALTNAVGNLGITGAYAEAVKKFGYELEALAGQEKDAALGNGGLGRLASCFLDSMATLNLPAWGYGLRYRYGLFKQHIAKEGQEEVAEDWLDKFSPWEIPRHDVVFPVRFFGHVEILPDGSRKLVGGEVLKALAYDVPIPGYKTKNAISLRLWEAKATAEDFNLFQFNDGQYESAAQLHARAQQICAVLYPGDATEEGKLLRLKQQFFLCSASLQDMIARFKERKSDRVSGKWSEFPTKVAVQLNDTHPTLAIPELMRLLMDEEGLGWDEAWDITYRTISYTNHTVLPEALEKWSQIVMRKLLPRHMEIIEEIDKRFKELVISKHKEMEGKIDSMKVLDNSNPQKPVVRMANLCVVSSHTVNGVAELHSNILKQELFADYVSIWPTKFQNKTNGITPRRWLRFCNPELSEIVTKWLKSDQWTSNLDLLTGLRKFADDEKLHAEWAAAKLSCKKRLAKHVLDVTGVTIDPTSLFDIQIKRIHEYKRQLLNILGAVYRYKKLKGMSAEEKQKVTPRTVMIGGKAFATYTNAKRIVKLANDVGAVVNNDPEVNKYLKVVFIPNYNVSVAEVLIPGSELSQHISTAGMEASGTSNMKFSLNGCVIIGTLDGANVEIREEVGEDNFFLFGAKADEVAGLRKDRENGLFKPDPRFEEAKQFIRSGAFGIYDYEPLLDSLEGNSGFGRGDYFLVGYDFPSYIDAQDRVDAAYKDKKKWTKMSILNTAGSGKFSSDRTIAQYAKEIWDIKASPVV

SEQ ID NO: 66369 - protein, 148 aa, Zea mays
  Clone ID: LIB4729-063-F12_FLI.pep
GGGFHQSLHLIQSVLRDSQLAAQFQEIPLDLKMIEAEKAGFEILKSTMVEKLPNDLEGMESSMGKLYILIDEIYKYVDDVVEGRVAPDNRIGRFISDSFASVPKLSPAAFDKLFNDKIQDNLALVYLSSITRTQISIAEKLNTAAQVL

SEQ ID NO: 66370 - protein, 361 aa, Zea mays
  Clone ID: LIB4729-063-F8_FLI.pep
VLRGMHPGGGPLSVPPGFRFHPTDEELLYYYLRKKVAYEPIDLDVIREIDLNKLEPWDLKERCKIGTGPQNDWYFFSHKDKKYPTGTRTNRATTAGFWKATGRDKAIFLGSARRIGLRKTLVFYIGRAPHGKKTDWIMHEYRLDEENVEIQEDGWVVCRVFKKKNYEQRGHDVAEMVALDDEELQPFTVPVVPAGTSSLPTTDHKNNPHLMQYDFPSFDPSMQLPQLMSADQPVPTLFPSHPGVATAMSSSIDVECSQNLLTMLTSNGSDGMLHVRAGGAGAGVDRFAGTTDWSILDKLLASHQNLDQLFHGKVTAASASPMAPYHQQLMELGGSSSSSSLQRLPLQYLSGETTDLLRFPK

SEQ ID NO: 66371 - protein, 489 aa, Zea mays
  Clone ID: LIB4729-065-F9_FLI.pep
PGTPRCRRRTRPRPPPPASPIPLARSPPVVQQLGSSHTSAKMREILHIQGGQCGNQIGAKFWEVVCDEHGIDTTGRYTGTSDLQLERVNVYYNEASCGRFVPRAVLMDLEPGTMDSVRTGPYGQIFRPDNFVFGQSGAGNNWAKGHYTEGAELIDSVLDVVRKEAENCDCLQGFQVCHSLGGGTGSGMGTLLISKIREEYPDRMMLTFSVFPSPKVSDTVVEPYNATLSVHQLVENADECMVLDNEALYDICFRTLKLTTPSFGDLNHLISATMSGVTCCLRFPGQLNSDLRKLAVNLIPFPRLHFFMVGFAPLTSRGSQQYRALTVPELTQQMWDAKNMMCAADPRHGRYLTASAMFRGKMSTKEVDEQMINVQNKNSSYFVEWIPNNVKSSVCDIPPRGLSMASTFVGNSTSIQEMFRRVSEQFTAMFRRKAFLHWYTGEGMDEMEFTEAESNMNDLVSEYQQYQDATADDDEEAEYEDEEEPADGM

SEQ ID NO: 66372 - protein, 407 aa, Zea mays
  Clone ID: LIB4729-065-H9_FLI.pep
RAAAQEVGRASEKKAIAAESFLFTSESVNEGHPDKLCDQVSAAVLDACLAQDPDSKVACETCTKTNMVMVFGEITTEASVDYEKIVRDTCREIGFTSDDVGLDADRCKVLVNIEQQSPDIAQGVHGHFTKRPEEIGAGDQGHMFGYATDETPELMPLSHVLATKLGARLTEVRKDGTCAWLRPDGKTQVTVEYVDEGGAMVPVRVHTVLISTQHDETVTNDEIAADLKEHVIKPVIPERYLDEKTIFHLNPSGRFVIGGPHGDAGLTGRKIIIDTYGGWGAHGGGAFSGKDPTKVDRSGAYVARQAAKSIVASGLARRCLVQVSYAIGVPEPLSVFVDSYGTGTIPDKEILKIVKENFDFRPGMITINLDLKKGGNRFIKTAAYGHFGRDDADFTWEVVKPLKKASA

SEQ ID NO: 66373 - protein, 172 aa, Zea mays; identical to SEQ ID NO: 41503
  Clone ID: LIB4729-067-D10_FLI.pep

SEQ ID NO: 66374 - protein, 236 aa, Zea mays
  Clone ID: LIB4729-068-C10_FLI.pep
RGSHGRAPTFYRTPSAAPLSILPPATPKFLGLLIGDFSAGDRKQRTKPLLCREASRSSLRPLLLFFLTRLSLDCCVKLKMRKLKFHEQKLLKRHNFLEYKREGGHREALVTQRYRLVERDDYKKYNGICLMVQKLVNIIKQMDPRDPFRIQMTDLILDKLRRLATVMVKLKFAEHLKEAVTYIEQGHVRVGPDAVTDPAFLVTRNMEDFITWVDSSKIKRKVMEYNDALDDYDAMF

SEQ ID NO: 66375 - protein, 419 aa, Zea mays
  Clone ID: LIB4729-070-A2_FLI.pep
GSPRRASKSSEPPARPPPSPPPVPKANSFQVAMADQANQPTVLHKLGGQFHLRSIISEGVRARNICPSVSSYERRFATRNYMTQSLLGPSMSVSGGINVPVMRTPLCANAPAEKGGKNFMIDFMMGGVSAAVSKTAAAPIERVKLLIQNQDEMIKSGRLSEPYKGIVDCFKRTIKDEGFSSLWRGNTANVIRYFPTQALNFAFKDYFKRLFNFKKDRDGYWKWFAGNLASGGAAGASSLFFVYSLDYARTRLANDAKAAKGGGERQFNGLVDVYRKTLKSDGIAGLYRGFNISCVGIIVYRGLYFGLYDSIKPVVLTGNLQDNFFASFALGWLITNGAGLASYPIDTVRRRMMMTSGEAVKYKSSLDAFQQILKKEGPKSLFKGAGANILRAIAGAGVLSGYDQLQILFFGKKYGSGGA

SEQ ID NO: 66376 - protein, 432 aa, Zea mays
  Clone ID: LIB4729-070-A4_FLI.pep
PGRSISRRIPSHYHPSRRPPIRSGSSNPGAVMATKRSVGTLGEADLKGKKVFVRADLNVPLDDAQKITDDTRIRASVPTIKFLLEKGAKVILASHLGRPKGVTPKYSLKPLVPRLSELLGVEVVMANDCIGEEVEKLAAALPEGGVLLLENVRFYKEEEKNEPEFAKKLASVADLYVNDAFGTAHRAHASTEGVTKYLKPAVAGFLMQKELDYLVGAVANPKKPFAAIVGGSKVSSKIGVIESLLAKVDILILGGGMIYTFYKAQGYSVGKSLVEEDKLELATSLIEKAKAKGVSLLLPTDIVVADKFAADAESKIVPATAIPDDMGLDVGPDATKTFNEALDTTKTVIWNGPMGVFEFEKFAAGTEAIAKKLAELTTTKGVTTIIGGGDSVAAVEKAGLADKMSHISTGGGASLELLEGKTLPGVLALDDA

SEQ ID NO: 66377 - protein, 250 aa, Zea mays
  Clone ID: LIB4729-070-B2_FLI.pep
RVCLSRVCDFNRRRCSSHIPREDACSSPIDTMAVFSDLHTADGLKSLEAHLAGKTYVSGDSITKDDIKVFAAVPSKPGAEFPNAARWYETVSAAVASRFPGKSVGVNLPAGSAPAAAAPADEAEDDDDLDLFGDETEEDNKAADERAAAAKASSKKKESGKSSVLMDVKPWDDETDMKKLEEAVRSVQMEGLTWGASKLVPVGYGIKKMTIMLTIVDDLVSIDTLIEDHLTQEPINEYVQSCDIVAFNKI

SEQ ID NO: 66378 - protein, 325 aa, Zea mays
  Clone ID: LIB4729-070-C4_FLI.pep
QSSRASMSSSAENDPTVSVTERGGKDKHEDGGDKEQGGGGFIDKVKDFIHDIGEKIEEAVGFGKPTADVCGIHIPHISLHRADLVVDVLIKNPNPVPIPLVDIDYLIDSDGRKLVSGLIPDAGTIHAHGQETVKIPVSLVFDDIKSTYKDIQPGSIIPYLVRVVLLVDIPIIGRVKIPIQKDGEIPIPYKPDVDVEKIKFHHFSFEETTATLHLKLENKNDFDLGLNLLEYEMWLGDDSIASAELTQTAKIEKQGITRMQVPFSFRPKDFGSAVWDMIRGRGTGYTIKGKIDVDTPFGNMKLPISKEGGTTRLKKEDDDDDDDDN

SEQ ID NO: 66379 - protein, 138 aa, Zea mays
  Clone ID: LIB4729-071-G11_FLI.pep
AVASSVRRVLMSAALSTELRHKYNVRSIPIRKDDEVQVVRGTYKGREGKVVQVYRRRWVIHVERITREKVNGSTVNVGIHPSKVMVTKLKLDKDRKALLDRKARGRAADKAKGKFTADDVAAAAGGAAATGASLQEID

SEQ ID NO: 66380 - protein, 145 aa, Zea mays; identical to SEQ ID NO: 53346
  Clone ID: LIB4729-071-H3_FLI.pep

SEQ ID NO: 66381 - protein, 126 aa, Zea mays
  Clone ID: LIB4729-073-B2_FLI.pep
LGKGDAENSKGEGKAKLMAEDQGNAKQMAEAPSKIESMRKWVVEHKLRAVGCLWLGGISSSIAYNWSRPNMKPSVKFIHARLHAQALTLAALVGSACVEYYDQKYGSSGPKVDKYTSQYLAHSHKD

SEQ ID NO: 66382 - protein, 261 aa, Zea mays
  Clone ID: LIB4729-073-B5_FLI.pep
SSSRRPSTRRPRMASLLSMSSRREASSLASRSTRAPLRLLAPTRRPPPRATMTSASAALNTTRPVPALPSGVLFSRLAPTSRHSLPIVEPEILVDGPHDIDRCAYVTETVLAACYKALNEHHVLLEGTLLKPNMVTPGSDSKKVTPEVIAQYTVRTLQRTVPAAVPAVVFLSGGQSEEEATLNLNAMNKLSTKKPWALSFSFGRALQASTLKAWAGKVENVEKARAAFLARCKANSEATLGTYKGDAAADTESLHVKDYKY

SEQ ID NO: 66383 - protein, 382 aa, Zea mays
  Clone ID: LIB4729-073-B8_FLI.pep
RDSPSSLFTIPPQNTSCDPRSLRRASIMSAYCGKYADELIKNAAYIGTPGKGILAADESTGTIGKRLSSINVENVEENRRALRELLFCCPGALQYISGVILFEETLYQKTKDGKPFVDVLKEGGVLPGIKVDKGTIEVVGTDKETTTQGHDDLGKRCAKYYEAGARFAKWRAVLKIGPNEPSQLAIDLNAQGLARYAIICQENGLVPIVEPEILVDGPHDIDRCAYVTETVLAACYKALNEHHVLLEGTLLKPNMVTPGSDSKKVTPEVIAQYTVRTLQRTVPAAVPAVVFLSGGQSEEEATLNLNAMNKLSTKKPWALSFSFGRALQASTLKAWAGKVENVEKARAAFLARCKANSEATLGTYKGDAAADTESLHVKDYKY

SEQ ID NO: 66384 - protein, 169 aa, Zea mays
  Clone ID: LIB4729-074-C1_FLI.pep
PSFPVYDSNDDEMASPLRRSFPSLGRALLTPAPARMLSAEASDALVEIKPGEIGMVSGIPEEHLRRKVVIYSPARTAYQQGSGKVGRWKINFLSTQKWENPLMGWTSTGDPYANVGEAGLTFNSAESAKAFAEKHGWNYVVRKRHTPLLKPKAYAENFKWKGPPKAEQA

SEQ ID NO: 66385 - protein, 491 aa, Zea mays
  Clone ID: LIB4729-074-D4_FLI.pep
AGRFSSSSRLRRNNQMQPMLTLQSVQPPPAAAHLRAAASAKTPLLLPRRAAGPPPASASASASAEFPGSVPDSAQMAPRRRRRRSVAGIDQDELLDPEALADPDSGFYEINSVRLHHKVCSHEDEDSSSDQSTGSTIASDSDAVLKSQIGLPILLLHGFGASVFSWSSVMRPLARIVRAKVLAFDRPAFGLTSRASRSADDAKPLNPYSMAFSVLATLAFIDYLGAEKAILVGHSAGCLVAVDAYFEAPERVAALVLVAPAIFAPRKAVKEGQSGEEEGGQQAQRVPNDENSPPNLFARISGGFLELWKHVAGLVLKMITAIRDVVRSLCLKAVVAFLRSSLGVVLVRWVMDKFGILGVRNAWYDPSKVTDHVIQGYTKPLKSKGWETALLEHTVSMIIDSVSASRVPVSKRLSEISCPVLVVTGDTDRIVPAWNAERVARAIPGATFEAIKSCGHLPHEERPEEFLSVVENFLRTTFANPNEQVFQAAVS

SEQ ID NO: 66386 - protein, 431 aa, Zea mays
  Clone ID: LIB4729-075-F10_FLI.pep
RAHTRTRTRSSGSPSAAIGPPLPYWGGAAVGAEEQRWRIGMDSAAAALLDSASASASSANAAGKEMPTARHIAHRTAHNMSSSSLRKKSDLALLRKVPCAPLRRLLDNLQEVLLATKLALLLPAVLLAIAARIFHFGQEWVFVLSLIGLVPLAERLSFLTEQVAFYIGPTVGGLLNATFGNVTEVIIAIFALYQGKVVVVKCSLLGSVLSNLLLVLGTSLFFGGLANLGTEQLYDKMQVDVSTGLLILGVLCHSLPLMLRYAVSSGEHAESSWDSGLELSRACSIVMLLAYVAYLFFQLKTHRQLFEPQPQEVEDGDDSVSQDEAVLGFSSAMIWLGVMTLMTALLSEFVVSTIEAASESWELSVSFISVILIPIVGNAAEHAGAVIFAFKNNLDITLGVSLGSATQISMFVVPLSVLVAWIMGVPMDLDY

SEQ ID NO: 66387 - protein, 264 aa, Zea mays
  Clone ID: LIB4729-077-C6_FLI.pep
SRWCIAGISLADMIFNQVDPSLKVEWFESDGNFVHKGLQFGRVYGCARSIIVAERVVLNFMQRMSGIATLTKAMSDAARPACILETRKTAPGLRLIDKWAVLIGGGKNHRLGLFDMVMIKDNHISVAGGIANAMRSVDQFLQKEKLTIPVEVETRTIEEVKDLLKYAAENKTSLTRIMLDNMVVPLGNGDFDVSMLKDAVRLINGRFETEASGNVTVDTVKKIGETGVTYISSGALTHSVTALDISLKIDTELALQVGRRTNRA

SEQ ID NO: 66388 - protein, 237 aa, Zea mays
  Clone ID: LIB4729-077-D12_FLI.pep
SYRGDRDSTAAYVAAATAFKGHMPPRRQWFKEDARAVRSSVVLLSRPLRLVDAVLCCILDVAGLGRQPRLGVVQLVGARRVLARQVLVHPGEHGQRSDAEAAGGDEPGRHERQRDGGRHQHRAEDHQHGGGHRERDHGAGQDQPGQHQHRPAEGRGRRGLERRHHGALLLLLLRLAVHAAPALEVAVAPATSRRAPVVISHGRLAERARYPTCARCPELLPLPLPLMLELRLRVRSG

SEQ ID NO: 66389 - protein, 419 aa, Zea mays
  Clone ID: LIB4729-077-G6_FLI.pep
PGPRRASKSSEPPARPPPSPPPVPKANSFQVAMADQANQPTVLHKLGAQFHLRSIISEGVRARNICPSVSSYERRFATRNYMTQSLLGPSMSVSGGINVPVMRTPLCANAPAEKGGKNFMIDFMMGGVSAAVSKTAAAPIERVKLLIQNQDEMIKSGRLSEPYKGIVDCFKRTIKDEGFSSLWRGNTANVIRYFPTQALNFAFKDYFKRLFNFKKDRDGYWKWFAGNLASGGAAGASSLFFVYSLDYARTRLANDAKAAKGGGERQFNGLVDVYRKTLKSDGIAGLYRGFNISCVGIIVYRGLYFGLYDSIKPVVLTGNLQDNFFASFALGWLITNGAGLASYPIDTVRRRMMMTSGEAVKYKSSLDAFQQILKKEGPKSLFKGAGANILRAIAGAGVLSGYDQLQILFFGKKYGSGGA

SEQ ID NO: 66390 - protein, 455 aa, Zea mays
  Clone ID: LIB4729-078-E9_FLI.pep
EGRRKMRECISVHIGQAGIQVGNACWELYCLEHGIQPDGQVPGDKTAGHHDDAFSTFFSQTGAGKHVPRAIFVDLEPTVIDEVRTGTYRQLFHPEQLISGKEDAANNFARGHYTIGKEIVDLCLDRIRKLADNCTGLQGFLVFNAVGGGTGSGLGSLLLERLSVEYGKKSKLGFSVYPSPQVSTSVVEPYNSVLSTHSLLEHTDVSILLDNEAIYDICRRSLDIERPNYSNLNRLVSQVISSLTASLRFDGALNVDVNEFQTNLVPYPRIHFMLSSYAPVISSAKAFHEQLSVAEITSSAFEPASMMVKCDPRHGKYMACCLMYRGDVVPKDVNAAVATTKTKRTIQFVDWCPTGFKCGINYQAPTVVPGADLAKVQRAVCMISNSTSVVEVFSRINSKFDLMYAKRAFVHWYVGEGMEEGEFSEAREDLAALEKDYEEVAAEGGSDDGDEEEEY

SEQ ID NO: 66391 - protein, 228 aa, Zea mays
  Clone ID: LIB4729-078-H8_FLI.pep
GMPPKSDSVEGIVLGFVNEQNRPLNSQNAADALQKFNLKKTAVQKALDALADSGQISFKEYGKQKIYIARQDQFDIPNGEELEEMKKTNAKLQEELVDQRKAISEVESEVRGLQSNLTLTEITSKKSELQSEVQEMEEKLNKLRSGVTLVKPEDKKIIENSFAEKVNQWKRRKRMFKELWDNITEHSPKDQKEFKEELGIEYDEDVDVNVQSYSDMLASLNKRRKFSR

SEQ ID NO: 66392 - protein, 197 aa, Zea mays
  Clone ID: LIB4729-079-A9_FLI.pep
GKTVLVSPTSQRRGPLSPLSSSSQPHQVPRSARPIRNLERSRRRPQQRGGRSTTAPQGSYSRRSGSTGSGSSEGKMSSVFSGDETAPFFGFLGAAAALVFSCMGAAYGTAKSGVGVASMGVMRPELVMKSIVPVVMAGVLGIYGLIIAVIISTGINPKAKPYYLFDGYAHLSSGLACGLAGLAAGMAIGIVGDAGVR

SEQ ID NO: 66393 - protein, 317 aa, Zea mays
  Clone ID: LIB4729-081-B1_FLI.pep
RDPCGPPCPSPDFPACALSLSLSLSLRRRRAWATCAAAPSPGLHRTLRQVLFRPIAGTEQLLHSFDFSYRIPHRGMLAKGRKVAGRREEMSANYAFGPQDDDAIIKHRLLTRTTTTRGEPPLKKLQKKFMSFATEIEKDADNISDCERLYKAFLHEINTFELPLLKSKAVVDANIREKESFNELQVEIERQILHAKTDIEDLKKQLEQSKIERQHKEECEAIRKLICLQPPRSETEKLIADLEKEITDLKAENVACIRTLELRKKQFALLLHVVEELQISIEDEQKSIADELRAIAGEQKMSMEEGSVGASDSMVVD

SEQ ID NO: 66394 - protein, 171 aa, Zea mays
  Clone ID: LIB4729-081-D7_FLI.pep
NTSSIILLLSASAMHAFLARDAHRTPHHLINRVAVNVGADLVRQGDAALAGQRGGAADVGAAPVGAVGDVLEAAADGAAVGGVVGLLQQAADAAAARLGRHGPAHLDERQARHQRAVHGGTRHRRAHRGRGSHHGRRQEHGQRQRRELRSSHASPSLSLGRAHVRYDGRAG

SEQ ID NO: 66395 - protein, 132 aa, Zea mays
  Clone ID: LIB4729-081-H10_FLI.pep
SSIPQESITGGTTCKDLLLDLSLLLLPQPVQRTVSITLSTDKPRESKRGEVTIVQAIRIQVANVDLDRGMILGSDDPIRGRALPGDVEVHRLTLLVLHDDGWGLPQQQLDLSKVSTEDRRQLRRRRRRLDPG

SEQ ID NO: 66396 - protein, 380 aa, Zea mays
  Clone ID: LIB4729-082-A4_FLI.pep
PGLVLGFGLTDDGHRQAAALAGWSCDIVSLLLLLPSMEVVNRYVATRHHIEGAPTEADFEVKEETARWAPDSGEVLVRNLYLSIDPYQLNRMKRSSASHLAVDGTLPGQRIAAYAAGEVVASACEEYKVGDVVAGVLGWEDYTLFKPSPAVLMSKVADADAAGFPLSHHISVLGTSGMTAYGGLFEVGKPVKGEKVFVSAASGSVGSLVGQFAKLAGCYVVGCAGTTAKVDLLKDKLGFDDAFNYKEEPDLKSALKRYFPDGIDIYFENVGGEMLEAALANMNTYGRVALSGVISEYTGGGRRAVPDLLEVIYKRITIRGFFAWDFLPRFAEFNAVIGGWVRDGKVQVLEDVSDGLESVPSAFAALFRGQNVGKKLVKLA

SEQ ID NO: 66397 - protein, 490 aa, Zea mays
  Clone ID: LIB4729-082-E2_FLI.pep
EPQRQASSYSPISATQSFPQFPPFSHFSPPPPLPPFNNTMRECISIHIGQAAIQVGNACWELYCLEHGIQADGQMPGDKTIGGGDDAFNTFFSETGAGKHVPRAVFVDLEPTVIDEVRTGTYRQLFHPEQLISGKEDAANNFARGHYTIGKEIVDLCLDRIRKLADNCTGLQGFLVFNAVGGGTGSGLGSLLLERLSVDYGKKSKLGFTVYPSPQVSTSVVEPYNSVLSTHSLLEHTDVAVLLDNEAIYDICRRSLDIERPTYTNLNRLVSQVISSLTASLRFDGALNVDVNEFQTNLVPYPRIHFMLSSYAPVISAEKAYHEQLSVAEITNSAFEPSSMMAKCDPRHGKYMACCLMYRGDVVPKDVNAAVATIKTKRTIQFVDWCPTGFKCGINYQPPSVVPGSDLAKVQRAVCMISNSTSVVEVFSRIDHKFDLMYAKRAFVHWYVGEGMEEGEFSEAREDLAALEKDYEEVGAEFDEGEDGDEGDEY

SEQ ID NO: 66398 - protein, 311 aa, Zea mays
  Clone ID: LIB4729-083-F4_FLI.pep
SSPTARSPRGSPTGAPPSPPSSSPTPRKGMSPYFGCIVGRVANRIKDGKFTLNGLEYSLPVNNGPNSLHGGLKGFDKVVWDVVEHKDGECPSITFQYHSKDGEEGYPGDVTIRATYSLPEATTLRLDMEATPENKATPISLAQHTYWNLAGHARGDILNHSLQIWGKHITPVDENTIPTGEVMPVDGTPFDFTTERRIGERIDGVPGGYDHNYVLDCGDEKDGLKRAARLKDPSSLRTLDLWTDAPGMQLYTANYVDGIGGKAGAVYAKHAGVCLETQGFPNAINQPEFPSVVVRPGEKYKHTMLFEFSGC

SEQ ID NO: 66399 - protein, 164 aa, Zea mays
  Clone ID: LIB4729-083-F8_FLI.pep
RGRPGCFPAAASKRPREPAPAKSTAPSMADTKASPAVTLRTRKFMTNRLLSRKQFVLEVLHPGRANVSKAELKERLAKMYEVKDPNCIFVFKFRTHFGGGKSTGFGLIYDNVDSAKKFEPKYRLIRNGLATKVEKSRKQMKERKNRAKKIRGVKKPKAGDAKKK

SEQ ID NO: 66400 - protein, 417 aa, Zea mays; identical to SEQ ID NO: 65964
  Clone ID: LIB4729-083-H1_FLI.pep

SEQ ID NO: 66401 - protein, 166 aa, Zea mays
  Clone ID: LIB4729-084-A12_FLI.pep
GIPPIAAEIPLRLSRVTKLSSFLAPTAMDEVTEAVNNLNISGVGAAGVAGAEGHKKNRIQVSNTKKPLFFYVNLAKRYMQLHNEVELSALGMAIATVVTVAEILKNNGLAVAKSIMTSTVDIKDETRTRPIQKAKIEILLGKTEKFDELMAAAAEEREANGAEEQS

SEQ ID NO: 66402 - protein, 349 aa, Zea mays
  Clone ID: LIB4729-084-D10_FLI.pep
RDPQPQLSLFHSPLTYFLSPADCCAAPLRSGGICICICICICISIPRSVFSQGGISVTMEAPPVALFDTLKAAKPFFLLAGPNVIESEEHVLKMAKHIKAITTKLGIPLVFKSSFDKANRTSSKSFRGPGLEEGLKILQKVKATYDLPIVTDVHESHQCEAVGRVADIIQIPAFLCRQTDLLVAAAKAGKIINIKKGQFCAPSVMVNSTEKVRLAGNPNVMVCERGTMFGYNDLFVDPRNLEWLRESNCPVVADVTHALQQPAGRKLDGGGVASGGLRELIPCIARTSVAVGVDGIFMEVHDDPLNAPCDGPTQWPLRNLEELLEELIAIARVTKGKKPFKIDLTPFQE

SEQ ID NO: 66403 - protein, 278 aa, Zea mays
  Clone ID: LIB4729-084-D3_FLI.pep
PGLPSLLIPSHRSHALLPRPHLLPHPRPPRLLRQLRHAPNRNLPARPPLPGSIYQISHLSSFSSNQVRFPFLSTLSLVSGGRWPHLPLPVALMAPSTALAPVAFRSAFSTPLASKPTRNRMNIEGAFCLPCSTRKRASYRPFRVYSLFGGKKDKDENGDEAPSKAGIFGNMQNLYETVKKAQMVVQVEAVRVQKELAATEIDGYCEGELIKVTLSGNQQPIRVEITEAAMELGAEKLSGLVNDAYKDAHQRSVQAMKERMADLAQSLGMPAGLGDGLK

SEQ ID NO: 66404 - protein, 124 aa, Zea mays
  Clone ID: LIB4729-084-F12_FLI.pep
PSSRTPRMKLNVLELFLDCITEPNERLIEFGIGGICNSCVDPANALIITQCGGIPLVIQCLSSPVRNTVTYALGALYYLCNPSTKKEILKPDVVSTIREYASAGTVNNNFSNLANAFLEKHVDP

SEQ ID NO: 66405 - protein, 405 aa, Zea mays
  Clone ID: LIB4730-001-A6_FLI.pep
EGEVLPRGMAASGAWLARATATAVLGFVLAVASAEAASGDVEMVFLKAAVAKGAVCLDGSPPVYHFSPGSGSGANNWVVHMEGGGWCRNPDECAVRKGNFRGSSKFMKPLSFSGILGGNQKSNPDFYNWNRVKIRYCDGSSFTGDVEAVDTAKDLRYRGFRVWRAVIDDLLTVRGMSKAQNALLSGCSAGGLAAILHCDRFHDLFPAKTKVKCFSDAGYFFDGKDISGNFYARSIYKSVVNLHGSAKNLPASCTSKPKQSPELCMFPQYVVPTMRTPLFILNAAYDSWQVKNVLAPSPADPKKTWAQCKLDIKSCSASQLTTLQNFRTDFLAALPKTQSVGMFIDSCNAHCQSGSQDTWLADGSPTVNKTQIGKAVGDWYYDREVPRQIDCPYPCNPTCKNRDDD

SEQ ID NO: 66406 - protein, 351 aa, Zea mays
  Clone ID: LIB4730-001-A8_FLI.pep
DPRFQALLSQLCSRNFVLFVRSRLREVEAKMFYGGYAYHGNSFEQTYRCYPASFFDKPHLEGGDKVIMPPSALDRLASLHIEYPMLFELHNDATQRISHCGVLEFVAEEGMIIMPYWMMQNMLLQEGDTVHVKNATLPKGTYVKLQPHTTDFLDISNPKAILEKTLRNFSCLTTGDSIMVAYNNKQYYIDIVETKPASAVSIIETDCEVDFAPPLDYKEPEKLRQPTVLASKAPAEDGNTAAEDEPKFKPFTGFGKRLDGKASKLQASEVPSTALSAPSDSNKRANQQISAPAASGASSYSRQKTGKLVFGSSASNNKEPQKAPAKEEQPAKKDDEPRFQAFSGKSYSLKR

SEQ ID NO: 66407 - protein, 315 aa, Zea mays
  Clone ID: LIB4730-004-B12_FLI.pep
PGCPPRNPSSNAPPSPSSLARTRSPPVSTPTDRSESRGVSAVKATASAMADEEHSERREEASELAPFDPTKKKKKKKVVIQEPSDEVDKLAEKTETLAVAEPAELNFTGMKKKKKKPVDLDSTLDELGDGEDTQDDQAVEEQGEGIVLGSVPTYPWEGTDRDYKYEELLDRVFNILRENNPDLAGDRRRTVMRPPQVLREGTKKTVFVNFMDLCKTMHRQPEHVMMFLLAEMGTSGSLDGQQRLVIKGRFAPKNFEAILRRYINEYVICNGCKSPDTILSKENRLFFLRCEQCGSSRSVAPIKTGFVAQVGRRKA

SEQ ID NO: 66408 - protein, 151 aa, Zea mays
  Clone ID: LIB4730-005-B11_FLI.pep
VLPNLCGRNFRVMTVSFHKYGDLFFPGTGDIKDIGEREGKYYAINIPLKDGIDDTSFTRLFKTIIAKVVETYLPGAIVLQCGADSLARDRLGCFNLSIEGHAECVKFVKKFNIPLLVTGGGGYTKENVARCWAVETGVLLDTELPNEIPKK

SEQ ID NO: 66409 - protein, 159 aa, Zea mays
  Clone ID: LIB4730-005-E12_FLI.pep
ARATKNGRNWQEHGGAAPGAQPHHVHHRHRLRELEPEPLHQRADQLPRRGRQRRDVLLPGVRHPGRRGGRGVQAGGRAPRARLAPRQPGHQRRVVAHRLHAAPLRAHAPHGPLRRQRWLPGPRLRRRRRGRRAQGGHQGLRILIDAARTCVIISGAAGV

SEQ ID NO: 66410 - protein, 396 aa, Zea mays
  Clone ID: LIB4730-006-A8_FLI.pep
VRPPPMASESSPPPAGAPPPGLGDKLAVFWDEGMLAHDAGRGVFDSGRDPGFLDVLDQHPENADRVRNMVSILRRGPIAHFLSWHSGRPAHASELLSFHSSEYIEELVQTNATGAKKKLCEGTFLNPGSWGAALLAAGTTLSSAKHILDGQGNLAYALVRPPGHHAQPDHADGYCFLNNAGLAVQLALDSGRAKVAVVDIDVHYGNGTAEGFYRTDTVLTMSLHMMHGSWGPSHPQSGSVDEIGEGKGLGYNLNIPLPNGSGDAGYEYAMNELVVPSIDKFQPQLLFLVVGQDSSAFDPNGRQCLTMEGYRKIGQIMRRLADRHCNGQILVVQEGGYHITYSAYCLHATLEGVLDLEAPLLDDPIAYYPEDDKYTMKVVDMIKSYWKESVPFLKEI

SEQ ID NO: 66411 - protein, 122 aa, Zea mays
  Clone ID: LIB4730-006-E4_FLI.pep
YYETVVLSEHDMLAHLTCLGLLQCVVVEQLLNEVNMGHEHSPAAVAEQFQSIQSIPFRVVGLEEVEVEVPLVPNHLAAGKAAHRYDHLRRRRRRWNPDRLVVEEVVNEGTERAMGWDFPAGL

SEQ ID NO: 66412 - protein, 254 aa, Zea mays
  Clone ID: LIB4730-006-F5_FLI.pep
RGNSVSNSRVLLLSDPELRRPQHQARPPSRVTEMALPNQGTVDYPSFKLVIVGDGGTGKTTFVKRHLTGEFEKKYEPTIGVEVHPLDFTTNCGKIRFYCWDTAGQEKFGGLRDGYYIHGQCAIIMFDVTSRLTYKNVPTWHRDLCRVCENIPIVLCGNKVDVKNRQVKAKQVTFHRKKNLQYYEISAKSNYNFEKPFLYLARKLAGDPNLHFVEAVALKPPEVTIDMAMQQQHEAELAAAAAQPLPDDDDDLIE

SEQ ID NO: 66413 - protein, 257 aa, Zea mays
  Clone ID: LIB4730-008-B8_FLI.pep
LGHLGVLRALPLHVLEEAAVVHAPHGLTRQVPLVVPRQHVQDRPLQLRRNPAVEVEGVAEPLRHRPELPVGEPVRGSAGVLAEQVLEVHWHEPALVVVGPRVTAMLALVDVVDVDREERGRQPPRQRGIAHGPVHDKSDQERQDHVEPKRTASRVRLPRVDDAVVVAVEEGDVLLQHAHVVVPVLVGRGAVGVVDVRRHQGSRQIWLGEVLLEVAADGAHDGHRRLQLGRRPSLHLGSTTARVRVCCLGVQFVSSSD

SEQ ID NO: 66414 - protein, 332 aa, Zea mays
  Clone ID: LIB4730-008-D4_FLI.pep
EDRICGGMATIQNKPTPTAPSTTTGGGLRAMDLYEKLEKVGEGTYGKVYKAREKATGRIVALKKTRLPEDDGGVPPTALREVSLLRMLSQDPHVVRLLDLKQGVNKEGQTILYLVFEYMDTDLKKFIRGYRANHEKIPAQTVKILMYQLCKGVGFVHGRGVLHRDLKPHNLLMDRKTMALKIADLGLSRAITVPVKKYTHEILTLWYRAPEVLLGATHYSTPVDIWSVGCIFAELVTNQPLFPGDSELQQLLHIFKLLGTPNEEMWPGVGKLPNWHVYPQWKPTKLSTLVPGLDSDGYDLLEKMLAYEPGKRVSAKKALEHPYFNDVNKEVY

SEQ ID NO: 66415 - protein, 130 aa, Zea mays
  Clone ID: LIB4730-010-A11_FLI.pep
RQFMTLVSGIEQNLKTTSALVSLPAERTALSEPCLSSCGLAEDSLAARAHNNSLGVAENSGYAEAPLALNIHEEGVGRLDESLFLVLELLEFCRRVEQINVVLENHLASGCGGGNCVRCGSGGGGAAAEV

SEQ ID NO: 66416 - protein, 672 aa, Zea mays
  Clone ID: LIB4730-010-G10_FLI.pep
TGRMLLGAAAARMEEKRVITGRERDQFPVGMRVLAVDDDPVCLKVLETLLRRCQYHVITTNQAITALKLLRENRDMFDLVISDVHMPDMDGFKLLELVGLEMDLPVIMLSVNGETKSVMKGITHGACDYLLKPVRIEELRDIWQHVVRRKFSKRERSNLDVYKDFNRLPGADPCHSHGHGHGQTTAGASDQSGRIGRKRKEMHSDEEDDGEENDFQEGDEPSAAKKPRVVWSIELHRKFVAAVNQLGIDKAVPKRILELMNVEKLTRENVASHLQKYRLYLKRLSAVASQQASIVAAFGGRDPFLHMGAFEGLQSYQPFAPCAALSSFIPHHGSLGRTTAAAFGVPELAPAITVQAAASNGMISHCAGDASRFQLSGIQENQQANLGQGSATSLGLPQLQQKWIQQETGDLSTVFSGSALANTLSGALQRVASSPLPPQELLEGVQTKVSAQPPITMASVSSELVERTVGVSANLQDSGISPQGTLPINDGFTADKLQLQDPFDSNGGTNFSVNMPVCPSGSLTASSNAKGGASSCSPVLLAPDTGRHSNYLQFGVAGNSGHDMNDIKQDHLHQGLSTGGFNHDFGTCMTEQTDPNVPYLMPQMKPNTLSSEDKLKQRNIYDLGIPKLHGGFSSSSCNFDGLLNSMIKAEKDDLSFTDSDLGCDFFPLGACI

SEQ ID NO: 66417 - protein, 231 aa, Zea mays; identical to SEQ ID NO: 43391
  Clone ID: LIB4730-012-A5_FLI.pep

SEQ ID NO: 66418 - protein, 174 aa, Zea mays
  Clone ID: LIB4730-012-H12_FLI.pep
SRPAGLASAGAADPSPSLPSLAPTPTRRDGPEEGQGPAAVVEAGQVRWWQAKEEEVEQGKAKGEGKQRGAVRPGYLRQAALGGAQVQANHPFHPLRASEDQRLPCSEGHQGLDGLGPLKPANLHQGNQYIRMGKRSKMHCLPSLCPLCRRSLSLEQLPSLSRVANVMLLVMSSR

SEQ ID NO: 66419 - protein, 250 aa, Zea mays
  Clone ID: LIB4730-012-H2_FLI.pep
RDSPFALFTIPPQNTSCDPRSLRRASIMSAYCGKYADELIKNAAYIGTPGKGILAADESTGTIGKRLSSINVENVEENRRALRELLFCCPGALQYISGVILFEETLYQKTKDGKPFVDVLKEGGVLPGIKVDKGTIEVVGTDKETTTQGHDDLGKRCAKYYEAGARFAKWRAVLKIGPNEPSQLAIDLNAQGLARYAIICQENGLVPIVSLRSLLMALMTLIAALTSLRQSLLPATRLSTSTMSSWRVPS

SEQ ID NO: 66420 - protein, 143 aa, Zea mays; identical to SEQ ID NO: 58320
  Clone ID: LIB4730-014-D6_FLI.pep

SEQ ID NO: 66421 - protein, 246 aa, Zea mays
  Clone ID: LIB4730-015-F2_FLI.pep
QATKAATDAPSSNALATVPSRSSRSTQEVSLVEGKALKMSSTVPKSSNIFWHDCPVGKTDRQKLLKQKGCVVWITGLSGSGKSTLACTLGRELHTRGKLAYVLDGDNLRHGLNKDLGFKAEDRAENIRRVGEVAKLFADAGLVCIASLISPYRRDRESCRALLSDSSFIEVFLNMSLELCEARDPKGFYKLARAGKIKGFTGIDDPYEAPLNCEIEIKEVDGVCPPPAEMAGQVVTYLEEKGFLHE

SEQ ID NO: 66422 - protein, 430 aa, Zea mays
  Clone ID: LIB4730-017-C4_FLI.pep
GTSRRIPSHYHPSRRPPIRSGSSNPGAVMATKRSVGTLGEADLKGKKVFVRADLNVPLDDAQKITDDTRIRASVPTIKFLLEKGAKVILASHLGRPKGVTPKYSLKPLVPRLSELLGVEVVMANDCIGEEVEKLAAALPEGGVLLLENVRFYKEEEENEPEFAKKLASVADLYVNDAFGTAHRAHASTEGVTKYLKPAVAGFLMQKELDYLVGAVANPKKPFAAIVGGSKVSTKIGVIESLLAKVDILILGGGMIYTFYKAQGYSVGKSLVEEDKLELATSLIEKAKAKGVSLLLPTDIVVADKFAADAESKIVPATAIPDDWMGLDVGPDATKTFDEALDTTKTVIWNGPMGVFEFQKFAAGTEAIAKKLAELTTTKGVTTIIGGGDSVAAVEKAGLADKMSHISTGGGASLELLEGKTLPGVLALDDA

SEQ ID NO: 66423 - protein, 208 aa, Zea mays
  Clone ID: LIB4730-019-C3_FLI.pep
IPMASRRRTLLKVIILGDSGVGKTSLMNQYVNKKFSNQYKATIGADFLTKEVQFEDRLFTLQIWDTAGQERFQSLGVAFYRGADCCVLVYDVNSMKSFDNLNNWREEFLIQASPSDPDNFPFVLLGNKVDVDGGNSRVVSEKKAKAWCASKGNIPYFETSAKDGTNVEDAFQCIVKNALKNEPEEELYVPDTVDVAGGNRAQRSSGCC

SEQ ID NO: 66424 - protein, 109 aa, Zea mays
  Clone ID: LIB4730-020-B1_FLI.pep
PSRPAGSIRSDAHPTSVVDQAQAAEPAGICGRSGRWRRRRWPSSCCSSSSLRRRRRRWRRRACAGAGARASRGSACPTTTARRCACRRATAAATVTASCASASASGSAS

SEQ ID NO: 66425 - protein, 145 aa, Zea mays; identical to SEQ ID NO: 53346
  Clone ID: LIB4730-020-B4_FLI.pep

SEQ ID NO: 66426 - protein, 234 aa, Zea mays
  Clone ID: LIB4730-020-C12_FLI.pep
RVTAVYNLPDTNRREPPLDLVELVCLHHRISLGNGVPGSSPVVELAVVLVGVAVERAVQVPTPAVESREPNPLPAGAAPVRPYLPPFGDRRHPLAGSGNISGLLHVHCLQLDLGNSYYRVAASNNRLHDGVAAVHDAVDRGGSQLGLILLRYHLLVALRAHVHGRRAAEEATVIDAEDGSLGGLAPSLLVLHGFLNSDETALFAIPLRRSPRGRRGGEGRGIAGNSVGFEMGPG

SEQ ID NO: 66427 - protein, 278 aa, Zea mays
  Clone ID: LIB4730-020-G10_FLI.pep
PGKIECPSVFLPFVLPQRTRGSHPEGRELVATRREEPEVVPNQTQKRVGSGASQPAATMRRASKKSLSSAATASAGPTKAVSKEVERIDQFFYTYADNSSVMIDPEGIETLCSHLEVPHTDVRILMLAWKMGCEKQGYFTLDEWRAGLKALRADSISKLKKAFPELVQEVTRPSNFQDFYIYAFRYCLTEDKKKCIEIPVACELLNLVLGLQFRPQVDKLSNYLKYQNDYKVINMDQWMGFMRFCNEINFPSLDNYDSDLAWPLILGNFVEWLRENKS

SEQ ID NO: 66428 - protein, 691 aa, Zea mays
  Clone ID: LIB4730-021-G12_FLI.pep
PDRCSPAEFCSRLVSEAAEMASAGVAGCSGSAGDALFRELWHACAGPLVTVPRQGELVYYFPQGHMEQLEASTDQQLDQHLPLFDLPPKILCKVVNVELRAETDSDEVYAQIMLQPEADQSEPTSPDSEPPEPERCNVYSFCKTLTASDTSTHGGFSVLRRHAEECLPQLDMTQNPPWQELLAKDLHGNEWHFRHIFRGQPRRHLLTTGWSVFVSSKRLVAGDAFIFLRGENGELRVGVRRLMRQLNNMPSSVISSHNMHLGVLATASHAISTGTLFSVFYKPRTSRSEFVVSVNKYLEAKNHKVSVGMRFKMRFEGDESPERRLSGTIIGLGSMPANSTSPWANSDWRSLRVQWDEPSAILRPDRVSPWELEPLDATNPQPPQPHLRNKRARPPALLSIAPELPQVFGFLKSPAEPAQAFSFSRPQQTQELYHSNPSSIFSSSLNVGFSSKNDRSTPINSHLYWTMRQTRTESYSASVNKAPTEKKQESATSGCRLFGIEIGSAVSPVATVASVGQDQPPALSVDVESDQLSQPSNANKTDAPVASSERSLNESESRQVRSCTKVIMQGMAVGRAVDLTRLDGYADLHRKLEEMFDIQGELSANLKKWKVIYTDDEDDTMLVGDDPWNEFLRMVKRIYIYSYEEAKSLTRKAKPPVVGDTIKPDPNKLPPESDVPHDSNNNAPVAADYQD

SEQ ID NO: 66429 - protein, 170 aa, Zea mays
  Clone ID: LIB4730-023-A7_FLI.pep
GKISLSAAPPRPSVLLAAPPRPAVLLAATAPPAAKMPFKRFVEIGRVALVNYGKEYGRLVVIVDVVDQNRALVDAPDMVRCQMNFKRLSLTDIKIDIKRVPKKTTLIKAMEEADVKSKWENSSWGKKLIVQKRRASLNDFDRFKVMLAKIKRGGAIRQELAKLKKVAAAA

SEQ ID NO: 66430 - protein, 381 aa, Zea mays
  Clone ID: LIB4730-023-D3_FLI.pep
DWIESRTLSCSLQVVVALFLLLRCCCCFRFRFRRRHRRGNQTNLVTENLSSSTSSPHTILILCVIPLPFVRDLATSSLLRSRPHRSREIPQTKKEHGIEMELDGKYSKDQSLKCECLLFDLDDTLYPFNSGIAADIKKNIQDYMVHKLGVDEAISLDLCVLLYKQYGTTMAGLRAVGYQFDYDDYHSFVHGRLSYDKIKPDPVLRNILLSLPIRKLVFTNGDRTHASRALKRLGIEDCFEGVVCFETLNLTSPPPPVPAQELEIFDLMKHLAHPQPAVQLPKSPILCKPSREAMLQALKVASINPQTTILFDDSFRNIEAAKQIGMCTVLVGTSERKKGADHALESLHNMKEALPELWEEAEKDEDVRNSSKAGIETSVIA

SEQ ID NO: 66431 - protein, 217 aa, Zea mays
  Clone ID: LIB4730-025-A10_FLI.pep
FGADSRRGAAEVACVIRMAEPGLEDSQPVDLSKHPSGIVPTLQNIVSTVNLDCKLDLKAIALQARNAEYNPKRFAAVIMRIREPKTTALIFASGKMVCTGAKSEQQSKLAARKYARIIQKLGFPAKFKDFKIQNIVGSCDVKFPIRLEGLAYSHGAFSSYEPELFPGLIYRMKQPKIVLLIFVSGKIVLTGAKVREETYTAFENIYPVLAEFRKVQQ

SEQ ID NO: 66432 - protein, 286 aa, Zea mays
  Clone ID: LIB4730-025-D10_FLI.pep
PGTSILHTPPPSPSFISSHTSLSLSLLQNTPPHPKPRTHTTPEGFTTAHMIMQAMWKPGWLEALDTQKFFVACSFHEHAKKNEKNICCLDCCTSICPHCVAAHRAHRLLQVRRYVYHDVVRLEDLEKLIDCSSVQSYTINSSKVVFLKKRPQNRQFKGSGNICTSCDRSLQEPYFHCSLDCKVEYILRQKKKLSAYLRPCKTLQLGPDFFIPHDADDDTTHSTLVDVDEPMGSSDSENLSVPCTNFVRKKRSGPYICARSANRVSEEDMATNMSRRKGVPQRSPLC

SEQ ID NO: 66433 - protein, 395 aa, Zea mays
  Clone ID: LIB4730-025-F12_FLI.pep
AHAMAAAILRRLVPTAASQLVAPLPLLARGVSDSADAVTVDTSVPFKSHIVDPPPREATTSARELLSFFRDMSLMRRFEIAADSLYKAKLIRGFCHLYDGQEAVAVGMEAAATRADAIITAYRDHCAYLARGGDPVAAFAELMGRRDGCSRGKGGSMHFYKRDANFFGGHGIVGAQVPLGCGIAFAQRYRKEGTVTFDLYGDGAANQGQLFEALNMAALWKLPVILVCENNHYGMGTAEWRASKSPAYYKRGDYVPGLKVDGMDVLAVKQACKFAKEHALENGPIILEMDTYRYHGHSMSDPGSTYRTRDEIAGIRQERDPIERVRKLMLVHEFATAQELKDMEKEIRKQVDAAIAKAKECPLPDPSELFTNVYVNDCGLESFGVDRKEVRTVLP

SEQ ID NO: 66434 - protein, 150 aa, Zea mays
  Clone ID: LIB4730-025-H8_FLI.pep
MDYIQERSNTMAHSDRDVYPPKHSPATKRRLASESVEGAALALERVDDVHGGDGLAARVLGVGDGVADDVLEEDLEHAAGLLVDEPRDALHAAPPSQPPDRRLGDALDVVAEHLPVALGSTLAQTLAALAAPRHRRRLERVFLPSLTEAK

SEQ ID NO: 66435 - protein, 142 aa, Zea mays
  Clone ID: LIB4730-027-B6_FLI.pep
NLASDALPAGLLVVHDACRSCEDDVSELPGREQPCSPSLNVFHADIKARADDAALVQPPVEFDHDLARSVVINVLELSNVAVALHDRQELDDDLGRRPDHDLPLADLLSVVHGLERIVEHTDPHHADLTLPRRTTRRRATED

SEQ ID NO: 66436 - protein, 495 aa, Zea mays
  Clone ID: LIB4730-028-D4_FLI.pep
PAGTLAQHRRGAETGVFVLAYLRDSKLLPFPTAAAAAPPHSVDTMRECISIHIGQAGIQVGNACWELYCLEHGIQADGQMPGDKTIGGGDDAFNTFFSETGAGKHVPRAVFVDLEPTVIDEVRTGTYRQLFHPEQLISGKEDAANNFARGHYTIGKEIVDLCLDRIRKLADNCTGLQGFLVFNAVGGGTGSGLGSLLLERLSVDYGKKSKLGFTVYPSPQVSTSVVEPYNSVLSTHSLLEHTDVAILLDNEAIYDICRRSLDIERPTYTNLNRLVSQVISSLTASLRFDGALNVDVNEFQTNLVPYPRIHFMLSSYAPVISAEKAYHEQLSVAEITNSAFEPSSMMAKCDPRHGKYMACCLMYRGDVVPKDVNAAVATIKTKRTIQFVDWCPTGFKCGINYQPPSVVPGGDLAKVQRAVCMISNSTSVVEVFSRIDHKFDLMYAKRAFVHWYVGEGMEEGEFSEAREDLAALEKDYEEVGAEFDEGEEGDDGDEY

SEQ ID NO: 66437 - protein, 204 aa, Zea mays
  Clone ID: LIB4730-028-E2_FLI.pep
PGGSSSMAECKDDDSGRRSPSSSMDSSTHPPALSTASSASRHPAERRDQLSADLQLGLSLSPASSALLVAETNNSIVPSTPRNQALPDWPPIKPFLRSALTASARRRRTLFVKVYMEGVPIGRKLDMLLLDGYSSLLAKLCHMFKASITYADAVEYHQRVPHEKAAHVLTYEDHDGDWMMVGDVPWELFLGSVKKLRIARTDRC

SEQ ID NO: 66438 - protein, 312 aa, Zea mays
  Clone ID: LIB4730-028-F3_FLI.pep
GTSHTVCGLPDRNRTPQPTPPAVLMATDPAPVPAMRCYSLPPVRLPAEDILFCVDVDLEARAEMKSAAAAAASSGSTSTASPQPTQPAGAGGAPAAGPRTVVRRMDAVRQALLLFVHSKLTMCPEHRFAFASLGETFSMVKKGFSSDAGFAMEAIHSLSASETRYAMADLTQLFMTACQEGKRAESQGRILRVVLIYCRSSTKPQHQWPVKPKNFTLDIIYLHDKPNPDNCPQKVYDALVDVLEHVSQYEGYILETGQGLARVLFRQMCILVSHPLQRCMQDDLDIPKQVAKKIVAAEPAQNEDAAPVSSQQ

SEQ ID NO: 66439 - protein, 346 aa, Zea mays
  Clone ID: LIB4730-029-D6_FLI.pep
REKSQSNPSAYRPKPSPSSRSSPPVAGRRLRPTAAMARNEEKAQSMLNRFITMKQEEKRKPRERRPYLASECRDLADAERWRSEILREIGAKVAEIQNEGLGEHRLRDLNDEINKLLRERGHWERRIVELGGRDYSRSSNAPLMTDLDGNIVAVPNPSGRGPGYRYFGAARKLPGVRELFDKPPEMRKRRTRYEIHKRINAGYYGYYDDEDGVLERLEGPAGKRMREEIVSEWHRVERVRREAMKGVMSGEVAAAGGRSGEAAREVLFEGVEEEVEEERKREEEKREREKGEEVGREFVAHVPLPDEKEIERMVLERKKKELLSKYASDSLLVEQEEAKEMLNVRR

SEQ ID NO: 66440 - protein, 164 aa, Zea mays
  Clone ID: LIB4730-029-E11_FLI.pep
QEVENTLRFLITPFLLGYLTSVGDHRLLPWLAIVSPSAPFYGVHGIHSLDHPAEDNMLPIQPACLDSSYVKLRSIRIKSRIRHSNNPWMCMFYSEILIREDASIYRLTPFTVASNYVTALNHEARDNTMEWCSLIVKRFAIGPDTFFTCTKSPKFSTVFGTTSP

SEQ ID NO: 66441 - protein, 291 aa, Zea mays; identical to SEQ ID NO: 65479
  Clone ID: LIB4730-029-F4_FLI.pep

SEQ ID NO: 66442 - protein, 146 aa, Zea mays
  Clone ID: LIB4730-031-E5_FLI.pep
PLQHRLIGSTHHSHPKLKLHNSFKHSNGAHLQTKVTLEQTSLTPQKKHSLWLDTLNLLDSQTWRERLLELVGLVGVVDAEGVEVPGAAHLELDGVLGPLDPHRPCVLPPRSQQEVLDLVDLLRHGGSPGGRHCDANPKIRPGRPRG

SEQ ID NO: 66443 - protein, 145 aa, Zea mays; identical to SEQ ID NO: 53346
  Clone ID: LIB4730-031-E7_FLI.pep

SEQ ID NO: 66444 - protein, 190 aa, Zea mays
  Clone ID: LIB4730-033-A10_FLI.pep
RPSFHRLCSRSRGSGSTVRRELARSHGEQEPMVAAAANLLRGNGGHRASPPTRRPGRLFRADAGSSSGTARLLRDEHERLLRCSSASQAQRIPAPNVRWCHPRHRQPPAPRVRRPVRGAVLGDGVPEAVPLLLPQVLRGVPVRAAGHLRQQEHLPLLQQLEDQAGRPQVPLVALPLGLLDEIFCSKNQKE

SEQ ID NO: 66445 - protein, 436 aa, Zea mays
  Clone ID: LIB4730-033-G11_FLI.pep
GIYWYNRVICVPHRAGTRETMAFTTLGGCGAQASVRLAPQNGILGSNSKPFAGIILKKPQQVGSLPLRARGSIFSSPRRLFSPKAAAPKSGDSIRIAVLGASGYTGAEIVRILANHPQFHIKVMTADRKAGEQFGSVFPHLITQDLPRLVAIKDADFSDVDAVFCCLPHGTTQEIIKSLPRHLKIVDLSADFRLRDINEYAEWYGHSHRAPELQGEAVYGLTELKRDDIRNARLVANPGCYPTSIQLPLVPLVKAKLIKLTNIIIDAKSGVSGAGRGAKEANLYTEIAEGIHAYGITSHRHVPEIEQGLTDAAESKVTISFTPHLMCMKRGMQSTVYVELASGVTPRDLYEHLKSTYENEEFVKLLHGSNVPCTSHVVGSNYCFMNVYEDRIPGRAIIISVIDNLVKGASGQALQNLNLMMGLPENMGLQYQPLFP

SEQ ID NO: 66446 - protein, 323 aa, Zea mays; identical to SEQ ID NO: 58994
  Clone ID: LIB4730-037-F1_FLI.pep

SEQ ID NO: 66447 - protein, 145 aa, Zea mays
  Clone ID: LIB4730-045-B3_FLI.pep
QKPSILTRSMARTKQTARKSTGGRAPRKQLATKAARKSAPATGGVKKPHRFRPGTVALREIRKYQKSTELLIRKLPFQRLVREIAQDFKTDLRFQSSAVSALQEAAEAYLVGLFEDTNLCAIHAKRVTIMPKDIQLARRIRGERA

SEQ ID NO: 66448 - protein, 229 aa, Zea mays
  Clone ID: LIB4730-045-D8_FLI.pep
LLSVDMLHPSSVSLLIRRTRRLKRRTSRRRRCVVGAAPTGAVVVVMVVLLRLRLPERLAHVERVLSIGVVLSLDVVDLVPESGGVEVEGGAVGSADVEGDVLGAEDLVHGCLRGGHELGGEPELAVGAEHREGGDVAVAGLGGVLLHLGEHVADDAAAVVLGDEEELRPRQHVVEVVLHLVVLRQAHQVAGLHRQQVVDSRLPDAHHLDLRLVLTSTLSDALDSVVLRL

SEQ ID NO: 66449 - protein, 198 aa, Zea mays
  Clone ID: LIB4730-048-E2_FLI.pep
GIRVLASAESLFRPGNQKASCPAAQRKKRAEEDGSYEADRPQVHGRQGPPQAARHQGGEEVGADDRRREEAPQVQARNRGAARDPQVPEEHGAADPQAALPAPGARDRAGLQDRPPIPEPRRAGAPGGRRGLPRRSLRGHQPLRHSRQARHHHAQGHPARPPHPWGEGLGVVAVEVEVVVAVSVITVWLEVVEMCRFM

SEQ ID NO: 66450 - protein, 181 aa, Zea mays
  Clone ID: LIB4730-048-H3_FLI.pep
GKPYPTPPPPAAPPQRIARRDLIDHLQLSIMADVDVEPEVAAGAPKKRTFRKYSYRGVDLDALLDMSTDDLVQLFPARARRRFQRGLKRKPMALIKKLRKAVSFQPLSFHYHFLLACSDQDKCVDRYAVMIYPYDMRCDLGVKILIKSQRLLLFSVNIVLKEDAINQPEDCLLECLARLLV

SEQ ID NO: 66451 - protein, 158 aa, Zea mays
  Clone ID: LIB4730-051-C9_FLI.pep
RKCVVTMVHFKNRYMVVEIFIDAGRGEQDPIILTQFNITKVIKDSIQLNFGECGLAGSLGSLQVKYVNPVTKLCIVRVSREDHQKVWAAMTMVRCIGKIPVSFNLLDMSGSIRACKKAALECDEAKFEQYKLVAGDCITAEITQSVEKCFEKIRGLES

SEQ ID NO: 66452 - protein, 412 aa, Zea mays
  Clone ID: LIB4730-052-B11_FLI.pep
RCTTTVHRGGGGTETTDMERSQRQSPPPPSPSSSSSSVSADTVLVPPGKRRRAATAKAGAEPNKRIRKDPAAAAAGKRSSVYRGVTRHRWTGRFEAHLWDKHCLAALHNKKKGRQVYLGAYDSEEAAARAYDLAALKYWGPETLLNFPVEDYSSEMPEMEAVSREEYLASLRRRSSGFSRGVSKYRGVARHHHNGRWEARIGRVFGNKYLYLGTFDTQEEAAKAYDLAAIEYRGVNAVTNFDISCYLDHPLFLAQLQQEPQVVPALNQEPQPDQSETGTTEQEPESSEAKTPDGSAEPDENAVPDDTAEPLTTVDDSIEEGLWSPCMDYELDTMSRPNFGSSINLSEWFADADFDCNIGCLFDGCSAADEGSKDGVGLADFSLFEAGDVQLKDVLSDMEEGIQPPAMISVCN

SEQ ID NO: 66453 - protein, 212 aa, Zea mays; identical to SEQ ID NO: 63896
  Clone ID: LIB4730-054-E2_FLI.pep

SEQ ID NO: 66454 - protein, 380 aa, Zea mays
  Clone ID: LIB4730-059-A1_FLI.pep
SEREEGNGGGELPVHLGVRERGAPRQAVRPGVGRGAGRLPGAGPRQQGGLRDLHQDEHGDGVRRDHHQGERGLREDRARHLPRDRVHLRRRGARRRPLQGAGEHRAAVPRHRAGRARALHEAARGDRRRRPGPHVRVRHRRDPRADAAEPRAGHQARRAPDGGPQGRHLRLAQARRQDPGDGGVRERGRRHGARPRAHRAHLHPARRDRHQRRDRRRPQGARHQARHPGEVPGREDHLPPQPVGALRHRRAPRGRRPHRPQDHHRHLRRLGSPRRGRLLRQGPHQGGPQRGLRRQAGRQEHRGQRPRPPLPRAGVLRHRRAVAPVSVRRLLRHRDHPRQGDPQDRQGELRLQARDDHHQPRPQEGRQQVHQDRRIRPLWP

SEQ ID NO: 66455 - protein, 174 aa, Zea mays
  Clone ID: LIB4730-062-H4_FLI.pep
NCMLQFTINHPATADKPKLKTTRQPPPPPPRAGPSSLRRRSRHGRGAVLLDLGQEVLLPGTDDGLDRHPVLDEVEGRHRLDIVGRGNFLQLVHVHLQEHSLGELLGVLDEQWRDEAAGAAPGGREVNDHQLAGLLGLGHVGVEVGLGVAGDHDSFLLGRHSSLFFLGGIESCWC

SEQ ID NO: 66456 - protein, 183 aa, Zea mays
  Clone ID: LIB4730-064-H11_FLI.pep
RVVRELLRSMGLGEGEYEPRVVHQFLDLAYRYVGDVLGDAQVYADHAGKAQIDADDVRLAIQAKVLLELARSRNRMPLPKSIAPPGSIPLPPEQDTLLAQNYQLLPPLKPPPQFEETEDENEESNPSLTPNPANSNPTFSQDQRSNEQQHTPQHGQRVSFQLNAVAAAAAKRPRMTVDQLNIG

SEQ ID NO: 66457 - protein, 178 aa, Zea mays
  Clone ID: LIB4730-065-H1_FLI.pep
PQDFMFLSRCLRWRLGPLAADPPCQLNVLWHDGHTLSMDGAQVGVLKQANKVCLSSLLEGKHRMALETQISFEVLCNFPDEPLEGQLPDQQLSALLILADLTEGNSSRAVAVRLLHSTSGGGRLTGSLGGKLLPGSLPSRGLASSLLGTSHLSRFFGLSARFESGGRRARNGRPEKCR

SEQ ID NO: 66458 - protein, 321 aa, Zea mays
  Clone ID: LIB4730-069-B4_FLI.pep
GSEVSHQYADTLHQRQATATMVKLATARECRAYSLGAGAGSGTGLRNRWEYINAGVYIFAAVLLVGGFLAQLLPWGGPSSPGLVVAAIGLAGLLAVNTHDLLAHAAGVDYRLGMVVGLDAQMGLVELGVPAVQIVGTALMLVAVVFFVIQMERGYRHSLAMHGLNLLIAGPALWCLGSVQNICQFYERASGHVQLLQKSVQIPLLLGSTLFLIAGIVNRHDRRSRHSGFVLLGRNWAWFCLFGSLLFLAGGPLNLLKVFKTQQMGGRGLEKLRGGSQERLALEREGKVPLILEHGHGGRRGPAIPPPPPGSYKDALVSSAS

SEQ ID NO: 66459 - protein, 183 aa, Zea mays
  Clone ID: LIB4730-075-B10_FLI.pep
ASNDNISSDKHTMCSIPHCSSTVSSKFPPHKQLANCSNTRTAATARRGAAGLAAEAVEGTALALKRVDDVHGGDGLTASVLSVGDGVADDVLQEDLEHAAGLLVDEPRDALHAAPPRQPPDRRLRDPLDVVAQHLPVTLRAALAQALAALAAPRHLRRGDERIGEFLLAGWCGEPVNWIPAGL

SEQ ID NO: 66460 - protein, 202 aa, Zea mays
  Clone ID: LIB4730-075-E3_FLI.pep
IESGGSAVQELPPALSFTPSIILSVLEVQVSRSAARAGSHEEGEPMVAAAANLLRGNGGHRASPPTRRPGRLFRADAGSSSGTARLLRDEHERLLRCSSASQAQRIPTPNVRWCHPRQSPATRVRRPVRGAVLGDGVPEAVPLLLPQVLRGVPVRAAGHLRQQEHLPLLQQLEDQAGRPQVPLVALPLGLLDEIFCSKNQKE

SEQ ID NO: 66461 - protein, 421 aa, Zea mays
  Clone ID: LIB4730-076-C12_FLI.pep
RALFLKVRSRGRRPDRLPFPASGAQGQANSFEVVMADQANQPTVLHKLGGQFHLSSSFSEGVRARNICPSFSPYERRFATRNYMTQSLWGPSMSVSGGINVPVMPTPLFANAPAEKGGKNSMIDFMMGGVSAAVSKTAAAPIERVKLLIQNQDEMIKSGRLSEPYKGIADCFKRTIKDEGFSSLWRGNTANVIRYFPTQALNFAFKDYFKRLFNFKKDRDGYWKWFAGNLASGGAAGASSLFFVYSLDYARTRLANDAEAAKGGGDRQFNGLVDVYRKTLKSDGIAGLYRGFNISCVGIIVYRGLYFGLYDSIKPVVLTGSLQDNFFASFALGWLITNGAGLASYPIDTVRRRMMMTSGEAVKYKSSLDAFQQILKKEGPKSLFKGAGANILRAIAGAGVLSGYDQLQILFFGKKYGSGGA

SEQ ID NO: 66462 - protein, 233 aa, Zea mays
  Clone ID: LIB4730-076-D9_FLI.pep
RVTAVYNLPDTNRREPPLDLVELVCLHHRISLGNGVPGSSPVVELAVVLVGVAVERAVQVPTPAVESREPNPLPAGAAPVRPYLPPFGDRRHPLAGSGNISGLLHVHCLQLDLGNSYYRVAASNNRLHDGVAAVHDAVDRGGSQLGLILLRYHLLVALRAHVHGRRAAEEATVIDAEDGSLGGLAPSLLVLHGSDETALFAIPLRRSPRGRRGGEGRGIAGNSVGFEMGPAGL

SEQ ID NO: 66463 - protein, 333 aa, Zea mays
  Clone ID: LIB4730-077-D4_FLI.pep
RGRISRPVFPLPGGLNPSSHSIFVSAPPPSMEFWGLEVKPGSTVKCEPGHGFILHVSQAALGESKKSDSALMYVKVDDKKLAIGTLSIDKYPQIQFDLVFNKEFELSHTSKTTSVFFSGYKVEQPIEGDEMDLDSEDEEEELNIPVIKENGKADGKEEQKNQEKAVAATASKSSLGLEKKSKDDSDDSDEDESDDSDEDDSDDSDEGEGLSPDEGDDDSSDEDDTSDDDEEETPTPKKPEAGKKRGAENALKTPLSDKKAKVATPPAQKTGGKKGATHVATPHPAKGKTPANNDKLTEKSPKSGGSVPCKSCSKTFNSEMALQAHSKAKHGAK

SEQ ID NO: 66464 - protein, 125 aa, Zea mays
  Clone ID: LIB4730-078-F4_FLI.pep
RARLTPPRRTRAGSASGKPKRPPSAFFVFMSEFRQEYQALHPGNKSVATVSKAAGEKWRAMSDQEKQPYVDQAGQKKQDYEKTKANFDKKESTSSKKAKTEDEDGSKSEVDDEDGSSDEENDDDE

SEQ ID NO: 66465 - protein, 325 aa, Zea mays
  Clone ID: LIB4730-079-B5_FLI.pep
YLKKPIFSSSLAAPPLNLRRRSPGASPTRAEGPRRSNYRCPKPRYSSSPPFPPQHPNPDLQGSAAMPQGDHIELHQKRHGKRLDHEERKRKREAREVHRRSKDARNLIGAKGKRFAKKRYAEKAQMKKTLKMHDESNKRQKVDDDVQEGALPPYLLDRDQTQRAKVLSNTIKQKRKEKAGKWDVPLPKVRPVAEEEMFKVLRTGKRKTKQWKRMVTKATFVGAGFTRKPPKYERFIRPTGLRFTKAHVTHPELKCTFNLDIISVKKNPNGPMYTSLGVMTRGTIIEVNVSELGLVTPAGKVVWGKYAQVTNNPENDGCINAVLLV

SEQ ID NO: 66466 - protein, 275 aa, Zea mays
  Clone ID: LIB4730-079-D9_FLI.pep
PALPISLALRRLRPPPLAALPASPYHTQLVQMSSEASKVAVPESVLRKRKREEQWATEKKEKALVEKKKSIESRKLIFTRAKQYAEEYDAQEKELVQLKREARLKGGFYVSPEAKLLFVVRIRGINAMHPKTRKILQLLRLRQIFNGVFLKVNKATINMLRRVEPYVAYGYPNLKSVRELIYKRGYGKLNKQRIPLSNNQVIEEGLGKHNIICIEDLVHEIMTVGPHFKEANNFLWPFKLKAPLGGLKKKRNHYVEGGDAGNRENYINELIKRMN

SEQ ID NO: 66467 - protein, 145 aa, Zea mays; identical to SEQ ID NO: 53346
  Clone ID: LIB4730-080-A7_FLI.pep

SEQ ID NO: 66468 - protein, 145 aa, Zea mays
  Clone ID: LIB4730-080-D1_FLI.pep
IKAKDVPQQWHKEPEHHKFLKKTFSLLFSTTQGGEQKEAPQLLLLGGARNAASGLVKHGVDLVAVLHLQLIRGLLAAKPAAIKQECNGIHVHRLAVAIGVHQLLQLGGPLYAKEHLIAILSLDLKVDVGAALRGLLILLAGSRHR

SEQ ID NO: 66469 - protein, 187 aa, Zea mays; identical to SEQ ID NO: 47521
  Clone ID: LIB4730-080-E9_FLI.pep

SEQ ID NO: 66470 - protein, 307 aa, Zea mays
  Clone ID: LIB4730-080-H12_FLI.pep
SINNQTQVHALSCPPKLRRAAGRLLDRGHVVLAADVDGMAPGRRGGVVADVERLLADDAVDLREHLGEGVLHVHRLQGRRLHEEGVLALGEGLGVLGRDGPEVAQVRLVPYQHHDDVGVRVVPQLPHPPLHVLEGDVPRDVVHDQRPDRSAVVRARDSAVSFLAGGVPDLGLDDLVLDVDAAGGELDADGGLGLEAELVAREAREQVRLADAGVADEHHLEEVVVVVVRPVRHRQQTAGRRRRREWDGRWRRRGARMGQREHADAGVGVGVFFFLSSQFHPGRVRVLGFRWLGAGSVPCGRRAVQSR

SEQ ID NO: 66471 - protein, 382 aa, Zea mays
  Clone ID: LIB4730-081-D3_FLI.pep
RDSPFALFTIPPQNTSCDPRSLRRASIMSAYCGKYADELIKNAAYIGTPGKGILAADESTGTIGKRLSSINVENVEENRRALRELLFCCPGALQYISGVILFEETLYQKTKDGKPFVDVLKEGGVLPGIKVDKGTIEVVGTDKETTTQGHDDLGKRCAKYYEAGARFAKWRAVLKIGPNEPSQLAIDLNAQGLARYAIICQENGLVPIVEPEILVDGPHDIDRCAYVTETVLAACYKALNEHHVLLEGTLLKPNMVTPGSDSKKVTPEVIAQYTVRTLQRTVPAAVPAVVFLSGGQSEEEATLNLNAMNKLSTKKPWALSFSFGRALQASTLKAWAGKVENVEKARAAFLARCKANSEATLGTYKGDAAADTESLHVKDYKY

SEQ ID NO: 66472 - protein, 150 aa, Zea mays; identical to SEQ ID NO: 66434
  Clone ID: LIB4730-081-G6_FLI.pep

SEQ ID NO: 66473 - protein, 215 aa, Zea mays
  Clone ID: LIB4731-006-F6_FLI.pep
PGPPLDVSLAISSSTPDWRTRHHEGADRCPCSPGARCERRLQYKRRLWLPDTTVSSTASVLYAASVLSAAAAAAAAMAIPHSTTAAKPVPAVRILRRRQRRQPVPGPVRRVPEAPVQPGGDALRLATVPGAAAAVLPPDQAGGAAAPVPGDIRCGPAVLPAAAAAGRARGADGGPGSAAADGDVRSAAAAARSLPLQRSCRRCLLLRKLCTVVIM

SEQ ID NO: 66474 - protein, 159 aa, Zea mays
  Clone ID: LIB4731-007-B2_FLI.pep
PGFSRAHAHQQLPPCCRRLSPRDRSTAAATMKIMFAMTSIKGVGRRFSNIVCKKADIDMNKRAGELTPEELERLMTVVANPRQFKVPDWFLNRKKDYKDGRFSQVVSNALDMKLRDDLERLKKIRNHRGLRHYWGLRVRGQHTKTTGRRGKTVGVSKKR

SEQ ID NO: 66475 - protein, 215 aa, Zea mays
  Clone ID: LIB4731-007-G12_FLI.pep
GPPPLDVSLAISSSTPDWRTRHHEGADRCPCSPGARCERRLQYKRRLWLPDTTVSSTASVLYAASVLSAAAAAAAAMAIPHSTTAAKPVPAVRILRRRQRRQPVPGPVRRVPEAPVQPGGDALRLATVPGAAAAVLPPDQAGGAAAPVPGDIRCGPAVLPAAAAAGRARGADGGPGSAAADGDVRSAAAAARSLPLQRSCRRCLLLRKLCTVVIM

SEQ ID NO: 66476 - protein, 452 aa, Zea mays
  Clone ID: LIB4731-007-G6_FLI.pep
ASSSAMGKEKSHINIVVIGHVDSGKSTTTGHLIYKLGGIDKRVIERFEKEAAEMNKRSFKYAWVLDKLKAERERGITIDIALWKFETTKYYCTVIDAPGHRDFIKNMITGTSQADCAVLIIDSTTGGFEAGISKDGQTREHALLAFTLGVKQMICCCNKMDATTPKYSKARYDEIVREVSSYLKKVGYNPDKIAFVPISGFEGDNMIERSTNLDWYKGPTLLEALDQITEPKRPSDKPLRLPLQDVYKIGGIGTVPVGRVETGVIKPGMVVTFGPTGLTTEVKSVEMHHEALQEALPGDNVGFNVKNVAVKDLKRGFVASNSKDDPAKEAASFTSQVIIMNHPGQIGNGYAPVLDCHTSHIAVKFAELITKIDRRSGKELEKEPKFLKNGDAGMVKMIPTKPMVVETFSQYPPLGRFAVRDMRQTVAVGVIKSVEKKDPTGAKVTKAAAKKK

SEQ ID NO: 66477 - protein, 363 aa, Zea mays; identical to SEQ ID NO: 42242
  Clone ID: LIB4731-008-H2_FLI.pep

SEQ ID NO: 66478 - protein, 389 aa, Zea mays
  Clone ID: LIB4731-010-F9_FLI.pep
EAGRASNPIQTRQARNPPMAHRVLLLLSLASAAAVAAAVDAEDPLIRQVVPGGDDNDLELNAESHFLSFVQRFGKSYKDADEHAYRLSVFKANLRRARRHQLLDPSAEHGVTKFSDLTPAEFRRTYLGLRKSRRALLRELGESAHEAPVLPTDGLPDDFDWRDHGAVGPVKNQGSCGSCWSFSSSGALEGAHYLATGKLEVLSEQQFVDCDHECDSSEPDSCDSGCNGGLMTTAFSYLQKAGGLESEKDYPYTGSDGKCKFDKSKIVASVQNFSVVSVDEAQISANLIKHGPLAIGINAAYMQTYIGGVSCPYICGRHLDHGVLLVGYGASGFAPIRLKDKPYWIIKNSWGENWGENGYYKICRGSNVRNKCGVDSMVSTVSAVHASKE

SEQ ID NO: 66479 - protein, 363 aa, Zea mays; identical to SEQ ID NO: 42242
  Clone ID: LIB4731-011-E1_FLI.pep

SEQ ID NO: 66480 - protein, 323 aa, Zea mays
  Clone ID: LIB4731-017-F3_FLI.pep
VARHCSTAKPRSSRVAPEGAEGLDGASPEDVLVVEGRDGSAHERAHPEDPVVVPGLVLVVDDGGAQAPGRVDAGAGDGDGGQVHHEHGEADGEGSQNRDVGVAGVALGVGGGEDGVDEHEGADDLGAEAGAAGVAGGERVGAAAVPVEVGALERLDEADAADGAEALRHDVEQRAHQGDLARQEEAEGDGGVDVAPRDAGGAVDEDEDHAAEGPGDAQHPHAAARRVGARRRRVRLVLVPDHGGHRDVQEQQRGDELGDHGAVQRPGPQLSRVDQRRRGRVRVVLGSELAAASAALDHVVLAHRILEPPRLYLQGMMEWMSPG

SEQ ID NO: 66481 - protein, 231 aa, Zea mays; identical to SEQ ID NO: 43391
  Clone ID: LIB4731-017-G6_FLI.pep

SEQ ID NO: 66482 - protein, 464 aa, Zea mays
  Clone ID: LIB4731-018-A2_FLI.pep
QQQTSGARNRIPQSPPSSVPSPRTLTLVHPAPMDEDAGGASPPPVPLAHVPPLQQPTTAAPSHRDMAASPTSSRSVTETVNGSHRFVIQGYSLAKGMGVGKHIASETFSVGGYQWAVYFYPDGKNPEDNSVYVSVFIALASDGTDVRALFELTLLDQSGKGKHKVHSHFDRSMESGPYTLKYRGSMWGYKRFFRRTALELSDYLKDDCLKINCTVGVVVSTIDYSIPHSIHVPDSDIGYDFGSLLDSQEGADVILNVGGERFHAHKLVLAARSHVFGSQFFDDESDGEKSEVNETDELKEFSIDDMEPNVFKAMLHFIYRDTLVDDDELGASSSDGSIFDTPAAKLLAAADKYHLARLKSLCESYLCKGISVASVASTLALADRHHAMELKAVCLKFAAENLSAVMRSEGFIYLKDNCPSLQSEILKTVAGCEDQCSSVGKSQSVCGQLSDGGDSSCRRVRQRT

SEQ ID NO: 66483 - protein, 307 aa, Zea mays
  Clone ID: LIB4732-001-E11_FLI.pep
RDTNLSTPRRVRGGAAMASSVAAAASTFLGTRLADPAPQNGRIVARFGFGLGGKAKPAPKKVAKTSTSSDRPLWFPGAVAPDYLDGSLVGDYGFDPFGLGKPVEYLQFELDSLDQNLAKNEAGGIIGTRFESSEVKSTPLQPYSEVFGLQRFRECELIHGRWAMLATLGALSVEWLTGVTWQDAGKVELVDGSSYLGQPLPFSISTLIWIEVLVIGYIEFQRNAELDPEKRLYPGGSYFDPLGLAADPEKKERLQLAEIKHARLAMVAFLGFAVQAAATGKGPLNNWATHLSDPLHTTIFDTFGGSS

SEQ ID NO: 66484 - protein, 286 aa, Zea mays
  Clone ID: LIB4732-003-C9_FLI.pep
RPTCHIYLRRKTLRVTSLRLFSRLRRLGGLRRRRRRCRCSTVLSPLPISSRRRAPPVDPPLLKTHSMASATGGSSSEMAVDHATGLGTVEKPRFDALMPSEMSGGRTQFRKVTVPQHRFAPLKRCWMEIYTPVYEHMKIDIRMNLKARRVELKTRQDTPDVSNLQKCADFVHAFMLGFDIADAVALLRLDDLYVDSFEIKDVKTLRGEHLSRAIGRLSGKGGKTKYAIENSTRTRIVIADTKIHILGSFVNIKVARDSLCSLILGSPAGKVYSKLRAVSARLAERY

SEQ ID NO: 66485 - protein, 226 aa, Zea mays
  Clone ID: LIB4732-004-G5_FLI.pep
GASLVRSTGSKVGAVRDLSNLVKPEDMITSEHLVTLLAIVPKYSQKDWLSSYEKIDTFVVPRSSKKLYEDNEYALYTVTLFAKVVDNFKVRAREKGFQVRDFEYSPEAQESRKQEMEKLLQDQEAMRTTLLQWCYASYSEVFSSWMHFCAVRVFVESILRYGLPPSFLSAVLAPSTKSEKKVRSILEELCGNAHSIYWKSEDDVGVAGLGGETEAHPYVSFTINFV

SEQ ID NO: 66486 - protein, 189 aa, Zea mays
  Clone ID: LIB4732-005-G12_FLI.pep
PRGRPGKTLASTPSGSSQTLHRRRRRRPPASSPKMQIFVKTLTGKTITLEVESSDTIDNVKAKIQDKEGIPPDQQRLIFAGKQLEDGRTLADYNIQKESTLHLVLRLRGGAKKRKKKTYTKPKKIKHKHKKVKLSVLQFYKVDDTTSKVTRLRKECPNSECGAGVFMANHFDRHYCGKCGLTYVYNQKA

SEQ ID NO: 66487 - protein, 363 aa, Zea mays; identical to SEQ ID NO: 42242
  Clone ID: LIB4732-006-E4_FLI.pep

SEQ ID NO: 66488 - protein, 380 aa, Zea mays
  Clone ID: LIB4732-006-G6_FLI.pep
RKEGTRIYICLSTCSQLIIRIYQAMHNNNQISTQLIQLALAGHDVHASRAVHRRPWSDGLDAALARRPHRLLQLLQLGQHRGRARGQHGHGQLVLVGGEGQLHLRLQLLCHGGGGRRRRQDDHGRRLALPVAAVEHHLDAPEEEAAHVRERDVGVLGEEAVQEPGDGAEGEEEGEGEGHELGTLRPDHNEDDAQGGDEDGHGEGEADAAEHPDAVRLRDEHDGDDGDEREGGHVEEEEGGERPQPGAPRRVDEVEEDVGGLHHAPEGVDGEQRAGVGLHQRVQDPQRAAEQSHHVRHRAEPLRRLLPVHAEERRPRMPKTEAHGCSMEKRPPAIATVTRTGKPKPYTLVRLCSSLSLAGERSETNFAPTPLHSCPCMRSR

SEQ ID NO: 66489 - protein, 237 aa, Zea mays
  Clone ID: LIB4732-008-E9_FLI.pep
LSVRSTRTCVNGRCSRRSSICGAVLAQGRRRQQEDGGVRGRVGAGEARPSGGRQLCGPCRDRQDPAWLQVQGDRRGVSDARAGAARARPAPRRQHDHHRLLDARDDWVRAAQTRQGVGGAQRHPRRHHVIGERVHPYHPLPGGGRRGLPPQARPPRRRLPPLQPDPVTACGAMLGARILNQKKKDSSSFFLSLLLGHRSSNKELTFGGRLFSFRDLNKLFGTGGMEHSVGCSFLHSS

SEQ ID NO: 66490 - protein, 257 aa, Zea mays
  Clone ID: LIB4732-008-H10_FLI.pep
RGRPGNSVSNSRVLLLSDPELRRPQHQARPPSRVTEMALPNQGTVDYPSFKLVIVGDGGTGKTTFVKRHLTGEFEKKYEPTIGVEVHPLDFTTNCGKIRFYCWDTAGQEKFGGLRDGYYIHGQCAIIMFDVTSRLTYKNVPTWHRDLCRVCENIPIVLCGNKVDVKNRQVKAKQVTFHRKKNLQYYEISAKSNYNFEKPFLYLARKLAGDPNLHFVEAVALKPPEVTVDMAMQQQHEAELAAAAAQPLPDDDDDLIE

SEQ ID NO: 66491 - protein, 268 aa, Zea mays
  Clone ID: LIB4732-011-F8_FLI.pep
ELTRCRGRNSRGGLHKCAPCTAMPNNKIVAANMEEKGAGGKAAVPHDELPRFTIFLIPNRREPPLDLVELVCLHHRISLGNGVPGGSPVVELAVVLVGVAVECAVQVPTPAVESRKSNPLPAGAAPVRPYLPPFGDRRHPLAGSGNISGLLHVHCLQLNLGNSYYRVAASNNRLHDGVAAVHDAVDRGGSQLGLILLRYHLLVALGAHVHGRRAAEEATVIDAEDGSLGGLAPSLLVLHGFLNSDETALFAIPLRRSHIMIESEAARC

SEQ ID NO: 66492 - protein, 156 aa, Zea mays
  Clone ID: LIB4732-015-C4_FLI.pep
KSTERIPRIAFAAFAASHHRETPAAASMAPKAEKKPAAKKPAEEEPAAAKAPAGKKPKAEKRLPAAKSSGKEGGDKKGKKKAKKSVETYKIYIFKVLKQVHPDIGISSKAMSIMNSFINDIFEKLAGEAAKLARYNKKPKHAVSEGTKAVTKFTSS

SEQ ID NO: 66493 - protein, 360 aa, Zea mays; identical to SEQ ID NO: 63910
  Clone ID: LIB4732-016-D5_FLI.pep

SEQ ID NO: 66494 - protein, 170 aa, Zea mays
  Clone ID: LIB4732-016-F3_FLI.pep
SAGMLVYQDLLSGDELLSDSFTYKELENGVLWEVEGKWVTQGPVDVDIGANPSAEGGEDESVDDTAVKVVDIVDTFRLQEQPPFDKKSFVSYIKKYIKNLTAVLEPEKADEFKKGVEGATKFLLSKLKDLQFFVGESMKDEASVVFAYYKDGATNPTFLYFSHGLKEIKC

SEQ ID NO: 66495 - protein, 360 aa, Zea mays; identical to SEQ ID NO: 63910
  Clone ID: LIB4732-017-D6_FLI.pep

SEQ ID NO: 66496 - protein, 193 aa, Zea mays
  Clone ID: LIB4732-018-F11_FLI.pep
VLSIRQCAAASNYPHAYPANKISKANDKARCKDCIASSKRLRIIHLRCWHTFKLCLEDDCHNYAINCDSLTEDDTDEVLRSDPGRLDGGPDEAAPRDEDTPCRAEDGDADGDGDTDCGEGIWRDLHQGARPRRRVRRHLSARSVSVSSRSPSAWPRPRDWIGEGGLCWGRRAGSAQRGREVTSSTFHPDPPQL

SEQ ID NO: 66497 - protein, 250 aa, Zea mays
  Clone ID: LIB4732-018-H9_FLI.pep
PGKNPIQFQIPLLASSPPPPLRSSPSRPAMATAARALVAARALVAARPARPLLPPRRLPSSSSIRPARQRAGVGCVRCMARRPDSTYSPLRSGQGGDRAPTEMAPLFPGCDYEHWLIVMDKPGGEGATKQQMIDCYIQTLAQVVGSEEEAKKRIYNVSCERYFGFGCEIDEETSNKLEGLPGVLFVLPDSYVDAENKDYGAELFVNGEIVQRSPERQRRVEPVPQRAQDRPRYSDRTRYVKRRENQSYQR

SEQ ID NO: 66498 - protein, 276 aa, Zea mays
  Clone ID: LIB4732-021-F8_FLI.pep
LARSSSNLASGMASKQIGVLTCFIAITALAFRPCASAVPMDGGWSNGGATWYGPAKGAGSDGGACGYQGAVDQPPFSSMIAAGSQSIFQDGNGCGTCYQVKCTGHASCSGSPVTVVITDLCPGAACQVEPVHFDLSGTAFGAMAKPGQADQLRNAGRLQVQYIRVACNWNGLDIAFRVDAGSNANYLAMAIEYESGDGDLRAVELKQSGAAAWAPMQRSWGAVWQYKSGSTNLQAPLSVRLTSGSGRVLVASNVIPAGWQPGRTYRSVVNFGGNHA

SEQ ID NO: 66499 - protein, 166 aa, Zea mays
  Clone ID: LIB4732-022-A1_FLI.pep
LLLYYRCGMPFCQLQQVVIRMKVVRQKIRAAPSTSRGIDGTKCISFTELISVTFVNKDGSEKTICVPVGMSMLEAAHENDIELEGACEGSLACSTCHVIVMDVKYYNKLEDPADEENDMLDLAFGLTETSRLGCQVIAKPELDGMRLALPVATRNFAVDGYVPKPH

SEQ ID NO: 66500 - protein, 188 aa, Zea mays
  Clone ID: LIB4732-024-D1_FLI.pep
RKTSERGEMLRHAARRLVSRTAAAPTARRALVTAEVPAEAAEDSTFVEAWKKVAPNIEPPTTPLFLMQPRPPTPATIPTKLTVNFVLPYKSEIANKEVDMVIVPATTGQMGVLPGHVATIAELKPGVLSVHEGNDVTKYFVSSGFAFVHANSIAEFTAKLGSASTDLEKAEAQIGVDVHSALNAALTG

SEQ ID NO: 66501 - protein, 321 aa, Zea mays
  Clone ID: LIB4732-029-G7_FLI.pep
FLPGPHILPPMDVDGPAPADASARPATNGEAPSGAREVDVGEEDTLAGVLRSFVDGVWYPDEPLLRRLRAASCDAAPRLRGASRNSARDLLEWTRRGSGLRAILVISVGTITLIALTGLLTFMFFLLVATANAIIVSVLMSLACRRILGYLLCLLGCSVYWSSISCYLCHFCDCHLSSCWNFGCYRLGWVLLDDLVHRKEEHGPDEALLRHDELGNPIVFRVPASEAEACRLRLVGCVLYEALGYIYLCESRFCCLFVCKSVEDSLLVAAALFLSVTRCIMLALNFGSMYVRHGSQCCYLQDSEQMLMFIANKSMLMFIKF

SEQ ID NO: 66502 - protein, 102 aa, Zea mays
  Clone ID: LIB4732-031-B10_FLI.pep
SLVRSSSTTAPSPPPPPPPPWVRFTDRWPALGRCAGRRPRLQSRTRRRSPAAALTSACNTTAASSPPLLDSARSAAPTHRRSRSSYGFVFYSPLVSSLMATC

SEQ ID NO: 66503 - protein, 340 aa, Zea mays
  Clone ID: LIB4732-032-F12_FLI.pep
IELVLYVLCCVSCIGFAGRQASMGRSPCCDENGLKKGPWTQEEDEKLLHYIQKNGHGSWRTLPRLAGLNRCGKSCRLRWTNYLRPDIKRGKFSREEEQTILHLHSVLGNKWSAIATHLPGRTDNEIKNFWNTHLRKRLIQMGFDPMTHRPRTDFFAALPQLIALAALRGQLPADPDPPQQAGTTAAAAAALAGLIGALCSPPQLTLLDTTTATTAAAAPPVVSSSSADDDAAHQYYLPRTTFPDAPGSGEAAHQRQQQAAGLISYGRRPDDAGGDVDVFACYGGGGGSSLPPLTDLSDDAATLLQLQVDTASSEFGSGGSSPLLPWPEFFPDDPFITDFL

SEQ ID NO: 66504 - protein, 200 aa, Zea mays
  Clone ID: LIB4732-033-C5_FLI.pep
CMHPMADRSTPAAVRRPLLVVIRAVASFRCWSEGERELDLSAVLLLLDDRVSRRGKAAFLKHGLQGDGCFADEIVVGEVAVHDLEVQLRGVVGDGEDEGLVPFGLASCSICDAAFLLLGAAGKDHEGVHVIEEIGVLESLGGDEEDLQLPVHHVYLLPRSIAGSFLVRCSCSCRERTGRQPSAQESEPTALSPLLLVLAP

SEQ ID NO: 66505 - protein, 127 aa, Zea mays
  Clone ID: LIB4732-034-C1_FLI.pep
GQPLSRLSALVPVSPQLPTLYISISCSSTVSCFDANQINLWPLFPSELLRFVFLAEDMAAANGAAGAVLFSEEDLREVSAVRWGEDFVEVTCGCTSHRYGDAVGRLRVFVSGDLEINCECTPGCREA

SEQ ID NO: 66506 - protein, 153 aa, Zea mays
  Clone ID: LIB4732-034-D10_FLI.pep
REATYQQSPLPSQYRVLRTSSRTQVSRDETVDMARTQSAVAVAVVAAVLLLAAAATTSEAAITCGQVSSAIAPCLSYARGTGSGPSASCCSGVRNLKSAASTAADRRAACNCLKNAARGVSGLNAGNAASIPSKCGVSIPYTISTSTDCSRVN

SEQ ID NO: 66507 - protein, 152 aa, Zea mays
  Clone ID: LIB4732-035-B11_FLI.pep
LGGRPAPRVRQGQHPPRQALPQARPQGVHQGRRTHCDRLRRHGIRRLLCQAHLHPHQQHHRRLRLIHAPHSLRSGQWRLRLGGSAVFSSGIRKAAPFRLASARHPKGFCTLNIEDQMVFYALQQRPLNGPLNLEDAAGFFIYRVSLNGPLSI

SEQ ID NO: 66508 - protein, 235 aa, Zea mays
  Clone ID: LIB4732-036-C8_FLI.pep
FTDDDLANDSRRRQKRRNKRIATRERGFHPTSSAQRRGLHGRLQQLGPDQRAALVQQQVLGLDVAVVHAARVAVAHGGHQLPEVVARQVLRHAPRRVHQREQLAAAGEVQHEVDLLARRQDLVEPHHVAVPQSPEDARLPLDGGVDTAATGAWVGERLDGHGAAGEQVPRQVHLGGGAAAQEAAELVPAEEHGPRGGGSVGDGGGRHRGGGVCSAGAVVMTGRDGGNLLYRLTGR

SEQ ID NO: 66509 - protein, 228 aa, Zea mays
  Clone ID: LIB4732-036-F4_FLI.pep
QRRLHIGAWRTRSEEEDPHSPGKRITRLQPPFPAGDPTRVSATDPGKRRLMQFFGGSSLTSIAPEATPAPAAPPGTGTGASAQVLYVFNRNGVCLLYREWHRPLRTLDPTQDHKLMFGLLFSLRSFTAKIDPTTAEKGNLGVPLLPGQGCSFYSFKTNTYKLNFMESPSGIKLILITHPRTGDQRDSLKHIYNLYVEYVVKNPLYAPGTPIKCELFNKHLDQYVKTLI

SEQ ID NO: 66510 - protein, 530 aa, Zea mays
  Clone ID: LIB4732-036-G1_FLI.pep
PGLKSQQTPPSSLCSAQKHHTPSLSRAHKHVVNHGCRDEGERRSGVGGGREGAAAGREARRADAGAAGGGDADGRAVLPVQPGPEHRGDRADGVLLQALLVRRRRRQGRGRGRGSRAPRRAGARAGALPPAGGAAGRQPGDEAHRGADRRGRRVRGGRRRLRPRRRRRPHQARPRRARPARLLRPRRQAHPRDAPHDRAGDEVQVWGLRARPGHEPLHVRRHRRHGVRQLVGGDGARRRRAHRAAVPGPKRPEGARPARAHLPPPRVRRDPRRLRHGGALRRAGAAVPLLLLRPGPAGARARPCARRRRPGPLHHLRGAVGAGVARAHQGAGAGARAAHQAAVRRGRAPPVRAAAPAGLLRQRHRAHQRPCHGRRAAVRARVARGGAGAGRRADGHRRLHALGGGLLRGDAGPAVARVHAAHHHLVAARVPRRRLRLGRARHVGPGHAAGEGSHPVPGAREGEEEHQRAARPASHRDGRLPRAHGRDMIHSSVMTDMDGLLLYIHIRCRVLIHSSVARCYSTTVLILDLC

SEQ ID NO: 66511 - protein, 250 aa, Zea mays
  Clone ID: LIB4732-038-A12_FLI.pep
LEAGRAVSRRGRVENLLSPRSPPPPPPTSPHGHTCPHRRRGPTPMAKLPRLPCPFAVLALMCIIPLTAPRPALSSRTAPRDGVSFAGAGNTIHQLLKDHGLPGGLLPRGVESYTLDESTGLLEARLSAPCYATYDNGELAYFDNVVRGNLSKGALRGVEGLSQEELFVWLPVKGILVQDQEPGVILFDIGLAHKSLSRSLFEDPPDCKPSASGGMSAAAAARREGTQGVTGLRLRREMAAAGSDQSQEQR

SEQ ID NO: 66512 - protein, 161 aa, Zea mays
  Clone ID: LIB4732-038-E11_FLI.pep
KLSYGPCDFLIESDCKTIIEKCDAKSSHKSSKDSNWLPKEAHPKGEHDQDEIVCPVVVEVALEAAGPLGIGAWDGEPGEELRDSPRRRGPVHLPQRVHQVLRRHRAPVHLRRSRPCGTLRARNGASVVEGRAAAATTVLDGWVCVRRAVVQQRWCAMASLP

SEQ ID NO: 66513 - protein, 247 aa, Zea mays
  Clone ID: LIB4732-038-H2_FLI.pep
SVRIRTARRQAAPPATASARPMASLSPSLHLPCNSRTGFLGKTRGIRPCVFPAGRVGFVRTVVECKESRIGKQPIEVPSNVTLTLEEQFVKAKGPLGELSLSFPGDLKIVKEESGNLRVYKTAETERANQMHGLFRTLTDNIIVGVSKGFDKKLQLVGVGYRAAVEGNDLVMNLGFSHPVRMAIPEGLAVKVEENTRIIVSGYDKSAIGQFAATIKKWRPPEPYKGKGIRYMDEVVRRKEGKAGKKK

SEQ ID NO: 66514 - protein, 432 aa, Zea mays
  Clone ID: LIB4732-039-C10_FLI.pep
TRSTSRRIPSHYHPSRRPPIRSGSSNPGAVMATKRSVGTLGEADLKGKKVFVRADLNVPLDDAQKITDDTRIRASVPTIKFLLEKGAKVILASHLGRPKGVTPKYSLKPLVPRLSELLGVEVVMANDCIGEEVEKLAAALPEGGVLLLENVRFYKEEEKNEPEFAKKLASVADLYVNDAFGTAHRAHASTEGVTKYLKPAVAGFLMQKELDYLVGAVANPKKPFAAIVGGSKVSSKIGVIESLLAKVDILILGGGMIYTFYKAQGYSVGKSLVEEDKLELATSLIEKAKAKGVSLLLPTDIVVADKFAADAESKIVPATAIPDDWMGLDVGPDATKTFNEALDTTKTVIWNGPMGVFEFEKFAAGTEAIAKKLAELTTTKGVTTIIGGGDSVAAVEKAGLADKMSHISTGGGASLELLEGKTLPGVLALDDA

SEQ ID NO: 66515 - protein, 380 aa, Zea mays
  Clone ID: LIB4732-044-G10_FLI.pep
SSASNVRRTNLDLGARRRTTIMKMSSVPAAAAVMVVVVLLSAAAATVTGQALVPGVMIFGDSVVDAGNNNRLATLVRADFPPYGRDFPATHAPTGRFCNGKLATDYTVESLGLSSYPPAYLSEEAQSNNKSLLHGANFASGAAGYLDATAALYGAMSLSRQAGYFREYQSRVGASAGEQRARELTSGSIYVVSAGTSDYVQNYYVNPMLSAAYTPDQFADALMQPFTSFVEGLYSLGARRIGVTSLPPMGCLPASVTLFGGGNDGCVERLNNDSLTFNRKLGVAADAVKRRHPDLKLVVFDIYQPLLDLVQNPTNAGFFESRRACCGTGTIETSVLCHQGAPGTCTNATGYVFWDGFHPTDAANKVLADALLLQGLQLIA

SEQ ID NO: 66516 - protein, 345 aa, Zea mays
  Clone ID: LIB4732-044-H6_FLI.pep
LFSLVSCPGTKDLILERKGKIRFSALFQNSDNSPCHPVSECKPFSVHLPAVESDLRRRSSRRRKTAHLHHRLGKVGSEHAGVAAVLLDQRILRPAVEELLVRVQQAALRHQVRVVGVVEGVRRLVVERREVAVAAALRARLLPRRREGGVDVLVGVDAPAEEEAARAPHGVRAGERRHVARREPLGRERGHEGRGAGAWAREVGVGRALARRARVLPAELHVPCWASEQVHGVTRRQGDDVGARHGALAGCFDLRLDGVDHLVPADGVGVRSGVLLAGERRSVIQEDGRVTTIDETVVEEEADDGGAHPGLLGDRLLHHRPHDGGHAGARLGVELGRELPMARKK

SEQ ID NO: 66517 - protein, 243 aa, Zea mays
  Clone ID: LIB4732-047-A3_FLI.pep
IKLRAIHDKLRPPLRSPPSYSDPKERTQGESTMTEGGRPNRPDQRDLGELSAVSDLDHLGGGAVAGAHLLDGLDDVHALDDLAEDDVLAVEPRGRDGADEELGAVGVGPGVGHGEHTGGGVLAHELLVGELLAVDGLAAGAVAAGEVAALAHELGDDAVEGGALVVERLPGLAHALLARAQRAEVLRGLGHLVGVQLHHDPARRGAADGHVEEDARVRHRDRELGFGDIFPSLYECDLIFFSR

SEQ ID NO: 66518 - protein, 169 aa, Zea mays
  Clone ID: LIB4732-047-D9_FLI.pep
GATHRFLTITSTWGFQSNGPCGAASSWRRGCCRSHRQVAMSSSVLRAAADRAIRRQALTLTNSAASRIRQLLSLRQRPYLRLGVKARGCNGLSYTLNYADEKGKFDELVEEKGVKVLIDPKALMHVIGTKMDYVDDPLKSEFVFINPNSKGQCGCGDSFMTTGSKGSTS

SEQ ID NO: 66519 - protein, 389 aa, Zea mays
  Clone ID: LIB4732-047-G1_FLI.pep
PTQTRCPTAVPAMATRYWIVSLPVQSPGATATSLWSRLQDGISRHSFDTPLYRFNVPDLRVGTLDSLLALSDDLVKSNVFVEGVSHKIRRQIEDLERAGGVDSGALTVDGVPVDTYLTRFVWDEGRYPTMSSLKEIVGSIQSQVAKIEDDMKVRAAEYNNVRSQLTAINRKQSGSLAVRDLSNLVKPEDMVCSEHLVTLLAIVPKYSQKDWLSSYESLDTFVVPRSSKQLYEDNEYALYTITLFAKVVDNFKVRAREKGFQIRDFEYSPEAQESRKQEMEKLLLEQEVMRTSLLQWCYASYSEVFSSWMHFCAVRIFVESILRYGLPPSFLSAVLAPSTKGEKKVRSILEDLCGNVHSIYWKGEDDVAVAGLGGESEVHPFVSFTINFV

SEQ ID NO: 66520 - protein, 151 aa, Zea mays; identical to SEQ ID NO: 49345
  Clone ID: LIB4732-047-G7_FLI.pep

SEQ ID NO: 66521 - protein, 225 aa, Zea mays
  Clone ID: LIB4732-048-G6_FLI.pep
NHRHPGASPSRSPPPVAFVPSISGCVAGEPDTANRIRRQGEREEMGLTFTKLFSRLFAKKEMRILMVGLDAAGKTTILYKLKLGEIVTTIPTIGFNVETVEYKNISFTVWDVGGQDKIRPLWRHYFQNTQGLIFVVDSNDRDRVVEARDELHRMLNEDELRDAVLLVFANKQDLPNAMNAAEITDKLGLHSLRQRHWYIQSTCATTGEGLYEGLDWLSSNIATKS

SEQ ID NO: 66522 - protein, 154 aa, Zea mays
  Clone ID: LIB4732-049-D4_FLI.pep
RGEDLFSFFLSASTLRLASAASPASAVPLHPPRFRPNLCVRISRETVTAMAAAGGVSTDDVPILQAENLTSNVKSVYYSRTFLSIIGGVVAGIWGFTGLMGFVFYFLIMMVASIGLLAKSKFSVQAYFDSWTRISIEGVFWWPDVIRAVLDICL

SEQ ID NO: 66523 - protein, 269 aa, Zea mays
  Clone ID: LIB4732-049-D5_FLI.pep
KRPSSSPPIRTQSNRHPAEMGRKFFVGGNWKCNGTADQVEKIVKTLNEGNVPSSDVVEVVVSPPYVFLPVVKSQLRQEFQVAAQNCWVKKGGAFTGEISAEMLVNLGVPWVILGHSERRALLGESNEFVGDKVAFALSQGLKVIACVGETLEEREAGSTMDVVAAQTKAIAEKIKDWSNVVLAYEPVWAIGTGKVATPAQAQEVHASLRDWVKINVSPEVSESTRIIYGGSVTAANCKELAAQPDVDGFLVGGASLKPEFIDIINAAAV

SEQ ID NO: 66524 - protein, 299 aa, Zea mays
  Clone ID: LIB4732-052-F11_FLI.pep
LAEMTHGLAVGFGSLRCGPSVSSSSATIHRTLVAPPRRSLRICSSTFPPPPAPAIEGRDVSLSVTTRRGRVLPVLKGCSLLVPPGQLWMLLGPNGCGKSTLLKVLAGFQNPTAGTVYINRPCSYVFQNPDHQVVMPTVGSDVAFGLGKLKLPLDEVRLRVSKSLDAVGMLSYSQRPIQTLSGGQKQRVAIAGALAEASKVLLLDELTTFLDEHDQIGVINAVRDSVAADGEVAALWVTHRLEELKYADGAIYMEDGQIIIQGDVSTISKFIKKNRHATLVILNSKSPKFFGKAYLVYMD

SEQ ID NO: 66525 - protein, 174 aa, Zea mays
  Clone ID: LIB4732-052-G12_FLI.pep
PGRRFRFFPSISRYTHRSSTDKNSPDMASKRIQKELMDLQKDPPTSCSAGPAGEDLFHWQATIMGPSDSPYAGGVFFINIHFPPDYPFKPPKVNFQTKVYHPNINSNGSICLDILKEQWSPALTISKVLLSISSLLTDPNPDDPLVPEIAHMYKNQRQRYEETARAWTQKYAMG

SEQ ID NO: 66526 - protein, 234 aa, Zea mays
  Clone ID: LIB4732-053-A11_FLI.pep
RVTAVYNLPDTNRREPPLDLVELVCLHHRISLGNGVPGSSPVVELAVVLVGVAVERAVQVPTPAVESREPNPLPAGAAPVRPYLPPFGDRRRHPLAGSGNISGLLHVHCLQLDLGNSYYRVAASTNRLHDGVAAVHDAVNRGGSQLGLILLRYHLLVALRAHVHGRRAAEEATVIDAEDGSLGGLAPSLLVLHGFLNSDETALFAIPLRRSPRGRRGGEGRGIAGNSVGFEMGP

SEQ ID NO: 66527 - protein, 167 aa, Zea mays
  Clone ID: LIB4732-053-H10_FLI.pep
RHSPLGRVRFTQRLSQSSHHASDSDRTAVGPPLQLAVASGSNNPPAPTQRGATGDPYPLPRRAMATELTAAQLRAYDGTDPSKPIYVSVRGKVYDVTSGRGFYGPGGAYAVFAGREASRALGKMSKDEADVSGDLSGLTDKELGVLADWETKFQAKYPVVARLAADA

SEQ ID NO: 66528 - protein, 264 aa, Zea mays
  Clone ID: LIB4732-054-B7_FLI.pep
PSLRHSDPLLAMDAAGGDQLSLAAVRDALVRLEDSVVFALIERARHPRNAPAYAPAATAGEHSLVEFFVREAEALNAKAGHYQKPEDVPFFPQDLPSPLFPTKPSAKVLHPFASLVTVNDAIWKMYFDELLPLFTVDGDDGSYAQTVALDLACLQVLSQRIHIGKYVAEVKFKDAPQEYSRLIKEKDSNSLMDMLTFKAVEEKVKKRVEKKARTFGQNVTLDDNATAGDSECKVDPKVLSKLYDQWVMPLTKDVEVEYLLRRLD

SEQ ID NO: 66529 - protein, 393 aa, Zea mays
  Clone ID: LIB4732-054-E10_FLI.pep
PSLKSTPSTRPPHSPFALFTIPPQNTSCDPRSLRRASIMSAYCGKYADELIKNAAYIGTPGKGILAADESTGTIGKRLSSINVENVEENRRALRELLFCCPGALQYISGVILFEETLYQKTKDGKPFVDVLKEGGVLPGIKVDKGTIEVVGTDKETTTQGHDDLGKRCAKYYEAGARFAKWRAVLKIGPNEPSQLAIDLNAQGLARYAIICQENGLVPIVEPEILVDGPHDTDRCAYVTETVLAACYKALNEHHVLLEGTLLKPNMVTPGSDSKKVTPEVIAQYTVRTLQRTVPAAVPAVVFLSGGQSEEEATLNLNAMNKLSTKKPWALSFSFGRALQASTLKAWAGKVENVEKARAAFLARCKANSEATLGTYKGDAAADTESLHVKDYKY

SEQ ID NO: 66530 - protein, 372 aa, Zea mays
  Clone ID: LIB4732-055-E9_FLI.pep
GRIRSDALLAYERLHRLHERTMIGELGEEEESVNGVRELHHPYLLPPPPQHVGVPPLPLLQRVEATDHHHHRRKAVRQVGVVVCHVRGGVVPIGAFRQERPPHPVRATHGHHRHVPIQPDLSFRPLLAAKVRLHQDGASEVDGDGPRRGGGRRPALRHVVGDVGAGAVPGEEAAGEVHGDVDAVGETRGGEVSKHGDAVLVRGGPAVLGCEAVVDGHDDGAQLAAEPAAHGVVDVRGRREQREGAAVEVYHDWERGRGRLRRRPEHARPQAARRVHVGGPDALPVRARAGGGTKVEEVEDGAVDGAVATHRETGDDIEAEEQEPHLPRQGQSARCACCCFPGACFHYYWQWKAHNNVTLTATIYYLYVLPIP

SEQ ID NO: 66531 - protein, 431 aa, Zea mays
  Clone ID: LIB4732-055-H6_FLI.pep
SSSTSKQNGEGKIVAQPLGPAMQRPAPYAEQTDTTRPRGASGLPDDGGLGDHGGDHVGIHVGRRPAVLEVALAVLLRLAAHAHRRATVGDSPAEGVDVGGLVPAGEPALVALAVGRDVLLVPQLQLLDGRLDHLVPALLPHGLGAVVGVGARAVPVARDRLRVERHHHAGDLGDPLKNVASNPHLIARRDADGRSDLELPLPRHDLPVDATDVDACVQACLVVGVDYVTPERFLRADSTVVRTLRAREAANRPPEGPVGVLLKEGVLLLDTIPGLLGSDLRAAEDLGGAVPLVGGNWLASWGVAIAHDKDVVAPPEWVLEDGLRVQDDLAVLAGGLAGAGAVVVPLGQLAGIGHRAREGPGFAPEIHARSTDPYVLGDDLLCGVREVEVDEVGEAGHGRRLRRDCDCDRRGARAGNPRRKEGRMWRGIETT

SEQ ID NO: 66532 - protein, 216 aa, Zea mays
  Clone ID: LIB4732-056-E5_FLI.pep
AFSPAARPVRYPILFVSRTDGVDARMAVAAGDAAHEPGRHQVRGVLRPGAPHGGELPGPLRQRLLRRHRVPPKHQGLHDPGRRPHRLRQGRLLHLGHQVRGRVQGVPQAQRTGDHVDGQQRAQHQRQPVLHHLRQAAAPQRPLHRLRQGHPRLRGPRPHGEGADRPRGQAARRDQAQPRHRPRQPASPLNYYCLPPAPAVLSRGFINYYYYSWKSG

SEQ ID NO: 66533 - protein, 172 aa, Zea mays; identical to SEQ ID NO: 45169
  Clone ID: LIB4732-058-B10_FLI.pep

SEQ ID NO: 66534 - protein, 306 aa, Zea mays
  Clone ID: LIB4732-058-D3_FLI.pep
LLYCLRAEGRGRQNYGGRSRGGFIDKVKDFIHDIGEKIEEAVGFGKPTADVCGIHIPHISLHRADLVVDVLIKNPNPVPIPLVDIDYLIDSDGRKLVSGLIPDAGTIHAHGQETVKIPVSLVFDDIKSTYKDIQPGSIIPYLVRVVLLVDIHIIGRVKIPIQKDGEIPIPYKPDVDVEKIKFHHFSFEETTATLHLKLENKNDFDLGLNLLEYEMWLGDDSIASAELTQTAKIEKQGITRMQVPFSFRPKDFGSAVWDMIRGRGTGYTIKGKIDVDTPFGNMKLPISKEGGTTRLKKEDDDDDDDN

SEQ ID NO: 66535 - protein, 452 aa, Zea mays
  Clone ID: LIB4732-060-C8_FLI.pep
HFPSAMGKEKTHINIVVIGHVDSGKSTTTGHLIYKLGGIDKRVIERFEKEAAEMNKRSFKYAWVLDKLKAERERGITIDIALWKFETTKYYCTVIDAPGHRDFIKNMITGTSQADCAVLIIDSTTGGFEAGISKDGQTREHALLAFTLGVKQMICCCNKMDATTPKYSKARYDEIVKEVSSYLKKVGYNPDKIHFVPISGFEGDNMIERSTNLDWYKGPTLLEALDLINEPKRPSDKPLRLPLQDVYKIGGIGTVPVGRVETGIIKPGMVVTFGPSGLTTEVKSVEMHHEALQEALPGDNVGFNVKNVAVKDLKRGYVASNSKDDPAKEAASFTSQVVIMNHPGQIGNGYAPVLDCHTSHIAVKFAELITKIDRRSGKELEKEPKFLKNGDAGMVKMVPTKPMVVETFSEYPPLGRFAVRDMRQTVAVGVIKSVEKKDPTGAKVTKAAAKKK

SEQ ID NO: 66536 - protein, 452 aa, Zea mays
  Clone ID: LIB4732-063-E5_FLI.pep
YPPRDRPPPSSNSKMAGTTRCSIRSSNARGLQLALPCLLLLLAGAGVSNGQLQVGFYSKSCPDAESTVASVVRQSGSADPTILPALIRLQFHDCFVRGCDGSVLIKGGGNNNNNAEVDNGKHQGLRGLEIIEGAKTQLEAQCPGVVSCADIVVLAARDAVAFTGGPSFDVPTGRLDGKVSNLRDADALPDVHDGIDALRSKFRANGLDEKDLVLLTAAHTVGTTACFFLQDRLYNFPLPGGGRGSDPTIPPGFLSELKARCAPGDFNTRLALDRGSENVFDTSILRNIRNGFAVIGTDAALYNDTATVDVVDSYSGLLSNFFGPYFRQDFADAMVRMGSIGVVTGSKQGEVRKFSLQQGHQETSRHFSWFHAHPWMVGWRAQAGKSFIALVLCFIGKRTAGLQEECSMAPLHYHATAKWCSIHGVFQLLDLACLASFRGRILFSPRFELWVL

SEQ ID NO: 66537 - protein, 245 aa, Zea mays
  Clone ID: LIB4732-065-E6_FLI.pep
PGCCLVEEYSTSPRFRQTAMKSLTPTAAGSAADFSDSLPSPISPAAVPCHSSPGRHYYLAVDRTQFKMRTLLELLGVVADRRGGLPIATCVSSRDELDAVCAAVANLPFVSASPLYSDQAEAERASILENFRQETTQWNKTAKATNIAESSKLESTGSKISIIVATDACLPQAAMAEAPLMARVLINYELPTKKEAYLRRMSTCLAADGIVINMVVGGEVVTLKALEENSGLLIAEMPIHVSEIL

SEQ ID NO: 66538 - protein, 276 aa, Zea mays
  Clone ID: LIB4732-066-F3_FLI.pep
LARSSSNLASGMASKQIGVLTCFIAITALAFRPCASAVPMDGGWSNGGATWYGPAKGAGSDGGACGYQGAVDQPPFSSMITAGSQSIFQDGNGCGTCYQVKCTGHASCSGSPVTVVITDLCPGAACQVEPVHFDLSGTAFGAMAKPGQADQLRNAGRLQVQYIRVACNWNGLDIAFRVDAGSNANYLAMAIEYESGDGDLRAVELKQSGAAAWAPMQRSWGAVWQYKSGSTNLQAPLSVRLTSGSGRVLVASNVIPAGWQPGRTYRSVVNFGGNHA

SEQ ID NO: 66539 - protein, 250 aa, Zea mays
  Clone ID: LIB4732-070-E2_FLI.pep
ENQGNADIGSLLGREVGLDVVHLAAADAEGLGEDVGGHGRHGAEERHGDGLRALELAVEGGDDGGGAVAPVLLEVDEAAREDEDVALGDGLGEERVGGGDEADLERALEDEDDLGGARVRVRRVLAARRVVDARHGDAQRVHARELLHVGRRHHGARRVVGVAGVPQPVEEEVVRRKVRLAREPVQLHRGGVVSRADVLQHVGVAGEGRGGEREDDGAGRGDVEVDLRHERSVDGVCRLPDLCTYRRQGD

SEQ ID NO: 66540 - protein, 275 aa, Zea mays
  Clone ID: LIB4732-071-H11_FLI.pep
GIPSSSSAASACSGGKERERERERDLVERLVGGPRTKMLAVFSGQVVEVPAELVAAGSRTPSPKTKASQLVGRFLAASEPAVSVQLGDHGHLAYSHTNQALLRPRSFAAKDEVFCLFEGVLDNLGRLSQQHGLSSKGANEVLLVIEAYKTLRDRAPYPASFMLAQLTGSYAFVLFDKSTNSLLVASDPEGRVPLFWGITADGCVAFSDDIDMLKGSCGKSLAPFPQGCFYSNALGGLKCYENPKHKVTAVPADEEEICGATFKVVEGSTVLTALH

SEQ ID NO: 66541 - protein, 244 aa, Zea mays
  Clone ID: LIB4732-072-C10_FLI.pep
HKHSAGAWHPRPESHGIQGRPLLGSQPPVLHGGQRLRQLPDPNASCYPTPFVQRQVPAERAQVRRVRRCARPRQRRGWQGACRAMLYPHQRPCGLRGRRLPLHGHQGQRARRRHRCPHQAQRPRQLLWQVRAQGLLVRVSSFRRSHARSCSRTRLHMHAPCMARMHALCLLIYLSCLSCIVHLSVLQNLEPFQPNTCQFNSHVLSLVEFPFFFVFGHFLVRVRHLLQGKRAVLRVIVVYVKPNT

SEQ ID NO: 66542 - protein, 187 aa, Zea mays
  Clone ID: LIB4732-072-C11_FLI.pep
RGRPGNSEAQRHQLPPFWQPRREKKRAKRGHQLTAERKRRRATNPSPRPPPSPRTMAFPTVLKDLMYADSHEWVKVEGDSATVGITDYAQYQLGELVVVELPEVGISVSQGKTFGSVESVNGASDIYSPVSGEVVEVNEKLSDLPGVVNTSPYEKGWIMKVKLSNLGELNSLMDDDKYSKYCEEGNH

SEQ ID NO: 66543 - protein, 213 aa, Zea mays
  Clone ID: LIB4732-072-F2_FLI.pep
PPRTTRSSTSPCPAFASTRNAWSATSVPSSSPPPRTPPPASPPGTSSSPPTSPRASTSPASTTRAPSSPSSSTTTGAASASVPLSTPPSTPTSTASRALPTFSSSPSSTAWPPSTPSPRLLRPAQGQRMVRRGRDLAGAQQGTHVPPPGAVLRRGRRAGQGHQRLPQPLTRIAGDGGVVGLGSNLASFIVYLEIGITAASSPVKNAGATLHSY

SEQ ID NO: 66544 - protein, 192 aa, Zea mays
  Clone ID: LIB4732-073-H12_FLI.pep
KKQASNPQSAPARSLSSNSQLNLAPQLHAFPGRDDRPLRAPTKGAHLHERDEELARGVADGLLAVAEALDSGGDEGVEVDLEVVAGDDSGDGERLEAALGDAEVGIPRQIHAGVHQRGDLGRRQPATRRDVKHLVQPLDPGQTLLGVLGARRLQRRLHFLHAPEDSGGPAAGRALGLRGAGPAARRAGSGRI

SEQ ID NO: 66545 - protein, 249 aa, Zea mays
  Clone ID: LIB4732-073-H7_FLI.pep
GKTPVPPTAAATNRAGAAATTKNRAGAAAMAAAVESVVVVHNVAKRHNVGTLARSATAFGVAEVVVVGRRDVSAFGSHGATSHLRFRHFVSLALARAYLKDERGCDICGVEITDDAQPVTAHPFRRSTAFLFGNEGTGLSQKECEICDFFVYIPQYGGGTASLNVTVAASIVLHHFGVWAGFTERGREGNKFVVAERPQGHSRGLYCTDSVEAVVEERKMRKENACDVLEENGCSHLQESNGLDLMFAD

SEQ ID NO: 66546 - protein, 269 aa, Zea mays
  Clone ID: LIB4732-075-C11_FLI.pep
REAVIASHTFLRQPSIGAITGIPTASPQIPKPRLVSHGKCVLYARLSPRPRQPAIHGTWVLCPGSPRRPSIRVRDSLIPHMDWVPLCPESSPPPGISVRVRVVVSAVSMEGDPACGLALADEEAECSSWDSDDEYQKFIQNMNPPRVTIDNTSCPSATVIHVDSTNKYGILLEVVQVLTNLKLIVTKAYISSNRGWFMDGRRAIGFFPFRQNGKCPPMKEKPKHRSMVLCSWRPVQKLGSTSSPCSARSLDPFQDWTHFRQESRKTWST

SEQ ID NO: 66547 - protein, 369 aa, Zea mays
  Clone ID: LIB4732-075-C7_FLI.pep
GTLAPRYLRPTPPHTLPQSAHHELHLPISLISLHEPTKSNRFARSAPAQRLPAMASLTLPPAMANPRQDAIDLQKAFKGFGCDSTTVINILTHRDSVQRGLIQQEYRAMYHEELSHRISSELNGNHKKAMLLWILDPAGRDATVLREALSGDTMDLRAATDIICSRTPSQLQIMKQTYYARFGTYLEHDIGHHTSGDHQKLLLAYVGIPRYEGPEVDPTIVTHDAKDLYKAGEKRLGTDEKTFIRVFTERSWAHLASVSSAYHHMYDRKLEKVIKSETSGNFEFALLAILRCAENPAKYFAKLLRKAMKGLGTDDKTLIRVVVTRTEIDMQYIKAEYFKKYKKPLAEAIHSETSGNYRTFLLSLVGPGH

SEQ ID NO: 66548 - protein, 385 aa, Zea mays
  Clone ID: LIB4732-076-D4_FLI.pep
SFFRSPTRRKSPQPQAGGEEVPLTYCRDSRVTARGPCRTRGPRGSALSPRQRISFRPADGRTPTHEATTHLLATTCSARFQPPGSLPASESPPRDPVPRAGRMEVKTVKVSNLSLNALKRELTEFFSFSGDIEYVEMQSESEWSQLAYVTFKDSQGADTAVLLSGATIVDRAVIITPAENYQLPPEAHKQLSGANVPTESAVRKAEDVVSSMLGKGFVLSKDALNLARSFDERHNILSNATATVASLDRQYGLSEKINLGRAIVGSKVKEVDERYQVSELTKSALAAAEQKASFAGSAILSNQYVSFGASWLTSAFTLVTKAAGDMTSMAKDKVERAEEERKAIMWEERNGLVSDYAKIHLDEPSSWEPAVLPLESVDEQKLQAV

SEQ ID NO: 66549 - protein, 309 aa, Zea mays
  Clone ID: LIB4732-077-C3_FLI.pep
PAMERLQRIFGASGMGQPPTDSPLLDSSEQVYISSLALLKMLKHGRAGVPMEVMGLMLGEFVDDYTVRVVDVFAMPQSGTGVSVEAVDHVFQTNMLDMFKQTGRPEMVVGWYHSHPGFGCWLSGVDINTQQSFEALNPRAVAVVIDPIQSVKGKVVIDAFRLINPQTMMLGQEPRQTTSNVGHLNKPSIQALIHGLNRHYYSIAINYRKNELEEKMLLNLHKKKWTDGLILKRFDTHSKTNEQTVQEMLNLAIKYNKAVQEEDELPPEKLAIANVGRQDAKKHLEEHVSNLMSSNIVQTLGTMLDTVVF

SEQ ID NO: 66550 - protein, 186 aa, Zea mays
  Clone ID: LIB4732-077-D6_FLI.pep
PGFLLASPSSWIGFKVGLLDSCGVHGSSVTCEEEGSGSMASKRILKELKDLQKDPPTSCSAGPVAEDMFYWQATIMGPSDSPYAGGVFLVTIHFPPDYPFKPPKVAFKTKVYHPNINSNGSICLDILKEQWSPALTVSKVLLSICSLLTDPNPDDPLVPEIAHLYKTDRVKYESTARSWTQKYAMG

SEQ ID NO: 66551 - protein, 428 aa, Zea mays
  Clone ID: LIB4732-077-E12_FLI.pep
RLLASAIPGHRARGRARLSVGAAEIRDQLRADREQSPGPDAGGDPPPVDEREQGEALRRGPPGADGVRQHGRGVHHRRGQREPADHGRQPRRGAAVGGGERAALHPGHAHHLRHRGQRGLLRQRHGHDGQPPPRHEGRPRGARGPGPRRPGHRLVGALRERARRQLPAVVGRVPGGPGGVHEAHPGLPRPDGVAVPHQRLPVLRVQGEPGQRVAAVRAVRAQPGGARPQHRAQLRQHAVRPDRRRVRRHEGHGAHGRGRPNLGDRVAVQGRRGRDRGHGAERRRVQRQPHAEGRHEPGDAAQAQRARRRLRVRALQREHEARAHVGAQLRAVLPQRLAGVRAQRRLRRRFRSGRVAQPVLHIHVLLLVQIRGERDLFERESDAVTAAASNCNTPTLLLVSEYLVILYTKKKMHLNSTHRVGLRFENLA

SEQ ID NO: 66552 - protein, 269 aa, Zea mays
  Clone ID: LIB4732-080-H6_FLI.pep
PALRAAAVPRDYSKLPEPMAAMAMAPAAVSFLALALLMLSDAEAKFLPNNFTVVGSVYCDACSNNTFSKHSFFLKGARVLIKCSFKVNSTSSEGLSLEAERTTDQHGVYKLDVPPVDGFECREGHELRSACRATLVRSSSAACNVPGLGASTQHIELRSRATSACFLNLNALNFRPAKRDGALCHAQGGDAFGSSLFFWPFLPLFWPPFRVPGGGAGGTVSFPWPFPVPAWLVPFLRPPFLPFPLYEPAPSPPPPFYRFPPPREAVSRP

SEQ ID NO: 66553 - protein, 407 aa, Zea mays
  Clone ID: LIB4732-083-C9_FLI.pep
SRPAGRNQPDHTNQTTASSPDRRGASPPAPMATRYLIVSLPVQSPGATASSLWSRLQDSISRHSFDTPLYRFNVPDLRVGTLDSLLALSDDLVKSNVFVEGVSHKIRRQIEDLERAGGVETGTLTVDGVPVDTYLTRFVWDEGKYPTMSPLKEIVGSIQSQVAKIEDDMKVRASEYNNVRSQLSAINRKQSGSLAVRDLSNLVKPEDMITSEHLVTLLAIVPKYSQKDWLSSYEKIDTFVVPRSSKKLYEDNEYALYTVTLFAKVVDNFKVRAREKGFQVRDFEYSPEAQESRKQELEKLLQDQEAMRTTLLQWCYASYSEVFSSWMHFCAVRVFVESILRYGLPPSFLSAVLAPSTKSEKKVRSILEELCGNAHSIYWKSEDDVGVAGLGGETEAHPYVSFTINFV

SEQ ID NO: 66554 - protein, 214 aa, Zea mays
  Clone ID: LIB4732-084-B4_FLI.pep
GKKKIKKKKKSPLSGCPLLRVGACASACPHQPAARSHQTHTRTMASASKEEVIGKLNIRVVRGNNLAIADPLTHTSDPYVVLQYGAQKVKTSVQKKNSNPVWNEVLQLSVTHPTKPVHLEVFDEDKFTADDSMGVAEINITDIYDAAKLDLKHASDGTRIKTIYPVGVNYLGGESHVQWKDGKVVQDLILKLRKVESGLIVVQLEWVHVPGVKL

SEQ ID NO: 66555 - protein, 316 aa, Zea mays
  Clone ID: LIB4732-084-F3_FLI.pep
VARHCSTAKPRSSRVAPEGAEGLDGASPEDVLVVEGRDGSAHERAHPEDPVVVPGLVLVVDDGGAQAPGRVDAGAGDGDGGQVHHEHREADGEGSQNRDVGVAGVALGVGGGEDGVDEHEGADDLGAEAGAAGVAGGERVGAAAVPVEVGALERLDEADAADGAEALRHDVEQRAHQGDLARQEEAEGDGGVDVAPRDAGGAVDEDEDHAAEDPGDAQHPHAAARRVGARRRRVRLVLVPDHRGHRDVQEQQRGDELGDHGAVQRPGPQLSRVDQRRRGRVRVVLGSELAAASAALDHVVLAHRLLEPPRLYLQGG

SEQ ID NO: 66556 - protein, 124 aa, Zea mays; identical to SEQ ID NO: 41198
  Clone ID: LIB4738-001-A2_FLI.pep

SEQ ID NO: 66557 - protein, 179 aa, Zea mays
  Clone ID: LIB4738-001-H8_FLI.pep
FPTCSMYRTTRLELNERALCAPARARRPDRSRRRRVQPGRRFRGDTHAGMIARAISVLLVSVAGVGAAAGARRDLDDEAGEDVVGVVDVRVPLQDVGVAAPGADAVQRLPLRHHVQLVARPRGQPRPAHHHQPGSVVLLLLLLPRPGERSDNHHERQQGAPRRHVRRPRPTPLRGHRRW

SEQ ID NO: 66558 - protein, 293 aa, Zea mays
  Clone ID: LIB4738-002-D1_FLI.pep
SLHNIANMQIIFELTRCRGRRILGGGLHKCAPCTAMPNNKIVAANMEEKGAGGKAAVPHDELPRFTIFLIPNRREPPLDLVELVCLHHRISLGNGVPGSSPVVELAVVLVGVAVECAVQVPTPAVESRKSNPLPAGAAPVRPYLPPFGDRRHPLAGSGNISGLLHVHCLQLNLGNSYYRVAASNNRLHDGVAAVHDAVDRGGSQLGLILLRYHLLVALGAHVHGRRAAEEATVIDAEDGSLGGLAPSLLVLHGFLNSDETALFAIPLRRSPRGRRGGEGRGIAGNSVGFEMAR

SEQ ID NO: 66559 - protein, 173 aa, Zea mays
  Clone ID: LIB4738-002-D12_FLI.pep
LEAGRGARGASNGCSRSVHPGGFVRSKAASELEDAGQAVGRRGGRASPGDGPGEAPQGHHRPPARHQQRRGRRQLQAGAVDAVDPDDAGDAVVVDDAARRRQRVAQRLPPGEQPGHQGHGRQPLRPAAAQLPHRLRLALQRRDQEQPPLDRARWTVKRPGVSVRPCLLVLVVI

SEQ ID NO: 66560 - protein, 433 aa, Zea mays; identical to SEQ ID NO: 66109
  Clone ID: LIB4738-002-F2_FLI.pep

SEQ ID NO: 66561 - protein, 296 aa, Zea mays
  Clone ID: LIB4738-003-D8_FLI.pep
SLHNIANMQIIFELTRCRGRRILGGGLHKCAPCTAMPNNKIVAANMEEKGAGGKAAVPHDELPRFTIFLIPNRREPPLDLVELVCLHHRISLGNGVPGSSPVVELAVVLVGVAVECAVQVPTPAVESRKSNPLPAGAAPVRPYLPPFGDRRHPLAGSGNISGLLHVHCLQLNLGNSYYRVAASNNRLHDGVAAVHDAVDRGGSQLGLILLRYHLLVALGAHVHGRRAAEEATVIDAEDGSLGGLAPSLLVLHGFLNSDETALFAIPLRRSPRGRRGGEGRGIAGNSVGFEMGPAGL

SEQ ID NO: 66562 - protein, 200 aa, Zea mays
  Clone ID: LIB4738-003-F8_FLI.pep
LHHLNRPLLDITSCMILMCTQKGHGKVQLVCLIFHFNSFIDNGDRSSLGHHDLDELLVVDLAVAVNIGLTDHLVDLLVSQLLAEVGHDMAELSSRDETILVLVEDAKGLLKLLLGVGVLHLPCHQVLLCFSGVLAKGAHHSSKLLGSDAAVAILIEEAEGLLELRDLLVRELVRHGRWLRRGHAMGKKGKRWMLVLASLC

SEQ ID NO: 66563 - protein, 186 aa, Zea mays
  Clone ID: LIB4738-004-B6_FLI.pep
GPSIWNPREKQSGRSASVLRSIARQAVAEESSTLTAAMSVEFILWLFSFVSVMVLIGLTAYQLICLSDLEYDYINPYDSSSRINAVVLIEYSLQGALCASFLLTLHWFPFLVMTPVTYYHVKLYLARKHLVDVTEIFRQLSDEKKYRMIKLAFYFCLFIITIYRLVMTAVMLFIDEDINLAETRSI

SEQ ID NO: 66564 - protein, 360 aa, Zea mays; identical to SEQ ID NO: 63910
  Clone ID: LIB4738-004-C7_FLI.pep

SEQ ID NO: 66565 - protein, 293 aa, Zea mays
  Clone ID: LIB4738-004-F5_FLI.pep
SLHNIANMQIIFELTRCRGRRILGGGLHKCAPCTAMPNNKIVAANMEEKGAGGKAAVPHDELPRFTIFLIPNRREPPLDLVELVCLHHRISLGNGVPGSSPVVELAVVLVGVAVECAVQVPTPAVESRKSNPLPAGAAPVRPYLPPFGDRRHPLAGSGNISGLLHVHCLQLNLGNSYYRVAASNNRLHDGVAAVHDAVDRGGSQLGLILLRYHLLVALGAHVHGRRAAEEATVIDAEDGSLGGLAPSLLVLHGFLNSDETALFAIPLRRSPRGRRGGEGRGIAGNSVGFEMGP

SEQ ID NO: 66566 - protein, 136 aa, Zea mays
  Clone ID: LIB4738-006-C5_FLI.pep
PWGLSSCCRPFEDEEPERLQAEVDEAPLAVRDVAAEAGANHALPSGAMDRVKLLLDVGRDAPAVEDVEAIQGPGRRRHRLGLHLRRHVGVLHHRLSFQHDGTSRGVAVASCPASTRALSCMERDQGILKKTAPRPA

SEQ ID NO: 66567 - protein, 334 aa, Zea mays
  Clone ID: LIB4738-006-E8_FLI.pep
HSRGSFGTATNPSFQDRQHLEAAASAPLRPTLERDRPDDHLVVDGSQRSADEGADPEDPVVSPGMVLVVNYGGAKAPRGVDAGAGDRDGGQVDEEHGKPDWKRGEDRHMGVPGVPLGVGGGEDGVDEDEGADDLGAEAVALGVAGRHDVGAAAVAHVQPLLEPLDDARAADGAQALHDDVKHRPGEGQLPRQEQPEGHRRVDVPAGDAGGAVDEGEDHAAEGPGDALDADGGALGGGLGDAHDGEDGDVEEEEGGDELGDAGAVEGPGLELPGLEERRRRGLLVVLVVRALRRRADGLALRELVGAQADVLLLPLHACAVTFLQQTSLARARRS

SEQ ID NO: 66568 - protein, 165 aa, Zea mays; identical to SEQ ID NO: 57437
  Clone ID: LIB4738-006-H6_FLI.pep

SEQ ID NO: 66569 - protein, 137 aa, Zea mays
  Clone ID: LIB4738-008-D4_FLI.pep
PMARTKQTARKSTGGKAPRKQLATKAARKSAPTTGGVKKPHRYRPGTVALREIRKYQKSTDLLIRKLPFQRLVREIAQDFKTDLRFQSHAVLALQEAAEAYLVGLFEDTNLCAIHAKRVTIMPKDIQLARRIRGERA

SEQ ID NO: 66570 - protein, 240 aa, Zea mays
  Clone ID: LIB4738-008-E6_FLI.pep
PGCARHCLVLSKEREKQSGVHPFLSAMTNGYLFREYIGAQSTGVQFSDVPINAFVSFHFILSFAIDYTPVGQQPKPVPTNGVFSPFWDTGNLSPAAVAAIKASHPNVAVMAGLGGDSVQDIVKAFFTPTSVDTWVANAVTSLTGIINRYGLDGVDVDYEHFADGADVNTFVECIGRLLTQLKQTMPNIATSIAPFEDPVVQKYYQALWSKYSGVIDYVNFQFYAYGFKYETEAQQIIANH

SEQ ID NO: 66571 - protein, 291 aa, Zea mays
  Clone ID: LIB4738-008-F9_FLI.pep
ANMQIIFELTRCRGRRILGGGLHKCAPCTAMPNNKIVAANMEEKGAGGKAAVPHDELPRFTIFLIPNRREPPLDLVELVCLHHRISLGNGVPGSSPVVELAVVLVGVAVECAVQVPTPAVESRKSNPLPAGAAPVRPYLPPFGDRRHPLAGSGNISGLLHVHCLQLNLGNSYYRVAASNNRLHDGVAAVHDAVDRGGSQLGLILLRYHLLVALGAHVHGRRAAEEATVIDAEDGSLGGLAPSLLVLHGFLNSDETALFAIPLRRSPRGRRGGEGRGIAGNSVGFEMGPAGL

SEQ ID NO: 66572 - protein, 245 aa, Zea mays
  Clone ID: LIB4738-010-C8_FLI.pep
EAGRGLQQPELVSSAEPRAAIPYSQRRSGSDRSEMAAAGLGVKATPFTYAAHALAALAAALVLVWCVHFRGGLALEAQNKNLIFNVHPVLMLIGYIILGSEAIMIYKVFPNMNHDTAKLTHLILHAIATVLGAFGIYCAFKYHNDSGIANLYSLHSWLGIGTIALYAIQWVFGFVTFFLPGARRGTAGLRPDSGQLEGEEFAGQSEEGSCVLFLNCTMTYQACAWLTSGFTSRGKRTRVRDGFRS

SEQ ID NO: 66573 - protein, 124 aa, Zea mays
  Clone ID: LIB4738-011-B8_FLI.pep
SSNPLNCLVKKKKKSQANKTTCFIDSSRDRASFAPQGRGCLAAADQAAAAAQAASAARSTLTWRRRAPPRSPPSSSGWPRRRRPRPSSSRPRRSPARPPTAAAAVAAASATPATADHIDRRPWI

SEQ ID NO: 66574 - protein, 257 aa, Zea mays
  Clone ID: LIB4738-013-B3_FLI.pep
RGRPGRGMFHSLDPPPLHSLLPEVTHQTPPPKKARTLPFPSQAPGPSPRLLICRCSPSLGSENRREARAAMASSASRFIKCVTVGDGAVGKTCMLICYTSNKFPTDYIPTVFDNFSANVVVDGTTVNLGLWDTAGQEDYNRLRPLSYRGADVFVLAFSLVSRASYENIMKKWIPELQHYAPGVPVVLAGTKLDLREDKHYLMDHPGLVPVTTAQGEELRRQIGAMYYIECSSKTQQNVKAVFDAAIKVVIQPPTKIR

SEQ ID NO: 66575 - protein, 199 aa, Zea mays
  Clone ID: LIB4738-014-E7_FLI.pep
DAGDYTIYMGADKNENEELIKYGLPEDVWFHVDKVSSAHVYLRLKKGETIHTISEALLEDCAQLVKAHSIQGNKMNNVEVIYTPWANLKKSPSMDVGQVHVLIVEKRVNEIINRLNKTRVERRAPDLKAEKEASNAAEKAERKMQLKEKKRKEEMERLEKEKWAEIRSYKGLMVAEKMTSNRQIASAGKSMQEMEDEFV

SEQ ID NO: 66576 - protein, 178 aa, Zea mays
  Clone ID: LIB4738-016-H10_FLI.pep
PQDFMFLSRCLRWRLGPLAADPPCQLNVLWHDGHTLSMDGAQVGVLKQANKVCLSSLLEGKHRMALETQISFEVLCNFPDEPLEGQLPDQQLSALLILADLTEGNSSRAVAVRLLHSTSGGGRLTGSLGGKLLPGSLPSRGLASSLLGTSHLSRFFGLSARFESGGRRARNGSRKSPG

SEQ ID NO: 66577 - protein, 177 aa, Zea mays; identical to SEQ ID NO: 48026
  Clone ID: LIB4738-016-H4_FLI.pep

SEQ ID NO: 66578 - protein, 274 aa, Zea mays
  Clone ID: LIB4738-016-H5_FLI.pep
RGRPGVVPLLCLVGPSSSSSPSPVLLASRTRGQPVDPRCRHCWGGPCSSLVRLAGLLAVEYSGGGVVFLASIGLHPPLLHSTCASLQPTGRGRGASTNSSRPRRAAGLARVPSPMAAAAIHQFAECITCHAWSPDQSMIAFCPNNHEVHIYKFFTDKWEKLHVLSKHDQIVSGIDWSNSSNKIVTVSHDRNSYVWTQEGSDWIPTLVILKLNRAALCVQWSPKENKFAVGSGAKSVCICYYEQENNWWISKVIRKRHESSVTSLAWHPNNVSLK

SEQ ID NO: 66579 - protein, 267 aa, Zea mays
  Clone ID: LIB4738-021-A3_FLI.pep
IRGREGGGEGRRGVEAESAGEKGSDGEFVRQLLRRSDGGRVVATCRTPGSAAELQKLREEHAPGRLTVLPLDVTDESTIEAAAASITETHGSLDLLINSAGILSIPNVIQPETTLSKVQKSSLMLAYEVNAVGPILVIKHMWPLLKIGGRSETRRGFALVANMSARVSSIGDNALGGWHAYRASKTALNQLTKTVSVEFGRKDNIACVLLHPGTVDTDLSRPFQRNVPEGKLFTREFSVQRLLSVIDSVKKGDNGKFFAWDGQEIPW

SEQ ID NO: 66580 - protein, 261 aa, Zea mays
  Clone ID: LIB4738-021-F3_FLI.pep
VGRLRLLVVGGGELLVGVGDEEQLVDDAGEAAADEGPDPVHPLVAPLPADEGGAEGHGGVHGRAVEGAAHQDVGPHDEADGNGGDGAQAALLRVHRRGVHRVHQPEGHHDLQHQRLPHRHARQPEGARGLPARREAEQEARHGGPQQLRHPVQEPPEQGDVAAHEGAEGHGRVHVPAGDVRAPDTATNSANACATAAAIRPAGVVGPPPVSLLKAMPEPWPAKTKMRVEMNSANAALRAPGWYTSWWLPRAILLIGIFTAL

SEQ ID NO: 66581 - protein, 476 aa, Zea mays
  Clone ID: LIB4739-058-F10_FLI.pep
SRPAGIPSYSYLGGGEKCGAGAGERPSSRAGSRAQASGRPSRRRRAAVRLGVRPSELVQSSRRATVRPGVGFQELMDKATKLLIYGASAHLLLSMMAMVIESRKRKRDSRRVGITYGPMEERDRMRLDYLNTKIWMSDTTCVNMLRLSRSSFFRFCKGFRDRGLLEDTIHMCVEEQVAMFLNTVGHNLRNRLVGTNYGRSGETVSRYFNKVLRAIGELRAELIRPPSLETPSKIAGNPRWDPYFKDCIGAIDGTHIRALVSIDMEPSFRGRKSYASQNVMAAVDFDLRFTYVLAGWEGSAHDALVLRDALERENGLRVPQGKFYLVDAGYGAKPGFLPPFRAVRCHLNEWGNNPVQNEKELFNLRHSSLRVTVERAFGSLKRRFKILDDATPFFPFSTQVDIVVACCIIHNWVIQDGGDELIIEESNWPIHNHATTSSGQASEHAFMVNLRQEIANQMWEDRKTTMLPNLLLFFLL

SEQ ID NO: 66582 - protein, 157 aa, Zea mays
  Clone ID: LIB4739-062-D1_FLI.pep
PLQLLSRILFHLLQPSLDVVPRHVSKHLPDLEAHDIFVRQDEFVPSIVKVLVRFLREFDLVLELVEAVVEATEAVDVLLVLPRHLRLRAVALLHLRFSVSRADRRSESRVSSTRPPLIPLRARPLGDCYRCEIWSELEHSNGGKRWRRGKAYASLSP

SEQ ID NO: 66583 - protein, 432 aa, Zea mays
  Clone ID: LIB4739-069-A10_FLI.pep
ESEKAEADVPRSDLTTSHKLLLHIPQSTHPDRARPHLPDLICDDLLPPDPAPSPPTATAAAAASPTEVLSSAIQPEPAAATMYGWEMLSFNIHDGFLEAIVRGNRSGLLTAADYNNLCQCETLDDIKMHLTATEYGPYLQNGPSPLHTTTIVEKCTLKLVDEYKHMLCQATEPLSTFLQYITYGHMIDNVVLIVTGTLHERDVNELLEKCHPLGMFDSIASLAVAQNMRELYRLVLVDTPLAPYFSECITSEDLDDMNIEIMRNTLYKAYLEDFYKFCQKLGGATAEIMCDLLSFEADRRAVNITINSIGTELTRDDRRKLYSNFGLLYPYGHEELAVCEDVDQVRGAMEKYPPYQSIFSRISYGESQMLDKAFYEEEVKRLCLSFEQQFHYAVFFAYIRLREQEIRNLMWISECVAQNQKSRVHDSVVFIF

SEQ ID NO: 66584 - protein, 309 aa, Zea mays; identical to SEQ ID NO: 61196
  Clone ID: LIB4739-074-C1_FLI.pep

SEQ ID NO: 66585 - protein, 159 aa, Zea mays; identical to SEQ ID NO: 50480
  Clone ID: LIB4740-002-A9_FLI.pep

SEQ ID NO: 66586 - protein, 267 aa, Zea mays
  Clone ID: LIB4740-004-C2_FLI.pep
GSYRDTTPTREGREHSHSPTRPRRAREKEKRGGSFVREKYWRRREGEGGGSEMNVFRLAGDMTHLLSVVVLLLKVHTIKSCAGISLKTQELYALVFAARYLDLFVHFVSLYNTVMKLVFLASSFSIVWYMKRHKIVRRTYDKDHDTFRHYVLVLPCLLLALLINEKFTFREVMWAFSIYLEAVAIFPQLVLLQRTRNIDNLTGQYVFFLGAYRVLYILNWIYRYFTEPHFVHWISWMAGIVQTLLYADFFFYYIMSWKNNVKLELPA

SEQ ID NO: 66587 - protein, 250 aa, Zea mays
  Clone ID: LIB4740-006-D5_FLI.pep
QQTWKRKARGARQQFRMTSYRGLIFLIPNRREPPLDLVELVCLHHRISLGNGVPGSSPVVELAVVLVGVAVECAVQVPTPAVESRKSNPLPAGAAPVRPYLPPFGDRRHPLAGSGNISGLLHVHCLQLNLGNSYYRVAASNNRLHDGVAAVHDAVDRGGSQLGLILLRYHLLVALGAHVHGRRAAEEATVIDAEDGSLGGLAPSLLVLHGFLNSDETALFAIPLRRSPRGRRGGEGRGIAGNSVGFEMGP

SEQ ID NO: 66588 - protein, 207 aa, Zea mays
  Clone ID: LIB4740-009-F10_FLI.pep
SRPAGTSTSTATNPLPTRLVGLAAPPQVQVEAWKSRRRRRGPSCAWLPSAAPSARPPSTAASSAPPRRCARTPSRGSASTSSTSPTCPSSTPTSRPSAPEYNYSIATPLKNALDWASRGKNCWADKPAAIVSAGGGFGGGRSQYHLRQVGVFLDLHFINKPELCVQAFQQPPKFDSDGNLVDAEIRERLKKVLLSLQAFTLRLQKED

SEQ ID NO: 66589 - protein, 223 aa, Zea mays
  Clone ID: LIB4740-010-A11_FLI.pep
RISRLASTSIVQGLGIQGLRAMASKAVLFLALNLLFFTVANACGNCPTPTPPVEPPPPPPAATPPPFVQRQVPAERAQVRRVRRCARPRQRRGWQGACRAMLYPHQRPCGLRGRRLPLHGHQGQRARRRHRCPHQAQRPRQLLWQVRAQGLLVRVSSPARSHARSCSRTRLYMHAPCMARMHALCLLIYLSCLSCCAPSVLQNLEPFQPNTYLSVQFACIVSC

SEQ ID NO: 66590 - protein, 193 aa, Zea mays
  Clone ID: LIB4740-012-C12_FLI.pep
HWPKSTRKRNRAVAPCGGDLRGSKLGNGLGALGDGVLGELARKDEAHRSLDLPGGYGGLLVVAGELGGLGSQLLEDVVDEGVHDGHGLGRDTNVRVHLLEHLEDVDLVRLDALLGLLLPLLLAALLARHALLRPGLLLGLLLRRLLLRGLLLGLGRHREFDQMERRTRDGKRRIGNLLIGGDERWWLWLCAIP

SEQ ID NO: 66591 - protein, 231 aa, Zea mays; identical to SEQ ID NO: 43391
  Clone ID: LIB4740-014-B6_FLI.pep

SEQ ID NO: 66592 - protein, 197 aa, Zea mays
  Clone ID: LIB4740-014-F3_FLI.pep
VHTTTPTVLNPAALESRPRTSAERRHYHHRKRRRGDVSATDPDRRRWPGGAEGGLEVAPNAREVLIGLYTRTLKEIEAVPKDEGYRKAVESFTNHRLQICQEEDDWKRIEDRIGCGQVEELIEEAEDELKLIAKMIEWDPWGVPDDYECEVIEDDTPIPKHVPQHRPVALPEEFFKTLDAVKSDPALQGDAPPQVKA

SEQ ID NO: 66593 - protein, 163 aa, Zea mays
  Clone ID: LIB4740-016-B1_FLI.pep
GRGSGTGWWSTGRCRLTCGTTSTSTATTAASGRSRRCCSPPSPSTTRPSTSGPTQVPNAVDIRSLQHLPDVLRKADIHKIQAELVSCLPSLPHLSDLQKLKDELKTSWNSMEVLPSLSRWHLLELLANCLPHRFTHPNETSLSVLVSSLQLAELLDYILLLLS

SEQ ID NO: 66594 - protein, 294 aa, Zea mays
  Clone ID: LIB4740-016-H9_FLI.pep
SLHNIANMQIIFELTRCRGRRILGGGLHKCAPCTAMPNNKIVAANMEEKGAGGKAAVPHDELPRFTIFLIPNRREPPLDLVELVCLHHRISLGNGVPGSSPVVELAVVLVGVAVECAVQVPTPAVESRKSNPLPAGAAPVRPYLPPFGDRRHPLAGSGNISGLLHVHCLQLNLGNSYYRVAASNNRLHDGVAAVHDAVDRGGSQLGLILLRYHLLVALGAHVHGRRAAEEATVIDAEDGSLGGLAPSLLVLHGFLNSDETALFAIPLRRSPRGRRGGEGRGIAGNSVGFEMGPG

SEQ ID NO: 66595 - protein, 161 aa, Zea mays
  Clone ID: LIB4740-017-C10_FLI.pep
LYFISSLASSLVQRAGRKLGRRNLADLVAVGGHADGESDGDAALAGDGGDGAHVDALDAVGEALEAAARRLAVRAGPRRAVEALDAAAARRGERAGPPRRVRDARSQRRPHLPAGDRRRSGRRQQRRRHQHGNHLRRLPAVQHSRHRRCSISRRRPQFVCG

SEQ ID NO: 66596 - protein, 176 aa, Zea mays
  Clone ID: LIB4740-018-E3_FLI.pep
ARRKAHQCSSPAGPFSVPVRGSMKILVAVKRVVDYAVKVRVRPDGRGVETANVKMSMNPFCEIAVEEALRLREAGVAAEVVAATVGPAQSADTLRTALAMGADRAVHVLHDPDPARPLLPLAVAKILRAVALQEKPGLVILGKQAIDDDCNQTGQMLAGLLKWPQGTFASKHGFKT

SEQ ID NO: 66597 - protein, 173 aa, Zea mays
  Clone ID: LIB4740-020-B4_FLI.pep
RKMGLAKKEMRILMVGLDAAGKTTILYKLKLGEIVTTIPTIGFNVETVEYKNISFTVWDVGGQDKIRPLWRHYFQNTQGLIFVVDSNDRDRVVEARDELHRMLNEDELRDAVLLVFANKQDLPNAMNAAEITDKLGLHSLRQRHWYIQSTCATTGEGLYEGLDWLSSNIASKA

SEQ ID NO: 66598 - protein, 373 aa, Zea mays
  Clone ID: LIB4740-020-G6_FLI.pep
SRPAGSTVHLSSHILSPTSPASPVSVVSSPLLTSPAMGKIKIGINGFGRIGRLVARVALQSEDVELVAVNDPFITTDYMTYMFKYDTVHGQWKHSDITLKDSKTPLFGEKPVTVFGIRNPEEIPWGEAGAEYVVESTGVFTDKDKAAAHLKGGAKKVVISAPSKDAPMFVVGVNEDKYTSDVNIVSNASCTTNCLAPLAKVIHDNFGIIEGLMTTVHAITATQKTVDGPSAKDWRGGRAASFNIIPSSTGAAKAVGKVLPELNGKLTGMSFRVPTVDVSVVDLTVRIEKGASYEEIKKAIKAASEGPLKGIMGYVEEDLVSTDFTGDSRSSIFDAKAGIALNDHFIKLVSWYDNEWGYSNRVVDLIRHMFKTQ

SEQ ID NO: 66599 - protein, 153 aa, Zea mays
  Clone ID: LIB4740-021-B7_FLI.pep
RPGGHLPAVTTPKPVPSPTSSRTQVSRDETVDMARTQSAVAVAVVAAVLLLAAAATTSEAAITCGQVSSAIAPCLSYARGTGSAPSASCCSGVRNLKSAASTAADRRAACNCLKNAARGVSGLNAGNAASIPSKCGVSIPYTISTSTDCSRVN

SEQ ID NO: 66600 - protein, 150 aa, Zea mays
  Clone ID: LIB4740-027-D5_FLI.pep
HNVLLANRLSTCTGYSFRVPEDNDDRIPTEEHLAYEPVLVHRESLLLAFTGLRYLGPHLPNVLKNHVAVPIEGSHATKQLLVVPAVDKNLGIILDAHHEHRERTGAELLFLLFYVGFFRHGRQLEPSIWVAAARRRRRVERDELFFFFFP

SEQ ID NO: 66601 - protein, 223 aa, Zea mays
  Clone ID: LIB4740-027-E9_FLI.pep
RVSPYITFPPQIRSARPIRNLERSRRRPQQRGGRSTTAPQGSYSRRSGSTGSGSSEGKMSSVFSGDETAPFFGFLGAAAALVFSCMGAAYGTAKSGVGVASMGVMRPELVMKSIVPVVMAGVLGIYGLIIAVIISTGINPKAKPYYLFDGYAHLSSGLACGLAGLAAGMAIGIVGDAGVRANAQQPKLFVGMILILIFAEALALYGLIVGIILSSRAGQSRAD

SEQ ID NO: 66602 - protein, 177 aa, Zea mays; identical to SEQ ID NO: 44953
  Clone ID: LIB4740-028-A1_FLI.pep

SEQ ID NO: 66603 - protein, 297 aa, Zea mays
  Clone ID: LIB4740-028-B12_FLI.pep
LEAGRGRGAPPPTIRSLPRVSPLPPLAATHSPASATSHRRSPPSDPPRANSPPPSTRIPDELGEVLIWIFVECAMVDFVRRLASALLKCCDLDIPNRPKGLEDPERLARETVFNVNEIEALYELFKKISSAVVDDGLINKDEFQLALFKTNRKDSMFADRVFDLFDTKHNGILEFEEFAQALSVFHPSAPIDDKIDFAFKLYDLKQQGFIEKQEVKQMVVATLAESGMNLSDDIIEGIIDKTFEEADTKHDGKIDKEEWRSLVLRHPSLLKNMTLPYLRDITTTFPSFVFNSQVEDA

SEQ ID NO: 66604 - protein, 292 aa, Zea mays
  Clone ID: LIB4740-034-E12_FLI.pep
PGPVHPAHSPGHSQIATHSTSPPLLVHPAISATPTYRQQPSTSLSTPPPPSIRSEPIASASSSPSRSHHMAALLARQAAQALRARQSAQLGPTTSAMQGHLRTYMNAGIPKRFKEEEEKEQLAKDIAKDWNAVFERSINTLFLTEVVRGLMLTLKYFFERNVTINYPFEKGPLSPRFRGEHALRRYESGEERCIACKLCEAICPAQAITIEAEEREDGSRRTTRYDIDMTKCIYCGFCQEACPVDAIVEGPNFEFATETHEELLYDKEKLLENGDRWETEIAENLRSESLYR

SEQ ID NO: 66605 - protein, 186 aa, Zea mays
  Clone ID: LIB4740-035-A12_FLI.pep
RCGVVYELDWTWRSTLFIFCTTMALQMQLLLARLGNAVDELDGCGDRAGRDGVLDDLASVAVAGAGDQGAGQGAPDHRVLPVTAATDPFHAVHHAHINSSNSAPICALLAHLPQGMLNLVLRNIPPVEALEGLLGSHLAGADGADLEEAVDGAVEEGVSHVDDDVDLGRPEGPREAAAGHPRPRRR

SEQ ID NO: 66606 - protein, 210 aa, Zea mays
  Clone ID: LIB4740-035-A9_FLI.pep
GRPGPSSNKPTTKGRRGTPRHRTGLDTWRKEKQRSGMGTSPVIPATMLVVALLVASSTVCFGATATDTDTDGAIRLPSSSGAVGRPWECCDYVTKEPFIRPPRWRCNDVVDKCSADCQECEESPAGDGFVCRDWIFSLLEPPVCTPRPWDCCDFAVCTRDYIPYCQCGDVVESCPSNCKACKLVESDPPRYRCLDVFHGYPGPKCTPWIS

SEQ ID NO: 66607 - protein, 169 aa, Zea mays
  Clone ID: LIB4740-035-H6_FLI.pep
RANSNLPSLGQPPPRRSHALRARRLPSSPPPHSSRLTHMASIAGSSALSFAMPVKAINSNSLAFSPVRKGNTFLRLQPVPMRSVSCAAKKDTVDKVCEIVKKQLALPDHTEVCGESKFSELGADSLDTVEIVMGLEEHFDISVEESSAQTIATVEDAADLIDKLVAVKA

SEQ ID NO: 66608 - protein, 173 aa, Zea mays
  Clone ID: LIB4740-037-H7_FLI.pep
NTSSIILLLSASAMHAFLARDAHRTPHLINRVAVNVGADLVRQGDAALAGQRGGAADVGAAPVGAVGDVLEAAADGAAVGGVVGLLQQAADAAAARLGRHGPAHLDERQARHQRAVHGGARHRRAHRGRGSHHGRRQEHSQRQRRELRSSHASPSLSAGLTYDMMAGQCSKLR

SEQ ID NO: 66609 - protein, 155 aa, Zea mays
  Clone ID: LIB4740-040-D8_FLI.pep
SCIGIWDRTVLGGVKHLSLGLIGGRLRLGLGLGLGLSRGERLLDGDGVDLRHVRRQRGVHHPVPLQQPLPLELLRHHLDLVARATPSGRVRHHEIGRAESGGDGRLDVLLGHAHRFFASSSPVCSGGATDWQARRRLGPGGSSEASFQFLPAGLE

SEQ ID NO: 66610 - protein, 277 aa, Zea mays
  Clone ID: LIB4740-040-D9_FLI.pep
RDTGSATVPTSQPLCLSSRQSRIDRQPLHCTHALPHSPTPQSPPNLSASFSLHRRVRPHCPSPCGDLSRAGRRVLVTGTREKRPWWVAAAGHGGAAGDEWCVCRQDASQAALQKTIDYACGSGADCNSIHESGACYNPNTVPAHCSWAANSYYQNNKAKGATCDFAGTATLTTSDPSSSGCSYPTTSASAAGTVTPTTGGTMGGAGGPGTLTPAGTGAGTAGTTGMGTAGTTGTGFGGLGPAGMDTAAAAAGGLLLLPEAGLCAALVALLLSAIVLA

SEQ ID NO: 66611 - protein, 243 aa, Zea mays
  Clone ID: LIB4740-042-A5_FLI.pep
SRPAGAFRVSVQLVSIEQPRAEMAPVRVFGTADFVNAARVMACLEEVGVEYEVVEVDYAAMEHKGAQHLARNPFGQIPAFQDGDTMLFESRAIAKYVLRKYSKSAQVDLLREGNPEEAAMVDVWTEVEAHTYLPAIAPIFYEYVVYPAEHGTTPNQEVVDESVERLRKVLDVYEAHLYKTKQLYLAGDYFSLADLNHVPYTFHLMRTPHASLFEAYPHVKAWWERVIARPSLQKLAPDMVIKA

SEQ ID NO: 66612 - protein, 264 aa, Zea mays
  Clone ID: LIB4740-042-D9_FLI.pep
PGKPSASTGGSPNSVSNSRVLLLSDPELRRPQHQARPPSRVTEMALPNQGTVDYPSFKLVIVGDGGTGKTTFVKRHLTGEFEKKYEPTIGVEVHPLDFTTNCGKIRFYCWDTAGQEKFGGLRDGYYIHGQCAIIMFDVTSRLTYKNVPTWHRDLCRVCENIPIVLCGNKVDVKNRQVKAKQVTFHRKKNLQYYEISAKSNYNFEKPFLYLARKLAGDPNLHFVEAVALKPPEVTIDMAMQQQHEAELAAAAAQPLPDDDDDLIE

SEQ ID NO: 66613 - protein, 343 aa, Zea mays
  Clone ID: LIB4740-043-D11_FLI.pep
LEAGREKKKKEEQSSSIKRPSWWLRLEEELERESPIATHKRKRKRKRKARTMGLLLLLLVAAAATAPAADAWGKEGHYMVCKIAEVIAESFLTKEASTAVKELLPGWAGGELAETCSWADTQRFRYRWSSPLHFADTPGDCEFDYAWDCHNTKGEKNMCVVGAINNYTAALKDSSSPFDPTESLMFLAHFVGDVHQPLHCGHTDDLGGNTIVVHWYRRKTNLHHVWDVNVIETAMKDFYGNDQSTMIQAIQQNITEEWADEEKKWEACRSRTKTCADKYAAESAKLACTAYEGVDQDSTLEDDYFFAALPVVQKRIAQGGVRLAAILNRIFGGNSRSGFRAVD

SEQ ID NO: 66614 - protein, 239 aa, Zea mays
  Clone ID: LIB4740-043-H5_FLI.pep
TLRAPVQAFSNRRAAMDGSGVDTATTAAWMEKHRQMYERATRHPFTVSIRDGTVDMSAFKRWLSQDYLFVREFVAFIASVLLKCCKQEDSSDMEIILGGVASISDEISWFKNEATVWGVDLASVSPLKANLEYHRFLRSLTEPEISYAVAVTTFWTIETVYQDSFGFCIQDGNKTPPELMGTCQRWGSAGFRQYCQSLQSIVDRCLANAPADAVQSAEEAFVRVLELEIGFWDMSSSRS

SEQ ID NO: 66615 - protein, 296 aa, Zea mays
  Clone ID: LIB4740-045-F3_FLI.pep
VGRLRLLVVGGGELLVGVGDEEQLVDDAGEAAADEGADPVHPLVAPLPADEGGAEGHGGVHGRAVEDAAHQDVGAHDEADGDGGDGAQAALLRVHRRRVHRVHQPEGHHDLQHQRLPHRHPRQPEGARGLPARREAEQEARHGGPQQLRHPVQEPPEQGDVAAHEGAEGHGRVHVPAGDVRAHRHRHEQRERVRHRRRDQARRGRRAAAGQLAEGHAGALAGEDEDEGGDELSERRLEGARVVHLLVAPQGDPIDRHFHGPLASSRALVTTVIGAGVELSSARGVWDAVVSPAGLE

SEQ ID NO: 66616 - protein, 301 aa, Zea mays
  Clone ID: LIB4740-046-G9_FLI.pep
LARGVAMVLPLRLIPRLAAAARLTPATSCAPRLLLRRAPLPPALAMASAYSAGYGAGRRLLFRQLFEKESSTYTYLLADVADPDRPAVLIDPVDRTVDRDLNLIKELGLKLVYAMNTHVHADHVTGTGLIKTKLPGVKSVISKASGAKADHFVDHGDKIHFGNLFLEVRATPGHTSGCVTYVTGDADGQPSPRMAFTGDALIIRACGRTDFQGGSSEQLYQSVHSQIFTLPNDTLLYPAHDYKGFTVSTVEEEAAYNARLTKDKETFKTIMNNLNLSYPKMMDVAVPANLVCGIQDPPPKT

SEQ ID NO: 66617 - protein, 382 aa, Zea mays
  Clone ID: LIB4740-047-A12_FLI.pep
RELRGKGSYSLAFEKEHHPQPNAQQSGPTSLPIPQSVQAMVAAGRHAPVPPRYLRPDLAADVVVADDATTIPIIDFQRLLLVDPEESARLHAACQDWGFFQLINHGVPDDVMEAMKASIQSFFALPAEAKQQYRQQAGQLEGYGQLFVVSEDQKLDWADVLYLNTQPPEHRNLSFWPAGESFRQTLDTYSAAVKHVADRLLGAMYMNLGLQLSIMDMDPERGAGIQSVRMNYYPPCAEAADKVLGFSPHSDSDLLTLVLQVNQLQGLQIKRPPDGGGAWAWLPVTPLQGAFVVNVGDVLEIFTNGRYRSVEHRALVNAHTERLSIAAFHSPSIHATIGPLPELLGDQEVPKYKTLDHQSFITLFFSAKLQGKSFLERMKKLS

SEQ ID NO: 66618 - protein, 338 aa, Zea mays
  Clone ID: LIB4740-047-C1_FLI.pep
AGISLPSRSLPGEAMDEAAVDDLIRRLLEARGGRTPRNAQVTDAEIRRLCAAAKDVFLSQPNLLELEAPIKICGDVHGQYSDLLRLFEYGGYPPDANYLFLGDYVDRGKQSIETICLLLAYKIKYPENFFLLRGNHECASINRIYGFFDECKRRFNVRIWKIFTECFNCLPVAALIDDKIFCMHGGLSPDLKSMDQIRNIPRPVDVPDVGLLCDLLWSDPDKEIDRWGENDRGVSYTFGADVVAEFLQKHDLDLICRAHQVVEDGYEFFAKRQLVTIFSAPNYCGEFDNAGALMSIDNSLVCSFQILKPSEKKGKAGNGNMPKPGTPPRKIKISVTHI

SEQ ID NO: 66619 - protein, 299 aa, Zea mays
  Clone ID: LIB4740-049-F2_FLI.pep
HDSINNLYIATRTSFPGRVRVVLPVVPERAAPDGVDDDEEDQEDDVDGGDLLPVVLQVGQHACLAGHAVVSCGVEASGLGPDSLALVREVATRWWLAASRLDRGEVAVDELGGRLLSGRKLLADLAVLEAAADLGPVLRVLHPPLQPGGVVPEAVLLVPPAGDDPPGAAVGDDEREDGECEEEQDEEEEREEVEPEEAGGAAERAGQAREGEREEEHAQRDDGPLEEPLAVGGGRAVAEPGAAPQRDDGEDQHARVEEAQEAVAAPRHGDRRSRSALGSWDGMGLASWELGHGEECVRL

SEQ ID NO: 66620 - protein, 363 aa, Zea mays
  Clone ID: LIB4740-049-H3_FLI.pep
PPSRRASIMSAYCGKYKDELIKNAAYIGTPGKGILVADESTGTIGKRLSSINVENVEENRRALRELLFCCPGALQYISGVILFEETLYQKTKDGKPFVDVLKEGGVLPGIKVDKGTIEVVGTDKETTTQGHDDLGKRCAKYYEAGARFAKWRAVLKIGPNEPSQLAIDLNAQGLARYAIICQENGLVPIVEPEILVDGPHDIDRCAYVTETVLAACYKALNEHHVLLEGTLLKPNMVTPGSDSKKVTPEVIAEYTVRTLQRTVPAAVPAVVFLSGGQSEEEATRNLNAMNKLSTKKPWSLSFSFGRALQASTLKAWAGKVENLEKARAAFLARCKANSEATLGTYKGDAAADTESLHVKDYKY

SEQ ID NO: 66621 - protein, 384 aa, Zea mays
  Clone ID: LIB4740-050-H8_FLI.pep
PGLRGQPLGEVISVKEKRVLGNKKKIQKRRIIKTRINYLTVHAMPMTPLECDMAPAASRQSWPLPRCGLLVLALALATTAAVGSAQLSSESYYDASCPAALLTIRTAVSTAVLLEPRMGASLLRLHFHDCFVQGCDASVLLDDTASFTGEKGAGPNAGSLRGFDVIDNIKMLLELLCPQTVSCADILAVAARDSVAQLGGPSWAVPLGRRDATTASASLANSDLPGPTSSLNGLLNAFSNKGLSSTDMVALSGAHTVGRAQCKNCRARIYNDTDIDASFAASLRASCPAQAGAGDGALEPLDGSTPDAFDNAYFGDLLSQRGLLHSDQALFGGGGGATDGLVSAYASNAGQWGADFAAAMVKMGSISPLTGTDGEIRVNCRRVN

SEQ ID NO: 66622 - protein, 153 aa, Zea mays; identical to SEQ ID NO: 47696
  Clone ID: LIB4740-052-E8_FLI.pep

SEQ ID NO: 66623 - protein, 294 aa, Zea mays
  Clone ID: LIB4740-053-E7_FLI.pep
VGRLRLLVVGGGELLVGVGDEEQLVDDAGEAAADEGADPVHPLVAPLPADEGGAEGHGGVHGRAVEGAAHQDVGAHDEADGDGGDGAQAALLRVHRRRVHRVHQPEGHHDLQHQRLPHRHPRQPEGARGLPARREAEQEARHGGPQQLRHPVQEPPEQGDVAAHEGAEGHGRVHVPAGDVRAHRHRHEQRERVRHRRRDQARRGRRAAAGQLAEGHAGALAGEDEDEGGDELSERRLEGARVVHLLVAPQGDPIDRHFHGPLASSRALVTTVIGAGVELSSARGVWDAVVGRPR

SEQ ID NO: 66624 - protein, 221 aa, Zea mays
  Clone ID: LIB4740-053-H5_FLI.pep
EPPLDLVELVCLHHRISLGNGVPGSSPVVELAVVLVGVAVECAVQVPTPAVESRKSNPLPAGAAPVRPYLPPFGDRRHPLAGSGNISGLLHVHCLQLNLGNSYYRVAASNNRLHDGVAAVHDAVDRGGSQLGLILLRYHLLVALGAHVHGRRAAEEATVIDAEDGSLGGLAPSLLVLHGFLNSDETALFAIPLRRSPRGRRGGEGRGIAGNSVGFEIRPAS

SEQ ID NO: 66625 - protein, 275 aa, Zea mays
  Clone ID: LIB4740-062-A12_FLI.pep
SACTYVYAEAPSPPNEPSRKPSPSPCPLRWPTSPHLSSAHCPVAAETRKTLSEVLGTCLRTQLPGGSVCRQSSSIAAPWETTTTRSPACSCAILFTKQTQRSFSWFRLSPPPGSSWFLLSGSEPSMTLTMCKESGLLSTASSHLRPCRYPMCLSRSASVSTTFDTPQALAMVSAVSAARRRSDEYTAAGLASLDSRRATTTACRLPASFSSGSIWPWTTREAFHAVSPRRTTTTSVDGSSSPARAAGAGVGDMAGSVAGWLLLGSRGALHYRPAS

SEQ ID NO: 66626 - protein, 162 aa, Zea mays; identical to SEQ ID NO: 50729
  Clone ID: LIB4740-064-A6_FLI.pep

SEQ ID NO: 66627 - protein, 155 aa, Zea mays
  Clone ID: LIB4740-064-B5_FLI.pep
RGRPGGHLPAVTTPKPVPSPTSSRTQVSRDETVDMARTQSAVAVAVVAAVLLLAAAATTSEAAITCGQVSSAIAPCLSYARGTGSAPSASCCSGVRNLKSAASTAADRRAACNCLKNAARGVSGLNAGNAASIPSKCGVSIPYTISTSTDCSRVN

SEQ ID NO: 66628 - protein, 230 aa, Zea mays
  Clone ID: LIB4740-064-H11_FLI.pep
PLHCWMKHGPLSRGAPSLVIIFILLTTLFIILVIDLRLGLVRLLFIFLLFLLGRSLLSCSALALVVGSDGLVVLELELVSLGYIGSLVRLAQGFPPVASSFPHRSDRLVLRVLLLELLAKFLHEHEESAGSPLRLVGVLAGLPFPALGGLLRPLALHRQLGIGLGGALGFGPLHGGFERRHGAQRSDPRLAEGIPVAGGRIGVESRAKLPLAARGEREGGKGKGRRRALP

SEQ ID NO: 66629 - protein, 161 aa, Zea mays; identical to SEQ ID NO: 66595
  Clone ID: LIB4740-068-C2_FLI.pep

SEQ ID NO: 66630 - protein, 344 aa, Zea mays; identical to SEQ ID NO: 59183
  Clone ID: LIB4740-073-C12_FLI.pep

SEQ ID NO: 66631 - protein, 301 aa, Zea mays
  Clone ID: LIB4740-073-G12_FLI.pep
RVATMHLVAGAIGNLAPKLLRLLRDEYSLQKGVRKQVQFLSEELESIHAALRKVAAVPPDQLDEQVKIWARQVRDASYDMEDALDTFLVRVEGRPEPNCGHGRLKGAAKRMGRLFKKANAHRHVASVIAGIKMQLQEVAERRARYRVDEVVATRPAAASAIDPRLEAMYKQATQLVGVDGAMGDLVLLLSLEVSILGVGGLGKTTLAKAVYDNLKSQFDCGAFVSVGRNPDLKKVFRDILIDLDKHKYTAEVNLSIFGETQLIDEIRELLESKRYDLASYKNAHSIHQCNLSCHSRYSQFR

SEQ ID NO: 66632 - protein, 222 aa, Zea mays
  Clone ID: LIB4740-074-B6_FLI.pep
EPPLDLVELVCLHHRISLGNGVPGSSPVVELAVVLVGVAVERAVQVPTPAVESREPNPLPAGAAPVRPYLPPFGDRRHPLAGSGNISGLLHVHCLQLDLGNSYYRVAASNNRLHDGVAAVHDAVDRGGSQLGLILLRYHLLVALRAHVHGRRAAEEATVIDAEDGSLGGLAPSLLVLHGFLNSDETALFAIPLRRSPRGRRGGEGRGIAGNSVGFEMARPAS

SEQ ID NO: 66633 - protein, 360 aa, Zea mays; identical to SEQ ID NO: 53639
  Clone ID: LIB4740-074-G7_FLI.pep

SEQ ID NO: 66634 - protein, 245 aa, Zea mays; identical to SEQ ID NO: 41835
  Clone ID: LIB4740-076-G5_FLI.pep

SEQ ID NO: 66635 - protein, 185 aa, Zea mays
  Clone ID: LIB4740-077-H12_FLI.pep
EAGREELRAVFISVALRPCVPALCALALSAEVGDDWATAAAVRQVLRSPSDPSPGLLPRRAPPGVHPIFFTGSSAASSHASKSGVASIRLRCLTKHTIMQASDRFNINSQLEHLQAKYVGTGHADLSRFEWAVNIQRDSYASYIGHYPMLAYFAIAENESIGRERYNFMQKMLLPCGLPPERDED

SEQ ID NO: 66636 - protein, 145 aa, Zea mays
  Clone ID: LIB4740-078-F2_FLI.pep
LKLFLFGSGLITNICTFILTFLQKKNSDVLPCPPLLLGTLLNSELPAFARGAGPDLTIMQASDRFNINSQLEHLQAKYVGTGHADLSRFEWAVNIQRDSYASYIGHYPMLAYFAIAENESIGRERYNFMQKMLLPCGLPPERDED

SEQ ID NO: 66637 - protein, 274 aa, Zea mays
  Clone ID: LIB4740-079-F1_FLI.pep
IPSSSSAASACSGGKERERERERDLVERLVGGPRTKMLAVFSGQVVEVPAELVAAGSRTPSPKTKASQLVGRFLAASEPAVSVQLGDHGHLAYSHTNQALLRPRSFAAKDEVFCLFEGVLDNLGRLSQQHGLSSKGANEVLLVIEAYKTLRDRAPYPASFMLAQLTGSYAFVLFDKSTNSLLVASDPEGRVPLFWGITADGCVAFSDDIDMLKGSCGKSLAPFPQGCFYSNALGGLKCYENPKHKVTAVPADEEEICGATFKVVEGSTVLTALH

SEQ ID NO: 66638 - protein, 216 aa, Zea mays
  Clone ID: LIB4740-081-C6_FLI.pep
RILSCIFQQRLQQSNMRTLPWMAVNTHLEPIIATVIHDITYYTWHGNSRYYIKSTDFMKIREGACSGMFRSSSLFCNLVLRFRQQIAQGDDRSLGASTLFNRLEFLQLLEVLPWLLPDLSFIELIDFAILHFNSEIVHRASNHLCLGLHKLLEPQKSIGLLVVLIDGEARELLELEVVLVRRHVLDAACQHPGVVSHGLLLCAARGGNGGKGKQHE

SEQ ID NO: 66639 - protein, 542 aa, Zea mays
  Clone ID: LIB4740-083-D5_FLI.pep
PAGSTRYDLASGAMETKRVAIIGAGVSGLAACKHLLERGCRPVVFEAGTVVGGVWARVPDSTALQTPRPMYQYSDFPWPDTVTEVFPDHRQVMSYLDAYARHFGVLDCVRFGRRVLGMEYHGVAEDDVAAWEEWGGNGQAFGCAGAGEWRLKVADAEGRIETHKADFVVLCIGRFSGVPNTPTFPPGEGPEAFDGQVIHSMDYAKMGTKKAREMIKGKRVTVVGYLKSAVDIAAECAEVNGADHPCTMVVRTKHWIIPDYFAWGVHISLLFLNRFAELLIHKPGEGFLLWLLATLLAPLRWLFSKFAESYYAIPMRKHSMVPDHSLFQALATCLIAIQPKGFYERLEEGSIVLKRSKTFSFCREGVVVEGEVSSSSLVESDVVIYATGFRGDLKIKDMFASEYFRSVAVGSACTTVPLYRECIHPKIPQLAVLGYSESIANLYTSEIRAKWLAHFMDGGFRMPSVAAMQKNVLEWEKCMKRYAGGRYFRRSCIGLLHIWYNDQLCRDMGCDPRRKKGFLEELFGVYGPADYADLHPDRKKDD

SEQ ID NO: 66640 - protein, 231 aa, Zea mays; identical to SEQ ID NO: 43391
  Clone ID: LIB4740-084-C7_FLI.pep

SEQ ID NO: 66641 - protein, 450 aa, Zea mays
  Clone ID: LIB4741-001-E9_FLI.pep
PPTMGKEKSHINIVVIGHVDSGKSTTTGHLIYKLGGIDKRVIERFEKEAAEMNKRSFKYAWVLDKLKAERERGITIDIALWKFETTKYYCTVIDAPGHRDFIKNMITGTSQADCAVLIIDSTTGGFEAGISKDGQTREHALLAFTLGVKQMICCCNKMDATTPKYSKARYDEIVKEVSSYLKKVGYNPDKIAFVPISGFEGDNMIERSTNLDWYKGPTLLEALDQITEPKRPSDKPLRLPLQDVYKIGGIGTVPVGRVETGVIKPGMVVTFGPTGLTTEVKSVEMHHEALQEALPGDNVGFNVKNVAVKDLKRGYVASNSKDDPAKEAASFTSQVIIMNHPGQIGNGYAPVLDCHTSHIAVKFAELITKIDRRSGKELEKEPKFLKNGDAGMVKMIPTKPMVVETFSQYPPLGRFAVRDMRQTVAVGVIKSVEKKDPTGAKVTKAAIKKK

SEQ ID NO: 66642 - protein, 577 aa, Zea mays
  Clone ID: LIB4741-003-E8_FLI.pep
APPPLPATPGIRRSAVGRFFPWHPALGFFLPRFSARRRPLLLPPVARCRSSPRSTRPLLQPAAPPVLPLPAPAASCSSSPLAGTAAASTLLKAKELNRALLMGSLHALRAPTPLVGSTRIGFSSGLRFCSDRVLRGLTPIGAMKSYRLSELSDTEVSSLKARPRINFSSIFGTVNPIVEDVRVGGDAAVKHYTEKFDKVMLDDVVVCVSDLPDAELDPAVKEAFDVAYDNIYAFHVSQKIPEKTVENMKGVRCKRITRCIGSVGLYVPGSTAVLPSTALMLAVPAQIAGCKTIVLATPPSRDGSICKEVLYCAKKAGVTHILKAGGAQAISAMAWGTASCPKAEKIFGPGNQYVTAAKMILQNSEAMVSIDMPAGPSEVLVIADKYANPVHVAADLLSQAEHGPDSQVVLVVAGDGVDLGAIEAEVSKQCNALPRGEFASKALSHSFTVFAKDMVEAISFSNLYAPEHLIINVKDAEQWEEFIENAGSVFLGQWTPESVGDYASGTNHVLPTYGYARMYSGVSLNSFLKYITVQSLTEEGLRKLGPYVAKMAEVEGLEAHKRAVTLRLQEVEANVTV

SEQ ID NO: 66643 - protein, 123 aa, Zea mays
  Clone ID: LIB4741-012-H8_FLI.pep
KLQQKKTTYIACSTETARLPVCHPILVSGYACGRTMFATLPMNSIYQRQQYTYKQGDRDAHCATYFCSLIYLLALLLDHISLLHFFQDCIICVLMKALIQLFCLFAALPYHRKCSSPCTLSIF

SEQ ID NO: 66644 - protein, 490 aa, Zea mays
  Clone ID: LIB4741-013-C3_FLI.pep
NRRDRRLRTRLSPRPKAFPLLPFFSHFSPPPPLPPFDNTMRECISIHIGQAGIQVGNACWELYCLEHGIQADGQMPGDKTIGGGDDAFNTFFSETGAGKHVPRAVFVDLEPTVIDEVRTGTYRQLFHPEQLISGKEDAANNFARGHYTIGKEIVDLCLDRIRKLADNCTGLQGFLVFNAVGGGTGSGLGSLLLERLSVDYGKKSKLGFTVYPSPQVSTSVVEPYNSVLSTHSLLEHTDVAVLLDNEAIYDICRRSLDIERPTYTNLNRLVSQVISSLTASLRFDGALNVDVNEFQTNLVPYPRIHFMLSSYAPVISAEKAYHEQLSVAEITNSAFEPSSMMAKCDPRHGKYMACCLMYRGDVVPKDVNAAVATIKTKRTIQFVDWCPTGFKCGINYQPPSVVPGGDLAKVQRAVCMISNSTSVVEVFSRIDHKFDLMYAKRAFVHWYVGEGMEEGEFSEAREDLAALEKDYEEVGAEFDEGEDGDEGDEY

SEQ ID NO: 66645 - protein, 255 aa, Zea mays
  Clone ID: LIB4741-014-A7_FLI.pep
AYPLKKIRHLHQIRSHAPAAKTKSASGSPHSPPKIILRTKSAAAEMGAECRYEVAQAAYIKLALHALKHPATAVNGLLVGRLVEPSSSPAVVSVIDAVPLSHHPHHLPLLPTLELALTLVEDHFATQGEGLAVVGYYHANPRCDDTELPPVAKRVGDHIFRYFPRSAVLLVDNKKLEEAVKGKFSDAVIQLHTRDSSKSWRQAGSDGSSQLVLKEPSTNVVLADHVTTKKWEKIVDFDDHLDDISKDWSNPGLLD

SEQ ID NO: 66646 - protein, 509 aa, Zea mays
  Clone ID: LIB4741-018-F2_FLI.pep
TMSTSKGSAAKGGGGKKKEVKKETKLGMAYRKDDNFGEWYSEVVVNSEMIEYYDISGCYILRPWAMEIWELMKEFFDAEIKKLKLKPYYFPLFVTENVLQKEKDHIEGFAPEVAWVTKSGKSDLEAPIAIRPTSETVMYPYFSKWIRSHRDLPLRCNQWCNVVRWEFSNPTPFIRSREFLWQEGHTAFANKEEADEEVLQILELYRRIYEEFLAVPVSKGRKSEMEKFAGGLYTTSVEAFIPNTGRGIQGATSHCLGQNFAKMFDITFENEKGVREMVWQNSWAYTTRSIGVMVMTHGDDKGLVLPPKVAPIQVIVIPVPYKDADTTAIKGACESTVYTLNQSGIRADQDTRENYSPGWKYSHWEMKGVPLRIEIGPKDLANKQVRIVRRDNGAKVDIPVTNLVEDVKVLLDEIQKNLFKTAQERRDACVQVVNSWDEFTTALNNKRLILAPWCDEEEVEKDVKARTKGELGAAKTLCTPFEQPELPEGTLCFASGKPAKKWSFWGRSY

SEQ ID NO: 66647 - protein, 172 aa, Zea mays; identical to SEQ ID NO: 41503
  Clone ID: LIB4741-027-A3_FLI.pep

SEQ ID NO: 66648 - protein, 571 aa, Zea mays
  Clone ID: LIB4741-040-G12_FLI.pep
QRGEKMAPLLAAAMNHAAAHPGLRSHLVGPNNESFSRHHLPSSSPQSSKRRCNLSFTPRSARVGSQNGVQMLSPSEIPQRDWFPSDFTFGAATSAYQIEGAWNEDGKGESNWDHFCHNHPERILDGSNSDIGANSYHMYKTDVRLLKEMGMDAYRFSISWPRILPNGTKEGGINPDGIKYYRNLINLLLENGIEPYVTIFHWDVPQALEEKYGGFLDKSHKSIVEDYTYFAKVCFDNFGDKVKNWLTFNESQTFTSFSYGTGVFAPGRCSPGLDCAYPTGNSLVEPYTAGHNILLAHAEAVDLYNKHYKRDDTRIGLAFDVMGRVPYGTSFLDKQAEERSWDINLGWFLEPVVRGDYPFSMRSLARERLPFFKDEQKEKLAGSYNMLGLNYYTSRFSKNIDISPNYSPVLNTDDAYASQEVNGPDGKPIGPPMGNPWIYMYPEGLKDLLMIMKNKYGNPPIYITENGIGDVDTKETPLPMEDALNDYKRLDYIQRHIATLKESIDLGSNVQGYFAWSLLDNFEWFAGFTERYGIVYVDRNNNCTRYMKESAKWLKQFNAAKKPSKKILTPA

SEQ ID NO: 66649 - protein, 581 aa, Zea mays
  Clone ID: LIB4741-043-G8_FLI.pep
HCTRLILRPDAPTPPLREEVLCAPSHSASTPTSVASQPAMASDSGPASSDPLLHGRRAPSTGGWKSALFIIWVEVAERFAYYGISSNLISYLTGPLGQTTAAAAAAVNAWSGAASMLPLLGAAVADSWLGRYRTIVASSVLYITGLGMLTLSSVFSSPQQCRDSADDGEGICPPSSLQTAFFYASLYLVAIAQSRHKPCVQAFGADQFDATDPDEAVSRASFFNWWYMGLCTSATVTIALMSYVQDNVGWALGFGVPSMAMLLALAIFLLGTRTYRFYGSRGGAGASASASASASSLFRNAFVAWRKRSREVELGHGELAQDDAVLAEEVKGLARLFPIWATCLLYGAVFAQPPTLFTKQAATLDRRIGRSFQVPPAALQCFLGASIVTCIVLYDRVLVPVTRRVSGAASGITMLQRIGTGIALSLVTLVVAVLVEMKRLRAARDAGGGGLVDGSGTGTAAVPMSLWWIVPQYVLLGAADVFTMVGMQEFFYDQVPGALKSLGLALYLSVLGVGSFISSFLITVIDAVTTRNGGTSWFADDLNRGHLDYFYQLLAALTALELLAFAYFSTSYVYKTKAGNL

SEQ ID NO: 66650 - protein, 571 aa, Zea mays
  Clone ID: LIB4741-045-F3_FLI.pep
QRGEKMAPLLAAAMNHAAAHPGLRSHLVGPNNESFSRHHLPSSSPQSSKRRCNLSFTPRSARVGSQNGVQMLSPSEIPQRDWFPSDFTFGAATSAYQIEGAWNEDGKGESNWDHFCHNHPERILDGSNSDIVANSYHMYKTDVRLLKEMGMDAYRFSISWPRILPKGTKEGGINPDGIKYYRNLINLLLENGIEPYVTIFHWDVPQALEEKYGGFLDKSHKSIVEDYTYFAKVCFDNFGDEVKNWLTFNEPQTFTSFSYGTGVFAPGRCSPGLDCAYPTGNSLVEPYTAGHNILLAHAEAVDLYNKHYKRDDTRIGLAFDVMGRVPYGTSFLDKQAEERSWDINLGWFLEPVVRGDYPFSMRSLARERLPFFKDEQKEKLAGSYNMLGLNYYTSRFSKNIDISPNYSPVLNTDDAYASQEVNGPDGKPIGPPMGNPWIYMYPEGLKDLLMIMKNKYGNPPIYITENGIGDVDTKETPLPMEDALNDYKRLDYIQRHIATLKESIDLGSNVQGYFAWSLLDNFEWFAGFTERYGIVYVDRNNNCTRYMKESAKWLKQFNAAKKPSKKILTPA

SEQ ID NO: 66651 - protein, 335 aa, Zea mays
  Clone ID: LIB4741-053-H6_FLI.pep
WNEITFRDEKGITRFPPGTFLRVRTATPFMAAVASSFSRFSFRCAVCPSPLRVRFSQPHPPARLRVSSTVVALHKRNPKRLKYAAERQFTRGDAGLLRVEVEPSGGDFWKLDPIIDLINRGAVGVIPTDTVYSVVCDLSNNESIERLRRLKGIGDSKPLSILCRSLRDIDTYTTGFPQGTNQGQANIFRVVKRAIPGPYTFILPASKQFPKQCIKHGSSTRYAKRRQVGVRIPDDPICQAILQNLDEPLICTSVKYLSEDEWILDPVIIADLYEPLGLDFIVDGGPRIADPSTVVDMMGANPTVIRQGKGLKLDWMVAKDEEEDEAQSMFSFKSA

SEQ ID NO: 66652 - protein, 198 aa, Zea mays
  Clone ID: LIB4741-054-F8_FLI.pep
AGRGKFHAFLIFRSARKSLYHLLPIPLFRPLASRASRSLLCVTGWPPIRRHRPASGVPVTSVHLMLEYQNAIGGRLKLKGKALDVKDGGVKKKKKKYQREESSQIAHDELHKGGRSESPIDPNNERIESDKTGDEGNPHPDYGHLTPAERRYMEQKQKIDMQKMAKAANKSHRDRIQDFNQYLANLSEHYDIPKVGPG

SEQ ID NO: 66653 - protein, 374 aa, Zea mays
  Clone ID: LIB4741-058-C3_FLI.pep
PAETIGIGSEWNKMEGFCGGDSELDEQSNQEPAFEAFMCPLTKQVMHDPVTIETGQTFEREAILKWFRECRDSGRKPTCPLTQAELRSTDITPSIALRNVIQEWRARNEDKELDKAMASLTATQEAQAQDDDDDTLRALLYVSRMKKTLVRRQGVIPTIADLLKSSSRRVRLKALQVLGVIVEEDDENKEELAKGDTIRTIIKFLSNENFQERELAVSLLYELSKFDPTCERIGAIYGAILLLVGMASSKSEHGVAVEKAENTLKNLEKYETNVKQMAENGRLQPLLTKLIQGPPQVQLAMAEFLGELALANDVKVLVAEQVGVSYWMLLEFEGEKIREESSVWERITGRCDRCIPLPKFFLSDYYRLIVLILH

SEQ ID NO: 66654 - protein, 255 aa, Zea mays
  Clone ID: LIB4741-069-E12_FLI.pep
LEAGRALCLSRVFDFSRRRCSSHIPREDACSSPIDTMAVFSDLHTADGLKSLEAHLAGKTYVSGDSITKDDIKVFAAVPSKPGAEFPNAARWYETVSAAVASRFPGKAVGVNLPAGSAPAAAAPADEAEDDDDLDLFGDETEEDKKAADERAAAAKASSKKKESGKSSVLMDVKPWDDETDMKKLEEAVRSVQMEGLTWGASKLVPVGYGIKKMTIMLTIVDDLVSIDTLIEDHLTQEPINEYVQSCDIVAFNKI

SEQ ID NO: 66655 - protein, 351 aa, Zea mays
  Clone ID: LIB4742-001-H11_FLI.pep
LVWSPLSRPSGPPVQRRSLSLPLSSGHRTRLPALTPPAPPAPGTAPRLHLRRRRRRIAPIDPRNSGNRGLREMDLKDSLSKFKQQQERCQSSLASIAASTSKPKHRAQPAHAPNVPARPSQPIKFSNDTERLQHINSIRKSPVGAQIKLVIELLYKTRQAFTAEQINEATYVDIHGNKAVFDSLRNNPKVSYDGRRFSYKSKHDLKGKDQLLVLIRKFPEGLAVVEVKDAYSNVLEDLQALKAAGEVWLLSNMDSQEDIVYPNDPKAKIKVDDDLKQLFREIELPRDMVDIEKELQKNGFKPMTNTAKRRAAAQINGVKPKAKPKKKQREITKRTKLTNAHLPELFQNLNT

SEQ ID NO: 66656 - protein, 207 aa, Zea mays
  Clone ID: LIB4742-007-A2_FLI.pep
LASNLRNQHGHHTTPATEQRALVNCDAPMNGLELYCTGPSPVLALHLVLEEVVVEVVERLGGCLLDDVRVGHLVVGLVELHGPADDGAALALRLGRSHLQRDLEVLVEVRQLAVHHAVRHHLVLVVRRLQLLLGERQHRHRLGVLEEADGAGRLAVALDGLDALVLLGEDLGEQLRRVTQRRPQLVSRGLDLNHQLNLGRHCLCTDS

SEQ ID NO: 66657 - protein, 289 aa, Zea mays
  Clone ID: LIB4742-007-F9_FLI.pep
PGFRHGFQADRSLDLLHCHHRSRLPSLRIRRAHGRRLVERRRHLVRPRQGRWIRRWCVWVPGCRRPTSVLVNDHRRQPIHLPGRQGLRHLLPGEVHRTRVVLRQPGDSGHHRPVPRRCVPGGARPLRPERDGVRCHGEARPGRPAPERRPPASPVHSGGVQLERLGHRLQGGRRLKRQLPGHGHRVRVRGRGPARRGTEAERRGGVGAHATLLGRCVAVQVRLHQSAGPPVCPPHLGLRQGPRRQQRHPRRMAARQNLPLRRQLRRKPCITSDIKDVVCRCLHLRCMHI

SEQ ID NO: 66658 - protein, 258 aa, Zea mays
  Clone ID: LIB4742-008-B12_FLI.pep
GRPGKTISRIHNTLFHSPHPTPISPVSLHFLTQMAAAPCSTTFSGDVWAELRLASASDVPHIHRLIHQMAEFELLTDLFAATEELHTSTLFPSPTPPPFTSFTALILDLSPSPVAPDPSSTIASRRLDLSASPLADPEAAAFASPRGGGRVTAGFVICFPNYSTFLSKPGLYVEDIFVRAPWRRRGLGRMMLSAVAGRAAELGMGRVEWCVLDWNKNAIDFYEGMGADVLPQWRICRLAGKALDKYKGSAGGKAAAAE

SEQ ID NO: 66659 - protein, 305 aa, Zea mays
  Clone ID: LIB4742-009-E5_FLI.pep
GSASGSVRRPRPHSPPAQLRCAISNPLLPPSRTSPSISSPADSSSLQPPSTAGRKWPRVSPLTPVKNLGVVYPAPSSSPWRSGASDKNKSMVEQLQRYGVIRSTKVAEVMEAIDRGLFVPPGGSPYHDSPMPIGYNATISAPHMHAACLELLEKNLQPGMRALDVGSGTGYLTACFALMVGPEGRAVGVEHIPELVATSTENIKKSAAAPHLNDGSLSIHVSDGREGWPELAPYEAIHVGAAAPQIPEALIEQLKPGGRMVIPVGTVFQELKVVDKKLDGTVSIRDETSVRYVPLTSKDAQSHAS

SEQ ID NO: 66660 - protein, 222 aa, Zea mays
  Clone ID: LIB4742-013-H8_FLI.pep
RGGGSGEMGMRDKKRNQKRVLARRTAVPRPGEGKDFLPLEGGPGKKLRKVQQPEEPENTATVVYIGHIPHGFYEDEMKGFFKQFGDIKRLRIARNRKTGKSKHYGFIEFENPAVAKVVADEMNNYLLFERTLQVALVEPEKVHPKLWKGVRRGFIPVDRVAIERKRHNKDKTVAEHKKMVEGIVKRDGKRRKRIKAAGIDYECPALIGSIQPSAKKIKFDEA

SEQ ID NO: 66661 - protein, 177 aa, Zea mays
  Clone ID: LIB4742-016-C5_FLI.pep
SHDSDKPTKARDELTRVPETFLTARLVGTARKRRICRRGEHREEPISLAAEAVEGAALALERVDDVHGGDGLAAGVLSVGDGVADDVLEEDLEHAAGLLVDEPRDALDAAPPRQPPDRRLGDALDVVAQHLPVTLRAALAEPLATLTAPGHGFFRSGLWWAGEFPRKARLVALARPA

SEQ ID NO: 66662 - protein, 273 aa, Zea mays
  Clone ID: LIB4742-016-H9_FLI.pep
QPIPLVLCVRSSRVSSAPLGLVCSLSFDRGFKEKNNIFINVDRCMKYSTFCYAPINPNITPLATASFGDMADSSIFTFPRIHVKDPYQRLGISREALEEEIRAARIYLISKYGGHKPSADAIESAHDRIIMQSFFDRKKPKNEPQEKIRELSQSRAVKAIQGRFQTPRSKVIWQTAITFVLLGVLTLAFPTDEGPTLQAAVSCAANIYFIYQRVKSGWRAFFYGFGSFFASWFLGTFLMVSLIPPVLPGPRNLEVSTACVTYVLLFVSSTFLK

SEQ ID NO: 66663 - protein, 183 aa, Zea mays
  Clone ID: LIB4742-026-H11_FLI.pep
ISFGCLDLLYRVLACRARYGVMLEKGAFDKRTADFLWMMIFGAISLLVLSIIPLFNSFFLGIPMVSMLLYVWSRENPNAQINIYGLVQLRSFYLPWAMLLLDVIFGSSLMPGLLGIMVGHLYYFFAVLHPLATGKSYLKTPKWVHKIVARFRIGMQANSPVRPPANGNSGSGVFRGRSYRLNQ

SEQ ID NO: 66664 - protein, 345 aa, Zea mays
  Clone ID: LIB4742-027-B12_FLI.pep
KWACQGHNQNIDGAITGLKDSATGKVEPQDAAPRIDIPVLSLDELIEKTDDFGSTALIGEGSYGRVYYAILDNGTKMAVKKLDSTENEPTAEFLTQVSLVSRLKHENFVDMLGYCMERNLRIVAYEFTTMGSLHDVLHGRKGVQGAQPGLALDWMQRVQIAVDAAKGLEYLHEKVQPSIVHRDIRSSNILLFEDFKAKIADFNLSNQAPDMAARLHSTRVLGTFGYHAPEYAMTGQLTQKSDVYSFGVVLLELLTGRKPVDHTMPRGQQSLVTWATPRLTEDKVKQCVDPRLMGEYPAKGLAKLAAVAALCVQYEAEFRPNMSIVVKALSPLLVTKQTPPPVVDS

SEQ ID NO: 66665 - protein, 233 aa, Zea mays
  Clone ID: LIB4742-029-E7_FLI.pep
PAGKKKKKKISCVSAGGVAAMAASKPILYSAWISSCSFRVRIALNLKGVDYEYRAVTRNDLDYEKINPIKYVPALVDGDFVVSDSLAIILYLEDKYPQHPLLPQDLKKKAINLQIANIVCSSIQPLQCYAVIGLLDGTLGCNQSLQIVRNYTDKGFKAIEKLLEGCDSKYATGDEVQLADVFLAPQMYAGVTRFGIDMSKYPLLERFYKAYMEIPAFQVAVPEKQPDAPASPY

SEQ ID NO: 66666 - protein, 173 aa, Zea mays
  Clone ID: LIB4742-031-C4_FLI.pep
SVFARVFSPYKSPFLTPEPHSPPPRAPARFTSLGAHRSEEMAVPLLTKKIVKKRVKQFKRPHLDRYKCLKPSWRRPKGIDSRVRRKFKGCTLMPNIGYGSDKSTRHYLPNKFKKFVVHNVSELELLMMHNRTYCAEIAHNVSTKKRKEIVERAAQLDIVVTNKLARLRSQEDE

SEQ ID NO: 66667 - protein, 155 aa, Zea mays
  Clone ID: LIB4742-040-F8_FLI.pep
AGREAAPNQREHPDQTPKSIAMAMKPAAAAPPTPAAAHSVFVYGSLMADEVVRTILKRVPPAAPALLPNYHRFNIKGRIYPAILPVESKRVAGRVIMGVTDEELQLLDTFEDVEYTRTRVEISLADSSENMLADTYVWSDAEDLNLYGEWDFEVI

SEQ ID NO: 66668 - protein, 193 aa, Zea mays
  Clone ID: LIB4742-044-E9_FLI.pep
PAGTKEIHKAILASPYQSILPETLLQSTEFCLLRRIELESTMSLVRRSNVFDPFSMDLWDPFDTMFRSIVPSATSTNSETAAFASARIDWKEMPEAHVFKADLPGVKKEEVKVEVEDGNMLVISGQRSREKEDKDDKWHRVERSSGQFVRRFRLPENTKVDQVKAGLENGVLTVTVPKAEEKKPEVKAIEISG

SEQ ID NO: 66669 - protein, 167 aa, Zea mays
  Clone ID: LIB4742-044-H10_FLI.pep
STLRFPLRSTCSLPTTEPMADQLTDDQIAEFKEAFSLFDKDGDGCITTKELGTVMRSLGQNPTEAELQDMINEVDADGNGTIDFPEFLNLMARKMKDTDSEEELKEAFRVFDKDQNGFISAAELRHVMTNLGEKLTDEEVDEMIREADVDGDGQINYEEFVKVMMAK

SEQ ID NO: 66670 - protein, 168 aa, Zea mays
  Clone ID: LIB4742-046-F8_FLI.pep
KRQDHHHRHVRAGPSSLRRRSRHGRGAVLLDLGQEVLLPGTDDGLHRHPVLDEVEGRHRLDIVGRGNFLQLVHVHLQEHSLGELLGVLDEQWRDEAAGAAPGGREVNDHQLAGLLGLGHVGVEVGLGVAGDHDSLLLGRHSSLLPRWDRELLVLIEVFFRGVDCKISF

SEQ ID NO: 66671 - protein, 181 aa, Zea mays
  Clone ID: LIB4742-051-B6_FLI.pep
YSSVQSASPHLTDSQSSQLQSWCKRTVAEQDAGRGPAIGVAPAPLAGPRAPLLLHLRQHRWSRGGTEDVVHRQAVGVERDPGAEPGLRVLPGELRRDPEGRAVLLPGQPRVPRRRRHEPLLRLQRQAPLELLLQQLRARRAVRPKLWLLHVLLRRSGETKREIHSCLAAGSTASVCRVLVF

SEQ ID NO: 66672 - protein, 299 aa, Zea mays
  Clone ID: LIB4742-062-B2_FLI.pep
AAPKSQTPSTRTMAAQQKIRWGELEEDDGGDLDFLLPPRVVVGPDENGLKKVIEYRFDDDGNKVRVTTTTRVRKLARARLSRSAIERRQWPKFGDALKEDAGSRLTMVSTEEILLERPRAPGSKAEESAASGDPLAMASKGGAVLMVCRTCGKKGDHWTSKCPYKDLAPPTETFTDRPPTSDGPPAPGGPAKGAYVPPTMRGGADRTGDSMRRRNDENSVRVTNLSEDTREPDLLELFRAFGPVSRVYVAVDQKTGSSRGFGFVNFVHREDAEKAINKLNGYGYDNLILRVEWATPRPN

SEQ ID NO: 66673 - protein, 318 aa, Zea mays
  Clone ID: LIB4742-064-B2_FLI.pep
HSRGSFETATNPSFQDRQHLEAAASAPLRPTLERDRPDDHLVVDGSQRSADEGADPEDPVVSPGMVLVVNYGGAKAPRGVDAGAGDRDGGQVDEEHGKPDWKRGEDRHMGVPGVPLGVGGGEDGVDEDEGADDLGAEAVALGVAGRHDVGAAAVAHVQPLLEPLDDARAADGAQALHDDVKHRPGEGQLPRQEQPEGHRRVDVPAGDAGGAVDEGEDHAAEGPGDALDADGGALGGGLGDAHDGEDGDVEEEEGGDELGDAGAVEGPGLELPGLEERRRRGLLVVLVVRALRRRADGLALRELVGAQADVLLLPLHAC

SEQ ID NO: 66674 - protein, 292 aa, Zea mays
  Clone ID: LIB4742-064-E5_FLI.pep
PGKKKKKSDSGALASGLASTVSQSPGPHRPPVFWSPQISHRGTLPEHQPWRSRRASCAASRSTSTPRSLALSAQFPRPPPRPPRRPPRSPIASCASSPSISRGRAARSSASPGRHSSARSPTRSSSSRPPTASRISTRAPPSARSTSRRSGSTSCRHRPTRSGTCSRARPGTASSTSTRAWAARSSSRRSCMAWSSLSPSLSRGTSRNGLPRRMARCGFRRCEPSFIPLARSSLCASAIPFYVTDLMKNNSLMGKTCHWLTFVLLNVECNGCCNVESRCNYRSSMFHGLKFS

SEQ ID NO: 66675 - protein, 537 aa, Zea mays
  Clone ID: LIB4742-064-F10_FLI.pep
GAHRHTNTSRRRQRASLLSHASRQGRERDRRSPSRRRWCGCPPSSSEICLVTDLSDKMVKICCIGAGYVGGPTMAVIALKCPDIEVVVVDISKPRIEAWNSDTLPIYEPGLDDVVKQCRGRNLFFSTDVEKHVAEADIIFVSVNTPTKTRGLGAGKAADLTYWESAARMIADVSKSDKIVVEKSTVPVKTAEAIEKILTHNSKGINYQILSNPEFLAEGTAIEDLFKPDRVLIGGRETPEGRKAVQALKDVYAHWVPEDRILTTNLWSAELSKLAANAFLAQRISSVNAISALCEATGANVTEVAYAVGKDTRIGPKFLNASVGFGGSCFQKDILNLVYICECNGLPEVANYWKQVIKINDYQKSRFVNRVVSSMFNTVAGKKIAVLGFAFKKDTGDTRETPAIDVCKGLLGDKAQISIYDPQVTEDQIQRDLAMNKFDWDHPMHLQPTSPTAVKQVSCVWDAYEATKGAHGLCILTEWDEFKTLDYQKIFDNMQKPAFVFDGRNIIDSEKLREIGFIVYSIGKPLDAWLKDMPAVA

SEQ ID NO: 66676 - protein, 253 aa, Zea mays
  Clone ID: LIB4742-064-F12_FLI.pep
AGRALCLSRVFDFSRRRCSSHIPREDACSSPIDTMAVFSDLHTADGLKSLEAHLAGKTYVSGDSITKDDIKVFAAVPSKPGAEFPNAARWYETVSAAVASRFPGKAVGVNLPAGSAPAAAAPADEAEDDDDLDLFGDETEEDKKAADERAAAAKASSKKKESGKSSVLMDVKPWDDETDMKKLEEAVRSVQMEGLTWGASKLVPVGYGIKKMTIMLTIVDDLVSIDTLIEDHLTQEPINEYVQSCDIVAFNKI

SEQ ID NO: 66677 - protein, 220 aa, Zea mays
  Clone ID: LIB4742-064-H9_FLI.pep
SREGIWENVEADGVEKIPCAGEHADDAAVDHGQAVVRAVHPVAERAVAAEVGHDLDGGDAALHVLELERAHGPGNSRYILRGLQCDLRAACARCRWMDPHVCSSMQRRRRGRRRTHRLRALSFAVAAPGAGGVQLPALVPVGEGDPVEDLAPADGDALQPPRRHRDVAGAPAVAAPRPDLHRRALRAAGRHRGKRAERLCLLIVTCAVISSSSRDTFDRN

SEQ ID NO: 66678 - protein, 159 aa, Zea mays; identical to SEQ ID NO: 50480
  Clone ID: LIB4742-065-D3_FLI.pep

SEQ ID NO: 66679 - protein, 176 aa, Zea mays
  Clone ID: LIB4742-067-A8_FLI.pep
GFDSAAMDAADVWGRSSSSSSSSAAAARRLQARYDLYMGIDDADAGLDEVTEPRGGAESYNCPFCGEDFDFVGLCCHIDDEHAVEAKSGACPICATRVGMDLIGHLTMQHGSYFKMQRRRRVRKVSSGSHSLLSLLRKDLRNGSLQSFLGGSSYVSNPPAAAPDPFVSSNLITASQ

SEQ ID NO: 66680 - protein, 211 aa, Zea mays
  Clone ID: LIB4742-067-B9_FLI.pep
FSRSSSIGCLHSPRRAEGIMSSAPLQIAPVPEHVCYVRCNFCNTILAVSVPSHSMLNIVTVRCGHCTSLLSVNLRGLIQSLPVQNHHYSQQQENFTVQNMGFTENYPEYAPSYRMPTTLSAKGDLDHMLHVRAPEKRQRVPSAYNRFIKEEIRRIKACNPDISHREAFSTAAKNWAHFPNIHFGLGPCESSNNLDEATGAMCHPRKVQDLY

SEQ ID NO: 66681 - protein, 172 aa, Zea mays
  Clone ID: LIB4742-071-A6_FLI.pep
IGYLEAGRGLRPYIRSQISNSLLLRLSRSPSPPFPPPSRSLCAPPPSVKACSCAVPPRPIRQGMATFELYRRSTIGTCLTETLDELVSSGAVSPELAIQVLVQFDKSMTEALEMQVKSKVSVKGHLHTYRFCDNVWTFILTDATFKSEEIQETLGRVKIVACDSKLLQPQHP

SEQ ID NO: 66682 - protein, 167 aa, Zea mays
  Clone ID: LIB4742-073-D3_FLI.pep
IEAGRELSHRDHPPALRLGFTALPSPPRASEAMKLEVMPKQRVLEAEQREEAMEMSGLDLWKHEKPPRICSLPPPLPAPPACDEAALVPPLNFAMVDDGIFRSGFPETANFRFLKSLNLRSIVYLCPEPYPETNTEFLEKNGIRLHQFGIEGRKHLELFSFLLCLAA

SEQ ID NO: 66683 - protein, 243 aa, Zea mays
  Clone ID: LIB4743-039-F9_FLI.pep
GTYLHLTRAPTHLHHAIHRNGRRRRRHRAPPPPVRRISRVRSRRRRVDDLQGVLPRRRGGDEPDGGAHRAGGVLQHVVHQLRRSGGHRRPADDGSHARRGHGGGPRPGHLHVRGPADVRPPHGHELRVHGRRAQRQHALHPWPQRGAQRRPRDEHRRRQRQVPHGARVRAGTHHRLRRHLRDHRRPVHRQRQGLATSISGCFVHTLSFFCVSTLHLHDNLSSLSGIRIYRAQLLLKFQNFTEI

SEQ ID NO: 66684 - protein, 297 aa, Zea mays
  Clone ID: LIB4743-041-H8_FLI.pep
PGDWSYLRSKKLSSSGLPPFCSCAPLPRGAAASLSCAMPPRKRPALPPDEPSPSSKHQPEAQPSEPSKPSPDSEQPIISAAILAQLPPQERLAYKLIFEAGNKGMWMLDIRKKLLMGPNIATKVVRTLVTRRLLKEVSDVRHRSRKIFMATDFQPSAEITGGTWYHDGRLDTDAVTTARRCCQAQVERLGAATVQMIHHGILKDDPRAGYTIDKIRDIIKTMVLDKVLEEVKSTGTGEFRDVRAGTMCYRLVTGAPQGGMMEGIPCGVCPRIDECSPEGIISPSTCVYYKKWLQMDF

SEQ ID NO: 66685 - protein, 319 aa, Zea mays
  Clone ID: LIB4743-047-C4_FLI.pep
LAKGGKMAPLLAAAMNHAAAHPGLRSHLVGPNNESFSRHHLPSSSPQSSKRRCNLSFTTRSARVGSQNGVQMLSPSEIPQRDWFPSDFTFGAATSAYQIEGAWNEDGKGESNWDHFCHNHPERILDGSNSDIGANSYHMYKTDVRLLKEMGMDAYRFSISWPRILPKGTKEGGINPDGIKYYRNLINLLLENGIEPYVTIFHWDVPQALEEKYGGFLDKSHKSIVEDYTYFAKVCFDNFGDKVKNWLTFNEPQTFTSFSYGTGVFAPGRCSPGLDCAYPTGNSLVEPYTAGHNILLAHAEAVDLYNKHYKRDDPHRACV

SEQ ID NO: 66686 - protein, 545 aa, Zea mays; identical to SEQ ID NO: 53246
  Clone ID: LIB4743-047-F5_FLI.pep

SEQ ID NO: 66687 - protein, 213 aa, Zea mays
  Clone ID: LIB4743-049-F3_FLI.pep
LHHLNRPLLDITSCMILMCTQKGHGKVQLVCLIFHFNSFIDNGDRSSLGHHDLDELLVVDLAVAVNIGLTDHLVDLLVSQLLAEVGHDMAELSSRDETILVLVEDAKGLLKLLLGVGVLHLPCHQVQELWEVNGPIAISINLVDHVLQLCFSGVLAKGAHHSSKLLGSDAAVAILIEEAEGLLELRDLLVRELVRHGRWLRRGHAMGKKGKPR

SEQ ID NO: 66688 - protein, 582 aa, Zea mays
  Clone ID: LIB4743-049-G9_FLI.pep
RSMDPHRRSPEYNSLLLAGPRLGPLKQAHARLVVSGHGDSLPLITKLATLAVAAGAASYARLLAASHPAPDSFLFCSLTRATARRGLPAAALAFYRCLLAAALPFSSFAFTSVAKACADLSAIRAGMGIHAHAVLLGLGSNRFVQTSLVVLYSKCGQLDVARKLFDAIRDKSVVAWNAMISGYEQNGLAGRAIEVYREMQMAGEAPDSATFVATLSACAQAGALDLGRQVDKLIVSERMEMNVVLGAALVNMYARCGLVNKAREWFNMLQERNVVTWTSMIAGYGMHGHGGEAVKLFNLMRQQGPPPNDVTFVAVLSACAHAGLVSEGRDAFASMKSVYGLVPRVEHYCSMVDMYGRAGLLDDAMRFIHDSIPGEPGPEVWTAMLGACKMHKDFNLGVEVAERLIALEPESPSHRVLLSNLYALSGKMNHVEKVRDTMIKRRLKKPIGYSLIEIAGVAHLFRMGEKSHPKTSEIYQYLEKLIEKITDVGYVPKTDSVLHELEEEEREFALRYHGEKLAVAFGLMMTSGCTTPIRIIKNLRICEDCHLAIKYMSAVENREIIVRDMHRFHHFKAGKCSCQEYW

SEQ ID NO: 66689 - protein, 535 aa, Zea mays
  Clone ID: LIB4743-050-D5_FLI.pep
HRHTNTSRRRQRASLLSHASRQGRERDRRSPSRRRWCGCPPSSSEICLVTDLSDKMVKICCIGAGYVGGPTMAVIALKCPDIEVVVVDISKPRIEAWNSDTLPTYEPGLDDVVKQCRGRNLFFSTDVEKHVAEADIIFVSVNTPTKTRGLGAGKAADLTYWESAARMIADVSKSDKIVVEKSTVPVKTAEAIEKILTHNSKGINYQILSNPEFLAEGTAIEDLFKPDRVLIGGRETPEGRKAVQALKDVYAHWVPEDRILTTNLWSAELSKLAANAFLAQRISSVNAISALCEATGANVTEVAYAVGKDTRIGPKFLNASVGFGGSCFQKDILNLVYICECNGLPEVANYWKQVIKINDYQKSRFVNRVVSSMFNTVAGKKIAVLGFAFKKDTGDTRETPAIDVCKGLLGDKAQISIYDPQVTEDQIQRDLAMNKFDWDHPMHLQPTSPTAVKQVSCVWDAYEATKGAHGLCILTEWDEFKTLDYQKIFDNMQKPAFVFDGRNIVDSEKLREIGFIVYSVGKPLDAWLKDMPAVA

SEQ ID NO: 66690 - protein, 574 aa, Zea mays
  Clone ID: LIB4743-052-A6_FLI.pep
SSSCYARRRLAPRRRRAADQSESAGADRRSIGHQTMGTPVNIIVGSHVWLEDPGEAWVDGVVTEIKGGDATIATTNGKTVVASLGSVYPKDTEAPPAGVDDMTKLAYLHEPGVLHNLSCRYGLNEIYTYTGNILIAVNPFQRLPYLYDVHMMEQYKGASFGELSPHLFAIADACYRALINDQASQAILVSGESGAGKTETTKMLMRYLAFMGGRSGTEGRTVEQQVLESNPVLEAFGNAKTVKNNNSSRFGKFVEIQFDKNGKISGAAVRTYLLERSRVCQVSDPERNYHCFYMLCSAPPEDVKRFKVGDPRSFHYLNQTNCYEVANVDDAREYIETRNAMDIVGIDQDEQDAIFRVVAAILHLGNVNFSKGQEIDSSKLRDDKSVHHLKTVAELLMCDEKALEDSLCQRVIVTPDGNITKPLDPGSAALSRDALAKTVYSRLFDWIVDKINNSIGQDPDATNIIGVLDIYGFESFKINSFEQLCINLTNEKLQQHFNQHVFKMEQEEYTREEIDWSYVEFVDNQDVLDLIEKKPGGIIALLDEAWYGLWYFERFVLLKKMEKSFEKHVALCTN

SEQ ID NO: 66691 - protein, 210 aa, Zea mays
  Clone ID: LIB4743-053-E1_FLI.pep
KISAAQPVPSSEKKDSAKPAESKTQSTSGMEDLFKDSPAVPLSSAPAVSQVNAKNDIMSLFEKSNMVSPFAAHQQQLALMSQQQALLMAALKAGNAPQMMIPGTANQLNANGTLPFQNWTNLYQNSGSTPAAAQNGATKVANNNQDFSSGTFGFGTPGVYNISPTVPANGATTAGAINNGTASTASSTLPSQSGKDYDFSSLTQGFFTKR

SEQ ID NO: 66692 - protein, 650 aa, Zea mays
  Clone ID: LIB4743-055-D9_FLI.pep
LIATDSSKVLINLVDATSLCLPPPVFRLRHTQMSSFFAVAVALVLSSLIHGTTMATASSEESFFQKCPASSCSEGGPEIRFPFRLATSPLSCGAPGMELVCSKADTVLVHPNLGLCKVTAIWYGGSTITIVPLAAEPEPKCPFQKIISTNLSTDVYRPYGDRATLVSCSAEFIVPSHPASLAGPISCLTNASRRFTYLVPSFRPMDFLPLDCTVLSNSISVPYPASVNAGFNGTARGAVAFGETMLEWRVPNITDVCRDCEAEGRLCGFSSESRQAFCKSKNHSSRLKVIAVTTPVAAVLVLSAMAGAALLHLALKSKYDDEIHRKVEMFLETYRTLKPRRYTFSEVRKMTRRFSSRLGQGGFGSVYKGELPNGGVPVPVAVKMLEDSTGEEEFISEVATIGTIHHANVVRLLGFCSERSRRALVYEFMPNASLEKYIRCSSQEQSLIPTASKMLEIATGIARGIEYLHQGCDQRILHFDIKPSNILLDYNLNPKISDFGLAKLCARDQSVVALTAARGTMGYIAPELYSRNFGTVSCKSDVYSFGMVVLEMVVVSAKRRKYSPAETEDQNDDVCVPEWIYEEIVTGQEPREMARGERDMVRKLAIVALWCIQWNPPNRPSMTTVVNMLTDSLQSLKIPPKPFVSSFVGQ

SEQ ID NO: 66693 - protein, 315 aa, Zea mays
  Clone ID: LIB4743-055-E5_FLI.pep
IYSFTDEMTTTSRDEIVFLDVETTAPTSAGRWWLLEFGAILVCPRKLVEVGSYDTLIRPGDLSAVSRRFTDGVEAIASAPPFKDVADKIFGILDGRVWAGHNIQRFDCPRIREAFADIGRPAPEPAGVIDSLNVLAAEFGRRAGDLKMATLATYFGIGKQKHRSLDDARMNLEVLKHCATVLLLESSLPHVLCGRHQSRQADGAVVTTRRMAAQQTPPPKHEVHQHRPGVLTKLPPFTPVHDRAATATAAPAHAATPTPTTPCGKRNSLGKVVARAVTATTAPLSSSNSTSTNRRPVTATTPFHMILRHSRAILR

SEQ ID NO: 66694 - protein, 454 aa, Zea mays
  Clone ID: LIB4743-061-B7_FLI.pep
RDTMRECISIHIGQAGIQVGNACWELYCLEHGIQADGQMPGDKTIGGGDDAFNTFFSETGAGKHVPRAVFVDLEPTVIDEVRTGTYRQLFHPEQLISGKEDAANNFARGHYTIGKEIVDLCLDRIRKLADNCTGLQGFLVFNAVGGGTGSGLGSLLLERLSVDYGKKSKLGFTVYPSPQVSTSVVEPYNSVLSTHSLLEHTDVAILLDNEAIYDICRRSLDIERPTYTNLNRLVSQVISSLTASLRFDGALNVDVNEFQTNLVPYPRIHFMLSSYAPVISAEKAYHEQLSVAEITNSASEPSSMMAKCDPRHGKYMACCLMYRGDVVPKDVNAAVATIKTKRTIQFVDWCPTGFKCGINYQPPSVVPGGDLAKVQRAVCMISNSTSVVEVFSRIDHKFDLMYAKRAFVHWYVGEGMEEGEFSEAREDLAALEKDYEEVGAEFDEGEDGDEGDEY

SEQ ID NO: 66695 - protein, 171 aa, Zea mays; identical to SEQ ID NO: 66134
  Clone ID: LIB4743-062-H10_FLI.pep

SEQ ID NO: 66696 - protein, 438 aa, Zea mays
  Clone ID: LIB4743-063-B10_FLI.pep
IEPTQQTSARSTSPSRRELAATAAAFSKLTVQDLRKLIPPEFYPSWVSFTQKQKLKWLNQELTKIWPFVNEAASELIKTSVEPIFEQYKSFILASLHFSKLTLGTVAPQFTGVSILESDDSAIIMELELQWDGNPNIVLDIQTTLGISLPVQVKNIGFTGVLRLIFKPLVSEFPCFGAVCCSLREKSKVEFTLKVIGGEMTAIPGISDAIEGTIRDTIEDTLTWPNRIIVPIVPGDYSDLELKPTGVLEVKLVEARDLKNKDLVGKSDPFALIYIRPLHDKTKKSKTINNDLNPIWNEHYEFVVEDISTQHLTVKIYDDEGLQSSEIIGCARVDLTDIQPGKVKDLWLDLVKDLEIQRDKKPRGQVHLELLYYPYAKHEGVPNPFANQIQLTSLEKVLKTESNGYDINQRKNVIMRGVLFGDGHICRGVATYGHWWQG

SEQ ID NO: 66697 - protein, 231 aa, Zea mays; identical to SEQ ID NO: 43391
  Clone ID: LIB4744-022-A2_FLI.pep

SEQ ID NO: 66698 - protein, 139 aa, Zea mays
  Clone ID: LIB4744-037-E9_FLI.pep
PKVPCNHNEQKLSISPTPRKKRSMASEQGVVIACHSKAEFDAHMTKAQEAGKLVVIDFTAAWCGPCRAIAPLFVEHAKKFTHRGLRGRGDADLPLRQERQDGRDHRGCQEGRAPGPDREACRACACVCVCLKEISRRRQ

SEQ ID NO: 66699 - protein, 231 aa, Zea mays; identical to SEQ ID NO: 43391
  Clone ID: LIB4744-042-H7_FLI.pep

SEQ ID NO: 66700 - protein, 210 aa, Zea mays
  Clone ID: LIB4744-047-B7_FLI.pep
PMAARCSTAASVVRTGSRDLSPSFSFTAAALPSARLRPVGAWVRGGGYTCRLRAVCAMGSAPSSSQSPSPHTPSGQTQGKADYKSLSEEEWKKRLTEEQYYVTRQKGTERAFTGEYWNTKTPGIYQCVCCDTPLFQSSTKFDSGTGWPSYYKPIGENVKSKLDMSIIFMPRTEVLCATCDAHLGHVFDDGPPPTGKRYCINSASLKLKPQ

SEQ ID NO: 66701 - protein, 132 aa, Zea mays
  Clone ID: LIB4744-047-E12_FLI.pep
WLASVRRPHYHAPAPLVSIFASSIAGFSGHGRRQRPEVQDGAREERREEQGRQRQPAGGQQEGHEHPVQDLHADLHLHHLRGQVQRTCGGEASQERPLPVLPPPQELVSSRSICSAQLKDKYYIYIYTLCVN

SEQ ID NO: 66702 - protein, 158 aa, Zea mays
  Clone ID: LIB4744-049-E9_FLI.pep
RTNSCSDHELAEVDDGGCAEQQEDAAGGGRAGGGGAAGFVRVGGDHLRAGGVVAGAVHPLRDGEGQRAPLVVLQRRQEPQQRGADQRGPPGGVPLPQEPRQQRQERQHGHRRHHPRQVRRLRRIPHQHVHRLQQDQLSYDDQANKPTERTRTSRALHE

SEQ ID NO: 66703 - protein, 142 aa, Zea mays
  Clone ID: LIB4744-054-F11_FLI.pep
YHPTPLLKTLASAAAAADSSFSIPSQSAAVAPSNMAPKKDKAPPPSSKPAKSGGGKQKKKKWSKGKLKEKVNNAVLFDQATYDKLLSEVPKYKQITPSILSERLRINGSLARRAIKDLMARGLIRLVSVHSSQQIYTRATNT

SEQ ID NO: 66704 - protein, 178 aa, Zea mays
  Clone ID: LIB4744-055-C4_FLI.pep
PQDFMFLSRCLRWRLGPLAADPPCQLNVLWHDGHTLSMDGAQVGVLKQANKVCLSSLLEGKHRMALETQISFEVLCNFPDEPLEGQLPDQQLSALLILADLTEGNSSRAVAVRLLHSTSGGGRLTGSLGGKLLPGSLPSRGLASSLLGTSHLSRFFGLSARFESGGRRARNGRPEKSR

SEQ ID NO: 66705 - protein, 382 aa, Zea mays
  Clone ID: LIB4744-055-F10_FLI.pep
RDSPFALFTIPPQNTSCDPRSLRRASIMSAYCGKYADELIKNAAYIGTPGKGILAADESTGTIGKRLSSINVENVEENRRALRELLFCCPGALQYISGVILFEETLYQKTKDGKPFVDVLKEGGVLPGIKVDKGTIEVVGTDKETTTQGHDDLGKRRAKYYEAGARFAKWRAVLKIGPNEPSQLAIDLNAQGLARYAIICQENGLVPIVEPEILVDGPHDIDRCAYVTETVLAACYKALNEHHVLLEGTLLKPNMVTPGSDSKKVTPEVIAQYTVRTLQRTVPAAVPAVVFLSGGQSEEEATLNLNAMNKLSTKKPWALSFSFGRALQASTLKAWAGKVENVEKARAAFLARCKANSEATLGTYKGDAAADTESLHVKDYKY

SEQ ID NO: 66706 - protein, 114 aa, Zea mays
  Clone ID: LIB4744-058-D12_FLI.pep
FAAGLSMILSFRGPLCASSLFFDAERSSLTVLLGLSSWLPLLFFTAAWVAAAAFRGSLSLLLLAKAERRTLPLLCADLKGYLLLGDTSDPFLPILLFVCHTLVPNVVVALNKTK

SEQ ID NO: 66707 - protein, 312 aa, Zea mays
  Clone ID: LIB4744-058-E10_FLI.pep
VARHCSTAKPRSSRVAPEGAEGLDGASPEDVLVVEGRDGSAHEGAHPEDPVVVPGLVLVVDDGGAQAPGRVDAGAGDGDGGQVHHEHGEADGEGSQNRDVGVAGVALGVGGGEDGVDEHEGADDLGAEAGAAGVAGGERVGAAAVPVEVGALERLDEADAADGAEALRHDVEQRAHQGDLARQEEAEGDGGVDVAPRDAGGAVDEDEDHAAEGPGDAQHPHAAARRVGARRRRVRLVLVPDHGGHRDVQEQQRGDELGDHGAVQRPGPQLSRVDQRRRGRVRVVLGSELAAASAALDHVVLAHRLLEPPRLA

SEQ ID NO: 66708 - protein, 158 aa, Zea mays; identical to SEQ ID NO: 66702
  Clone ID: LIB4744-064-A12_FLI.pep

SEQ ID NO: 66709 - protein, 231 aa, Zea mays
  Clone ID: LIB4744-066-A12_FLI.pep
RVTAVYNLPDTNRREPPLDLVELVCLHHRISLGNGVPGSSPVVELAVVLVGVAVERAVQVPTPAVESREPNPLPAGAAPVRPYLPPFGDRRHPLAGSGNISGLLHVHCLQLDLGNSYYRVAASNNRLHDGVAAVHDAVDRGGSQLGLILLRYHLLVALRAHVHGRRAAEEATVIDAEDGSLGGLAPSLLVLHGFLNSDETALFAIPLRRSPRGRRGGEGRGIAGNSVGFEM

SEQ ID NO: 66710 - protein, 149 aa, Zea mays
  Clone ID: LIB4744-072-E3_FLI.pep
LPTMVEEEITEGLKNLTVTGDAAASGGEGQRRGGGISSNRIQVSNTKKPLFFYVNLAKRYMQQHGDVELSALGMAIATVVTVAEILKNNGFAVEKKIRTSTVDINDESRGRPFQKAKIEIILGKSDRFNELMAAAAEERGEVEEGEEQA

SEQ ID NO: 66711 - protein, 229 aa, Zea mays
  Clone ID: LIB4744-074-A8_FLI.pep
PLHCWMKHGPLSRGAPSLVIIFILLTTLFIILVIDLRLGLVRLLFIFLLFLLGRSLLSCSALALVVGSDGLVVLELELVSLGYIGSLVRLAQGFPPVASSFPHRSDRLVLRVLLLELLAKFLHEHEESAGSPLRLVGVLAGLPFPALGGLLRPLALHRQLGIGLGGALGFGPLHGGFERRHGAQRSDPRLAEGIPVAGGRIGVESRAKLPLAARGEREGGKGKGRRRAL

SEQ ID NO: 66712 - protein, 250 aa, Zea mays
  Clone ID: LIB4744-074-F8_FLI.pep
GFCGPIAYSRGLPPFALLAETATMAKQQNPIPIPMPLSLSLPLVLVALLLPAARGAAETPQYTTVHAESDFEVRLYGDTVWMSAPTPDIPSFHVATKLGFHRLFQYLMGANLNSSRIRMTTPVLTSVVPGAGPLRSSAYSVRLYLPAKFQASPPVPLPELNLHPDRWPGHCVAARSFSGRARDKNVVEEAEKLAMSLSRSPWANSTDYSSKSAYSVAQYSSPFRIIGRVNEVWFDVNCRSTSTAAGVESY

SEQ ID NO: 66713 - protein, 179 aa, Zea mays
  Clone ID: LIB4744-077-H8_FLI.pep
PQDFMFLSRCLRWRLGPLAADPPCQLNVLWHDGHTLSMDGAQVGVLKQANKVCLSSLLEGKHRMALETQISFEVLCNFPDEPLEGQLPDQQLSALLILADLTEGNSSRAVAVRLLHSTSGGGRLTGSLGGKLLPGSLPSRGLASSLLGTSHLSRFFGLSARFESGGRRARNGRPEKFSR

SEQ ID NO: 66714 - protein, 179 aa, Zea mays; identical to SEQ ID NO: 38879
  Clone ID: LIB4744-079-B6_FLI.pep

SEQ ID NO: 66715 - protein, 172 aa, Zea mays; identical to SEQ ID NO: 41503
  Clone ID: LIB4744-080-C4_FLI.pep

SEQ ID NO: 66716 - protein, 266 aa, Zea mays
  Clone ID: LIB4744-081-D2_FLI.pep
QKKKKNLSSSVNLRCAFGRVELMEQDKRAKVLCLHGFRTSGSFLKKQISKWHPSIFQQFEMVFPDGLFPAGGKSEIEGIFPPPYFEWFQFNKEFTEYTNLDECISYLCDYMVKNGPFDGLLGFSQGATLSALLIGYQAQGKLLSNHPPIKFMVSISGSKFRDPIICDVAYKDPIKVKSVHFIGEKDWLKVPSEELASAFDEPLIIRHPQGHTVPRLDDVSVKQLSEWSSHVLEDLKSADVPEALDSGKPSDKEAAGAEFTENLVKA

SEQ ID NO: 66717 - protein, 226 aa, Zea mays
  Clone ID: LIB4744-084-F10_FLI.pep
AVQAELMATSEPVQESLVVHYSQPSRPRVLLAASGSVAAIKFESLCRSFSEWADVRAVATTSSLHFVDRSSLPSGIVLYTDDDEWSTWKKIGDEVLHIELRKWADVMVIAPLSANTLAKIAGGLCDNLLTCIVRAWDYSKPLFVAPAMNTLMWNNPFTERHLHTINQLGIALIPPVTKRLACGDYGNGAMAETSQIHTAVRLACKTQPHDASSSLAGPVSNNRPSS

SEQ ID NO: 66718 - protein, 216 aa, Zea mays
  Clone ID: LIB4745-005-D9_FLI.pep
AGRVWMGVFISMRLRMNNHQQQLQAWRKKKGIAAGSGMGTSPVIPATMLFVALLVAVCFGATAARSSHARHTDADDAIRLPSSFGAGGRPWNCCDSAIKDASLPAWRCNDVVDKCSADCQDCEASPAGDGFVCGDFILSLTEPPVCTPRPWDCCDSVACTRDYIPNCMCLDKVESCSSNCERCEFLYHSDPPRFQCRDIFHGYPGPKCRTWISTSN

SEQ ID NO: 66719 - protein, 407 aa, Zea mays; identical to SEQ ID NO: 40601
  Clone ID: LIB4745-008-D10_FLI.pep

SEQ ID NO: 66720 - protein, 546 aa, Zea mays
  Clone ID: LIB4745-008-H7_FLI.pep
EISRATAQATTEMSPQPAPDLAEDKERDTNVFIEAAPGSPAKVAEGDGHGHGSPPTSPVAWFRMLARELHWSFVFGVVATYGISQGLGGGISRVASDYYWKDVQRVQPSVAQVYQGVTSIPWMVKPLWGLLTDVLPVAGYRRRPYFILAGFIGVIAMLILALYSKLHALFALLALMTGSASVAIADVTIDACVAENSIVYPHLAADMISLNGFCSSVGGLIGFSISGFLVHAIGAQGALGLLTIPSALVILSGTLLKEVHIPNFPYEQAHKKFVEASGKMLTALKCPEVWRPCVYMYISLALSVDIQEGMFFWYTDQSAGLSFHEGFIGFMFAIGSVGSLVGVILYQNILKDHSFRSLLFSSQLLLSLAGMLDLILVLRLNLKMGIPDYYFAVIDEGVSKMINRIKWMPLLVLSSKLCPTGIEGTFYALLMSIDNIGSLTGSWVGGLLLHLLRITRTEFKNLWAAILIRNMMRLLPLALLFLVPRSDPNSTLLPSDLLNEGDDDEAQRVENVELTPLPANRNSCDGKSLHDGERDDDEASLLANRS

SEQ ID NO: 66721 - protein, 567 aa, Zea mays
  Clone ID: LIB4745-012-C8_FLI.pep
LTRPCAFLPPPLPPPRVTTERQTERMAAPDARPSSAGPPPARSLLLPLLLVLLLAAYSLPADSAARPSSNSNPRPAFTPPLLKRHQLRRPSSSSAELVAGPANASTKPFTAHYFPQLLDHFAFTPNASTVFRHKYLLNDTFWRRPGAGAGDDGPGPLFVYTGNEGDIEWFATNTGFMFDIAPTFGALLVFIEHRFYGESKPFGNDSYRSAETLGYLTSTQALADFAVVIRGLKRDLGAEAAPVVVFGGSYGGMLASWFRLKYPHVAIGALASSAPILQFDHITPWSSFYDAVSQDFKSESSNCFGVIRAAWDVLDERGATDKGLLDLSKLFRACKTVKYAYSIRNWLWTAFTYTAMVDYPTPANFLENLPAYPVKEMCKTIDAFPAGADVLEKAFAAASLYYNYTGDQACNKIEDGDDPHGLDGWQWQACTEMIMPMTISNESMFPPSAFSYDDRSDECFQSWGVRPRPHWITTEYGGYKIDKVLKRFGSNIIFSNGMRDPWSRGGVLKNISSSIIALVTEKGAHHLDLRSSTKGDPDWLIEQRRQEVEIIQGWIDQYHQDMAETSS

SEQ ID NO: 66722 - protein, 761 aa, Zea mays
  Clone ID: LIB4745-013-E1_FLI.pep
GQEEQHHPVHHELFCTRLAGHRLLLASKSFIYGVRAFCSNPSPAAMECDNGRVAATNGDSLCMALPRAADPLNWGKAAEEMMGSHLDEVKRMVAEYRQPLVKIEGASLRIAQVAAVAAGAGEARVELDESARGRVKASSDWVRDSMMNGTDSYGVTTGFGATSHRRTKEGGALQRELIRFLNAGAFGIGTDAGHVLPAEATRAAMLVRINTLLQGYSGIRFEILEAIVKLLNANVTPCLPLRGTVTASGDLVPLSYIAGLVTGRENAVAVAPDGTKVNAAEAFRIAGIQSGFFELQPKEGLAMVNGTAVGSGLASTVLFEANVLAVLAEVLSAVFCEVMNGKPEYTDHLTHKLKHHPGQIEAAAIMEHILEGSSYMKLAKKLGELDPLMKPKQDRYALRTSPQWLGPQIEVIRASTKSIEREINSVNDNPLIDVARSKALHGGNFQGTPIGVSMDNTRLAVAAIGKLMFAQFSELVNDYYNNGLPSNLSGGRNPSLDYGFKGAEIAMASYCSELQFLGNPVTNHVQSAEQHNQDVNSLGLISSRKTAEAIEILKLMSSTFLIALCQAVDLRHIEENVKSAVKSCVMTVAKKTLSTNSTGGLHVARFCEKDLLQEIEREAVFAYADDPCSANYPLMKKLRNVLVERALANGTAEFDAETSVFAKVAQFEEELRTALPSAVEAARAAVENGTAAIPNRITECRSYPLYRFVREELGAVYLTGEKTRSPGEELNKVLVAINQGKHIDPLLECLKEWNGEPLPIC

SEQ ID NO: 66723 - protein, 488 aa, Zea mays
  Clone ID: LIB4745-014-D6_FLI.pep
SSTPPDPLSSSSGLGDPSVPGSFGAEVWPGKMANIRALLVGLSRARGSLAEAGRCASTRPSILASLGAHYKIPMPARWFSSTGLPPHLVVGMPALSPTMVTSRNGENRKGTRYLAKILAPEGSKDVQVGQPIAVTVEDVEDIKSIPADTSFGGEQKEEQSTESALQNKVVNVSEQSSTVSRISPAAKLLIKEHGLDTSLLRASGPRGTLLKGDVLAALKSGISSSSTKEKKSPAQPSSQPTRDSQSQASSISKKDDTYEDVPNSQIRKVIAKRLLESKQTTPHLYLSKDVVLDPLLAFRNELKVLHGIKVSVNDIIIKAVAIALRNVPEANAYWNNDKEETQKCDSVDISIAVATEKGLMTPIIRNADQKTISAISAEVKQLTEKARAGKLAPNEFQGGTFSISNLGMYPVDHFCAIINPPQSGILAVGRGNKVVEPVVDSDGTEKAAAVTKMSLTLSADHRVFDGQVGGKFFTELALNFSDIRRLLL

SEQ ID NO: 66724 - protein, 717 aa, Zea mays
  Clone ID: LIB4745-017-A6_FLI.pep
SVLGFPPSYRFLVPAAAAQTLANPSSAMADDHYSSKRKYDDPSPPPRRTGFSSGPPPASPPAGGAPSYNSVAPPPDEIQLAKQRAQEIAARIFNAAEAKRPRVDNGDDDVGGFGGGSSLGGSGGGGGGRIGGAGLGFSSSAGGGHGASIPPLSSQSSAPQYSYGGHQGTSKKIEIPNGRVGVIIGKAGETIRYIQLQSGAKIQVTRDHEAEPGALTRQVELSGNPEQISKAEQLIKEVIAEADAGSSGAVSGGRKYNAPQPGAETFQMKIANNKVGLIIGKGGETIKSMQAKSGARIQVIPLHLPAGDTSTERTVHIDGTQEQIEHAKQLVAEVTSENRARNPMSGGYSQQGYHPPRPQSNWGPPSAPPQQSGYGYMQPGAYPGAPPQYGAPQQPYGSYPPTSGGYQTGWDQSQNQQSHTTPPGTGYDYYSQQQQPQQQQSAPGTAASTDATSYNYGQPSTYASQGYDSTYTQHSGGQQAYGHDGYSGYQTQGQQQGYSQQTGYDQQGYGASAYGSAANLTQDGSSYGGPGGATQASPGQQTSTPAAGSHPGYASQPPTSAAASYPVQGSAPSGYGAPPPQPGYGTQPPQQGGYGPGAYGQPSPHGEKPPASSPYGQAPPPGSAQGGYVQYGYSQPAYGAPPAYPGAPTASHPGYGQQQSYGDAYGSGSYGQPTAYTTEAAAPAASQDHSAAPAAAPGTTAAPAPDNNGGAKTSAET

SEQ ID NO: 66725 - protein, 170 aa, Zea mays
  Clone ID: LIB4746-002-E8_FLI.pep
LCAGELLLLVRLDDDVRGGVGVAGEHPAGGDLAVVEVALVGLVHGAGDDLAGARGAGPRAAGVGQVDAVLLGLVQDVHVVGHLQLHLPLWRDQLHVVGGLRAQPAPAAGATAHDAHLGRRQRHGGRRRRGAEGGRRKEEGRRAGAAQDGGHCCGGSGRGGVAAGAVRGLP

SEQ ID NO: 66726 - protein, 220 aa, Zea mays
  Clone ID: LIB4746-004-F4_FLI.pep
RGRTYRLSRGPPTPMESWRRRTLLKVIVLGDSGVGKTSLMNQYVSKKFSQQYKATIGADFLTKEVLIGDRLVTLQIWDTAGQERFQSLGVAFYRGADCCVLVYDVNVKRSFNTLDTWHDEFLNQAGPSDPQRFPFILVGNKIDLDGGNKRMVPEKKAREWCASKGDIPYFETSAKEDHNVDTAFLCIARLALEHEHDQDIYFKTVAEQVPDTEQTSGCAC

SEQ ID NO: 66727 - protein, 135 aa, Zea mays
  Clone ID: LIB4746-005-B3_FLI.pep
LGAAAAAMAASMISSSALAVAPQGLPPLGRRASSFAVVCSKKKIKTDKPYGIGGGLTVDVDANGRKGKGKGVYQFVDKYGANVDGYSPIYNEDDWSPTGDVYVGGTTGLLIWAVTLAGILGGGALLVYNTSALSG

SEQ ID NO: 66728 - protein, 203 aa, Zea mays
  Clone ID: LIB4746-005-E8_FLI.pep
PGQLSHRDHPPALRLGFTALPSPPRASEAMKLEVMPKQRVLEAEQREEAMEMSGLDLWKHEKPPRICSLPPPLPAPPACDEAALVPPLNFAMVDDGIFRSGFPETANFRFLKSLNLRSIVYLCPEPYPETNTEFLEKNGIRLHQFGIEGRKVRKTWFQRNPLLLRGWLAIVHGGVELLLEGLKYGLLSVTSMMYGLFAPSRRC

SEQ ID NO: 66729 - protein, 461 aa, Zea mays
  Clone ID: LIB4746-007-B12_FLI.pep
PGTAFFPFSCENMATTLRQRTAPATQSKKERRDSDVLSTSSDEDTSPVSHLENTFPPFEVPNFTTKEVLGAIPAECFERSAAISFAYVARDFAFVAALGYAASFIEPALGSNGHVLNGWAGFAAKWAAWAAYWTVQGWVMTGIWILGHECGHQAFSTSKTLNNTVGLFLHSFVLVPYHSWRISHAKHHAATGHLTRDEVFVPRTLSERKFKENPKKVEVAPGIVLDELLEDAPIYRLGWLIVQQLFGWPAYLFTNASGQLSYPAWTNHFDPKSLIFDARHRADVLITDAFLIGMLTLLTLFGQKVGGFGEVVKYYGIPYLAVNHWLVCITYLQHTDPSLPHYDATEWNFVRGALCTMDRNLLGPVGPYLMHGICETHVAHHLCSRIPHHNAYAATEALKKFLGPHYASTDESMFVSLWKSYKQCRYVDDEGSVRMYRDAYGRARRTVAPVEVPSDSGVDFE

SEQ ID NO: 66730 - protein, 211 aa, Zea mays; identical to SEQ ID NO: 62322
  Clone ID: LIB4746-007-C8_FLI.pep

SEQ ID NO: 66731 - protein, 136 aa, Zea mays; identical to SEQ ID NO: 36723
  Clone ID: LIB4746-008-H5_FLI.pep

SEQ ID NO: 66732 - protein, 269 aa, Zea mays
  Clone ID: LIB4746-009-A6_FLI.pep
PGRLRSQLSVTRKRKLPSSYQPAGRGSARTARMATAGGGAGHLKLLGAWPSPFVNRVRMALHLKGLEYENVEEDLTNKSDLLLASNPVHKLVPVLLHGDKPISESLVIVEYLDDAFPGAGQAVLPADPYERAVARFWAKYVDGKLHGMMVKALMGATEEERATATVDALAAMDTLEGAFAECSGGKKFFAGDAPGYLDVALGGFIGWLRAWDKVGGVKLLDAGRVPRLATWAERFAALDVAKEVIPDPDHIAEFAKVLQARSAAAATSN

SEQ ID NO: 66733 - protein, 541 aa, Zea mays
  Clone ID: LIB4746-010-A4_FLI.pep
REQVVSNESHIPLSTRARVSSVSPCPTPSSIPAPEAPAKRPPLNKYALACAVLASMNSILLGYDVSVMSGAQLFMKQDLKITDTQIEILAGIINIYSLVGSLAAGRTSDWLGRRYTMVLAAAIFFAGALIMGLAPSYAILMLGRFVAGVGVGYALMIAPVYTAEVSPTSARGLLTSFPEVFINTGVLLGYVSNYAFHGLPVHLSWRVMFLVGAVPPIFLALGVLAMPESPRWLVMQGRIGDARRVLAKTSNSPAEAEERLADIKNAIGVPDGVGDNDDDVVVVARRNKGSHGEGVWRDLLIRPTPPVRRILIACLGLQFFQQASGIDSVVLYSPRVFEKAGLRSNNNSLGATMAVGATKTLFILVATFFLDRVGRRPLLLTSAGGMVVSLVTLASALRAIDRLPEGQATSLAGVSIAAVLTFVASFSIGMGPIAWVYSSEIFPLRLRAQGCALGTAMNRVMSGTITMSFISLYKAITFAGSFYLYAGIAAAGWLFMFFFLPETRGSNLEDTEKLFGGGDHDEDKEDGHDAQKSTELSSNQQ

SEQ ID NO: 66734 - protein, 140 aa, Zea mays
  Clone ID: LIB4746-010-D4_FLI.pep
GMEEPVPADPPRIFWKSRRSGSANGRSLQQEPDKDATEETNEQAQEEPMKTDDATDTAAATAEPYPKANLSEKRKALFEPLEPINGKRGAAETLLPPPDFEPASYPKGWLVGKKRKLVNVDVVESMRRIAIQEMNRKVHA

SEQ ID NO: 66735 - protein, 235 aa, Zea mays
  Clone ID: LIB4746-010-H11_FLI.pep
RLGFSRPAAMATEQEAENYTVEDLVALNPYNPDILNDLEKFVNEQVASQTYNLDANLSLLRLYQFEPGRMSIHIVAHILIKALMAMPAPDFSLCLFLIPEHVQMEEQFKALIVLSHYLETARFRQFWDDAANNRHILEAVPGFEQAIQSYAIHVLSLTYQKVPRHILAEAINIEGLALDKFLEYHAANSGWVIEKGGQSQVIVLPRNEFNHPQLKKNTADTAPFEHLTRIFPVLS

SEQ ID NO: 66736 - protein, 369 aa, Zea mays
  Clone ID: LIB4746-011-C3_FLI.pep
GGERGCFSLSASIRRERSRLVVENLFNLLNDVVGQFGQEVEGLKVLHELFGLGRSEDDSRNVGVLGAPSEGERGLVRSAEAFRNVSEFAHLCNLCFTLFSFEFLDRVGVHRRSLEPRVFRDAIVVLAGEHATCERGPNSGTVAVVLEEDVVLDFEPFSVEHVVLALFGDGADQAQFVADAIRLCDLGRTPLARSPVEDFVLLDERVDGADRLLDRGAVVGSVQKHDVDIVHLEAFERSFESLDDVLAGRAALVRVRLASTEEDLGRDDDLGAVNVEFLESATHLSLGFSVRVDLGVVKEVDSVIKSRLDDLDDGVALDRSAGREPSSVREKRDTESRVSEGTENRSWGRIGTASSLVCLESVGLEKGVP

SEQ ID NO: 66737 - protein, 136 aa, Zea mays; identical to SEQ ID NO: 36723
  Clone ID: LIB4746-012-A3_FLI.pep

SEQ ID NO: 66738 - protein, 267 aa, Zea mays
  Clone ID: LIB4746-013-E3_FLI.pep
LLPSAAASSTSGRAPNAVPPMATAAATADLSAADDKQRDSALPELTTEFMVDMKCEGCVTAVKNKLQTLEGIKNIEVDLSNQVVRVLGSLPVKTMLDALHQTGRDARLIGQGNPNDFLVSAAVAEFKGPVVFGVVRLAQVNMELARVEATFSGLSPGKHGWSINQFGDLTRGAESTGNVYNPPDHLSDKPLGDLGTLEAGENGEAHFSGPKEKLRVVDLIGRSIALYATEDRSDPGIAAAVIARSAGVGENYKKLCTCDGVTIWESS

SEQ ID NO: 66739 - protein, 199 aa, Zea mays
  Clone ID: LIB4746-016-F5_FLI.pep
YCVIDNKIKHNRRPKCWVNKSGSTTRQQYSTTLSMKLTSSSTSVLDLLLGPQLVAVTTLLLAAVDSPRVQACIAFAADHLVLVVLASERLQRGLNDSTAEPKHEVERRLLLDVIVRKGAAILQLLPGKDQPLLVRRDPFLVLDLGLDIVDGVAALNLEGDGLPCQRLHKDLHLVGPGRSPGCCDCCGGGGGFSSPRNFP

SEQ ID NO: 66740 - protein, 469 aa, Zea mays
  Clone ID: LIB4746-018-H12_FLI.pep
SVIYSSCRSSMITLIRCMGALQVLTTTLLLLVGSRHSSAVSPPSGYRSTLTHVDSHGGFTKAELMRRAAHRSRHRAFMMLLPRYSTMSTSSNAGPARLRSGQAEYLMELAIGTPPVPFVALADTGSDLTWTQCKPCKLCFPQDTPIYDTAASASFSPVPCASATCLPIWRSSRNCTATTTSPCRYRYAYDDGAYSAGVLGTETLTFAGSSPGAPGPGVSVGGVAFGCGVDNGGLSYNSTGTVGLGRGSLSLVAQLGVGKFSYCLTDFFNTSLGSPVLFGSLAELAAPSTIGGAAVQSTPLVQGPYNPSRYYVSLEGISLGDARLPIPNGTFDLRDDGSGGMIVDSGTIFTVLVESAFRVVVNHVAGVLNQPVVNASSLDSPCFPATAGEQQLPDMPDMLLHFAGGADMRLHRDNYMSFNQESSSFCLNIAGAPSAYGSILGNFQQQNIQMLFDITVGQLSFVPTDCSKL

SEQ ID NO: 66741 - protein, 452 aa, Zea mays; identical to SEQ ID NO: 44998
  Clone ID: LIB4746-020-F12_FLI.pep

SEQ ID NO: 66742 - protein, 136 aa, Zea mays; identical to SEQ ID NO: 36723
  Clone ID: LIB4746-022-A8_FLI.pep

SEQ ID NO: 66743 - protein, 172 aa, Zea mays
  Clone ID: LIB4746-022-E9_FLI.pep
SAGAEMLVYQDLLSGDELLSDSFTYKELENGVLWEVEGKWVTQSPVDVDIGANPSAEGGEDESVDDTAVKVVDIVDTFRLQEQPPFDKKSFVSYIKKYIKNLTAVLEPEKADEFKKGVEGATKFLLSKLKDLQFFVGESMKDEASVVFAYYKDGATNPTFLYFSHGLKEIKC

SEQ ID NO: 66744 - protein, 251 aa, Zea mays
  Clone ID: LIB4746-022-F6_FLI.pep
RALCLSRVFDFSRRRCSSHIPREDACSSPIDTMAVFSDLHTADGLKSLEAHLAGKTYVSGDSITKDDIKVFAAVPSKPGAEFPNAARWYETVSAAVASRFPGKAVGVNLPAGSAPAAAAPADEAEDDDDLDLFGDETEEDKKAADERAAAAKASSKKKESGKSSVLMDVKPWDDETDMKKLEEAVRSVQMEGLTWGASKLVPVGYGIKKMTIMLTIVDDLVSIDTLIEDHLTQEPINEYVQSCDIVAFNKI

SEQ ID NO: 66745 - protein, 310 aa, Zea mays
  Clone ID: LIB4746-025-A7_FLI.pep
QAAPHTNLSTPRRVRGGAAMASSVAAAASTFLGTRLADPAPQNGRIVARFGFGLGGKAKPAPKKVAKTSTSSDRPLWFPGAVAPDYLDGSLVGDYGFDPFGLGKPVEYLQFELDSLDQNLAKNEAGGIIGTRFESSEVKSTPLQPYSEVFGLQRFRECELIHGRWAMLATLGALSVEWLTGVTWQDAGKVELVDGSSYLGQPLPFSISTLIWIEVLVIGYIEFQRNAELDPEKRLYPGGSYFDPLGLAADPEKKERLQLAEIKHARLAMVAFLGFAVQAAATGKGPLNNWATHLSDPLHTTIFDTFGGSS

SEQ ID NO: 66746 - protein, 461 aa, Zea mays
  Clone ID: LIB4746-025-C3_FLI.pep
RGGPLAALLLLAACAAFFPAAGAAGTPDGSEEWGYVEVRPKAHMFWWLYHSPQRVDNGKTPWPTVLWLQGGPGASGVGYGNFMEIGPLDEKLKPRATTWLAKADLLFVDNPVGTGFSYVDGGDKSLMAHTDAEAARDLVTLLCALYRDSPRLRASPLYIVAESYGGKFAVTTALAALRAVDQGRLGVHLAGVALGDSWISPLDFVLSWGPLLYQVSRVDEKGLQQCNSVAAKIKEQLEKGQFADAEASWSELEGVVLASSNSVNFYNFLKDEASGDATATATAAVSTLASFRRRGGYSGYLSSMAASSSSSAGGFDGLMNTVIKKKLGIIPKDLKWGEQSDDVFDALAGDFMKPRIQEVDQLLKLGVNVTIYSGQLDLICATKGTMDWVQKLKWDDLNSFLSSPRTPIYCDKEGQSGTQAFVKSYKNLNFYWILEAGHMVPLDNPCPALKMLADITRSPAE

SEQ ID NO: 66747 - protein, 220 aa, Zea mays
  Clone ID: LIB4746-025-F2_FLI.pep
IDPRSTAMVRMKQVKISVKKDVDSYTIRGTNKVVHVGDCVLMRASDSDKQPYVARVEKMEADGRGSVRVQVRWYYRPEESKGGRRQFHGAKELFLSDHFDLQSAHTIEGKCVVHSFKNYTKLDNVGPEDYFSRFEYKAATGSFTPDRVAVYCKCEMPYNPDDLMVQCEACKDWFHPSCMAMTIEQAKKTRSLCLLRLFERKWFKETFKCICHFIKFLAQG

SEQ ID NO: 66748 - protein, 438 aa, Zea mays
  Clone ID: LIB4746-025-H5_FLI.pep
RGPLLESCDEGTEMASSSSDSGRIAGTLALRTSSALAAASLIPGLPDDVAAVILCLLTFPDQSRLRATSRAWCLLLSAATLLPLRRSLRLPRRHLLCLFPTDPSLASPILLDPAAPTTWWPLPPLPCSPQLYGLANFTALAVGRHLYVLGGSCFDARSYPLGQPSASAAVYRLDLANSRHCWERLPDMQLPRGSFACAHAPSAGGLLVAGGGSRHPMFPSNGSRTGSTEWYDATTHSWHLGASMPRDRAGCVGFLARGAGDGGEDEFWVMGGYDGYTTLGGVVPNDVYCRDAVALGLWSGKWRVIGDMWEEGERRRLGPIAALSADDGRITEVFMLDGNDVFRYDFASNRWLKEATTRRKIPNTESCGFVPMNGELYVLRSAKVRVESSGPWRQLKKKLAMEFQVYNPGAKKWRVLTTYPPVDAPIDFRTAALCTVEL

SEQ ID NO: 66749 - protein, 258 aa, Zea mays
  Clone ID: LIB4746-026-A1_FLI.pep
ALSTAGSGSSSCLPPRVLAGPEVGLHPRDEEDLAVVDVGVNQGQRQRRRSTDHLALVVVLGSVAWADELVLGAVPRHDAAEVSAHGVDPVGGQRLVLLHHQVRGVTLEPLRERAIVGTVRVEPRLHRDVVAQLVLGVGPAAGVPGAGRDEEGAVGDDHADGGQRDGAEEEEVHQLPLLHVGDAVGGDAARRLARNAPLGALAAHAQAKPLHRLAQRSAGPVELGGIGGGGERRGGRHGCSRRGSVGVGSRDNTAVFPR

SEQ ID NO: 66750 - protein, 146 aa, Zea mays
  Clone ID: LIB4746-026-F12_FLI.pep
GVQPVRHRLRLQFRLQQGRRVGYSVRRRGERVTSAEGAGMKPVVGIVVSNKMQKSVVVAVDRLFHHKMYNRYVKRTSKFMAHDEADSCNIGDRVRLDPFRPLSRHKHWVVAEILRRAKVYVPPASTASSQSSEHDSKSQKAGVATK

SEQ ID NO: 66751 - protein, 468 aa, Zea mays
  Clone ID: LIB4746-027-C12_FLI.pep
RDKVAVQESLDRGKKENNALNAQVELYANIDVAGSLDNLRELHTLLGGALEVVDAEDLKTALVDELLGGFHVGTLETGNDGDAEVHGLGDGDQTLGDVVATDDTTEDVDEDGSNLGVGGDEVESALDGLGGSSTTNVEEVSGRTTVELDDVHGGHGETGTVDEAANVTIELDEVQALLGSLDLISVLLGDVAPLEDLLLPEVGVVVESELGVHAHDLVVGGLGQRVDLDLSGILLHEELVELLDGVGTGVDALRAEAELGGDLLGHLVGNTNVDVNGGGDDGLGALLGDGLDVHATLGGGDNDGRLGSTVHEDGEVELAAGELALDNVDAVADATTLAGLLGDELVANHLVGENASLAGRVDDPHTTLEAVVEVTLSSATSKNLGLDDHVVALNGLGYLLGLLCVVSDIALGDLDSVRVEELRGAPLVDGKVAALLESRLSDRSAVCALERRSELAAPRKLEHFEYEW

SEQ ID NO: 66752 - protein, 172 aa, Zea mays
  Clone ID: LIB4746-027-C6_FLI.pep
RGARHGLPLLCRRHRPFLRRTSASPRRGQKEVLHRARLSPQGHRHRRRGNGCQRPACRRCHGPGGAAGRRRRRARLRAQPVHRQGRRHHHIQEQRRLPAQRRLRRRRGAERRRRHQDLAGGVPQRARRDLLRHPHRAGNLRLLLRAASRSRNGRQDHRQLIKLAIDRYPFMY

SEQ ID NO: 66753 - protein, 438 aa, Zea mays
  Clone ID: LIB4746-028-B6_FLI.pep
GIFVFMMFFYIIWGLLLGSLATAVPQHESKRAAPALPLFTKGRDILDANGNVFHFMSTNWPGHQEIMIPEGLQHSSIEKIVSWFPKLGLNSVRMPFAIEMIDDYLANSPNQTLERSVLRSIPGANGTTVLNSILKNNPQFTKNTTRLQVWDAVAKELARQGIVLHLDNHVSKAFWCCGENDGNGWFGERYFDVEKWKRGLAFMAKHAKENWPTFSSIGLRNELRSATGAEPVDWYTWYIHMTSAANAVHQADPDALLFFSGLSYDTYIDPIPLGKTLSGTAGTSTANKKATFVPSDFAWKNKIVLEIHKYDFEGTKDDCQTFKRKWYQSGFQAVNASDPATKYVFPMVISEWGFINNGVYWNQTTYAKCLVEMVKEYKVGWQHWELCGSFYLQTRPNRQPNTLVGADEAWGILDYDWTAIRSPVTLENSLFKMIAALK

SEQ ID NO: 66754 - protein, 263 aa, Zea mays
  Clone ID: LIB4746-028-C2_FLI.pep
SSILRCRRQRDDSIIISSQSTQATMVTSIRVIVGIIGSVVCVLLYAVPVLTFKRVVKEAGVGEFSCVPYILALFSAFTWGWYGFPIVSDGWENLSLFGTCAVGVLFEASFVVIYVWFAPRDKKKSVVLMVSLVVATLCVIVSLSSFVFHTHHTRKLFVGSIGIVTSISMYSAPLVAVKQVILTKSVEFMPFYLSLFSLLTSFTWMLYGILGRDPYLTAPNGAGCLTGLLQIAVYCIYSRSNRPPKAVNGATTTSREDANDCKV

SEQ ID NO: 66755 - protein, 566 aa, Zea mays
  Clone ID: LIB4746-029-C6_FLI.pep
RDWPFRPHETPNPRRHRRRRSSARVARPSRPRPPPRAPIPPAPQPILPGARPMTMNGAAAPERSPPASPPPLVQAQAPPSPSPTQPLEWRFSQVFGERSAGEEVQDVDIISAIEFNKSGHHLATGDRGGRVVLFERTDVKDLASRKDAEKADYSISRHPEFRYKTEFQSHEPEFDYLKSLEIEEKINQIKWCQATNCALFLLSTNDKTIKFWKVQEKKVKKVSEMNLDRSTAPTNGSPGGTGYPRPSLSNGNVLKPGGLPLLRLPVVTTQETSLAASCRRVYAHAHDYHINSISNNSDGETFISADDLRINLWNLEISNQSFNIIDVKPTNMEDLTEVITSAEFHPTHCNTLAYSSSKGSIRLVDLRQSALCDTHSQIFEQHEAPGSRSFFTEIIASISDIKFSKDGRHILSRDYMTLKLWDVKMNSGPVATFQVHEYLRPKLCDLYENDSIFDKFECCQSGDGLRVATGSYSNIFRVFGCRSGSSEATTLEATRNPTRRQVQTTSRATRSLSTLTRAVRRGGESTGIDANGNSYDLSTKLLHLAWHPSENLIACAAANSLYMYYA

SEQ ID NO: 66756 - protein, 168 aa, Zea mays
  Clone ID: LIB4746-029-G12_FLI.pep
LVFTWPLLSMPMSSIHRTDPQHDLQLVLANAIDADQLRLEDQHAVGGDGTGAPATVRPLGLDGQLPLLAGAHVEQTLVPALNNLAATDLEAEGLAAVVGGVELGAVGLEGTAVVDVDLVTGDGRALAVDCGNDFGLEVLVVDGLSCERSRGKGENGCELHIGQLRCLV

SEQ ID NO: 66757 - protein, 245 aa, Zea mays
  Clone ID: LIB4746-030-C1_FLI.pep
DQRGGDGWRRAGGVLPRTMSEGTHLLVPILQKPFIFDIRTRPHSFSSTSGTKDLQMVSLTLRVLSRPDVEHLPDIFTSLGLEYDEKVLPSIGNEVLKAVVAQFNADQLLTERPHVSALVRESLTKRAREFNIVLDDVAITHLAYGQEFAQAVEKKQVAQQEAERSRFLVARAEQERRAAIVRAEGESESARLISEATTTAGNGLIELRRIEAAKEIASVLSRTPNVSYIPAGDNGQMLLGLNAAR

SEQ ID NO: 66758 - protein, 177 aa, Zea mays
  Clone ID: LIB4746-032-C5_FLI.pep
YYSKRQNLELDEVLGLRLLYTEDVEADSLGEGTALSNGNDITDLDTESGRAVDGNVLVTLLVPRVLGNEVEVLATDDDGAGHLGRDDLAGEDASTDRDETGEGALLVDVGTLDRLTGSLEPETDLLEPTAVLASDLARGGRDLGVVEQRLLLERLLNLFGHDEVEEGRFFGSKNHPG

SEQ ID NO: 66759 - protein, 450 aa, Zea mays; identical to SEQ ID NO: 66641
  Clone ID: LIB4746-034-H5_FLI.pep

SEQ ID NO: 66760 - protein, 683 aa, Zea mays
  Clone ID: LIB4746-035-G4_FLI.pep
VAKMARPLFLVYQLVSLCLRLTNLCSGDDQQFVYSGFTGTNLSTDGVAAITSDGMLELTNGTLQRKGHAFYPEPVRLREPANGTARSFSTSFVFGILSDHVELSAHGMAFVVAGSRDFSGALPSGYLGLLNVQSNGNSSNRLFAVELDTMQNDEFQDINDNHVGVDVNSLHSVQSYYAGYYGGGGFRNLTLISGEAMQVWVDYDAEVAQINVTMAPLSMAKPARPLVSARYNLSKVLTDDGPAFVGFSAATGGTLKSRHYVLGWSFSIDRPAPAIDLSNLPKLPRVSAKDRTRTLEIVLPVATAAFLLAAGMAILLLVRRHRRYAELHEDWELEFGPHRFSYKDLFHATDGFKNSNLLGIGGFGRVYKGVLPASRTEIAVKRVSHESKQGMKEFISEIVSLGRLQHRNLVQLLGYCRRKGELLLVYDYMPNGSLDKCLHDREGRQHALDWALRVQIIKGVASGLSYLHLDWEKVVIHRDIKASNVLLDGDMNGRLGDFGLARLYDHGGADGPKTTHVVGTIGYIAPELGRTGKASPLTDIFAFGIFVLEVACGRRPINKQLTQDGGALLLVDWVLSHWQNGSLTETVDIRFQGDYDSDEASMVLKLGLLCSHPFVDARPTSMRQVTQYLEGHVALPDFMPPCHILPSSMMIPEQSEGFLMYNNTSSQKFKASNGSMSSLSGGR

SEQ ID NO: 66761 - protein, 312 aa, Zea mays
  Clone ID: LIB4746-036-G3_FLI.pep
PGSPAPHTNLSTPRRVRGGAAMASSVAAAASTFLGTRLADPAPQNGRIVARFGFGLGGKAKPAPKKVAKTSTSSDRPLWFPGAVAPDYLDGSLVGDYGFDPFGLGKPVEYLQFELDSLDQNLAKNEAGGIIGTRFESSEVKSTPLQPYSEVFGLQRFRECELIHGRWAMLATLGALSVEWLTGVTWQDAGKVELVDGSSYLGQPLPFSISTLIWIEVLVIGYIEFQRNAELDPEKRLYPGGSYFDPLGLAADPEKKERLQLAEIKHARLAMVAFLGFAVQAAATGKGPLNNWATHLSDPLHTTIFDTFGGSS

SEQ ID NO: 66762 - protein, 167 aa, Zea mays
  Clone ID: LIB4746-037-A4_FLI.pep
PGKNSTSLSRRQLLTTANRQTAGSISVQSNLSIMADSQVTLRTRKFIRNPLLGRRQMVVDVLHPNRANVSKDELRGKLGELYKAKKEDVSVFGFKTHFGGGKSTGFALIYDSAEAMKKFEPRYRLVRYGMATKVEKASRQQRKQRKNRMKTFRGTAKAKGGAKKEKK

SEQ ID NO: 66763 - protein, 423 aa, Zea mays
  Clone ID: LIB4746-037-D4_FLI.pep
GKSLSAPRHLFPDTLPLQLSTPTAAMDVPRSNKQPTSTPQNTPANAAPISSRAQQPNVGTIKEEELDRAAAGLFAANPALVSMMQAKLGSLVGRSSGYIESLPGSVRRRVAGLKGVQKEHSKLEAEFQEEVLQLEKKYFAKFTPLYEQRAKIVNGSTEPTEEQVKVGEQQDEDDEDDEEAGEKELNKDEGKGVKGIPEFWLSAMKNQISLAEMITDRDEAALKHLTDVRMEYLDRPGFRLIFEFEENEFFTNKTITKTYFYQEENGYGGDFIYDHAEGDKIDWKTGKDLTVRVESKKQRNKNTKQTRVVKKTVPTESFFNFFDPPSPPQDEDDDASSDIEERLELDYQLGEDIKEKLIPRAIDWFTGEALQYENIEDFDEGEFEDEDDEDEDGLSDDRDEDEESDDENDGTKPKQEAAECKQS

SEQ ID NO: 66764 - protein, 240 aa, Zea mays
  Clone ID: LIB4746-037-E9_FLI.pep
TLSGSFPYARFSLVAQHQSTSEEPSPVPGMECVLGVVGRDFALVAADTSAVQSILVHKTDEDKVMVLDSQKLMGASGEPGDRVQLTEFIQKNLHLYQFRNTIPLSTAAAANFTRGELATALRKNPYMVNIILGGYDKDVGASLYYIDYIATLHKIDKGAFGYGSYFCLSLMDKLYHPDMTVEEAVDLVDKCIKEIRLRLVVAPQNFVIKIVDKDGAREYARRELVGDNAPAEAATAVVAA

SEQ ID NO: 66765 - protein, 141 aa, Zea mays
  Clone ID: LIB4746-038-B5_FLI.pep
CGCAPFPIASTPSRMFLNRPPLDGAGVHHNPDTGTEGLWWKVVLERSANETRVAMSSADLAPDDADGVRLAAADAVYIGDTLSEVPLRVLCAFDALELEQADVGVRVALATLVANVAALDVEAVALFRRHLEGCGGTCRDG

SEQ ID NO: 66766 - protein, 573 aa, Zea mays
  Clone ID: LIB4746-038-E12_FLI.pep
SAIVKSFSCRGREGFANMALAGTSKVVLGCIAFGIFWVMAVFPTVPFMPVGRTAGSLLGAMLMVLFRVISPEDAYAAIDLPIIGLLFGTMVVSIFLERADMFKYLGNLLSWKSRGSKDLLFRVCIVSAFASALFTNDTCCVVLTEFILKVARQNNLPPQPFLLALATSSNIGSAATPIGNPQNLVIAVESGISFGQFLLGVFPAMIVGVLTNAAILLLYFWKYLSVEKDQEGGQPTGPEVVADDEVTSHRFTPARMSHVSSLNPDDMDCVSEPIIRSNSVSTTGNENLRSRSINSEADIQLAIKSLRASSVSHEMVEVSTVPDRRDEGASSRKFTRTASQQRSVIIEDLAPSPEINGEKEKETEVAEKRWKVLVWKTAVYLITLGMLIALLMGLNMSWTAITAALVLLALDFTDAQACLEKVSYSLLIFFCGMFITVDGFNKTGIPNTLWELVEPYSRIDSAKGVALLAVVILILSNVAPNVPTVLLLGTRVAASAASISHGSERKAWLILAWVSTVAGNLTLLGSAANLIVCEQARRAQFFGYNLTFWSHLRFGVPSTIIVTAIGLLIVISY

SEQ ID NO: 66767 - protein, 269 aa, Zea mays
  Clone ID: LIB4746-039-E7_FLI.pep
RDPSSTLKMAIGKNKRLSKGKKGIKKKVVDPFTRKEWYDIEAPGFFETRNAGKTLVNRSQGLKNADDSLKGRVLELSLADLMNGDQEQGFRKIKLRVEAISGKNCLTSFYGMDFTTDKLRSIVRKWQTLIEASVDVKTTDGYVLRLFAIGFTKRAYNQVKKTTYAQSSQVREIRAKMVEIMKREAEGGDLKELVQKFVPESIGREIEKATKGIYPLHNVYVRKAKIVKTPKLDMTKLLESNGETGADATPGSKVVKGGDFVEPEVLASV

SEQ ID NO: 66768 - protein, 192 aa, Zea mays
  Clone ID: LIB4746-039-H8_FLI.pep
GGTIACRLIPAGRVSLHKMTTATAVGSVADRIMPHLLNIYGSSATARDFEIYAPNATFEDPLMRAHGVKQIKSAFYTLPKVFGESKITEYTVQENPMGPGKTEVVIQNKQHYKVLGKPVDLTSLIRLQLQDGKVVKHEDWWHGKPLKNRDTVGVPLVGRLAEASRRGAMLLTHALMGFGKDPTQPPPPPPTH

SEQ ID NO: 66769 - protein, 226 aa, Zea mays
  Clone ID: LIB4746-041-D3_FLI.pep
LSRRSNSSKKWMTLTFQKMLTVCDVHSAAGAKVNTEIDWYGILQVPVNADDALIKKQYRKLALLLHPDKNKFGGAEAAFKLVGEANITLTDRSKRSVHDMKRTTFRSVTARPSHQPPKRPAPARSSSTPVNLHTMHQQHQYQASNPTGPQTTFWTICPACGMKYQYYLSILKKVLRCQNCLKSFIAHDLKDQAIPSGANQRSAGVWKNAGTPQNSAGPQSNVTGQK

SEQ ID NO: 66770 - protein, 306 aa, Zea mays
  Clone ID: LIB4746-042-C2_FLI.pep
SKNTFRPVDGRGGAMAGLRGPSERVEDGGVERVAQVGGPVVERPLAGGGGLHGEAEEGDHGEPRVLDLRQLQPLLLLRVGRQAERVEVGAAGVQPLLRVELGVALELDVADHEHLDPDERRDGERQRLAQVGGPVHQLHLAGVLPGDAGEPLDGEGAEGGEHGPAAVDELALAEPLEAEHLAVGLQRGELDFGGLEPGADDAAGLILGQVLVQRVQLELQVLHGLPETERVEPVVADQRAVQVVGRHGAGEPQRPVRGGRCLRHLLRSRLRLAAQPEPEPGHDAPVLWRRVRQAGAQECARRGGHR

SEQ ID NO: 66771 - protein, 241 aa, Zea mays
  Clone ID: LIB4746-042-D11_FLI.pep
GSSRDMAPAARWSTSPVLIFLLLLAAATATTTTTTAKHGHPSPTPWPERFHAVLFTNLTNYMEASTGPPLRVTDPYYDWPRRRNLNLVRHQLSDDPLYDVEWNNGTGFYFDSKACRVEQFPVGVLPPWWLSGGGAEYVGRRVAGGIDCHVWGKAGFIFYYEEARTGRPVRWDFVDVTGIQQFVMSFEPGAALEDDAQWQAPAYCFPDDDDAARSSGDEEAGDGLEAASRLLRKLAGAAATY

SEQ ID NO: 66772 - protein, 171 aa, Zea mays; identical to SEQ ID NO: 66134
  Clone ID: LIB4746-042-E5_FLI.pep

SEQ ID NO: 66773 - protein, 182 aa, Zea mays
  Clone ID: LIB4746-043-E10_FLI.pep
TLELLGDACEVLPLVEGVLQLHLARPPRAVGGERAGAVGAAALNLVHAEQLGAEGVAHRHEHHAVVRQLGDRCQRCRLLATTLGSSAEEDAGRLAGKALLPPEPTSGIEERLHLRCHHSEPRWEPEEDSVGLCEFLRRDDWHVRLRGCAHLSKHFLREGFRDLPCFSFNTFNRRGTFLDLFS

SEQ ID NO: 66774 - protein, 171 aa, Zea mays
  Clone ID: LIB4746-043-G10_FLI.pep
RVCCVESCCLLTSSPWPPSPLPPSPPLPSPHQRQPAPWSEGGPSPCAPLSARPPAPPPWQWLPAPCLPAVPWPRRCCWAQATAGSSSSPASSPSRPATPSHSRTTPASRTTSSSTKTRCRAASTPPRSRRRSTSTRQARPTPSPSPCREPTASTASRIKEPEWSARSPSTN

SEQ ID NO: 66775 - protein, 461 aa, Zea mays
  Clone ID: LIB4746-046-F11_FLI.pep
RQREREGGIFCDDERRVVVSMGKLAARLRAFSRNRWLVLVAAMWVQSMAGIGYLFGAISPVLKARLGYNQRQLAALAVAKNVGGYVGVVAGTLSAALPAWAMLLMGAAQNLLGYGWLWLIVTGQAPPLPLWMARASDRASFVFVYAVCLLLASYLAGVKLVQDFLQLSDGVVVSLTVVLLVLLISPVAVPVALTLTPEAECPIREALLSSSEPLTGEGNASQESPPCASESGGRPAPYLGENFTMMEALVKADFWLIWVSFLLGSGSGLTVMDNLGQMSQALGFEDAHIFVSLTSIWNFLGRIGGGYFSEIIARQRAYPRHIALAFAQVLIAAAHFLFAMAWPGTIYIGTFLVGLGYGAHWAIVPAAVSELFGIKHFGAMYNFLALANPTGSLVFSNLITSTLYDYEAEKQARQRRRRVMAELLASSPRSLHSAGLFAGAVVEEEDHSSSAKGLLASWSAL

SEQ ID NO: 66776 - protein, 459 aa, Zea mays
  Clone ID: LIB4746-047-F8_FLI.pep
SQVRPTVSKKGRRWAAMEDAVAADGKSVLQGRYELGRVLGHGNFGRVHAARDLRTGRSVAVKVVAKDKLERAGMAEQIKREIAVMKMVSHPNIVELHEVMATRSKIYLALELVRGGELFSRIARAGRVREDVARCYFRQLVAAVDFCHGRGVFHRDLKLENLLLDEVGNLKVADFGLSALAGHARSDGLLHTACGTPSYVAPEVLGGKGYDGAKADLWSCGVILYVLLVGSLPFHEDNLMVMYRKMQRGEFLCPPWVSADARKLIGELLDPDPSTRITVARLVETPWYRKPLPVLPPLNLKEPTPDARRATSDKEEPEVLNAFHLISFSEGFDLSPLFDQGRGGGVGRSSAGGIRFVTREAASSVVSRLESLVTGRGANMRVTKSGSRGVRLEAVSRGRSGARLAVAAEIFSVAPSVLLVDVKKDGGDTMEYRSFCSEELRPALKDIVWASSQDTPGAA

SEQ ID NO: 66777 - protein, 226 aa, Zea mays
  Clone ID: LIB4746-047-H3_FLI.pep
PPRTTSPDLSSCCFLGWFPSLAASPASSPNQRHESAMALASATSRPLLGRPAGTARPHLAVSSSSPASSIRFPRGADGGASRAAVSLRAPTPPAAATATSGSIAPAISLTEKALKHLNQMRAERNEVLCLRIGVKQGGCSGMSYTMEFENRENASPDDSVVEYDGFAIVCDPKSLLFMFGMELDYSDALIGGGFLFQNPNATKTCGCGKSFATGKETEAAATTCNN

SEQ ID NO: 66778 - protein, 238 aa, Zea mays
  Clone ID: LIB4746-048-C4_FLI.pep
GTAASKLPPSSLRAVPPLLRVGAALLPSLLLLMELDPRLYENVSVSDNDVRNIVLSYLMHNCFKETAEAFLSSTGLNLPVDYSVDVDKRKAIFNFVLEGNALKAIELTEEMAPNLLENDMDLHFDLLSLHFIELVRSKKFTEALDFGQKKLTSFQKVTKYIEKLEDFMALLAYEEPEKSPMFHLLSPEHRQNVAEGLNRAVLAHANLPAYSSLERVVQQATVVRQYLQQEVGKAFLSK

SEQ ID NO: 66779 - protein, 306 aa, Zea mays; identical to SEQ ID NO: 46382
  Clone ID: LIB4746-048-H9_FLI.pep

SEQ ID NO: 66780 - protein, 367 aa, Zea mays
  Clone ID: LIB4746-049-F12_FLI.pep
TDRTPDCDPQLLLLPIRTSLARRFFASNSYKASSSPLVMGGSQYDDEWVLPSADITLVLVGKLGYGKSATGNSILGREAFVSEYSHSGVTNTCQLGSTTLMDGRTINVIDTPGLFDMSIASDDAGKEIVKCMNMAKDGIHAVLMVFSGTSRFSREDASTIETIKVFFGEKIVDHMVLVFTYGDLVGESKLKNMLNDAPEYLQNVVELCQNRVVVFDNRTKDRRLQAQQLDKLLYVVDSVCANNGGKPFTDQMFTRIKEVHDREKEVHTLGYSDEQISELKEEIHRTRDEQLAQITSMVEEKLNRTVEKLQQQLMEEQNARLEAEKVAHEAMRKSEAQIQELKERLEKARLENEEFRRMAQSSKCAIL

SEQ ID NO: 66781 - protein, 260 aa, Zea mays
  Clone ID: LIB4746-049-H8_FLI.pep
GNSLSSSPLVHPHPTALLSPLHFQLSMAAAACSSASPLLLPSGPRHASASRAWFLGGRSRALRSEAPCCCKAAAARGSAPQCGTVGGGSSSTRRGLLGVALGASALGLAAFDAVAAGLPPEEKPKLCDAACEGELENVPMVTTESGLQYKDIKVGEGPSPPVGFQVAANYVAMVPTGQIFDSSLEKGQPYIFRVGSGQVIKGLDEGILSMKVGGLRRLYIPGPLAFPKGLTSAPGRPRVPPSSPVVFDVNLLYIPGLDDE

SEQ ID NO: 66782 - protein, 173 aa, Zea mays
  Clone ID: LIB4746-050-E2_FLI.pep
QGRARHGLPLLCRRHRPFLRRTSASPRRGQKEVLHRARLSPQGHRHRRRGNGCQRPACRRCHGPGGAAGRRRRRARLRAQPVHRQGRRHHHIQEQRRLPAQRRLRRRRGAERRRRHQDLAGGVPQRARRDLLRHPHRAGNLRLLLRAASRSRNGRQDHRQLIKLAIDRYPFMY

SEQ ID NO: 66783 - protein, 305 aa, Zea mays
  Clone ID: LIB4746-051-F10_FLI.pep
RNFSRPAPAMPLILISGFPSAGKTTRARQLEQFFESKIASAPPDARTSRLKVHLINDQTLGVPRSVYRTARAEKDARAEEYSAVKRVLSRDDIVIADGLNYIKGFRYQLYCEAKALQTPSCVLHVGTPPDRCRENNKKLLADEGTDGGYEEDVFENLIFRYEEPNGMTRWDSPLFIVVEEDETPPCDQIWEAMIGSDGKLKTVKPNLATVLKPATEQNYLYELDKTTSDILTQIMVYQKDHAGEGGGQIAVADVEKPIELPATPMTLPQLQRIRRQFITLNRQHSFSKARIKEVFVDYLNAEFLR

SEQ ID NO: 66784 - protein, 174 aa, Zea mays
  Clone ID: LIB4746-052-F12_FLI.pep
GRNPLQKNEKTGEEGTRSKRARLPADVPSPPPPYARPPLSCSADPTPVEMRATSSPVPAAVVLVAPSSPSAAAVAVKPRAAASGGGGSTAGRRDVLAAGTGLGAALLLALGPARAADEEYVSETGSLLITVSLFPPLQLCSTARNYAAAFCCGHVNGVFDEMLSRAASRGEHIQ

SEQ ID NO: 66785 - protein, 220 aa, Zea mays
  Clone ID: LIB4746-054-E8_FLI.pep
PRLPSIQLDQGTNREANAARVARSVAPIGFTGGGVGMEAQNGSCGGAPVVLNVYDLTPMNNYLYWFGLGIFHSGIEVHGMEYGFGAHQFPASGVFEVEPKSCPGFIYRRSVWMGTTDLSRAEFRSFIENLAGKYNGNTYHLISKNCNHFTDDVCKSLTKKSIPGWVNRLARVGSFFNCLLPESIQVSTVRHVPTQSAFSGRIYTRATRSRARGLIHITEP

SEQ ID NO: 66786 - protein, 388 aa, Zea mays
  Clone ID: LIB4746-057-F2_FLI.pep
PGKPSNPIQTRQARNPPMAHRVLLLLSLASAAAVAAAVDAEDPLIRQVVPGGDDNDLELNAESHFLSFVQRFGKSYKDADEHAYRLSVFKANLRRARRHQLLDPSAEHGVTKFSDLTPAEFRRTYLGLRKSRRALLRELGESAHEAPVLPTDGLPDDFDWRDHGAVGPVKNQGSCGSCWSFSASGALEGAHYLATGKLEVLSEQQFVDCDHECDSSEPDSCDSGCNGGLMTTAFSYLQKAGGLESEKDYPYTGSDGKCKFDKSKIVASVQNFSVVSVDEAQISANLIKHGPLAIGINAAYMQTYIGGVSCPYICGRHLDHGVLLVGYGASGFAPIRLKDKPYWIIKNSWGENWGENGYYKICRGSNVRNKCGVDSMVSTVSAVHASKE

SEQ ID NO: 66787 - protein, 259 aa, Zea mays
  Clone ID: LIB4746-057-G10_FLI.pep
ALSTAGSGSSSCLPPRVLAGPEVGLHPRDEEDLAVVDVGVNQGQRQRRRSTDHLALVVVLGSVAWADELVLGAVPRHDAAEVSAHGVDPVGGQRLVLLHHQVRGVTLEPLRERAIVGTVRVEPRLHRDVVAQLVLGVGPAAGVPGAGRDEEGAVGDDHADGGQRDGAEEEEVHQLPLLHVGDAVGGDAARRLARNAPLGALAAHAQAKPLHRLAQRSAGPVELGGIGGGGERRGGRHGCSRRGSVGVGSRDNTAVFHSL

SEQ ID NO: 66788 - protein, 269 aa, Zea mays
  Clone ID: LIB4746-058-B3_FLI.pep
PGRPFQASRQQRTNPDANRPEREAEFPILLDPPLLFLLPRSSSTRSAPIPPASADPDLAPAPMATRRRMLLKVIILGDSGVGKTSLMNQYVNNRFNNQYKATIGADFLTKEVQIDDRLFTLQIWDTAGQERFQSLGVAFYRGADCCVLVYDVNVSKSFEKLNNWREEFLIQASPSDPENFPFVVLGNKIDVDGGNSRTVSEKKAKAWCASKGNIPYFETSAKEGFNVEAAFECIARNAVKNEPEEDMYLPDTIDVGGAGRQQRSSGCEC

SEQ ID NO: 66789 - protein, 218 aa, Zea mays
  Clone ID: LIB4746-058-B5_FLI.pep
TKKITRRNREQMLSSTTLRPPASPAPAHLTICSSPAAWRRAPAVRAVRNYDSIPKREPFSSSRSILHEFLRQDKPLIQRTKDQITDYCTAIEGDECCSCWDAYFELNKLEQELPKDEIARMVKDSEGDVRYLIESIHHRSDLRKKVAEKSRNSVPSSSQGSRAAKPRPFPVPDGIPKTQEELAEEEEALMPESPYTRLLRRMGRYPDWYTPRPDHETD

SEQ ID NO: 66790 - protein, 203 aa, Zea mays
  Clone ID: LIB4746-059-A12_FLI.pep
PQPTAIEVENSDFFTHTHMALMSLGAAGYTTATAPPRPRRCTLPFRAAASPAALDRRRRPHNVAGDFFVDHRCIDCQTCRWMAPEVFKRVDGKAAVAAQPSSEEERTKALQALLSCPTSSIHTEKPPKDILKVQNMFPLPIDDKLLPVEEATADVEWKLEGNGPWNLGTDFELIHTPGHTPGSVCLYFKPLKVLFTGDHVAKS

SEQ ID NO: 66791 - protein, 204 aa, Zea mays
  Clone ID: LIB4746-059-B9_FLI.pep
GTAASVVRTGSRDLSPSFSFTAAALPSARLRPVGAWVRGGGYTCRLRAVRAMGSAPSSSQSPSPHTPSGQTQGKADYKSLSEEEWKKRLTEEQYYVTRQKGTERAFTGEYWNTKTPGIYQCVCCDTPLFQSSTKFDSGTGWPSYYKPIGENVKSKLDMSIIFMPRTEVLCATCDAHLGHVFDDGPPPTGKRYCINSASLKLKPQ

SEQ ID NO: 66792 - protein, 462 aa, Zea mays
  Clone ID: LIB4746-059-C6_FLI.pep
PEKSAGHRPPPTPSSPPCPRTGSVGAPALPTPTRRRDDREGGEQRKDSLELHLSASAVCGSDHVTVATSNWSWLRIDFWRRQRDCDLEHGEFDRLLGRRLQVEARSELSGRRGFVSQFSAGHVLSRAGNNVQVFSLNELKTATQNFHMLNCIGRGGFGAVYKGNLKDGTQIAIKKLAVESKQRISEFLTEINVISNVRHPNLVRLIGCCAEGKNRLLVYEYAENNSLANALLGPKNKCIPLDWQKRAAICIGTASGLAFLHEKAQPCIVHRDIKASNILLDKKLLPKIGDSGLAKIFPDTVTHISTRVAGTMGYLAPEYALLGQLTKKADIYSFGVLLLEVISSENSSKPTWGPNMHVLVEWTWKLREEGRLLEIVDPELKKYPEEQMLRFIKVALLCTQATSQQRPSMKQVVNMLSNKAEIDLQNVVAPGVLKEPRQRTGGFGSLTAGTTSSKPKHQRQSS

SEQ ID NO: 66793 - protein, 160 aa, Zea mays
  Clone ID: LIB4746-061-H9_FLI.pep
AARWASEREGERGRIGIPKVGHGGERREGCGGATADGGEGGVREDLLGNRRRDGSHQRLRGAAAAAPGAAQGRHGARAEGGPAHAHGRPHRTHDAAALPVLPPQHRPRARHLQVRGAPPSPLQTTTGGNLLSPNLNRNVTRQASVAKSCLFNWLHQALGV

SEQ ID NO: 66794 - protein, 615 aa, Zea mays
  Clone ID: LIB4746-063-F4_FLI.pep
PGAHQPTRATTSPRLRARSITPPPHTSSVLHDQLHGVAMDQLPKRPANYVPLSPVGFLARANAVYADRASVVYGGVRFTWRQTYERCRRLASALLSLGVRRGDVVSVLAPNVPAMYEMHFAVPMAGAVLNAINTRLDAAAVATILRHSGAKLLFVDYDYVRLAGDALRLLAAAAGGTVPLVAVVDDIDSPTGARLGELEYEALLAHGDPDADLPPLADEWDAVTLNYTSGTTSAPKGVVYSHRGAYLSTTSLLLQWGVATDPVYLWTLPMFHCNGWTFTWGMAARGGVNVCIRDARRADIYRAIARHRVTHMCCAPVVFSILLDGDGDGDGRQLEAPVHVLTGGAPPPAALLERVERIGFKVTHAYGLTEATGPALACEWRDQWDRLPLPERARLKARQGISVLSLADADVKNVDTMASVPRDGKSLGEIVLRGSSVMKGYLNNPEANDGAFRGGWFLTGDVGVVHPDGYIEIKDRSKDVIISGGENICSKEVEEVLFRHPAVADAAVVAMPHPRWGETPCAFVVPRDGKAHGLSEDDVLAFCARRMARFMVPKKVEVIGALPRNALGKVEKVKLREAARKLAPTVPAQIKPKGKTTTSTVVGGGRCEEQPVSRL

SEQ ID NO: 66795 - protein, 150 aa, Zea mays
  Clone ID: LIB4746-063-H2_FLI.pep
GSVLPNSQATPSSSAMNRQGKTRLAKYYVALEGSEKHKVEYEVHRLVVNRDPKFTNFVEFRTHKVIYRRYAGLFFSICVDITDNELAYLECIHLFVEILDHFFSNVCELDLVFNFHKVYLILDEFILAGELQETSKRAIIERMGELEKLE

SEQ ID NO: 66796 - protein, 159 aa, Zea mays; identical to SEQ ID NO: 50480
  Clone ID: LIB4746-065-G11_FLI.pep

SEQ ID NO: 66797 - protein, 372 aa, Zea mays
  Clone ID: LIB4746-067-F5_FLI.pep
RRMEAAAAVLPTLVPSGSAVVVLLAYLGYLAAAGAILPGKLVDGALLPDSSRLHYRCNGLLSLLLLLGLSAFGVYMGWMSPTVVADMGLELLSVTFIFSVIVSFALYIAGIKSGHKSSSLRPHVSGSLMQDWWFGVQLNPHFMEVDLKFFFVRAGMMAWLFINLSLFAKSYLAGSANLSVILYQFFCAWYIIDYFVHEEFMTSTWDIIAERLGFMLVFGDLVFIPFTFTIQGWWLLKNKVELSLLSGLANLCIFLIGYLVFRGANKQKHMFKKDPKAPIWGKPPKVVGGKLLASGYWGIARHCNYLGDLLLALSFSLPCGVSSVVPYFYPTYLLILLVLRERRDEARCSQKYREIWAEYCKLVPWRILPYLY

SEQ ID NO: 66798 - protein, 234 aa, Zea mays
  Clone ID: LIB4746-069-C3_FLI.pep
PGTHRPSLSSSSSLSSEGQVTVFVTMAGTLLQSVALGTPFGGRMRTHCWRSHGTRRPASMLAVSLSRPVKMSAFVGLRSVHSFSVTPTVSNSRSAVASYRSSRQTRRSRFVTRAMFERFTEKAIKVIMLAQEEARRLGHNFVGTEQILLGLIGEGTGIAAKVLKSMGINLKDARVEVEKIIGRGNGFVAVEIPFTPRAKRVLELSLEEARQLGSLIIKVSCKMLSLHVALNFIF

SEQ ID NO: 66799 - protein, 259 aa, Zea mays; identical to SEQ ID NO: 66787
  Clone ID: LIB4746-069-F2_FLI.pep

SEQ ID NO: 66800 - protein, 216 aa, Zea mays
  Clone ID: LIB4746-070-F11_FLI.pep
HISHSVCTPAGSMAGCKQDDDAGGRSPSSSSMGSSSSTHPPALSAASSSGFRPTTERRDDLSTDLQLGLCSLSPAASSALLVAAESKSVPSTPRGSRTTQDWPPIKPFLRSALTASARRRRRTLFVKVYMEGVAIGRKLDLLLLDGYDSLLAKLRHMFKASITFADAMEYHQRVPHEKPAHVLTYEDRDGDWMMVGDVPWELFLGSVKKLRICKNR

SEQ ID NO: 66801 - protein, 259 aa, Zea mays; identical to SEQ ID NO: 66787
  Clone ID: LIB4746-070-F3_FLI.pep

SEQ ID NO: 66802 - protein, 163 aa, Zea mays
  Clone ID: LIB4746-070-G3_FLI.pep
PGTPSPRIVPSSSLFPTAPFLGVYPARPGPNPKAAGRRRRRLLPLDTVKPPPSSSVSPGSGVQAAARAVSPPAPIWAPPALTPSDSPRAARPVPPRPVTRNFYSPVGSSSGSDEHIDLSTTLFGWKANRRAFLGFSEGSSQMWRPPESTTYCLRSPGSFRNPD

SEQ ID NO: 66803 - protein, 302 aa, Zea mays
  Clone ID: LIB4746-071-H6_FLI.pep
ESRTARVSVLSEDWNMQVWPYMQISPSQGKGWNCREGAAKHIRISTPPGHCKYANTCKFHHPELFNVVPSSRGSPIYTSVHSSASAGPQSYTGTMPSWAFPRASFIPSPRWQSPSNYAPMIVPQGLVQMPSWNSYTGQLQSPGAQQTYGSSQQGEASTGNQGMLSPYRSSSFPVPQYALQRENVFPERPDEPECQYYMKTGDCKFGAVCKFHHPRVRSLPPPDCVLSPMGLPLRPGEELCKFYSRYGICKFGANCKFDHPTVVAPMVYAYGFSASASPASASTNVPMARRLLGSPPGSGYTS

SEQ ID NO: 66804 - protein, 173 aa, Zea mays
  Clone ID: LIB4746-072-F8_FLI.pep
TGKCFSTATPASATCAAQEKERLVAFPPYSPPFQYTCNVPSSIIIMPHRLVDLLELNLEDELGASGDETAANILVAVGVVRADIKTSLLAELHLDNTLVPALDDATNANGGLEWPAAGLLSGVELLALAVLLASLLEPAGVEHGDGVALDGGGAVALENNGLGDAHVAGCGSG

SEQ ID NO: 66805 - protein, 663 aa, Zea mays
  Clone ID: LIB4746-072-G9_FLI.pep
PGIKSVDVALSSFSSVYSLLPAIQRRLLFSSPNPQSFRPFGNLVSACQALESKPDPNFCAKIPSLVIPSSPMGTLGDRLRAFSTNRWLVFVAAMWLQSMAGIGYLFGTISPVIKAALGYNQRQVAALGVAKDLGDCVGFLAGSLSAVLPSWAMLLIGSVQNFLGYGWLWLIVTRQAPALPLWMMCVLIYVGTNGETFFNTTALVTCIQNFPKSRGQTVGIMKGFAGLSSAILTQLYAVMHTPDHATLVFMVAVGPSLVAIGLMFIIRPVGGHRQVRPSDKNSFLFIYTICLLLASYLVGVMLVQDFMQLSDNVVNFLTVILLILLVLPIVIPVTLTLSSKTQHPIEEALLSDPSKGETSTSQEKEDQPEVILSEVEEEKPKDIDSLPPSERRKRIEELQTKLVQAAARGGVRIRRQPRRGENFTLVQALVKADFWLIWWSLLLGSGSGLTVIDNMGQMSQAVGFKDGHIFVSLTSIWNFLGRVGGGYFSEIIVREHTYPRHIALVICQILMAVGHFLFAMAWPGTMYVGTFLVGLGYGAHWAIVPAAVSELFGVKHFGAMYNFLTVANPAGSLVFSGLIASNLYDYEAEKQAQRRQITSLTSPRLFHSMGFLADGTLKCEGAVCFFVSSLIMSAFCVVGAGLSLIVVYRTRRVYTHLYGSNRT

SEQ ID NO: 66806 - protein, 136 aa, Zea mays; identical to SEQ ID NO: 36723
  Clone ID: LIB4746-074-H5_FLI.pep

SEQ ID NO: 66807 - protein, 252 aa, Zea mays
  Clone ID: LIB4746-077-B9_FLI.pep
PGLVERLVGGPRTKMLAVFSGQVVEVPAELVAAGSRTPSPKTKASQLVGRFLAASEPAVSVQLGDHGHLAYSHTNQALLRPRSFAAKDEVFCLFEGVLDNLGRLSQQHGLSSKGANEVLLVIEAYKTLRDRAPYPASFMLAQLTGSYAFVLFDKSTNSLLVASDPEGRVPLFWGITADGCVAFSDDIDMLKGSCGKSLAPFPQGCFYSNALGGLKCYENPKHKVTAVPADEEEICGATFKVVEGSTVLTALH

SEQ ID NO: 66808 - protein, 307 aa, Zea mays; identical to SEQ ID NO: 66483
  Clone ID: LIB4746-077-C11_FLI.pep

SEQ ID NO: 66809 - protein, 174 aa, Zea mays
  Clone ID: LIB4746-077-D9_FLI.pep
TLNSVSFPDLKKLRPVAAGAPPPRICAAMATSNTARMEDGGGDLRSTIKKWNIIYPVYLNSKKTVAEGRRIAAAKACPDPTCIEIADCCSHLKIPHAIELDKAYPRDFFQVGRVRVQLKKDDGSPVNPAIKTKKQLMIQVAELVPKHHGRTKKQEPAPNPGGSSKNTKGGKKKK

SEQ ID NO: 66810 - protein, 136 aa, Zea mays
  Clone ID: LIB4746-077-G4_FLI.pep
LGAAAAAAMAASMISSSALAVAPQGLPPLGRRASSFAVVCSKKKIKTDKPYGIGGGLTVDVDANGRKGKGKGVYQFVDKYGANVDGYSPIYNEDDWSPTGGVYVGGTTGLLIWAVTLAGILGGGALLVYNTSALSG

SEQ ID NO: 66811 - protein, 179 aa, Zea mays
  Clone ID: LIB4746-078-H2_FLI.pep
GITSHVRPPETTMAMETCFRAWALHAPAGSKDRLLVGNLVLPSKRALAPLSVGRVATRRPRHVCQSKNAVDEVVVADEKNWDGLVMACETPVLVEFWAPWCGPCRMIAPVIDELAKDYAGKITCCKVNTDDSPNVASTYGIRSIPTVLIFKGGEKKESVIGVVPKSTLTTLIDKYIGSS

SEQ ID NO: 66812 - protein, 235 aa, Zea mays
  Clone ID: LIB4746-079-H2_FLI.pep
RRLFRRDLIGSPVRLLLQRGAGAPLPPPGPAPPPPRGPRQAPRRGRGRGGELRVRAGGGGRRERHPRADGLRPREAGEDLRRRGRRRVLRQPHRPARGEGRAHRRDRQVVRAAAARRQLPQRRRRQLPRVHRAADRRRVRERLQLAHGHRGRHRHLRRAARVAGSSADRAARPEDDRRQERPPQDAARPGAHRRLHRAVRPRRLQLDRHERPEADRGDRVRVRVARRPARSLRPA

SEQ ID NO: 66813 - protein, 180 aa, Zea mays
  Clone ID: LIB4746-080-B3_FLI.pep
LVITSHVRPPETTMAMETCFRAWALHAPAGSKDRLLVGNLVLPSKRALAPLSVGRVATRRPRHVCQSRNAVDEVVVADEKNWDGLVMACETPVLVEFWAPWCGPCRMIAPVIDELAKDYAGKITCCKVNTGDSPNVASTYGIRSIPTVLIFKGGEKKESVIGAVPKSTLTTLIDKYIGSS

SEQ ID NO: 66814 - protein, 239 aa, Zea mays
  Clone ID: LIB4746-080-D8_FLI.pep
RERNHPPARRASVLRPFPHRPAAMKLEVMPKPKQRVLEAQQREEAMEMSGLDLWKHEKPPRICPLPPSLPPPPPAFDEAALVPPLNFAVVDDGIFRSGFPGTANFRFLKSLNLRSIVYLCPEPYPGTNTEFLEKNGIRLHQFGIEGRKEPFVNIPDDKIREALKVVLDPRNQPLLIHCKRGKHRTGCVVGCLRKLQEWCLSSVLDEYHRFAAAKARITDQRFMEMFDVSSLKHLTPSHC

SEQ ID NO: 66815 - protein, 297 aa, Zea mays
  Clone ID: LIB4746-080-F12_FLI.pep
LGDQLDARVDRGLRDEDVGSLRRVDGVEEHVAAGVPARPGRRRVAEVHPRLGRPRPAARPSSVGEAVSRGVLREFAEGRVDVEDGELEVGVPPLERPDGGVQLGVEGLGVAVEPRHARSLAVAVQPDGRRQAAQRRHGRDADPPRPQPVQLVGEAGEDADEEVGVLLDVVAAGQGGVVVVVLEEVAGARADDVERVAEDGASPGAPGHRRQLRLVLLVVLELLGQRDRVIHGRRVVVVAGRRGGEVGAGEQVLPRRLRAEVRRRVALEAERFGCNNKQCTERTRSINSSHTCSRRHA

SEQ ID NO: 66816 - protein, 142 aa, Zea mays
  Clone ID: LIB4746-081-D2_FLI.pep
SFLPLTTAPSRTPSPTPSLPVSRPTHPRSPAACQRPSRPRRARSSLSSSRSTTLTSCPPATPLSSRTSRASSLPTHSRRSRNGRRPRRPSRKHSRSDTSPERTDGSSLPYSSKLSLFGHGWAQMGMIWHGRLCMSMSVDIIR

SEQ ID NO: 66817 - protein, 375 aa, Zea mays
  Clone ID: LIB4746-083-E3_FLI.pep
GRVTAISLVGRGPGWWRARKTDSQSTVLPKSSRVCCMASTLQLLFSIAITALAFFLHPCASTDEFHRELYGWSNGIATWYGAADGAGTDGGACGYQNAVDQPPFSSMIAAGCSSIYDSGKGCGSCYQAVCTGNDACSGNPVTVVITDECPDCPCPDEQVHFDMSGTAFGALAKPGQESQLRGAGAIQIQYTRVQCEWPGVDVTFSVEPGSNPNYLAVLIEYEDSDSDLDSVDMMQTQGGTSGQWVPMQQSWGAVWKINSGSVLQGPFNIRLTFSSGRALVASNAIPAGWNAGVAYRSGGVAVTRARPRSGACRGYEAAGTLDGLVHRHVVVLLFLFLVLLTLGAEMRCNFFLVLGACEFGLHGLSSSVYFSCIAA

SEQ ID NO: 66818 - protein, 304 aa, Zea mays
  Clone ID: LIB4746-084-C12_FLI.pep
GGVVIPQSPSPQPAALLPHDHNHRQRNPQTQNPTTAPMASPPPPPARHPTSAATAAAAGNGHDTSAATAAAAGNSHATSASPVDALFLQNLMTRVQLRPPFLDTNSFLTQDLDDFLLNEFAALSAAAGASDDDEDVEDEDGGLAGGEGSGEARRRRMLAREEAKLEKEIVRMVLAGEAEDKLKPNSGQSVAVGDHHLCVGFHDDASGEYRIWEWHGHVMLFDDEEGYSAEYIYGNHFEPLAAATARAKKKEKEMREKELSMGLRDLVVDTDDGGNANRSKENGSSGGPRVVRRNVVNGPTTPAR

SEQ ID NO: 66819 - protein, 152 aa, Zea mays
  Clone ID: LIB4746-084-H4_FLI.pep
RALAAATTHYTTRAATALSMSILRAPPPCFSSPLRLRVAVAKPLAAPMRRQLLRAQATYNVKLITPEGEVELQVPDDVYILDFAEEEGIDLPFSCRAGSCSSCAGKVVSGSVDQSDQSFLNDNQVADGWVLTCAAYPTSDVVIETHKEDDLL

SEQ ID NO: 66820 - protein, 401 aa, Zea mays
  Clone ID: LIB4748-001-D8_FLI.pep
NLIPMNFHTASFCASAAIGLPTAPKISASLATGRFACRSERCLETWTFRSPAICLLAATPTRCTLTDTMDPSSDIILDTPFFRIYSDRRIDRLVGTDTVPAGFDPATGVTSKDVVLDSNSGLYVRLYLPDTATGSDHYSKKFPVLVYFHGGGFVTHSAASPPYQPFLNTLAAKAGLLIVSVNYRLAPEHPLPAGYEDSFRALKWAASGSGDPWLSHHGDLGRIFLAGDSSGGNFVHNVAMMAAASELQIEGAVLLHAGFAGKQRIDGEKPESVALTQKLWGIVCPEATDGVDDPRMNPLAAAAPSLRNLPCERVLVCAAELDSLRARNRAYYDALAASGWGGTVEWLESKGKQHAFFLYDSGCGEAVELMDRLVAFFAGNLNSSCVDVTTHHTTTSGETLR

SEQ ID NO: 66821 - protein, 584 aa, Zea mays
  Clone ID: LIB4748-006-E11_FLI.pep
SRADPHFIKSCSTMDTGCLSSMNITGASQTRSFAGQLPPQRCFASSHYTSFAVKKLVSRNKGRRSHRRHPALQVVCKDFPRPPLESTINYLEAGQLSSFFRNSERPSKPLQVVVAGAGLAGLSTAKYLADAGHKPILLEARDVLGGKVAAWKDEDGDWYETGLHIFFGAYPNIQNLFGELRIEDRLQWKEHSMIFAMPNKPGEFSRFDFPETLPAPINGIWAILRNNEMLTWPEKVKFAIGLLPAMVAGQPYVEAQDGLTVSEWMKKQGVPDRVNDEVFIAMSKALNFINPDELSMQCILIALNRFLQEKHGSKMAFLDGNPPERLCMPIVDHIRSRGGEVRLNSRIKKIELNPDGTVKHFALSDGTQITGDAYVCATPVDIFKLLVPQEWSEITYFKKLEKLVGVPVINVHIWFDRKLNNTYDHLLFSRSSLLSVYADMSVTCKEYYDPNRSMLELVFAPADEWIGRSDTEIIDATMEELAKLFPDEIAADQSKAKILKYHIVKTPRSVYKTVPNCEPCRPLQRSPIEGFYLAGDYTKQKYLASMEGAVLSGKLCAQSIVQDYSRLALRSQKSLQSGEVPVPS

SEQ ID NO: 66822 - protein, 306 aa, Zea mays; identical to SEQ ID NO: 46382
  Clone ID: LIB4748-009-A12_FLI.pep

SEQ ID NO: 66823 - protein, 490 aa, Zea mays
  Clone ID: LIB4748-011-B1_FLI.pep
SNKETRDSLPHRAPQPRTIMESSSAATTMTGSSSGREHGGVHVLLVPLPAQGHMNPMIQFGRRLAYHGLIPTLVTTRYVMSTSPAAGVPFPLLAISDGFDEGGMASCSDPVEFCRRLEAVGSETLARAIDAEARAGRAPAVMVYDPHMPWAQRVASAAGVPTAAFLSQSCAVDLIYGEAWARRAPLPMADGSALRRRRVISVDLGAEDLPPFVVAPEIYAQYLKVSISQFEFVDAAADVFVNSFRDLEPLEAEYMESTWRAKTVGPALPSFYLDDGRMPSNVASGVSFFSSSAPTMGWLDRQPPCSVVLASYGTVYSLDADQLGELGNGLCDSGWPFIWVVRPDEAQKLPQDLEDACGEKGLIVQWCPQLEVLSHKATGCFITHCGWNSTVEAIVAGVPMVGMPRSADQPTNARYVESAWGIGLRMRLDKNGLLKREEVQRCIRQVMEGERKTEFRRNAAKWMNKAKEAMQEGGSSDKNIAEFAAKYLSA

SEQ ID NO: 66824 - protein, 317 aa, Zea mays
  Clone ID: LIB4748-013-F7_FLI.pep
TLMGLLLDGVVMQTILISTGIFLTKQPETRAIMNWVKQEHFTASASLHGGALVADYPWDGTRDTSKHYYGCPDDKTFQHMASVYSRSHYNMSLSKEFEGGITNGAFWYPIYGGMQDWNYIHGGCFELTLEISDTKWPKADELPIIWEHNRMSMLNLLASLIKSGVHGRIFAADTGRPVPGSVMIKGIDSKVSASSTFGDYHRIVAPGETYEVVASMRGFRQKSTRIRLEQEAVSLDFILDPDGADGQTKLRPRSNDRGCRCDNDNAAKPFHVHEAHLWLYLLIVSVLLALYVVFKRKTVPRLLAYRHSSSLRRPVAV

SEQ ID NO: 66825 - protein, 502 aa, Zea mays
  Clone ID: LIB4748-016-F9_FLI.pep
ECILFTCCLIMDNSQNQPPPPGVGTWPQAPPSHPPQCHADPQSYHPQFAARPDNASANNSGSSANIESAVQEAVLHAQDIETQQVIQNQRHANTTSEPTKYGEDLLSNRRDPNALKEHLLKMTADHRAEMASKRGKPLHPNNGNCEIGNGYGVPGGGAYYAANLPSPQMNKPRDETDKAKCANDLPDFLKQRLRARGILKDETTNKNYTSTQTVDSQEIENKSAQELPPGWIEVKDPTTGVPYFYNQSTGVSQWDRPDSVVNIMQHQVSPSLPENWEEAIDKSTGHKYYYNTKTQTTQWEPPTSVNTNVTPPASTNTAVEPVAQAADIWNSQMQRCLGCGGWGVGLVQPWGYCNHCTRVQNRPFQQYPSYTNNTMHASGNNAPKTQGNVSAKNRSSSKPPLGKPNRKDHRKRNRPEDDELDPMDPSSYSDAPRGGWVVGLKGVQPRAADTTAAGPLFQQRPYPSPGAVLRKNAEVATHGKKRGGMAPITKRGDGSDGLGEAD

SEQ ID NO: 66826 - protein, 634 aa, Zea mays
  Clone ID: LIB4748-017-F12_FLI.pep
PGQANRLRRHPNSFTLISLLPLFLLFPLLPLQFSFPFFLHTSKALNLPPGKNPRPAMSVPGAPSGGGSRSFDFGADDVLCSYDDFAASSEPKRPDPADSVPDFHDSRLGRPFVKPYEQESYGKEDVLSAVEKCMKKYADNLLRSLEGITSRLSQLEIYCYKLERSIGELRSDVLRDETDHRLKSLEKHLNEVHRSIQILRDKQELAEAQKELAKFQLTQDTSKKKEDVPTSIPEQKKPEENPDTSNQQLALVLPHQVNLPSLAPRASESVQQYKNQPVQPSDPTPPVPQQDRYVLSQAIVYYPQRQAPGIQDTQGQKLQPEVQYLPARPPAQEVPVHAPSQPPQAGNQTQPQPYPPYQQQWHQQSSQPAPAPVAQTQQTFSQPFPPPAQQPQLSNVQQFPPQPVQQPQSNAQQYPPPVQPQQSSPQLPQAMQPQHPPMQTQMRPQTPPNYPHYPPHQPLNPTPETLPGNVAMQESYNTAVPSGANRPELPYSYGGAGIPLPQHNMQRHQLPPSSQGSFGPPPSKGSYAGSSQYAPQGNPQGYNTGYAYPPNGPPAVQPQQMPPGGVGMSHPGSHMMRGHPYGEMMEKAITMGYPRDQVLNVTQRMAESGQSMDFNTLLDRLNEAGSGAPPPRAW

SEQ ID NO: 66827 - protein, 228 aa, Zea mays
  Clone ID: LIB4756-001-A11_FLI.pep
NNPASAGRFAGGVAAMAASKPILYSAWISSCSFRVRIALNLKGVDYEYRAVTRNDLDYEKINPIKYVPALVDGDFVVSDSLAIILYLEDKYPQHPLLPQDLKKKAINLQIANIVCSSIQPLQCYAVIGLLDGTLGCNQSLQIVRNYTDKGFKAIEKLLEGCDSKYATGDEVQLADVFLAPQMYAGVTRFGIDMSKYPLLERFYKAYMEIPAFQVAVPEKQPDAPASPY

SEQ ID NO: 66828 - protein, 218 aa, Zea mays
  Clone ID: LIB4756-001-F12_FLI.pep
GTPLDLVELVCLHHRISLGNGVPGSSPVVELAVVLVGVAVECAVQVPTPAVESRKSNPLPAGAAPVRPYLPPFGDRRHPLAGSGNISGLLHVHCLQLNLGNSYYRVAASNNRLHDGVAAVHDAVDRGGSQLGLILLRYHLLVALGAHVHGRRAAEEATVIDAEDGSLGGLAPSLLVLHGFLNSDETALFAIPLRRSPRGRRGGEGRGIAGNSVGFEIP

SEQ ID NO: 66829 - protein, 308 aa, Zea mays
  Clone ID: LIB4756-001-G4_FLI.pep
PGHTNLSTPRRVRGGAAVASSVAAAASTFLGTRLADPAPQNGRIVARFGFGLGGKAKPAPKKVAKTSTSSDRPLWFPGAVAPDYLDGSLVGDYGFDPFGLGKPVEYLQFELDSLDQNLAKNEAGGIIGTRFESSEVKSTPLQPYSEVFGLQRFRECELIHGRWAMLATLGALSVEWLTGVTWQDAGKVELVDGSSYLGQPLPFSISTLIWIEVLVIGYIEFQRNAELDPEKRLYPGGSYFDPLGLAADPEKKERLQLAEIKHARLAMVAFLGFAVQAAATGKGPLNNWATHLSDPLHTTIFDTFGGSS

SEQ ID NO: 66830 - protein, 419 aa, Zea mays
  Clone ID: LIB4756-004-C12_FLI.pep
RTPPLPSSHEIPTRTKLSSPATVAAACYAQGVCGARGIQRGMGWGTVVYEGAVVGSSLVGLGWAGLWFLNRRLYKEYEERRVLVQILFGLVFAFSCNLFELVLFEILPVLSKHARFLNWHLDLFCLILLLVFVLPYYHCYLLLRNSGMRRDRAWLVAALFLLVFLYGFWRMGIHFPMPSPEKGFFTMPQLVSRIGVIGVSVMAVLSGFGAVNLPYSYLSLFIREIDETDIKTLERQLMQSIETCTAKKKKIILSQMEMERIQGSEEKLKARSFLKRIVGTVVRSVQEDQTEQDIKNLEAEVQALEELSKQLFLEIYELRQAKIAAAYSRTWRGHLQNVLGYALSVYCVYKMLKSLQSVVFKESGSVDPVTMSITIFLRHFDIGIDVALLSQIFDVHRDVGCHICSRFLGKCYEVLLRCF

SEQ ID NO: 66831 - protein, 397 aa, Zea mays
  Clone ID: LIB4756-004-G3_FLI.pep
GQKESTLHLVLRLRGGMQIFVKTLTGKTITLEVESSDTIDNVKAKIQDKEGIPPDQQRLIFAGKQLEDGRTLADYNIQKESTLHLVLRLRGGMQVFVKTLTGKTITLEVESSDTIDNVKAKIQDKEGIPPDQQRLIFAGKQLEDGRTLADYNIQKESTLHLVLRLRGGMQIFVKTLTGKTITLEVESSDTIDNVKTKIQDKEGIPPDQQRLIFAGKQLEDGRTLADYNIQKESTLHLVLRLRGGMQIFVKTLTGKTITLEVESSDTIDNVKTKIQDKEGIPPDQQRLIFAGKQLEDGRTLADYNIQKESTLHLVLRLRGGMQIFVKTLTGKTITLEVESSDTIDNVKTKIQDKEGIPPDQQRLIFAGKQLEDGRTLADYNIQKESTLHLVLRLRGGV

SEQ ID NO: 66832 - protein, 189 aa, Zea mays
  Clone ID: LIB4756-007-H4_FLI.pep
FRCFQRGRRAATQRNQRWYLSVSCLLRLGPGIVLLQREGQRQQQDGRGELQERGPSAGARRGLLGRPGVVLGDDVGGLGREGSRVDLADAVLGHELLGGGAVADVLEVRGGVLADGRQQDLVAAGVLFHERRDVVHLAGDDEPAVLAVAVLPHLLERVNLPSRHMVVGGLPIEMRIEQEDHQMKKLLAR

SEQ ID NO: 66833 - protein, 137 aa, Zea mays; identical to SEQ ID NO: 47611
  Clone ID: LIB4756-009-H1_FLI.pep

SEQ ID NO: 66834 - protein, 337 aa, Zea mays
  Clone ID: LIB4756-011-G11_FLI.pep
AKLDKASYRGEIKQSIGTAMATSSGSCLISLLVVVAALSASTASAQLSSTFYDTSCPSAMSTISSGVNSAVAQQARVGASLLRLHFHDCFVQGCDASILLNDTSGEQTQPPNLTLNPRAFDVVNSIKAQVEAACPGVVSCADILAVAARDGVVALGGPSWTVLLGRRDSTGSFPSQTSDLPPPTSSLQALLAAYSKKNLDATDMVALSGAHTIGQAQCSSFNGHIYNDTNINAAFATSLKANCPMSGGTSLAPLDTMTPTVFDNDYYKNLLSQKGLLHSDQELFNNGSTDSTVSNFASSSAAFTSAFTAAMVKMGNLGPLTGTSGQIRLSCWKLNSS

SEQ ID NO: 66835 - protein, 182 aa, Zea mays
  Clone ID: LIB4756-012-D11_FLI.pep
GLASTPSGSSQTLHRRRRRRPPASSPKMQIFVKTLTGKTITLEVESSDTIDNVKAKIQDKEGIPPDQQRLIFAGKQLEDGRTLADYNIQKESTLHLVLRLRGGAKKRKKKTYTKPKKIKHKHKKVKLSVLQFYKVDDTTSKVTRLRKECPNSECGAGVFMANHFDRHYCGKCGLTYVYNQKA

SEQ ID NO: 66836 - protein, 271 aa, Zea mays
  Clone ID: LIB4756-013-C8_FLI.pep
FSSDKLGVVKTAKGSSLMISFIYRIPHRGMLAKGRKVAGRREEMSANYAFGPQDDDAIIKHRLLTRTTTTRGEPPLKKLQKKFMSFATEIEKDADNISDCERLYKAFLHEINTFELPLLKSKAVVDANIREKESFNELQVEIERQILHAKTDIEDLKKQLEQSKIERQHKEECEAIRKLISLQPPRSETEKLIADLEKEITDLKAENVACIRTLELRKKQFALLLHVVEELQISIEDEQKSIADELRAIAGEQKMSMEEGSVGASDSMVVD

SEQ ID NO: 66837 - protein, 360 aa, Zea mays
  Clone ID: LIB4738-079-C2_FLI.pep
STPIVVAVAVERTTCTHTRARAIVGRARNNRALLHGALGGEALLVALGVGAVVVDHVLALHPAHPLLQGEVQLLVVPVPGAGGGGGGAGALGADGGAAAGPAARDGDAGVGLEPAVGGGEGGVGPVRLDAPALRRPVVRVPQAGVEPHRLALGERHPLALQVAEVPDGHVVHHEDDVLGVPEDGVGVEVGGGVEPEAELLLPLPLPPREHVGVQRVGLAGHVAQELEVDLVVRAALRRQVVGGDGAGGVARHQPQLHVDLAEQVLVPGLEPGAGRAVQRQRQQPPVVKDLAPPVAPRDVLLLVQAARREGAGHQHAQAQQQQGHPTRRRRHDRCNQPPRETDTYRHSTLMIEQVATRCST

SEQ ID NO: 66838 - protein, 452 aa, Zea mays
  Clone ID: LIB4738-080-C9_FLI.pep
PARALMAPALTSNPPSFRPLTSPLRRRAATVPCRVGKPGKDSSAADDATGPNKRPNLFADFGNAKSLIQAFPSQSLFAGGGRGRKDPQTVFVAGATGQAGVRIAQTLLRQGFAVRAGVPDLASAQELARLAAAYRLISPAEARRLNAVEAGFGDPDAIAKSIGPAAKVVVTVGSAEKGPEGGGVTTDDALRVVRAADLASVAHVVVVYDEGAASGGLGGGGSTYNVLDGFTSFFSNLFSREQALTLSQFLAKVAETDVRYTLVKASLTDDYTPESYYAQLVLTKEGVSPSDTGKVSRSQIAALVADVFSNVAVAENKVVEVSTSSSATAKNIAEAFTAIPEDRRRTEYLEAAAKAQAEEETLASERANKKAEAAASKSEADTKTTPSEEEAATPSAVNGAQASLENLLSRANVISADFSWEKFSTQFADVTTPLTSSLEKEPNKAQIATVRG

SEQ ID NO: 66839 - protein, 408 aa, Zea mays
  Clone ID: LIB4738-080-G5_FLI.pep
LGEWWRRRPTVGSPVSRFPLTTSTCPHPSRPRRLMESLLASRSIRSSFSAVASTRGAASPRPSRVATLASAGAGARSRALRAGHTDDMLNAKELVQWENGLSFNDIAARQGIRIRRHCRPTASLKEIEEELGAPLNILEKIIWDKEIEVAEGHAKKPLEEVIQAATKAPPSRDFYGALEAAYKRNGVPALIAEVKKASPSRGVLRENFNPVEIAQAYEKNGAACLSILTDEKYFQGSFDNLEKVRSSGVKCPLLCKEFVIDKWQIYNARSKGADAILLIAAVLPDLDIRKFLQICEELGMTALIEVHDEREMERVLKINGVKLIGINNRSLETFVVDTSNTKMLLEKHGDIIREKGILVVGESGLFTPDDVAYVQNAGVSAVLVGESLVKQECPGRAIVGLFGKELLH

SEQ ID NO: 66840 - protein, 497 aa, Zea mays
  Clone ID: LIB4738-082-E1_FLI.pep
TLTHTLFLSLSRGDDWATAGADLRQVPKPSTGPSPTTTTHESEMSSVGSGSGTRAANGAAAISAAATAAGSADARFHPQLLQQDRQSRWAGCFSGLSCFGSQKGGKRIVPAARTSDGNGSNARGNGLQSGANSNQNMPMNLSLLAPPSSPASFSNSALPSTAQSPNCFLSVSANSPGGPTSNMFAVGPYANEPQLVSPPVFSTYTTEPSTAPLTPPPELAHATTPSSPDVPYARFLSSSMDIKTASKEHNMPFLSTTYSGGSGLQASYPLYPESPCSSLISPASVTPRTGLSSPIPEQEVPPAHWKTSRSACDTPYFRASPIPEQETTAQWKTSRSACDTPYARTSPTNIFGLDSNTPRNYMLDSNFFRPAASAQFYLDQAQQAFPHNGGRVSVSREKQDADEIEAYRASFGFSADEIVQSQSYVGIPDAVDESFSISPFGNNAPATEICPFSDLPSEVQKADKSCTYVKDGTSPKKSANHLSIDSPIKFCAWTCSK

SEQ ID NO: 66841 - protein, 370 aa, Zea mays
  Clone ID: LIB4739-002-D2_FLI.pep
SLRHTCTGVAIDRRNAPPPPDAAAEKDESTQGLQLPEDIRWERLDKARFFVVGAGLFSAVSAALYPAVVLKTRLQVAPAAAAAESAALPLSAVAAATAILRQEGALAFYRGFATSLAGTIPARALYMGALEATRSAVGPAALSFGAAEPAASAAAGAVAGLAAAVAAQVVWTPVDVISQRLMVQGNPCPASRYHGGLDAFRKTVASDGLRGLYRGFGMSILTYAPSNAVWWATYSLSQKIIWSGIGCYLCDYGVGVQEIDLGDGDSLLQPGCKTVMVVQGVSAAMAGGASAFVTMPLDTIKTRMQVMDGDGEPITVGRTVRRLIKEGGLAACYRGLGPRWASMSLSATTMITTYEFLKRLSDKGQGSDLA

SEQ ID NO: 66842 - protein, 308 aa, Zea mays
  Clone ID: LIB4739-004-H8_FLI.pep
SLIIGMVGSLIFHSPNVDPKAENPNEMATAGVLSSLQNFLRKCLIAILSYGPMPKHIAFIMDGNRRYAKFRSMQEGAGHRMGFSTLIASLMYCYEMGVKYITVYAFSIDNFKRDPSEVESLMQLMEEKINELLENQSVINKIKCKINFWGNLDLLYEPVRLAAAKLMASTAGNTGLVFSICMPYNSTSEIVNAVSGVCAERMVMFQSEHIGDCNGHAANNGVRSEISVAELDRHMYSAGCPDPDIVIRTSGETRLSNFLLWQTTFSHLQNPDPLWPEFSFRHLVWAILQYQRVYPALEHNRKLAKKQL

SEQ ID NO: 66843 - protein, 460 aa, Zea mays
  Clone ID: LIB4739-007-B4_FLI.pep
YQLHRFLSKMALQNIGASNRDDAFYRYKMPRMITKIEGRGNGIKTNVVNMVDIAKALARPASYTTKYFGCELGAQSKFDEKTGISLVNGAHDTAKLAGLLEVFIKKYVQCYGCGNPETEILISKTQMISLKCAACGFVSDVDMRDKLTTFILKNPPEQKKGGKDKKAMRRAEKERLKEGEAADEEQKKLKKDAKKKGSKDSTAKGLKKKATTATGSDEDHSSSPTRSHDGDKAAADDDDDDVQWQTDTSIEAAKQRMQEQLSAATAEMVMLSTEETEKKMKQATHKDGSTNGSAKEIPNDKPAVTKPSPYEELIGDIKASLGSAPTPTQLKAVLASSTLPPQDVMNALLEALFGGVGKGFTKEVVKNKKYLAVAVPDEGAQTLLVQAIEAFGGKCNPEALKEVPVVLKALYDGDILDEETIVDWYNDAVAAGKDSQVVKNAKPFVEWLQSAESDEEGDDE

SEQ ID NO: 66844 - protein, 275 aa, Zea mays; identical to SEQ ID NO: 66540
  Clone ID: LIB4739-043-F6_FLI.pep

SEQ ID NO: 66845 - protein, 455 aa, Zea mays
  Clone ID: LIB4739-044-G3_FLI.pep
IRSIASGGDPSGVWRLASGVCLGPGCPAARSTFGEDAAPVLRLVGPEGGGAAMGALSRPEEVLALVKLRVAAGQIKRQIPPEEHWAFAYSMLQKVSRSFALVIQQLGPELRNAVCIFYLVLRALDTVEDDTSIPTEVKVPILQEFYRHVYNRDWHYSCGTNHYKVLMDKFHLVSTAFLELGQGYQKAIEEITRRMGAGMAKFICKEVETVDDYDEYCHYVAGLVGYGLSRLFYAAGTEDLAPDSLSNSMGLFLQKTNIIRDYLEDINEIPKSRMFWPREIWSKYADKLEDFKYEENTEKAVQCLNDIVTNALIHAEECLQYMSALKNHAIFRFCAIPQIMAIGTCALCYNNVHVFRGVVKMRRGLTARIIDETNSMSDVYTAFYEFSSLIESKIDDNDPNAALTRRHVNSIKQTCKSSGLVKRRGYHLDTSPYRPMLIMIVLLLVAILFGALYTK

SEQ ID NO: 66846 - protein, 226 aa, Zea mays
  Clone ID: LIB4756-013-H7_FLI.pep
RITKEFTAMLKNIIFNNDKNKTFKPKKSFSKGTKRYELHKHAKATLGSGNLRQAVVLPEREDINEWLAVNTVDFFNQINLLYGSITEFCTPKTCEVMSAGPKYEYLWADGETIKKPIKVSAPEYVDYLMTWVQSILDDESVFPSRVDVPFPKNFRDIIKQIFKRLFRVYAHIYYSHFHKIVSLGEEAHLNTCFKHFYYFICEFNLVDKKEMSPLQELIDNLTRNDK

SEQ ID NO: 66847 - protein, 256 aa, Zea mays
  Clone ID: LIB4756-015-D10_FLI.pep
ALSTAGFGSSSCLPPRVLAGPEVGLHPRDEEDLAVVDVGVNQGQRQRRRSTDHLALVVVLGSVAWADELVLGAVPRHDAAEVSAHGVDPVGGQRLVLLHHQVRGVTLEPLRERAVVGTVRVEPRLHRDVVAQLVLRVGPAAGVPGAGRDEEGAVGDDHADGGQRDGAEEEEVHQLPLLHVGDAVGGDAARRLAHNAPLGALAAHAQAKPLHRLAQRSAGPAELGGIGGGRERRGGRHGCSRRGSVGVGTIRLVFTH

SEQ ID NO: 66848 - protein, 169 aa, Zea mays
  Clone ID: LIB4756-015-G7_FLI.pep
RDGLPLLCRRHRPFLRRTSASPRRGQKEVLHRARLSPQGHRHRRRGNGCQRPACRRCHGPGGAAGRRRRRARLRAQPVHRQGRRHHHIQEQRRLPAQRRLRRRRGAERRRRHQDLAGGVPQCARRDLLRHPHRAGNLRLLLRAASRSRNGRQDHRQLIKLAIDRYPFMY

SEQ ID NO: 66849 - protein, 497 aa, Zea mays
  Clone ID: LIB4756-016-B5_FLI.pep
PAPSPTSGGGRATVLAPNMETYTTDDALTIMGFGKFQALVLFYAGMGWVAEAMELMLLSFLGPFIREEWNVSPENESPLSSVVFAGMLLGACAWGFVSDKYGRRTGLIFSTLFTSGMGFLSALSPNYLCLVALRFLVGVGVGGSHVFISWFLEFVPAQNRGTWMVIFSLFWTLGTILEASLAWVVLPALNWRWLLVFTALPCFLLLPFFGLTPESPRYLCAQNRMSDATSVLERMANANQSALPPGVLTYNRQTKCDHDVLAPESECLLPVREKECTVDNAKSSESGSLAALRMLLSRELLRSTLLLWFVFYANSFAYYGLVLLTSQLSDANKSCASGVSFGLRQKEINLYKDTFITSLAEIPGLFLSAVLVDWFGRKASMWSMMFACCAFLGPLVLQQTELLTTILLFGARACAMGSFTVLCLYAPEVYPTFVRSTGAGIATAIGRIGGVVCPLVAVAMLRSCHQMEALIVFEVILCLAAVACMFFPVETKGRGMD

SEQ ID NO: 66850 - protein, 194 aa, Zea mays
  Clone ID: LIB4756-016-B8_FLI.pep
PGKKTGPARIYITTPTPSLHVIRDTEPSGIDPTATGRMIIPKEDRRTIYENLFKDGVMVAKKDYDAPKHVELDVKNLYVIKACQSLNSRGLIKTQFSWKFHYYTLTDEGIEYLREWLNLPSEIVPATFKKVQRAVPAGRPQQASGVYRPPRGEGGGDREGYRKKESGADGRFRPRFAGIGRGAPSGDAPAAGGW

SEQ ID NO: 66851 - protein, 235 aa, Zea mays
  Clone ID: LIB4756-016-G5_FLI.pep
RGLTTTQRASVSHTVTHTASTRAARRPQASVPPAREGIRAGSWVASHRLTMPPAPKSGDALFASVDRVNAELFTLTYGAIVRQLLTDLEEVEEVNKQLDQMGYNIGTRLVDEFLAKSNVSRCVDFKETADVIAKLGFKMFLGVTATVTNWDAEGTSCSLVLEDNPLVDFVELPDTCQGLQYCNLLSGVIRGALEMVSMKAEVTWVRDMLRGDDAYEMRVKLIKQVPEEYPYKDDD

SEQ ID NO: 66852 - protein, 392 aa, Zea mays
  Clone ID: LIB4756-017-G6_FLI.pep
RRKLDSMSLCALRFPRVPIYQLRSTPRLRHLFFPTQYIRSFSALDKPTAMDKAPGQESKGSITDWVKPGDKSGEFKRQTSVFRNWIENKPNAEFPPEKGRYHLYVSYACPWAHRTLIVRQLKGLEDIISYNSVHWHMAEKGWRFASSDERIPGNTTPDPLHQDYTHLRDIYFEQNPDYEGRFTVPTLYDKKTNKIVSNESAEIIRMMYTAFDDIIEEKYKKVDLFPKDLQKDIEEMNEWVYNDVNNGVYKSGFATTEEAYTKAVTQLFKSLDRLEESLSQSKTPYLLSAPHVTEADVRLFTTIIRFDPVYVQHFKCNIRDIRSGYPHIHKWLRHLYWDYPAFKDTTNFEHIKKHYTKSHGQINKFQITPIGPLPDILNKEDEVPSVKAALAK

SEQ ID NO: 66853 - protein, 183 aa, Zea mays; identical to SEQ ID NO: 44872
  Clone ID: LIB4756-018-H8_FLI.pep

SEQ ID NO: 66854 - protein, 378 aa, Zea mays
  Clone ID: LIB4756-019-E4_FLI.pep
TARDRSYQDCGVCNQISMHNRIEEMYHHQQQLQSHSHFLSSRQTFPPERHMLLQGGSIPAEPGLVLSTDAKPRLKWTPELHERFVEAVNQLGGPDKATPKTIMRLMGVPGLTLYHLKSHLQKYRLSKNIHAQANGVNAKNVIGCTMAMDKPLEGNGSPASHLNLGTQTNKSVHIGEALQMQIEVQRRLHEQLEVQRHLQLRIEAQGKYLQSVLEKAQETLSKQNAGSVGVETAKMQLSELVSKVSTECLQHAFTGFEEIDGSQILQGHTIQLGDGSVDSCLTACDGSQKDQDILSISLSAHRGKEIGGMTFDIQEKERGREDLFLDKLSMTPPGQLDRRERGSFSMTRKAAKLDLNINDTTDGPQNCKKIDLNGFNWT

SEQ ID NO: 66855 - protein, 490 aa, Zea mays
  Clone ID: UC-ZMFLMO17067E02_FLI.pep
RTTGIEHEDDMVSTNHVDWVQTIEERAIDQAQKSQSGSFDQIHGNLESTFSQLQLSQADPANGMQVIQANTTIHSQPSQLDTLSPTQKKQENSSKQLQSVVTDSSIPKRTTQKCTIDQPSQPDINHIRTDQEFTGNQFPSSLPVDTVISLGDTEEFTAGHSQPRNSDTAGQIQANEENTADQVQLSLAETVILVPAIQEYAAGYSLLSKADTTDQTQANQEYIADQVQSCLTDALIPVKAIEEYTTDYSHISKADITNQIQVNQESTDDHLYLRQVDCLAEMQIIEQNLSKQPQLSQPDTGDQIRIDLESTTNHLQPNYDENSMLQSGFSWAPEQNRGAPTDFWKNVESQASSVSMPINGAPLSSFPANVRFQNAAAAAAAAEPALPPQVAPTETGSDQSGLAFQSLFGNIWSDPCIEFAFKTLTGDIPVLDDTTAVTDYFPEQQDLNKDPAPNCAGSVFDSSRNHTQVDVNLPPPAPDGFYDGSWFPPQ

SEQ ID NO: 66856 - protein, 143 aa, Zea mays
  Clone ID: UC-ZMFLMO17076B11_FLI.pep
SSTAPRSYSSPTISTCRAPTQLRGSVLSTLSRTIPGLTMLGLRTSSADSSTRRPPVRSPLTAWQCMKLLNPSIAGCPFYCACIFSLLVMIGLSIFSQGIANVRCRTTPMTSWCSAMLASTGTFVTMICNLHFTDICLCSPSIM

SEQ ID NO: 66857 - protein, 763 aa, Zea mays
  Clone ID: UC-ZMFLMO17077G03_FLI.pep
LPAGTIHVKFTGSAGQSFGAFLCPGITLELEGDSNDYVGKGLSGGKIVVYPPRNSSFSPEDNIVIGNVALYGATMGEAYFNGMAAERFCVRNSGAQAVVEGIGDHGCEYMTGGTVVILGKTGRNFAAGMSGGIAYVYDVDGKFSARCNNELVDLYHVEEEDDIITLKMMIEQHRRNTESVLARDILSDFDNLLPKFVKVYPRDYKRVLESMKVEKAVAKHAKEPKMANGISVTTKKVQPDQSASRPTHVANAKKYRGFITYERESISYRDPKERVRDWKEVAIESTPGPLLNTQSARCMDCGTPFCHQESSGAGCPLGNKIPEFNELVHQNRWREALDRLLETNNFPEFTGRVCPAPCEGSCVLGIIENPVSIKSIECAIIDKGFEEGWMIPRPPLQRTGRKVAIVGSGPSGLAAADQLNKMGHFVTVFERADRIGGLMMYGVPNMKTDKIGVVQRRVNLMAEEGVTFVVNANVGSDPLYSIERLRSENDAVILACGATKPRDLTIPGRELSGVHFAMEFLHANTKSLLDSNLEDGKYISARGKKVVVIGGGDTGTDCIGTSIRHGCTSLVNLELLSKPPSTRAADNPWPQWPRIFRVDYGHQEAATKFGKDPRTYGVLTKRFIGDGNGKVKALEVVRVKWEKVDRRFQLKEMEGSEEIIEADLVLLAMGFLGPEATIAEKLGLEKDNRSNFKAQFGDFATSVDGVFAAGDCRRGQSLVVWAITEGRQAAAAVDKYLSRYDQNAAATGDSTPSGTGLVQPVAA

SEQ ID NO: 66858 - protein, 400 aa, Zea mays
  Clone ID: UC-ZMFLMO17077H02_FLI.pep
GVLGGAMFVSSVVLGVIAIRLGGQEVAVHRASFFRDAAFLFLALVAVAVVVAAGQVTIWAAAGFASLYLVYVLAVAFTPDRWTRRHDAHAVDDPASAAAFSELHNVTETKFYTDQEARDPLLPDTAPLLQYYAGEANSNSNDGSTGNKSVFWTVLRVLELPLNLPRRLTIPDASKERWSKTAAVTAATLAPIFLSLLWSHRATGGPFVTVLLGGLAGLALGLIAFLTTDPFAPPTRFLGAWLAGGFAMSVAWAYVIANEVLSLLVSAGIILSVDSAALGVTVLAWGNSISDLIANVAVASRGGGAQVAVSGCYGGPVFNVLVGLGLSMLLACWSGYPQPVEIPREPGLYRTLAFVVAGLLWAVVMLPRRGMRVDRTLGVGLLVVYFCFLCINVSELKNAR

SEQ ID NO: 66859 - protein, 684 aa, Zea mays
  Clone ID: UC-ZMFLMO17156G04_FLI.pep
RNRSPATTSGDQITHQNAMQNSNSDTTQGKRDAQGTTEKHVKPYLKNPQNEQHFPGSDPAHGSANVRIAGGTVGPAQRHVGVVNSTRQFAARSGSQMHAPSGSYANIQRGSFTSVGASGRYSAFMSRNIQQNQRPDTMFRGRPTVRSFVAQNTNRYHQGSTSNQKVHPIKEWKPKSTKKSPTIDADNSIADATSPSASNCESANTLNVNELPEKISQTNLHEVEHVIIPEHLRVPEYEQTKLRFGSFTSGLDSEQVSASTPQDTEQPEHVQESVQQASEYDSLDAGPDDMDEQARSSQHLSTSTAEISLPPSEDSDRMSGQVENDDGLGLVQSDTPIGAADGDNTQITSTLTAFSAYSHEDPNMHTNNEAQLYGLVEPNVHPQVLASSSQGYPSENPEADNAVQVFRMPESNVHSQVLPSTSEALNPQIVSNSPVSISSQQQQHISQQQAAAQMYPQMHVQHFPNFMPYRQLYSPVYPMPMPNYSPNVPYPSNGNNYLQMPSGGSHLTAGSVKYGVSQFKPLPSGNPSGYGNYTHPAGFTMGSPGVIGATVGVDDVNRMKYKDNIYASTPQVETSDIWIQQAREMPPMQVPSYYNIPGQATPGAFVPNPANASFNATAQSSHVQFPGLYHPQQPPSIVSPHPMVHQQVPSAIGPNVGVGVAAPGPQVGAYQQPQLGHMNWRPSF

SEQ ID NO: 66860 - protein, 586 aa, Zea mays
  Clone ID: UC-ZMFLMO17164G09_FLI.pep
FRTRIELVGMPDWRVREFEGKFTDEFAHSNNNKHESGVEAPGVTSSKKLKHTVAGEKIQGVIPGINSSDPQKCNSENIQHENRIVSQNINSAGDCIGDCKDSSNAFSSREENTIAETRCPTDDWNSCQFALSNGSSILNNHSAPQDSLTYGDNDLNYIDWPGIDNFEDVDTLFRRSDFTYDPQQLENTDGLSWLPSSDAVYSSDVALQQGFDSSYSDYDILDDLSAFQCAEDKSLPSVGPSSDLCDNQFNDTYLFSEQKNANAYGEQIYQEDVMELLPTDQICSGHENIDMLQGGNQYSSEHTIQGIEDKKFSIASTSQLSSSQNLLKQRHHLDSNSPSNITYEAYEEKFGPSSGSFAQRNLKVQKKTMNMQPTQPINDNVMNRHPQTLTRSASYPCENNESERRGLGKRTLGDPQVTMGTSMVVDGSFVSSMSSDISVEESSFRQLQNAVSQLDVQTKLCIRDGLYRLARSAQHRQVIPNMMSSNEDNPDIKDLQNAETLRKFVDPRSIETQTNPIDRSIALLLFHQSSDHAAVAVDDASSLKPPAGSKHHQGPAANQNQGLIPDSSVYSPGDGAPKDVQSLDKF

SEQ ID NO: 66861 - protein, 197 aa, Zea mays
  Clone ID: UC-ZMFLB73201H12_FLI.pep
QQRQPAEAWSESCCRRRERRPEDLPAGLRRRRRRVRWRRRRPRGHRRRCGRHWRYDWRWPRRCRRWWTRRVWTAWWCWRRIRPWWRVRSRRWRRRRPWWRLRIGSGRQRRPWRWQWARWRRWLPSPVIVNVKLSVHDCLHTHVSAASCFARYMFLSFYIVLYIYVRCMHASSILKLVSSVVSTHNAASLCLFITHLY

SEQ ID NO: 66862 - protein, 332 aa, Zea mays
  Clone ID: UC-ZMFLB73235F02_FLI.pep
HFYLQYSLHCTHTVTHTPYSLIACVTSGARRRPRNQAGSWFCPRLSYKYSIASTHGRLLGDGAHDSNHASNTRRRLSVSLTHDTRCKLMECIVVRFGLLPPGRRRSCSDPWLRPRTPRRCRTAAGNPPRRRSYCRACHRRGRGVGRTRSRTLPRRGASAWGSTRGRSRTCRRPRRSSSGRSGTASCRSSRSPAAPAPAACRGGRPCSTTAGGPCRCRFPGTAGRPRGLLRRLPPLPRWRPARRWAADPCRCLRGTSSGRARRRSSSSASRCCGARHGGSSPPGTSPRGGRRARTRGRRCRRSRAARTPARQRCPRRRPSCRAQQWLRHAWSC

SEQ ID NO: 66863 - protein, 149 aa, Zea mays
  Clone ID: UC-ZMFLB73236C09_FLI.pep
HNSSKVVTLHCCPSPGHHHYPLPFRSYISSPLPPASHKLIRSAGPPLSATSLDQQEGQRNNGDAAVAGPPTGCHSGGVEAADDEICVARADVGGEGGSWRRVSQEASSCRMSSTQWGCMLATATATALVVSTEWRRPTTSSPSSSTSSQ

SEQ ID NO: 66864 - protein, 111 aa, Zea mays
  Clone ID: UC-ZMFLB73245B07_FLI.pep
SMWMFETINLHGDVTSASPRMSYLTEQSSSQCFTAKIAIVSNSPSNYVPVVDLFGAGNLSLDLLEFSATGSFFNGLYAKESRSITDCWQMLLASLRVLEICPFDGSDWTSK

SEQ ID NO: 66865 - protein, 303 aa, Zea mays
  Clone ID: UC-ZMFLMO17235B07_FLI.pep
ALLRFPGGEALSVAAILEAPGEVVAKSAHSTLYRAAVRSGEAAVLLRFVRPACADEAFAAAARRIGAVRHPNLVPLRAVYVGPRGEKLLVYPFYAAGSLQRFLQEGIAESQRWSIVCKLSVGIARGLDHLHTGLDKPMVHGNLKTSNVLLDGSYDECRVSDYGLHLLLSPAAAQEALEAAAAQGYGAPELAKARDATRESDVYSLGVVLLELLATAPAGGDGVGDGILLLPASSSSSFKNLVLERKISDAFGSSGLARQCRSGAGKERSLGAFFELATACCSPSPSLRPSARQVLQRLQEIAR

SEQ ID NO: 66866 - protein, 98 aa, Zea mays
  Clone ID: UC-ZMFLMO17238E11_FLI.pep
AGSSCATRTASREAAPRRSATSSSAGLGPGPAMPSAPPRRTARRVRRRAAAAAASKFYLSAVRLSCHGDGDGDGISRQRPRPSSWRVDLYRSPHPPVN

SEQ ID NO: 66867 - protein, 201 aa, Zea mays
  Clone ID: UC-ZMFLMO17242G01_FLI.pep
TISCGQKSYTRSCSNFSAIVDHGQKWIFKQSEDYSVHCGMQASWASVLMIHMGLKPLEDFSILQAGELMVRIGNIELLGDMPLQTEPLRQHLGLLSRLLPRRSPPVLLQHPLLIHESLPPKHVHQRVGEGPGQPRHPLRQELRAHGEVIALDLPHVDVLLPEFVHAFRNQPRPFGVLGHMHKQRRRIPGGDLGHGPVHALR

SEQ ID NO: 66868 - protein, 354 aa, Zea mays
  Clone ID: UC-ZMFLMO17257A06_FLI.pep
EQGDCSKFKGNTPHCCKKDPTIVDLLPGTPYNMQIANCCKAGVINTFNQDPANAASSFQISVGLAGTTNKTVKVPKNFTLKTPGPGYTCGRAIVGRPTKFFTADGRRVTQALMTWNVTCTYSQFLAQKTPSCCVSLSSFYNDTIVNCPTCSCGCQNPSGSNCVNEDSPNLQAAIDGPGKWTGQPLVQCTSHMCPIRIHWHVKLNYKEYWRVKITITNFNFRMNYTQWNLVAQHPNFDNITQLFSFNYKPLTPYGGGINDTAMFWGVKFYNDLLMQAGKLGNVQSELLLRKDSRTFTFEKGWAFPRRVYFNGDNCVMPSPENYPWLPNASPLTKQPLTLPLLIFWVALAALLAYA

SEQ ID NO: 66869 - protein, 68 aa, Zea mays
  Clone ID: UC-ZMFLMO17285E01_FLI.pep
APGTEEALNLYHMRCNWNFAPLLYFSRAHGSTLLRNIVVTCFPTSTLVCRERWTGHYRILMGYQPNLC

SEQ ID NO: 66870 - protein, 586 aa, Zea mays
  Clone ID: UC-ZMROB73055E04_FLI.pep
HFPQNKTTRSFPGEGRTGEAWPAMDPPNPNPNDAPSLPAESAARLAALSLCGTRDLPPDFHTAEILDDDEGYLTSASRGGSSTSAWKEAPEGLHDDDKDGDDVSQPSPRSSGYAGERGSSLDDDADPDPDPDQDWARGKKHPHEDDASSSWRKRKKHFFILSNSGKPIYSRYGDEHKLAGFSATLQAIISFVENSGDHIKFVRAGKHQIVFLVKGPIYLVCISCTEESYEGLRGQLELMYGQLLLILTKSVNKCFEKNPRFDMATLLGGTDAVFLSLIHAFSWNPATFLHAYTCLPLAQSTRQAASAVLQDIADSGVLFALLMCEHKVISLVGAQKATLHPDDILLLANFILSSGSFRTSESFVPICLPRYNPMAYLHAYVHFFDEHTYVTLLTTRSDAFYDLKDSRAHIQNALLKSNVLIEVQRSLHENALRVEDLPTNPSSQSASHPPESSQDISSQSLSSEMAIGGPGGLWHFIYKSIYLDQFVSSEFPSPISNKKQKKGLYKAYQKLYASMHDKATGPHKTQFRRDEDYVLFCWITQDFELYAAFNPLADKTQAIKMCNRVCQWVRDLENEIFVYGESTLSW

SEQ ID NO: 66871 - protein, 630 aa, Zea mays
  Clone ID: UC-ZMROB73062E05_FLI.pep
DWLLSMAGPEKTVVWFRRDLRIQDNPALAAAAKGGSVLPIFIWCPSDYGQYYPGRCSRWWLKQSLVHLGKSLELLGCPLVLIRAEDSTLAALLECVRSISATRVVYNRLYDPISLVLDNKIKNELPAHGISIQSFNGDLLYEPWDVYDENGQAFTTFNKYWEKCMSLPIEISQYLAPTRLVAAPGLANVRCCSIDDLGLESSKDVESSNALLSRAWSPGWRNAENMLEEFVSYGLLEYSEHGMKVGGSTTSLLSPYLHFGELSVRMIYQLVKMRQVKWQNEGKSEAEESVRLFLRSIGFREYSRYLCFNYPFTHERSFLGNLKHYPWLLDEGRFKSWRQGMTGYPLVDAGMRELWATGWTHNRIRVIVSSFAVKFLQIPWIWGMKYFWDVLLDADLESDILGWQYISGSLPDGHELSRLDNPEVQGQKYDPDGEYVRTWIPELARMPTEWIHSPWAAPNSILQVAGVELGFNYPKPIVELHMARECLDDAISTMWQLDTAAKLAELDGEVVDDNLNNIRNFDIPKVVLNKKLSPSTSSMEHRVLSTNGKDEKSQPTEVKALYKQIIRDDMMNDSNMDDTCSTANLKVTRKRSSSDSYFQKTADRDGTSKVEDNDSEDSGTSISRPSKKAA

SEQ ID NO: 66872 - protein, 107 aa, Zea mays
  Clone ID: UC-ZMROB73075F01_FLI.pep
YVENFSQFAVASPFGVHISAMQHNMVIYNVNQPVEHGHICVDIYMVFNKTWAMACTFSYFFPVRGHDGKKMNLCIFVVNMEKACYILLTGESIPVPDRSYMLCKSAC

SEQ ID NO: 66873 - protein, 472 aa, Zea mays
  Clone ID: UC-ZMFLMO17021C08_FLI.pep
YDLNSEGNWFTTSRSDEWTLEFVDFSGEMRRDVWLAFISEIISVYRFIREYGPGGDDPAIHNVYGAYKGKKRAVSSAANSIARLQSLQFIRRLYEDPAKLVQFSYLSNAPFGDVVLQTLAVNFWGGPLTTKARSANHRSTQWHRSSEDPSSGRTHVYDIDGSVYLRKWMTSPSWTSSHSANFWRNSSVKYGIILSKSLVVADKNLVEKAMVDCKEKSKVVERTQATIVAATIEGIPSNIDLFKELMLPFAIVAENFKKLQRWENPRSTFCFLLLVHTVIFRNMLSYVFPFTLMTMALSMLAVKGLKEQGRLGRSFGKVTIRDQSPSNTIQKILALKEAMASVENYLQNLNVSLLKIRTILLAGQPEVTTQVAFVLLASSAVLLVFPFKYVLAFFTCDLFTRELEFRRETVRAFMNFVKERWESIHAAPVVVLPYEGAESSPKTLPAEVSGQAEPQNVQRGSGYVSSKNGISS

SEQ ID NO: 66874 - protein, 669 aa, Zea mays
  Clone ID: UC-ZMFLMO17083C08_FLI.pep
DGCICLQCSNLKRVLPICTDWESACWAMARSWLDVQVDLELSQYQTSRPEKQLDDDMNGAQSSVGPESWPYHVLDQQPHDLTALLQKLHSSDLVHETVSRACREQHRQVQMNLMSGNISHLLDLLWSWLSPAEENHNNTARPLDDPEMIRFGAHIVLVLRHLFSDGMDDELDEKLVTVGDLIINMYVRYLFSEDQEELVGIYASQLQHDLCITLFVEMMELRLNSSLHTMYKLFLSAVEYLPFSSDNVSKACFEEIIERVLSRSRQTKPTKYDGDFSDVAHQHHLQSLQKAMVIQWLCFTPPSSIPDFQMISGKLLIRALTHSNTLFREFSLISMRRVPELPAGPHKLLAILAEPLKQKENLISREDPEVSDNLPEFEDWHEYYSLDATYRSWLKIEMMNAAVSPEMLSAEEKGQAVAAAKETLNLACSLLRRDGRPWLYAVESSPFESPDVIFLELHASAMLCLPSGECLLPDATSCTALTSALYSTVSEDDVLHRLLKVDVQVSSRDPCCIEVALRCLAAEGDGYGLHEANDGGLLAAVMAAGFKGELSRFQPGVSMAISRLDAWYSDRSGSVESTAAYIIRGLCRRCCLPETILRSMQACIALSAAGDDLDYSLDKCDELVELVGSAESGMMHLFSQQQLQEFLIFEREYLICTMELEEDRLPCDG

SEQ ID NO: 66875 - protein, 628 aa, Zea mays
  Clone ID: UC-ZMFLMO17161E07_FLI.pep
KHMRRTSIFLFCDSLHDSSLQGTGVRSMVFHPDGKTLFCGLDQSLKVFSWEPVRCHDVVDMGWSNLADLSIYEGKLLGCSYHECRVGLWAADISLIGPYALGVLPKANFFAELVQSMEDNPVKPVDSTANSRPASAMAHSRSSYKIKESGIAQSRVRGSHLTPASTDKTKKDRSSTIPRRPDSSLKSSVQSTTLMRRMKLVDSPSTNTKNVERNVGQRDISLASRAVMANNSATAKKSNLTESALVKDIYTTSQAVSAPIVVPRDILEDKTVSNVRRGTGETAAVPDDFRIPVHRRKPSLSGSAADSDSSSRSVFTEPDVCSEGLSSLKFSFGLTPYHKKEEFGDVDNEGIAQIAEKMERTVSLDHSQQLNDDKSFESPCSTTETAKVKYVRGVAVPLGKTKSLVERWEKRETSSTDYSPQTGSCGDRASRNDNHPFHLAEPSTTFEKDLSTVDEAMAPVNLVRNHDEFLNAVKLRLTKLEMMRHVFEQSGIKGAIAAVAKLPDNAVQADVVSALKGKLDLFNLEFFSNFLPVLAGLLCSKTERHAMVSLEMLLDLIKIFGPVIHSALSANLGVGVDIQAEQRLQRCSRCFNHLQKIQQSLNPLILRGGQTAQLAQELSLSLQDLVVI

SEQ ID NO: 66876 - protein, 305 aa, Zea mays; identical to SEQ ID NO: 46296
  Clone ID: UC-ZMFLB73318A03_FLI.pep

SEQ ID NO: 66877 - protein, 653 aa, Zea mays
  Clone ID: UC-ZMFLB73160A10_FLI.pep
IPNGLASGVATAFVPSDVDYSNEAQTHVLPHSTLEAYPSDMSVGNGTTYPNLGMACGSAHVTQDAYAYAAPIASNEPLDIDPLYLAKYGDGLLQRLDLLERLCGSNKGLELIRREIEIRMSDLNALSSYGSSLLPLWLHAEVHLKQLDSSISKLEMNYHADSEPRNSKTEVAEHRAPDDADLITPSNGEALKYEVCAGITIDANMKIGKPASTSQNSQGRDNAAVPPKIESDNDEDMDVEMEVDEDNVEEQAQCSSVPEKEHPPSEQLSSSNLPSFEDPTPPEDNSVPPPPPEEEWIPPPPPEHEHEPAPPASPEEPAASYVQVDTIPQPYIAQENVGYTISGMEYYSTEGTNANYYMQVSEPHVLQAQHSYYAPVSGSGISVSVDGTSIAPESYYTYPSVTVAASAVAAEHSGYYASSVSAIYSSAADIKTSSASLVSAISNSDLKNHDNVISNDASIVPFTQAVVATSAAGTTSVPESSTQPSSSTTNQIKVIRNKKRVVGITSSLRSNKKVSSLVDKWKAAKEELRDEEEDEPETALEALERKRQKEIEEWRKQQIAFGHAQENANFVPVRGDWRDRVKRRRAEAKKESKDDIVVASLSSSKQHKGSPDLAELSKGLPTGWQAYLDESTKQVYYGNSLTSETSWERPTNE

SEQ ID NO: 66878 - protein, 139 aa, Glycine max
  Clone ID: 700753986_FLI.pep
FRSSELLKLLLSQLEPLAEQQLMGIYNLQQSSQQTEDALSQGMDALQQSLSETLANGSPSSSGSSGNVANYMGQMAMAMGKLGTLEGFLHQADNLRQQTLQQMLRILTTRQSARALLAISDYFSRLRALSSLWLARPRE

SEQ ID NO: 66879 - protein, 200 aa, Glycine max
  Clone ID: 700761358_FLI.pep
QLNQMMAGNFNAQARVPCLDLGNEDSSSIHADERKPKKRGRKPANGREEPLNHVEAERQRREKLNQRFYALRAVVPNISKMDKASLLGDAITFITDLQMKIKVLEAEKNMGNNKDQKLSLPDMDFQEREDDTVVTVRCPLDIHPVSNVVKTFREHQIVAQDSNVSTADDKIIHTFSLRTEGGEAAAIQLKEKLEASLSKS

SEQ ID NO: 66880 - protein, 220 aa, Glycine max
  Clone ID: 700845749_FLI.pep
GGGALSPSISSNADTCSLFSSDHFRMFQFKVRNCPRVRSHDWTECPYAHPAEKARRRDPRKYHYSGTSCPDYRKGNCKRGDTCQFAHGVFECWLHPSRYRTQLCKDGTNCRRRVCFFAHTSDQLRVVTDSSSSSFVSSPTSVLINSSFSDSSPYSFVRGIVKLDEEGSYSGLTRCVFGSPRGGFMSVNGCEEEPAMERVESGRDIRARIYAKLSRENSIG

SEQ ID NO: 66881 - protein, 362 aa, Glycine max
  Clone ID: LIB3050-025-A6_FLI.pep
YREDDRRGTNFFLCSVLLSLPNNNKKMPSAEASSETICVTGAGGFIASWMVKLLLEKGYTVRGTLRNPDDPKNGHLKEFEGASERLTLHKADLLHLDSVRSVINGCHGVFHTASPVTDNPEEMVEPAVSGAKNVIIAAAEAKVRRVVFTSSIGAVYMDPSRSIDLVVDESCWSDLEYCKNTKNWYCYGKAVAEQAAWDTAKENGVDLVVVNPVLVLGPLLQPTINASTIHILKYLTGSAKTYANATQAYVHVRDVALAHILVYEKPSASGRYLCAESSLHRGELVEILAKYFPEYPVPTKCSDEKNPRAKPYTFSNQKLKDLGLEFTPVSQCLYETVKSLQEKGHLPVPAKQQEEDSTTVKS

SEQ ID NO: 66882 - protein, 153 aa, Zea mays
  Clone ID: UC-ZMFLB73122H11_FLI.pep
RFLLQFCMSLVLLDVSFAGLGWSFPCDIWSVGCILVELCSGEALFQTHENLEHLAMMERVLGPLPEDMIRKASSSAQKYFRRATRLNWPEGAVSRESIRAVRKLDRLKDLVSRNADHSKVALVDLLYGLLRFEPSERLTAEEALDHPFFRNPT

SEQ ID NO: 66883 - protein, 419 aa, Zea mays
  Clone ID: UC-ZMFLB73125A02_FLI.pep
IRELWRPNPSQLILLQTRGIGALHKELPKACALTGSSDPCYIEAYHLADPTDGRITLHLKILNLTELELNRVDIRVGLSGALYYMDGFSRTVRHLRNLVSQDPVQSSVTVGVSHFERCSLWVQVLYYPFYGSSGSTDYEGDYAEEDSQMMRQKRSHRPELGEPVVLRCQPYKFPLAELLLPLECSPVEYFRLWPSLPAMVECTGTYTYEGSGFKATAAQQYDSSPFLSGLKSISSKPFHQVCSHFIRTVAGFQLCYAAKTWFGGFVGMMIFGASEVSRNVDLGDETTTMICKFVMRASDESITREIKSDLQGWLDDITDGAVEYMPEDEVKSVAAEQLKISMERIALLKAARPKVPPAKTDQEEEEERKQSEELDGFGNPKGPSTLSKLTAEEAEHRALQAAVLQEWHQLCKERAMKAQ

SEQ ID NO: 66884 - protein, 564 aa, Zea mays
  Clone ID: UC-ZMFLB73125A07_FLI.pep
HRKKRKEAKKEGKAGQRKKVEKDPGIPNEWPFKEQELKALEARRAQALQELELKKEARKERARKRKLGLLEDEEIANLASAASAQGSEFAAKDAAKDKAPLTVAKSNDHSERSFYKELVKVIEASDVILEVLDARDPLGTRCIDMEKMVRKADPSKRIVLLLNKIDLVPKEAVEKWLTYLREEMPTVAFKCNTQEQRTKLGWKSSKLDKTNIIPQSSDCLGAENLIRLLKNYSRSHELKLAITVGIVGLPNVGKSSLINSLKRSRVVNVGSTPGVTRSMQEVQLDKKVKLLDCPGVVMLKSSNSGVSVALRNCKRVEKMEDPVTPVKEILGICPHEKLLSMYKVPSFSSVDDFLQKVSTVRGKLKKGGVVDVEAAARIVLHDWNEGKIPYFTLPPKRDAVEDSDVVIISEDGKEFNIDEIYKAESSYIGGLKSIEEFHHIEIPPNAPPAIDEEMLEDGSKPSEPAQENREEQMSDANDPQGSKPATASTQNDKLYTAEGILDPRKRKAEKKRRKANRFSVLNDMDADYDFKVDYQMEDAADGEDEDAGDEAKEDNEPMTGVDDS

SEQ ID NO: 66885 - protein, 527 aa, Zea mays
  Clone ID: UC-ZMFLB73128F08_FLI.pep
HKPKDRSEADFARRRLIFDDFFYLQLGRLFQMLEAVGTRVEKEELLYKCKSHELNTVGVDDWSPLTKKLLRALPYWLTPSQLDAVQEIIWDLRRPVPMNRLLQGDVGCGKTIVAFLACMEVVNSGFQAAFMVPTEVLAVQHYEHLTSLLEKFDGDEKPNIALLTGSTSTRESRIIRDGLKTGEIGMVIGTHCLIADKIEFSALRISVIDEQQRFGVVQRGRFNSKLYTSSSKLSGENTSSDEASDSETFMAPHVLAMSATPIPRTLALALYGDMSLTQITDLPPGRQPIKTLALEGNDVGFEAVFQMMRDELIDGGKVYLVYPIIDESEHLPQLRAATAGFDSIKQKFEGYPCGLLHGRMRSDEKEETLNSFRSGETRILLSTQVIEIGVDVPDASMMVVMNAERFGISQLHQLRGRVGRGERKSRCIFLASTSSTLPRLKVLEKSSDGFYLANADLLLRGPGNLLGKKQSGHLPEFPIARLEVDGGILQEAHLAALKVLVASNDLALYPRLKVELSMRQPLCILGD

SEQ ID NO: 66886 - protein, 196 aa, Zea mays
  Clone ID: UC-ZMFLMO17255F07_FLI.pep
EIDPITKEVLATPIADALGRKFTRFGHQAKEDRQAAIFRSENGNVWQVKIFGEDKTGKRSGQYLAPTGIGDVPYLPTIPRRIILAIAEKHGVKPPEDGQDFWPWFVDHPEIPLIVTEGGKKALAAISQGYVALSLYGCLCGNDGLTIKPSLLPYVQGREVAIAYDQDAKGSKGRKAVFKGTKRLARNLTYHAKATV

SEQ ID NO: 66887 - protein, 26 aa, Zea mays
  Clone ID: UC-ZMFLMO17268F07_FLI.pep
EREIGLHLFLYEFWWLNCPRQINWTN

SEQ ID NO: 66888 - protein, 147 aa, Zea mays
  Clone ID: UC-ZMFLMO17019E07_FLI.pep
MNLRRQTPLAAIHAALASADAMVAVHGAAVTHFLFMRPGSVLLQVVPVGLDWAADAFYGKPAQQLGLEYLEYKVAPEESSLAAEYGLDSTVLRNPWVISSRGWWEMKKVYMDRQNVTVNIKRFGELLRTARTHLKNTTACAAAAALR

SEQ ID NO: 66889 - protein, 346 aa, Zea mays
  Clone ID: UC-ZMFLMO17044H10_FLI.pep
QEIGKPQMFSFELLNDITESFSPGCLRGTGGFGYVYEGIPHGNEGAMAVKRLKEKIGISPKQFENEVHNLSRIEHRNIVRLIGYCDEIREILSHGKNKNDPPIREHIQERLLCYEYMPKGSLDKIIYDNLDWHTRYKIIEGICHGLHCLHEGQQDIQIAHLDLKPANILLDSDMVPKLADFGMSRLFSLEQVYILASKPMGTIGYIAPEYLDHKKVSTKADIYSFGIVVLEIVTRKQCPRSYADINAQHFIHHLRQNLTKDNYVKSMYPALEADCLQQVKLCIEIGLNCVEKEPTKRPTAREIISMFNQKKDSSRSGVSNCIVNVIEAWLSRLPWHPWPLTLLRQT

SEQ ID NO: 66890 - protein, 512 aa, Zea mays
  Clone ID: UC-ZMFLMO17150E02_FLI.pep
YSSLKDIYLFQVLQAGFSAPTPIQAQSWPIAMKGRDIVAVAKTGSGKTLGYLLPGFILLKRLHHNSREGPTVLVLSPTRELATQIQDEAIKFGRSSRISSTCLYGGAPKGPQLRELERGADVVVATPGRLNDILEMNKVSLRQVSYLVLDEADRMLDMGFEPQIRKIVKQIPPRRQTLMYTATWPKEVRKIASDLLNNPVQVNIGNTDQLVANKSITQHVEVIPHMEKSRRLDQILRSQDPGSKIIIFCSTKRMCDQLARNLSRQYGASAIHGDKSQAERDSVLNDFRSGRCPVLVATDVAARGLDIKDIRIVVNYDFPTGVEDYVHRIGRTGRAGATGSAYTFFGDQDSKYASELVKILEGANQSVPPQLKEMALRGGYGGRSRRWASSDDSYGSQGYGAKRSTDSFKNSSFGNQAGGGSSFHSSFHNSSSGNQFGDTTSFHASYGNSSQNNQTGDNPSFPPSSSNNQSGDGLSFHERFYGSRGRDESRSNNDGFRARSRSPGKPVEVSNW

SEQ ID NO: 66891 - protein, 381 aa, Zea mays
  Clone ID: UC-ZMFLMO17150E03_FLI.pep
KDTVEMAVKEWGDKSLTELEAEERLSYSCEKGPTRDEVIANLRNAFVKIADEYKVYTEEEKQKVITVGGLHVVGTERHESRRIDNQLRGRSGRQGDPGSSRFFLSLEDNIFRIFGGDRIQGLMQAFRVEDLPIESKMLTRALDEAQREVENYFFDIRKQLFEYDEVLNSQRDRVYAERRRALASDSLQSLIVEYAELTMDDILGANIGPDTPKENWDLNKLIAKLQQYCHLLDDLTPELLEGKSSSYDDLREYLRKRGREAYFQKTEIVEKQAPGLMKEAERFLILSNIDRLWKEHLQALKFVQQAVGLRGYAQRDPLIEYKLEGYNLFLDMMAQIRRNVIYSVYQFKPVVKNQEGEASQKVSKKKLDKGANKLGAAQAAS

SEQ ID NO: 66892 - protein, 69 aa, Zea mays
  Clone ID: UC-ZMFLMO17199C06_FLI.pep
SVVQIDGVHSDIFSPGAERGSHTLLIQVLFTRYEFKVGTHDGLGHNPEQQDVEILFGPGYTGLADLGNS

SEQ ID NO: 66893 - protein, 103 aa, Zea mays
  Clone ID: UC-ZMFLMO17172B12_FLI.pep
VMRVCYNIHISTFLEASRVRKEYDDANSKLSKIQSKISNLAEKLKHDFGKDKEFYSFYDQCFETKEGKYTYKVCAYKKASQAEGHSSTNLGYASRSSFFAEIS

SEQ ID NO: 66894 - protein, 70 aa, Zea mays
  Clone ID: UC-ZMFLMO17044C04_FLI.pep
AARHRVICSAAAGHAEAEAEAEPHLQGHRQGADGSSVVTLAHGKKVERSEAGVTDNEEDALVYSSLKKKR

SEQ ID NO: 66895 - protein, 183 aa, Zea mays
  Clone ID: UC-ZMFLMO17127G03_FLI.pep
PFWLFLFSNLYLPLSYGFCNFPADGIVLSGGDNTYGQLGRKAGPPELLPVGMSYRPFSMSASVGHSLALCYTTTEGTAGVETGLLSWGWNCSSQLGRSSQEDIPALVDSLSRERLVSASAGRVHSVALTSKGEVWTWGSGRNGRLGLGSSIDEAAPCLVDTLEGVEVLQVAAGMDHNLLLVAE

SEQ ID NO: 66896 - protein, 188 aa, Zea mays
  Clone ID: UC-ZMFLB73238A08_FLI.pep
RIRVRFLTFLNLFAVLLAVGAERRRSTGKVMPDEYDERSYCLYDTDASTVYGVSAFFVLLLQQAIVNVATWCLCFGPVLSSRGCAVTAFVLSWITFLVAEACLIGGSVRNAKHTKYLGYYMKHDLVSCAALRKGVFAAAAAMMIINLLASLVYYWSYSKAATGGFMKHQNEVGVGMTDYGLDKGVSGP

SEQ ID NO: 66897 - protein, 335 aa, Zea mays
  Clone ID: UC-ZMFLB73280C08_FLI.pep
LPRPERRMVGRGAATALVWAAVVAVATVVSRAQQLQVGFYDTLCPAAEIIVQEEVSKAASGNPGVAAGLLRLHFHDCFVRGCDASVLLDSSAGNQAEKDAAPNASLRGFEVIDSAKTRLEQACFGVVSCADVLAFAARDALALVGGDAYQVPAGRRDGNVSSAQEAGANLPPPTASASQLTQAFGAKGLSQAEMVALSGAHTVGAARCSSFAPRLYSYGPSGAGQDPSMDPAYLAALAQQVPAAGDRRRRPAPPHGPRHAHRLRHQLLRQPGRQARPARLRPGAARRPGHRRAGARLHQQPRHLPDRLRRRHDQDGCHTGAHRHSRHRPDQLQGG

SEQ ID NO: 66898 - protein, 470 aa, Zea mays
  Clone ID: UC-ZMFLMO17128B08_FLI.pep
QLDMPEAIPEDSNIAGFGAATIDGPLHIPDGIQSDAMLPRANDAYGATAAFSLQVPPNNQVNGASNDFVIGTLFQGLTGPFIGNEKEVALADRERAQVNTLYSDHFQDVPSDLHSTDANISSQDVTLDNSGQACAHATDGMTRELTHFVHSNANIFESNEVPASEITGVEYNQGASGFPQPTEDENAVGYNQDVSGFPRPTEDENAVDYNQDASGFSRPTEDVQDASGFPRPTEDENVVDYNQDASGFPRPTEDVNAVGYNQDASGFARPTEDVNAVGCNQDASGFPRSMKDENAVEYNQDGSGFPRPAENDVSAMGDNSGFHENNMGSLTDLDMVNDYELKESNDFGSAINGVDTDFLNYDDDDGGDFDDANDDEPNPNEFQSLDNSGWSSRTRGVARYLKALFDDESGLERKSVAIDHLVRGKTRKEASRMFFETLVLTTKDYISVDQPNPFDLVRIKPGSKLLMSEF

SEQ ID NO: 66899 - protein, 830 aa, Zea mays
  Clone ID: UC-ZMFLMO17068A01_FLI.pep
HPSTHTRTRPSRRPSPPSSTPLLPACLLLAAATATAVRCRGQRRGVVKSEATCPGSDLPRHNASRIASSPPRHTRPPSLPRRPGPLARGASELPRPVVGLPELSTHAGGSSEAWLCAFLRASSGQIHGTQPPAARIVLHLCTSHQRIARTAHLLLLVSLAIFRASGLEDMAAAMDAPNPGAAAGPGMPSDALYQELWHACAGPLVTVPRQGERVYYFPQGHMEQLEASAHHQQLDQYLPMFDLPPKILCRVVNVELRAEADSDEVYAQIMLQPEADQNELTSLDAEPQEREKCTAHSFCKTLTASDTSTHGGFSVLRRHAEECLPQLDMSQNPPCQELVAKDLHGTEWHFRHIFRGQPKRHLLTTGWSVFVSSKRLVSGDAFIFMRGENGELRVGVRRLMRQVNSMPSSVISSHSMHLGVLATASHAISTGTLFSVFYKPRTSRSDFIVSVNKYLEAKKQKISVGMRFKMRFEGDDAPERRFSGTIIGIGSLPAMSKSLWADSDWRSLKVQWDEPSSILRPDRISPWEVEPLDAANPQSPQPPLRAKRPRPPASPCMVSELPSGFGLWKSPIESSCTLSFSEPQRARELFPSIPTSTLSSSSNVSFNSKNEPSMLTSQFYWSARHTRADSCAASTNTVVIEKKQEPSSGGCRLFGINICSAEEEVLPEVTAPGVGYEQTAASVELNSDKLSQPSDVNNSDALAASSERSPLESQSRQVRSCTKVIMQGMAVGRAVDLTKLSGYSDLCQKLEEMFDIQGELGSTLKKWRVIFTDDEDDMMLVGDDPWDEFCRMVKRIYIYTYEEAKKLTSKSKLPVSSDSSKLSAANSLSE

SEQ ID NO: 66900 - protein, 648 aa, Zea mays
  Clone ID: UC-ZMROB73012D07_FLI.pep
SMAFTLRLGTAFLVLLLFSCAAEAGEVGVNYGMVANDLPNPASVVQLLKQNGITMVKIYDANATVLTSLANTGIKAMVMMPNQNLAHAARDPVYAAQWVQDNVKKYLPRTQINAVAVGNEVFDDPNVDKMTLVPAMKNVQKALADLGLANAVKVSTPIAFSAVRDSFPPSGSRFRDDIAQPVMKPMLQLLQRTGSFLTVNIYPCLTQMQQPDDIPLDYALGNAQHAVLDGSNKYYSLLDAQLDATHYAMEALGFGNVEAVLGETGCPNKGKIGKHRPPRRGVGSSRRRLLDDGGSEPEASVANARAYNNYVINRVLSGNTGTPHRPRADMHVYIFALFNENNKSADPDDVENNFGLFYPNMQKIYDFNFRGGGGGGGQPPAGPAAASWCVANAAVGDDRLQQALDYACGHGADCSAIQPSGSCFEPDTKLAHASYAFDSYYQRNGRATSACDFSGAASIVYQAPAVTCSSAKPSWCVAKPGAGGAQLQQALDYACGHGADCSAIQSGGSCFQPDTVAAHASYAFNSYYQRNGRARVACDFSGAGSIVYQQPSFCAATASWCVANPGVGDARLQTALDYACGHGADCRAIQPGGACFQPDNKASHASYAFNGYYQRNNRARVACDFSGAGSIVYQQPKVGNCVLPSNAG

SEQ ID NO: 66901 - protein, 176 aa, Zea mays
  Clone ID: UC-ZMFLB73126D11_FLI.pep
RTRATDAVTLAPNTERRSALHRMDSHGKPKPAGSTPPTPPKPPKPPTPPKPPTPPTPTPPTPEARKGFMRRIFPFLLAANLFVVAYVLVRANQKDSAKKDPTTDPATATAGKPAEPVSIPRKELPPIPEDDQRKLYKWMLEEKRKIKPRNAAEKKKLDEEKALLKEFIRAGSLPSF

SEQ ID NO: 66902 - protein, 387 aa, Zea mays
  Clone ID: UC-ZMFLB73212B10_FLI.pep
ANHRRPSARRKCDARIKAAREKSLLNNVQVLRQERRRRRQLIRSPLVLRLDEHVLIQHGGVVPAEVLRHAARLQAAPALLVVPVRGEAVRERVDHPVRLRAVERPPEPGVVERVERRHRVPEPPHGVHHGHGPVRHGVELVQPARLEPRRHQQDVRARRDAVRQGHREPHPRAHLVAVLRLEPPQHVLQVGPPGAQHHELHVLPRDPVDRVGDDVHALLVVQPPDEPDQWHVVADLQAQLPLQGGLALPLAGVQRLERVVGVVVGVEVHVHSGVPLAHVDAVHDALQLPVVLVYDVVEAPPAFRSLQLPHVAIANGHHPVCRLQPRSKNVAVIPTNVVIQFEVVDVVFRQVKIDEVVYRATTLMSNVVYHKHRASILHQTIVPVIGL

SEQ ID NO: 66903 - protein, 296 aa, Zea mays
  Clone ID: UC-ZMFLB73222F01_FLI.pep
IAWANGGPRFGDMVWAKVKSHPWWPGHIYSVSLTDDEEVHRGHRDGLVLVAFFGDSSYGWFDPSELVPFEDHFTEKAAQGGSSRSSFAAAVAEAVDEVARRSALALLCPCDIPDAFRPHPSDGNFFLVDVPAFDTDADYQLDQIRAARQRFVPRKALNYLLDAAVTQRDAAEKAARTVPGMEMAALFLAYRRAVFSPIDNTYAQAFGVDPELALAAEQKAAAERAQRGINNTHMLNSSCTVVLVTVYLKLMGKQCSYCFYRSSNNYFDVNNGVDLIQIVSISLLFNCWLHFFYQRE

SEQ ID NO: 66904 - protein, 89 aa, Zea mays
  Clone ID: UC-ZMFLB73229H01_FLI.pep
LSSNNITIQCKPGNTKHQFIDIKTQLRKLMQQQLSYNQLISITSMLLYFPLFCAALRNLSITLCQYAENIVITDELSINKVCLKQVGVG

SEQ ID NO: 66905 - protein, 522 aa, Zea mays
  Clone ID: UC-ZMFLB73230D11_FLI.pep
IALSNQDKVLNQGQATSRVACSSSSDRPKDMSSSNNSVSAALSGTTPVFRLRVWQLIAIAVGIVMAILLVIALCLSLRRKKKTVKGFDNTSLAEIPIVSKEINVDRVDAQSLHDGEAPFMPVQDKYSQTKGAGQLGGRRSVDVDAFSQCSSVYNIEKAGSSYSEDYSYSSSGPARKGSSPYAYSASPLVGLPELSHLGWGHWFTLRDLECATNRFAKSNVLGEGGYGVVYKGRLVNGTEIAVKKILNNVGQAEKEFRVEVEAIGHVRHKNLVRLLGYCVEGIHRMLVYEYVNNGNLEQWLHGVNQHGVLSWENRMKILLGTAKALAYLHEAIDPKVVHRDIKSSNILIDDEFNSKVSDFGLAKLLNSDKSHINTRVMGTYGYVAPEYANSGMLNEKSDIYSFGVVLLECVTARDPVDYSKPADEVNLIEWLKMMVTSKRAEEVVDPNLDVKPPKRALKRAILVGFKCVDPDADKRPKMSHVVQMLESVQNAYHQDQRKLSQVGSIDIESQQSLEETSNSADA

SEQ ID NO: 66906 - protein, 395 aa, Zea mays
  Clone ID: UC-ZMFLB73176E05_FLI.pep
PAPARRRSTSRRPSVCAVPMGCFGCFAPEVDEDLRPSKHDDSSGADARRKVAPDVASGYAHSFTFKDLLVATGYFNEANFIGEGGFGKVYKGKINGQMVAVKQLARDGVQGRNEFLVEVLMLTVLNHRNLVSLVGFCAQGDERLLVYEYMPFGSLESHLFDVPLGKKPLDWNTRVRIAVGVAEGVSYLHNVADPPVIYRDMKAANILLGEDFSPRLSDFGLAKVGPVGDRTHVSTRVMGTYGYCAPDYVVSGKLTMKSDIYSFGVLLLELITGRRIYDASRPKPEQSLLTWSRPFLHDKRKFYRLADPALLGCYPSSALNQLVVISIMCLQDQPHVRPIISDVVIGLNHVASQPYTAERPPPASVSSPVGSGSPQLVRTPSRRRGGTGRRSAQCA

SEQ ID NO: 66907 - protein, 254 aa, Zea mays subsp. mexicana
  Clone ID: UC-ZMROTEOSINTE034B05_FLI.pep
PTEFILETLEQSDPQSLIQYLAYQDLCVVSECNLEPWRRAAFFEESGETYRRIVTACLKPLEEFTSKIAEALEGFSSDQPELMLQQSRLFSAFDDSQICTWCARTLAGLTARSRKEDRYGVAQLTGCNAAVMTTLLSALVAIETCLGKKTNPQPVRSLGPENIRWTNLSTGRKGNGVAIASTQKSGLHKKAYIMADVLRTSVYHILSAFIDDLQANAKPSSLEKNWISEGRKPVYGSQAVLVQKLILFIEYRAV

SEQ ID NO: 66908 - protein, 379 aa, Zea mays
  Clone ID: UC-ZMFLB73262H01_FLI.pep
SKERRSIIPAGDTSQFIPSREADIAILEEPEHLNWYHHGKRWTDKFNHVVGVVHTNYLEYIKREKNGALQAFLVKHINNWVTRAYCDKVLRLSAATQDLPKSIVCNVHGVNPKFLKIGEEITANRGSGEPPFSKGAYFLGKMVWAKGYRELIDLMAKHKSDLEGFKLDVYGSGEDSQEVQSTARRLDLSLNFFKGRDHADNSLHGYKVFINPSISDVLCTATAEALAMGKFVICAEHPSNEFFMSFPNCLTYKTSEEFVARVKEAMDREPQPLTPEQRYNLSWEAATERFMEYSDLDKVLNNEAAQPGQGRKRKNKRTSQPNLSDIMDGGLALAHRCLTGNEVLRLATGAIPGTRDYDKQHCVDMGLLPPQVQHPVYGW

SEQ ID NO: 66909 - protein, 443 aa, Zea mays
  Clone ID: UC-ZMFLB73030C04_FLI.pep
VLGIIGGIFGGLFNYLLDKILRVYSIINERGAPFKILLTITISIITSMCSYGLPWLAACTPCPVDAVEQCPTVGRSGNYKNFQCPPGHYNGLASLFFNTNDDAIRNLFSNGTSTEFQMSSLFIFFTAIYCLGLVTYGIAVPSGLFIPVILAGATYGRIVGTLLGSISDLDPGLFALLGAASFLGGTMRMTVSVCVILLELTNDLPMLPLVMLVLLISKTIADSFNKGVYDQIVVMKGLPYMEAHAEPYMRHLVAGDVVSGPLITFSGVEKVGNIVHALRLTGHNGFPVLDEPPITETPELVGLVTRSHLLVLLNSKNFMKGRVKTSGSFVLRRFGAFDFAKPGSGKGLKIEDLDFTDEEMDMYVDLHPITNTSPYTVVETMSLAKAAILFRELGLRHLLVVPKTPDRPPIVGILTRHDFMPEHIHSLFPNLNPHKYHSASMAG

SEQ ID NO: 66910 - protein, 402 aa, Zea mays
  Clone ID: UC-ZMFLB73264F03_FLI.pep
RPMVQAWSLSQPDWTCKIDEGPAGIAYARWSPDSRHILTTSEFQLRLTVWSLVNTACVHVQWPKHGSKGVSFTKDGKFAAICTRRDCKDYINLLSCHSWEIMTVFAIDTVDLAGVEWSPYDSAIVVWDSLLEYKVLIYSPDGRCLFKYLAYESGLGVKTVAWSPCGQFLAVGSYDQAVRTLNHLTWKTFAEFSHAGYIRSPCNAAIYKEVDDPWQLDMSELCLSEGLSRNMPDNGAENGTEGGGSRVKYAVMDVPITLPSLKPAFDKPNPKQGIGMLSWSSDSHYFFTRNDNMPTVLWIWDICRLELAAVLVQKDPIRAAAWDPTCTRLVLCTESPHLYMWTPSGACCVNIPFLNFRIVDLKWSSNGSCLLLKERESFCCATIISALPEEEPDHSDDTSEDE

SEQ ID NO: 66911 - protein, 138 aa, Zea mays
  Clone ID: UC-ZMFLB73071A05_FLI.pep
YIQTHQSTFQNEKGVLGTTASTPYFPKNLERRTRPSSSLSLPLCLDLDRLFFSFLVLFDLDCDLDFLEPLPSSSLLEDSEDELELDSDELLCFLLVLLLFFASLSFLSIFKLLLSEEPYNRCNIFIFEEWQVMEILRF

SEQ ID NO: 66912 - protein, 274 aa, Zea mays subsp. mexicana
  Clone ID: UC-ZMROTEOSINTE092H09_FLI.pep
MSGLMYAVPPSPKKGKKIPRCLLSLDLCFGLLSQTLVNYLIMAFMYMQIDTKDILFICGGAFVDLEKTISERRQDSSIGFGAPVRANMRVGGTSSAQVTSSLLESVESGDLIAYGLIPEFIGRFPILVSLTALNEDQLVQVLTEPKNALGKQFKKLFSMNDVKLHFTDGALRIIAEKAMSKNTGARGLRTILENILMDSMYEIPDAKSGEKRIDAVVVDEDAVGSVDQPGYGAKILYGDGALDQYLSHIKVAGDGVASEMDGEAELSPSRAIGM

SEQ ID NO: 66913 - protein, 463 aa, Zea mays
  Clone ID: UC-ZMFLB73238H07_FLI.pep
FCFISLHIQIWYNNVPHPKLVEYKKDQNWVTRSGDYLVFPGGGTQFKDGVGRYIQFVEQIMPTIQWGRRTRTVLDVGCGVASFGGYLLDRNAITMSFAPKDEHEAQIQFALERGIPAFLAVIGTQKLPFPDNVFDVVHCARCRVHWYANGGKPLLELNRVLRPGGYFIWSATPVYRQEQRDQDDWNAMVTLTKSICWRTVVKSQDVNGIGVVIYQKPASNSCYAERKTNEPPLCSERDGSRFPWYAPLDSCLFTTAITTSDERYNWPVPWPERLDVSYASVPDDSASNKEKFEADTKYWKQLISEVYFNDFPLNWSSIRNVMDMNAGFGGFAAALIDQPLWVMNAVPIGQPDTLPLIFNRGLIGAYHDWCESFSTYPRTYDLLHMSNLIGNLTNRCDLIDVVVEIDRILRPGRWFVLKDTLEMIKKIRPILKSLHYEIVVVKQQFLVATKSFWRPGKPASTSG

SEQ ID NO: 66914 - protein, 707 aa, Zea mays
  Clone ID: UC-ZMFLB73264F06_FLI.pep
LHKHLTAEPCGLPWHICYQIIKGICLGLHYLHDKNIIHLDLKPDNILLDDDMVPKITDFGLSRLLGNGKSHTITQTRIGTWGYMAPEYLDDGVITMKTDIYSLGVIIRHMVKGRNSADTTDEEVLANWLIRLEKDPSQMMRQQTTRLLFETEYKEQIKACMDISWRCTLRKPMDRPTTQHILLTLEETEAKIKSVVGPTPPNAGQLQIAKFGPWGGDGGKTRDIRMTPCHLHSVTISSGTIIDSIGFSFTDHYGQHHTTGPWGGKEGTNKIELGPSEFLTGVSGTSGPFKNLTNVVTSLTFVTNTRSYGPFGKGRGTPFHIQTQNNGRIVGFFGRSGQYLYAIGVYTNQDARVARIGRPLGGDEGVLHGITDLSGQQRSRGGGPSGECGDSDDEPNGDFAKFGPWGGDGGQPQDIGTLPCRLDRIKISSGLIIDSIEFSYAGPDSQYRTAGPWGGHGGDNSSFQLAGSEFLTGVSGSIGTFNGHANVITSLTFVTNARSYGPFGRGRGTSFHIPVQGNGCIVGFFGRSGRYLNAIGVYTAPKPEPKAGGDEAVVARIGPWGGVGNALHDIAERPHRLHRVTIFSGTIVNSLEYLYSDGDGQQHTTGPWGGCGGTGRKIHLAPEEFIVEVTGTFHPCAWDRTIPSVVSSLTLVTSTGKTHGPFGTQLGAAFQVPVQSDSRIVGFFAHGDNYIEAIGAYVKKLTESSNR

SEQ ID NO: 66915 - protein, 337 aa, Glycine max
  Clone ID: 700786857_FLI.pep
QFILDTKIEMALRLTTVVSSVGHSGKPRFRFRIRSVAATVRNMAFSATSKVIDSHLHVWASPQEAGRFPYSLGQEPTLPGNAEFLLQCMEEAGVDGALIVQPINHKFDHSYVTSVLNKYPTKFVGCCLANPADDGSGLRQFEDLVLKDGYRAVRFNPYLWPPGEKMTNKVGKEIFQRAGELNVPVGFMCMKGLDLHISEIEQLCTEFPSTVVLLDHLGFCKPPINDEEGLVFSQLLNLSRFPQVHVKFSALFRVSRAQFPYLDLSPLFSQVVSHFGANRVMWGSDFPFVVAECGYKGAKEAVHLIASEISLPLSDLEWIMGRTATQLFQNQLTPVNS

SEQ ID NO: 66916 - protein, 609 aa, Zea mays
  Clone ID: UC-ZMFLMO17045G10_FLI.pep
TSVVVARLAGEASQPKVLPSANGVSSESYWRVAATRRWQGRGVRCCAAGFRGGGADADAVIASEDFVGFFREAWPYIRGHRGSTFVVVISSEVVCGPHFYRVLQDISLLHGLGIKFVLVPGTHIQIDKLLSERGKKAKYVGQYRITDEDARKAAMDAAGRIRLTIEAKLSPGPPMLNLRRHGVIGRWHGLVDSIASGNFLGAKRRGVVNGIDYGFTGEVTKIDVSRIRERLDSDSIVVISNMGFSSSGDVLNCNTYEVATACALALEADKLICVVDGQVFDDHGRAIQYMSIEEADLLIRKRARQSDIAASYVKVVDEEGINSLHKGDDRPSLSPKAYINGYAASFRNGLGFNNGNGIYSGEQGFAIGGEERLSRSNADPFKNGLGFNNGNGIYSGEQGFAIGGEERLSRSNGYLSELVAAAYVCHGGVQRVHIIDGCVDGSLLLELFTRDGAGTMIARDVYEGTRMATAEDLPGIRKIIRPLEDSGVLVRRTDAQLLEALESFYVVERDGSIIACAALFPFPEEQSGEVAAIAVSEECRGRGQGDKLLDYVEKMALSLGLKKLFLLTTRTADWFVRRGFSECSIGSIPEQRRKRINLSRGSKYYIKQL

SEQ ID NO: 66917 - protein, 267 aa, Zea mays
  Clone ID: UC-ZMFLMO17073D11_FLI.pep
LRHCRYLPAPTPHLRFAMNPSSSSTSSSGGYHSRAAAFASPQPRGGGGGGGGGRDGSDRIDALGRLLTRVLRHMAAELRLDMRTDGYVRVRDLLKLNLQTFAKVPLKSHTVDEIREAVRRDNKQRFSLLEEDGELLIRANQGHTISTVTSESLLKPILSPDEVSVCVHGTYRKNLDSILQFGLKRMARLHVHFSSGLPSDGEVTSGVRQNVNILIHLDVSKALKGGMKLYISDNKVILTEGFDGVVPVKYFERVETWPGRAPIPFQR

SEQ ID NO: 66918 - protein, 255 aa, Zea mays
  Clone ID: UC-ZMROMO17007H12_FLI.pep
CDRSAISSDNPADLYDVHVYTSSGDMFSKSRMFDNTARTGPKAIVSEYAVTGNDAGRGTLIAALAEAAFLIGLERNSDVVEMASCAPLFVNDNDQRWNPDAIVFNSWQHYGCPNYWMLHFFKDSSSATLHPSTIQLPNYDQLVTSAITWNNPHDGNTYMKIKVVNFGSKAVSLNISVTGLETDIQTFGSIKTVLTSGWLRDENSFQQPDKVVPAASPITNAGKQMGVILNSYSLTSFDLLLDSESQVRASIQAYD

SEQ ID NO: 66919 - protein, 295 aa, Zea mays; identical to SEQ ID NO: 47715
  Clone ID: UC-ZMFLB73145G09_FLI.pep

SEQ ID NO: 66920 - protein, 509 aa, Zea mays
  Clone ID: UC-ZMFLB73160A04_FLI.pep
EQKVDQTQNVSGQNAEIVQENNNEAHTPKGVLNDGMGALEVPINEDQLVPAEEKKSQTLAHETHPVPDEHGSDTKMPSEDSLAVEIETVPIDANESSEVPHEQQTDRIDSTIPPTQSTPTTVSTYDHPTDPDAPKDLSGAGAVEQKSLAETYFLQDEPDVSKDATIKEKRSDEVIREKTSKDGKIVLDIIEAIHAAEKKQADVDAYMYSEERRKLKEKYEKELKDTRARELMYAEEAAILDKELKKEKLKNAAALKELQEKAEQKLQDELQRKDEETSQQIEKAQEIAKAELAAAVAKEKASQIEQIAEANLNIDALCMAFYARSEETRQSHSVHKLALGTLALEHALSSGSPIRSEVELLRKSVEGIDKDSLLELALSSLPEDVLDYGSDTMMGLKQKFNSLKETIRHFSLLPAGGGGILAHTVARVASSIKIKGDNSGDGIESLINKVERLIVDGDLITAADALEQGLHGTEAEEIATEWVKQARKRAIAEQTLALLQACASSTTFS

SEQ ID NO: 66921 - protein, 357 aa, Zea mays
  Clone ID: UC-ZMFLB73148E12_FLI.pep
AFYPNNLTSCGSPLSLAATAPTSFPLWYCCWLAAALGGGGGGTETLALALMSQQEAVDPPSATDERLGGLPRSGSTSRLNAQAPEFVPRAAAVPPPPPQQKVVRLFAPPPHAAFFVAAPRPPPPPFEYYAAVATGGGGRFGPPAAAAEQEAEAEQPPRDGSFDDPVPKIRKQVEYYFSDINLATTEHLMRFISKDPEGYVPISVVAGSKKIKALVQSNSMLASALRTSSKLVVSDDGARVKREQPFTESDLEELQARIVVAENLPDDHCYQNLMRLFSVVGSVRTIRTCYPQTPNGTGPATNRSAKLDMLFANKLHAFVEYDTIEDAARAIVELNDERNWRSGLRVRLLSTCMVTFH

SEQ ID NO: 66922 - protein, 219 aa, Zea mays
  Clone ID: UC-ZMFLB73232F01_FLI.pep
LFWKLQALAKKVRYFCEARNPSPASTLSVRRFAVSHTHFLHRHRALAQFHTHPRSRLCLVPALPPPPVMYPRGPDGGRDASSRPMLATPAGNDTREEDEITTAEAHVEKDAARMDAALLMRTTPKMDEFHTGGDLDSSGSGSGISGPSASKRQLQRRGSWRQRVSRSSIHAYPFPLCFYLICFFARASNREECGRGCNGSAGTPSTLIISFVFLFDLFF

SEQ ID NO: 66923 - protein, 443 aa, Zea mays
  Clone ID: UC-ZMROB73004C02_FLI.pep
PASEEPPLLPSCTSARPAEEDADDEGVGAGAVVGGGGAVAGGAGAVGGGGLPPRRRGPQAGVLQEDLPGRRERGQVPRRQGHQGQPRRRRRARPPHLPRLLRQGVRRVGAAGPDAGEPGDGEDGADQHRAGGVRGDRRDQGGAGGAVPGDGVVRGHRGVRGPGRVEPAEQRARPLRGARGAAGRRGVPRRRRAARPAGLHLHRVRADPQLPAQELHGGGAGDPVGRARRRRRPLLLVPRAPVGAAGADRAGVPEPAVGQVRGGGGRRRRPRGGQQRARRGPARRRGGLPVLPREAAQGQGLSGQQLLPQQPGKDRHLQLRLATAHGEGGAGARQGVRRERHPLGRGLLRRAPQAQPAAHAAAQQGRDQEDVPLGQPPLILLKLCTRPDGNIPDGSSRRFVSIFFHFVAVCLFDYYLMICMCFFMRLISCCILFFHVCMDYGQQ

SEQ ID NO: 66924 - protein, 798 aa, Zea mays
  Clone ID: UC-ZMROMO17068D12_FLI.pep
KLRRATEQINIIEGKLQQALNENAKLKVKQTEDSKLWQGLDSKLSSTKTLCDQLTETLQQLASQTEQAEEDKKFFEEMLGKNSKALDEFNCLLRDLSTKLEYAEQKIISGRQEMLQIKQEKEEMDRSYKGQLYSNDTTIKEKDSLIKQLEGSLDDNKSRLIYLDSRLQCMEQELKLKDDVCISLKGNLASSESEKNSLELMNKGHILEIKKLCQDNKDLNELFSSFMVKVTELDKEHASMSSHVSRLISSFERFYEMAQEEKMLMARSSKDKFEHLQSQYVDLTSENNALKTEIEELKSRLIELQRTQEIVMVQHVEECQVAEDKIRRLESEAEVSASNINQLEKLASELQGRIQKLLEDSTFAENHKQELLQKILKLESDNQELLGQMQSIMEEKSNNAESLHGEITKRDQQVDTLENQINQLRSVLDEKEQLYLCSVQKEKTLEEQKLQVEALLSATECKLSDAKKQYDLMLEGEKIELSKHLKELSLKNDQAINEIRKKYELEKIEITNAEKEKAEKLIREIENKCNEKISQNKHDSERYLICLKEEHGTTVARIQQDNEHKESTLRAYHKEELQRIQSQAENEMRERLSLLRKEHEVQIKSLRMHHEEECQRMQEELELQKSKEEKQRALLQLQWKVMGESQRVDQEVNSKKEYSVSSIRRSDPYGRKEQEVQLVSPETNRKDVNLPGILQSPISNMLRKVEKVSQDIPKHRKVTHHEYEVETANGRITKRRKTRSTVMFGEPNSQKPLHNTTDKDVKKLKKVPTRSRAHPANIGELFSEGSLNPYADDPYAFD

SEQ ID NO: 66925 - protein, 535 aa, Zea mays
  Clone ID: UC-ZMFLB73080H09_FLI.pep
IGLAKENEELRLQLKVLIEDNKRLVELYEHTVVNVEANQDGNPVDDLLNAQPAATSDFHAHNSSSVAQESKIVDEKCTNEDNFSRVTSVELRLQLEEMHEENDRLMGLYEKAMQERDEFKRKILEQSDSEAVKHIQLDEKDVEMSEAAENPEVKHIHDSTIAALKEVLQIVRSKLELVQDKVVSAQDAVKYFKALEIASGKAEELSARIELQRLGAQRGQEEITFLKSVLSESQKKKNAFEGKYFLPAASCWNLVLKTKSLAESKFDASFGSMNQKKEQLNHLQTRKIELSAARTRARESETELKSKIDGLKAKLRAHEAQRKEEEKVLFAIDNLDTSTTLMHKPKNYGKATDLLKSEEDRMKLLCELQKAREQRSMVHKEIRSMNECDYIDREIGVLEAEIEDSCISILETDIEKFVRDNTLAEIWEGSAKDLEALLVDYQDCVFQVNLKEEEIKVCSESLQYQARDMDKLQSKLNQAIRELGELLQDRRSLTACSLDEPTLPVGEKVAADLEAVRIHVDEAKQLLILDNQANS

SEQ ID NO: 66926 - protein, 163 aa, Zea mays
  Clone ID: UC-ZMFLB73303D03_FLI.pep
APGDALAAPGVGVGGGRDPAVVVGHPGPGARHHVAPQGVVADVPPPRGRLPQQPPVRLRVHLQLRRLHADAVASSPVQDEQQQEEEWRCCPRPWEQDRLGGCRHCVVRDWLTEISLALSFLVQSAMALLSLSALDLCCFLMEGTGKHCTEIYPSFSGGGPRGG

SEQ ID NO: 66927 - protein, 730 aa, Zea mays
  Clone ID: UC-ZMFLMO17109D01_FLI.pep
TLSILVSSEIMARKGNQSKSGPNHASPKWKNTTDGDALSTPERGAADSENPSSHVQGRSKGPEGSSEKKGRGSKRNSTNNGISSSGKKQQMDTGCDISSSEEKEIPVRGTKNRRGSQKPSRRGFGRSFLIEQTTSSGLAGNVLEKTRCIACMAASIIRASMIYLVEEGKRFIDKRMPTINTYMAFVNKGHAYVLSKIAYVYPIVRAWMLNAGRVMLLLFTVWLDCNVRGFDSLLRLGTNSLLAVLWCSTLSTFAMIGIKKMLIFMAIAASAFAFIGLGFAILLISVLAVVILWVYGSFWTTTCVMILGGVLFFLKRERITLLVACLYSMYCARCYVGWLGLLLGLNLSFFSSDILVQFLRDNADNKKFNGSSRYSERSSGRQGNIFEEFQPSADSTSQARYARASDRDPGDPSTSGPEKELTSEDEVARLLNCTDHYSALGFRRYENIDVSSLKREYKKKAMLVHPDKNMGNDKAADAFKKLQNAYEILLDSLKRKTYDDELRREDLLNYFRQSVSQKNGRNSTFQHGFSPSEGVDEGPYGLSRRIACKKCSDFHLWIYTGRAKSQARWCQDCKEFHQAKDGDGWVEQSFQPVLFGMLQKPDLPHAYVCAESYIFDVTEWFNCQGMRCPANTHKATFHVNANMAKQSSGKASTSTQRAGKAPSGVNMDGGGLNEEEFFEWFQNAVNSGMFETTFGAQGDPTSPGNGSNAKSSGSSSNNSSRKKKKGKKQW

SEQ ID NO: 66928 - protein, 410 aa, Zea mays
  Clone ID: LIB4756-022-E10_FLI.pep
PGLQRPATAPRCSCNWVPPTTLYSLNMLAARSFASPARQCLRQANRSRWAPALSQVSARTYASEVAKFHGTKGSDGKYCVTLIEGDGIGPEIAQSVKDIYSAANVPIKWESVDVTPRLNEEGKTVISDESIASVKKNLVALKGPLATPIGKGHVSLNLTLRRTFNLFANVRPCRSIAGYKTPYDDVDTVLIRENTEGEYSGIEHIVVDGVVQSIKLITREASERVLRYAFQHARDIGRKKVRAVHKATIMKMSDGLFLSTAREIAKDFPDIEFDAELLDNTCLKMVTDPVPYNDKVLVMPNLYGDILSDMCAGLIGGLGLTPSGNIGDNCSIFEAVHGSAPDIAGKQLANPTALLLSSIMMLRHMGLNSEAANIEQAIFKVLAEGKTITGDLGGKAKTFEYADAVIKALK

SEQ ID NO: 66929 - protein, 137 aa, Zea mays
  Clone ID: LIB4756-024-D8_FLI.pep
LGAAAAAAAMAASMISSSALAVAPQGLPPLGRRASSFAVVCSKKKIKTDKPYGIGGGLTVDVDANGRKSKGKGVYQFVDKYGANVDGYSPIYNEDDWSPTGDVYVGGTTGLLIWAVTLAGILGGGALLVYNTSALSG

SEQ ID NO: 66930 - protein, 312 aa, Zea mays
  Clone ID: LIB4756-029-D3_FLI.pep
RTSPAPHTNLSTPRRVRGGAAMASSVAAAASTFLGTRLADPAPQNGRIVARFGFGLGGKAKPAPKKVAKTSTSSDRPLWFPGAVAPDYLDGSLVGDYGFDPFGLGKPVEYLQFELDSLDQNLAKNEAGGIIGTRFESSEVKSTPLQPYSEVFGLQRFRECELIHGRWAMLATLGALSVEWLTGVTWQDAGKVELVDGSSYLGQPLPFSISTLIWIEVLVIGYIEFQRNAELDPEKRLYPGGSYFDPLGLAADPEKKERLQLAEIKHARLAMVAFLGFAVQAAATGKGPLNNWATHLSDPLHTTIFDTFGGSS

SEQ ID NO: 66931 - protein, 302 aa, Zea mays
  Clone ID: LIB4756-029-H2_FLI.pep
DRHLEAAASAPLRPTLERDRPDDHLVVDGSQRSADEGADPEDPVVSPGMVLVVNYGGAKAPRGVDAGAGDRDGGQVDEEHGKPDWKRGEDRHMGVPGVPLGVGGGEDGVDEDEGADDLGAEAVALGVAGRDDVGAAAVAHVQPLLEPLDDARAADGAQALHDDVKHRPGEGQLPRQEQPEGHRRVDVPAGDAGGAVDEGEDHAAEGPGDALDADGGALGGGLGDAHDGEDGDVEEEEGGDELGDAGAVEGPGLELPGLEERRRRGLLVVLVVRALRRRADGLALRELVGAQADVLLLPLHAC

SEQ ID NO: 66932 - protein, 172 aa, Zea mays; identical to SEQ ID NO: 41503
  Clone ID: LIB4756-030-E7_FLI.pep

SEQ ID NO: 66933 - protein, 358 aa, Zea mays
  Clone ID: LIB4756-031-H10_FLI.pep
QRRRRQLVAATETRRVTCPAAVGVYVLPPPEFQETRIEEAPIRSGDIVEPLVSRRTETMADQLGSYTIRSHGMILARLHMYDWIILLLLAVIDGLLNIIEPFHRFVGKDMMTDLRYPMKGNTVPFWAVPLIGIILPWAIFVGIYFKKKNFYDLHHGILVITDAIKDGVGRPRPDFFWRCFPNGNDVYDNITTGVICNGVKSVIKEGHKSFPSGHSSWSFAGLGFLAWYLAGKLTAFDRKGHIAKLCIVFLPLLTAALVAVSRVDDYWHHWQDVFAGGLIGLTVASFCYLQFFPYPFDGDALWPHAYAVRLAEEGNSRNANSYSVRPTEIETVDIPGHGAIITLRETLNDVESGSARRL

SEQ ID NO: 66934 - protein, 224 aa, Zea mays
  Clone ID: LIB4756-031-H2_FLI.pep
RDRPPRSRQQAAAMSKVFTLDAVAKHNSKEDCWLIIGGKVYDVTKFLVDHPGGDHLIRISGAGKLSVHQTSTSSRSLQPLPAASKQMATVLSSPRAPAFSFSLRAAPAPTTVAMTRGGGASSRLRAQATYNVKLITPEGEVELQVPDDVYILDYAEEEGIDLPYSCRAGSCSSCAGKVVSGSVDQSDQSYLDDGQIAAGWVLTCVAYPTSDVVIETHKEDDLIS

SEQ ID NO: 66935 - protein, 323 aa, Zea mays; identical to SEQ ID NO: 58994
  Clone ID: LIB4756-033-C2_FLI.pep

SEQ ID NO: 66936 - protein, 172 aa, Zea mays; identical to SEQ ID NO: 41503
  Clone ID: LIB4756-034-A11_FLI.pep

SEQ ID NO: 66937 - protein, 388 aa, Zea mays
  Clone ID: LIB4756-034-E7_FLI.pep
PGKPSNPIQTRQARNPPMAHRVLLLLSLAAAAAVAAAVDAEDPLIRQVVPGGDDNDLELNAESHFLSFVQRFGKSYKDADEHAYRLSVFKANLRRARRHQLLDPSAEHGITKFSDLTPAEFRRTYLGLRKSRRALLRELGESAHEAPVLPTDGLPDDFDWRDHGAVGPVKNQGSCGSCWSFSASGALEGAHYLATGKLEVLSEQQFVDCDHECDSSEPDSCDSGCNGGLMTTAFSYLQKAGGLESEKDYPYTGSDGKCKFDKSKIVASVQNFSVVSVDEAQISANLIKHGPLAIGINAAYMQTYIGGVSCPYICGRHLDHGVLLVGYGASGFAPIRLKDKPYWIIKNSWGENWGENGYYKICRGSNVRNKCGVDSMVSTVSAVHASKE

SEQ ID NO: 66938 - protein, 231 aa, Zea mays; identical to SEQ ID NO: 43391
  Clone ID: LIB4756-034-H7_FLI.pep

SEQ ID NO: 66939 - protein, 256 aa, Zea mays; identical to SEQ ID NO: 66847
  Clone ID: LIB4756-035-A7_FLI.pep

SEQ ID NO: 66940 - protein, 150 aa, Zea mays
  Clone ID: LIB4756-035-A9_FLI.pep
RAQPVPRGQRVFRSAPSAIIRRLAKRPSRADGAGAGRAPPRRFPPRASCPPASLPRSLRRSCGRRCLEADAGTVHQAGVLPLRWTQGEAPRRVHACWHALLTRVSRTPGEGHHDESGVGAALPVRDSSVGQGAPRRDRGSTSQIIATSKC

SEQ ID NO: 66941 - protein, 350 aa, Zea mays
  Clone ID: LIB4756-035-G7_FLI.pep
GASVQLQPNSAAKPQATARRRAMAATRSTTAVPELALPSGNARPVPVIGLGTAVMFQPPETTKDAVLAAIELGYRHFDTASLYGTEKPLGEGVAEAVRRGLIESREEVFVTSKLWCTQCHPDLVVPSLRQTLENLQMDYLDLYLIHMPVCQKPGPPVFLARREDARPFDFKGVWQAMEECQRLGLARAIGVSNFRTKHLDKMMPFATITPAVNQVEVNPVCQQLKLRGYCAEKGIHVQAFSPLGGQSWAAERNAVLESEVLAEIAKARGKTVAQVSLRWVFEQGVSFVVKTYKKERLKENLEIFDWELTDEDRVKISRIPQKKLSGFAFMFMPEGEFTSVDVSEINPIEE

SEQ ID NO: 66942 - protein, 281 aa, Zea mays
  Clone ID: LIB4756-036-C4_FLI.pep
GRRQHNIRTFPNPLLPPPSRASYLSPVGSHALPRFTSAALPLPYNPRAGSGEIRPNSMGLEMVEVMSETVPTVVPAAARENGVDIYPLSRYYFGARDAAGVPRGLETAADRALRLKANFAAHGLRTSVHGVLLVELFDHPHVLLLQVRNSSFLLPGGRLRPGEEEVRGLKRKLSSKLSVVDDAEAVQEEDWQIGQCIGMWWRSEFEAIPFPYMPPRFRAAKECMKLFLIRLPMSRQFIVPRNMKLLAVPLSQIHGNAQVYGPIIAAIPSILSKFSFNVISD

SEQ ID NO: 66943 - protein, 286 aa, Zea mays
  Clone ID: LIB4756-037-E9_FLI.pep
RETVDAIMKKFLPENFTAILFHYDGNVNGWNDLPWSKSVIHIAASNQTKWWFAKRFLHPAVVSIYQYIFLWDEDLEVDNFSPRRYLNIVRSEGLEISQPGLDSKLSEIHHRITVRKKAGTFHRVSRANKKCSREGPPCSGWVEGMAPVFSKSAWQCVWHLIQNDLIHGWGIDYKFGYCAQGDRTKNIGVVDSEFIVHRGVQTLGGSTITKDGIRGKNAKPLGQKAAQIQRSRGRAPGLDMRTKIRRKSRSELRDFQKRWDRAAREDRTWVDPFARSRRKRKNRNPQ

SEQ ID NO: 66944 - protein, 233 aa, Zea mays
  Clone ID: LIB4756-038-F12_FLI.pep
GVGFGFGSLRCGPSVSSSSATIHHTLVAPPRRSLRICSSTFPPPPAPAIEGRDVSLSVTTRRGRVLPVLKGCSLLVPPGQLWMLLGPNGCGKSTLLKVVMPTVGSDVAFGLGKLKLPLDEVRLRVSKSLDAVGMLSYSQRPIQTLSGGQKQRVAIAGALAEASKVLLLDELTTFLDEHDQIGVINAVRDSVAADGEVAALWVTHRLEELKYADGAIYMEDGQIIVQGDVSTIR

SEQ ID NO: 66945 - protein, 385 aa, Zea mays
  Clone ID: LIB4756-039-A6_FLI.pep
REANQDRPGRLVALERAGAMAAAEIKIGQVDDVQELHRTGLQTVPDRYIRDGDDRPDGDNVCAVAHIPVIDVTELQHDDVGLDKLRLACEEWGFFQVVNHGIAHELLDEMERLAREFFMLPLEEKEKYPMAPGGIQGYGHAFVFSEDQKLDWCNMLALGVEPASIRQPRLWPTAPAGFGETLEAYSAEVGELCRRLLARIAETLGLAPATFADMFGEAVQAVRMNFYPPCPRPDLVMGLSAHSDGSAVTVLQQDVGCAGLQVRGKGGAWVPVHPVPHALVVNIGDTLEVLTNGRYKSVEHRAVANGEQDRLSVVTFYAPAYDVELGPLPEFVTDEAPCRYRRFNHGEYSRHYVTSRLEGKKTLEFAKIDPLAVEHDGTAPEETST

SEQ ID NO: 66946 - protein, 172 aa, Zea mays; identical to SEQ ID NO: 36903
  Clone ID: LIB4756-039-H2_FLI.pep

SEQ ID NO: 66947 - protein, 207 aa, Zea mays
  Clone ID: LIB4756-040-C11_FLI.pep
HSEDCCLAMIHPHLCYARLSHTGTGDGRGVLELDRASVAASGLDRLDNALGLLVRHLAEDDVLAIEPRRHDRGNEELGAVGVGAGVGHGQEEGAVVLAREVLVAELLAVDGLAAGTVAAGEVTTLKHELGNDTVELGARVAEALLAGAESTEVLSRLGDDIVVELEVDAASLVLHGASGSDGAVAIDLDLRALPGHVEVSLDTHVEG

SEQ ID NO: 66948 - protein, 303 aa, Zea mays
  Clone ID: LIB4756-042-D4_FLI.pep
PVLRGSWQRITGPVRMNRGRETGGNLRESGLFSGCDGDGGAGMDRKRIKDVLEKHLERSSPSTSRGVVSKERERLAAGKLPASLGKAEKVSDGEEFETDSEDEDSDISGSESEGTSWISWFCTLRGNEFFCEIDDDYIQDDFNLCGLSMQVPYYDYALDLILDIESSDDTYTEERKEFIELSAEILYGLIHARYILTSKGLAAMLEKFKNRDFGGCPRVYCCGQPCLPAGQSDVPRSSTVKIYCPKCEELNYPISMYQGSIDGSYFGTTFPHLFLMTYPHLKPQKPPQQYTPRVFGFKHHKPS

SEQ ID NO: 66949 - protein, 195 aa, Zea mays
  Clone ID: LIB4756-042-E10_FLI.pep
PGKKKKKKTHPSTTQKLHICSFVSSNIMDYSSTRVVVCLALALAMVAVMPCAAQNSPQDFVNPHNAARAAVGVGPVSWDENVAAFARSYAAQRQGDCKLVHSGGGPNHYGENIFWGGGSAWKASDAVGLWVGEKQNYDYNSNSCAAGKVCGHYTQVVWRKSTAIGCARVVCNNGGGVFITCNYNPPGNFRGQRPY

SEQ ID NO: 66950 - protein, 359 aa, Zea mays
  Clone ID: LIB4756-042-H5_FLI.pep
NPSCQSVASSIGDSQSTANMSGSTAPPHVVEDFLGVIQIFSDGSIVRGDESTIMPAGPCPDVPGVQWKDAVYEATRGLKVRVYKPPPTPGGGNKGKLPVLVYFHGGGYCGGAYDYPLLHSCCQRFAAELPAVVLSVQYRLAPEHRLPAAVEDGAAFFSWLRSQAQAQPAAPGAAAAADPWLAESADFSRTFVSGGSAGANLAHHIVVRIASGQIALGAAVRVAGYVLISAFFGSVERVATESDPPAGVYLTVETIDQLWRMALPVGATRDHPLANPFGPGSPSLEPLPLPPALVVAPERDVLHGHVRRYAARLREMGKPVELAEFAGEGHGFSVGPWSEARDELMRILKRFVNQGAGLG

SEQ ID NO: 66951 - protein, 357 aa, Zea mays
  Clone ID: LIB4756-044-G11_FLI.pep
RVASSSRPPLPECSALAGGRGSFTFMEAAAIPTSAPETRIAVVTGGNKGIGLEVCRQLAGAGATVVVLTARDETRGAAAAQELRESGLSDVIFHQLDITDAASVSRLAEFLKARFGKLDILVNNAAVGAVEYVQDPADSSTSEEELSGMDMVQRLQCMLKRVRETYDAATEGIKTNYYGIKHVIEALLPLLQASSDGRIVNVSSDFGLLRLINNEEAKAGAKRRGEAHRGEAGRGAGRVPERLRRRRGGGARVAGGLLGLQGGQGGHERVHEDPSEEPPGAARQLRAPRLREHRHDRPHRASHARARRGQRREGGAAAGGRPDRRVLRVGRGGVLYVTKAPSSLSSSLFANSLLVDF

SEQ ID NO: 66952 - protein, 383 aa, Zea mays
  Clone ID: LIB4756-044-H12_FLI.pep
GTNHPGQFPTATMSRPTVTVVSAKGEVTQDTIPVPNVFKAPIRPDVVHAVHTGMNKNRRQPYAVSEKAGHQTSAESWGTGRAVARIPRVSGGGTHRAGQAAFGNMCRSGRMFAPTKVWRKWHQKINLNQKRFATASALAASGSPALLLARGHAISTVPEVPLVVSSTAFADAAIKKTSAAVALLKAVGAGADVEKARNSRKLRAGKGKLRGRRHKQRRGPLVIYNPDEDGKELVLAFRNIPGVETSSVYSLNLLQLAPGGHLGRFIVWTSSAFSALDKVYGSTTEPSALKKDFLLPSPMMVQPDLSKIINSSDIQKVLRPVRGGAVTKRSHTQKKNPLKNFQVQLRLNPYAATFAKEKLGQKKIEAGKAEPAADTFYELLQDN

SEQ ID NO: 66953 - protein, 257 aa, Zea mays
  Clone ID: LIB4756-044-H3_FLI.pep
LVCIKTAAKMGRQFFVGGNFKMNGTIKSITEIVDNLNKAKLDENTEVVIAPPSLYLLLTREHLRKGIEVAAQNIFDKPNGAFTGEISVEQLKDSGITWTILGHSERRQILQENDDFVASKTKAAVDGGLGVILCCGESLEQREAGETVNVVTKQLKAVADKVKDWSKIVVAYEPIWAIGTGKVATTEQAQEVHAALREWLKKEVSAEASEKTRILYGGSVSEKNCKELAKRPDIDGFLVGGASLKPAFVDIINSHQA

SEQ ID NO: 66954 - protein, 286 aa, Zea mays
  Clone ID: LIB4756-047-D11_FLI.pep
GIPSSSSAASACFVGEGERERARERSSREASRWSSNEDVGGVQRAGGGGAGGAGGGGQPDAVAQDEGVAARGALPGRLRAGRVRAARRPRPPRLLPHQPGAPPPQVVRGQGRGVLPVRRGAGQPGSAEPAARAVKQGRQRGAPRHRGLQDAARPRALPGQLHARPAHRLLRLRPLRQVHQLPARRIRPRGQGAALLGDHRRRLRRLLRRHRHAQRLMRQVARAVPARLLLLQRPRRAQVLREPQAQGHRCPRRRRRDLRCHFQGGGRVYCPDGAALIDHQLAEAMP

SEQ ID NO: 66955 - protein, 191 aa, Zea mays
  Clone ID: LIB4756-047-D2_FLI.pep
RAPPFSPPTTSSARGSPSSDRIHSKQQQPAAGSPRLRLLHPDRQQRKTRMSGSKVYTLEEVAKHNTKDDCWLVIGGKVYNVTKFLEDHPGGDDVLLSSTAKDATDDFEDVGHSSTARAMMDEYLVGEIDAATIPTKVKYTPPKQPHYNQDKTQFFGPPRNTGSGRRCKDVHQVGICLVSCHQRFKHHSQTE

SEQ ID NO: 66956 - protein, 172 aa, Zea mays; identical to SEQ ID NO: 41503
  Clone ID: LIB4756-048-D9_FLI.pep

SEQ ID NO: 66957 - protein, 188 aa, Zea mays
  Clone ID: LIB4756-048-F3_FLI.pep
GLPRPFTHLASHHYSRSSTRADNNGHGDVLQSVDAARPRWQQGPAPRRQPGAAVEAGARAAVRRPRRHAPAAARLPVQERSGRSSGGGREELGRVGDGVRDAGAGGVLGAVVRAVPDDRAGDRRAGQGLRRQDHVLQGEHGRQPQRGVHLRHPQHPHRAHLQGRREEGERHRRRPKVHAHHPHRQVHR

SEQ ID NO: 66958 - protein, 190 aa, Zea mays
  Clone ID: LIB4756-049-D12_FLI.pep
RKATRRERGGPRGRGEAPHQDPCSPPSPLISARLSGFNMSTSTFATSCTLLGNVRTTQASQTAVKSPSSLSFFSQVTKVPSLKTSKKLDVSAMAVYKVKLVGPEGEEHEFDAPDDAYILDAAETAGVELPYSCRAGACSTCAGKIESGSVDQSDGSFLDDGQQEEGYVLTCVSYPKSDCVIHTHKEGDLY

SEQ ID NO: 66959 - protein, 243 aa, Zea mays
  Clone ID: LIB4756-049-E9_FLI.pep
QFAAAGVLTGLLALATLASCNTDGDILYKQRLAWEDPNNVLQSWDPTLANPCTWFHVTCNLNNSVVRVDLGKAGISGPLLPDLGALESLQYMELFGNSLNGSIPATLGNLTDLISLDLWDNLLTGPIPTTLGSISTLQYLRLYENNLTGPIPPSFGNLTSLLELKLHRNSLSGSIPASLGNIKSLQFLKLNENMLTGTVPSEVLSLVVVGNLTELNIARNNLDGTERSSGLRVTAVIQDMRTA

SEQ ID NO: 66960 - protein, 379 aa, Zea mays
  Clone ID: LIB4756-049-G12_FLI.pep
RELRTCPHLFLPCSAALPQLGKDDPREEEEEDSAAMTGGGEEQGRSLFGVSLTNRPRWQQFLICSSGFFFGYLVNGICEEYVYNRLQFSYGWYFTFVQGFVYLALIRLQGFTVEQMVNPWRTYVRLSAVLMGSNGLTKGSLAFLNYPAQIMFKSTKVLPVMVMGAFIPGLRRKYAFQEYVSAVMLVVGLILFTLADAQTSPNFSMAGVAMVSGALVMDAFLGNLQEAIFKMNPDTTQMEMLFCSTVVGLPFLAVPMVLTGELVTAWTSCSQHLYVYAVLVLEAMATFVGQVSVLSLIALFGAATTAMVTTARKAVTLLLSYLIFTKPLTEQHATGLLLITMGIVIKLLPENKEGRPRRSPKNDDDDKPREGREAGEETA

SEQ ID NO: 66961 - protein, 171 aa, Zea mays; identical to SEQ ID NO: 66134
  Clone ID: LIB4756-049-H12_FLI.pep

SEQ ID NO: 66962 - protein, 253 aa, Zea mays
  Clone ID: LIB4756-051-B6_FLI.pep
ACPKHLDTSPPSPPQLVRHLSRAGLLLCKRGEPQVRLDDAEVREEILGLLVGNGWVDDNIITRNPVNRGGNPVLITRLQRIQHTQNLGGIPTSGRRVAQNQANSLLRIDDENRANRKRNTLLIDIGGILVVQHIVQQRDLALLVAYYGELEVAASDLVNVLDPLVVRLDGVGGQADELCVAAREFGFELCEGTKFGGADGGAVCGVGEEDGPRVADELVEVDGAGGGFGLEIGGGAAQAEGLRASFGHCWLWW

SEQ ID NO: 66963 - protein, 233 aa, Zea mays
  Clone ID: LIB4756-052-B3_FLI.pep
PGSQTQERKEKKGRDEPTRATTTMATMVASSCHGQLLLFLLVAVASACLGSAAAHQAGSGEGYTIAGRVKIDGMSVKGFGLATKTSNTKVILNGGQRVTFARPDGYFAFHNVPAGTHLIEVSSIGYFFSPVRVDISARNPGYIQAALTETRRVLNELVLEPLKEEQYYEVREPFSVMSLLKSPMGLMVGFMVLMVFVMPKMMENIDPEEMKQAQEQMRNNPVSLSGLLARAQG

SEQ ID NO: 66964 - protein, 231 aa, Zea mays
  Clone ID: LIB4756-052-E1_FLI.pep
GVMAVSFANLNSEAGLKKLDEYLLTRSYITGYQASKDDLAVYTSFSAAPSSKYINVARWFNHIGALVRLSGITAEGQGVKVESSAVPSAPTPDVAEAQAPVAEEDDDDDVDLFGEETEDEKKAAEERAAAAKASGKKKESGKSSVLLDVKPWDDETDMAKLEEAVRSVQMEGLLWGASKLVPVGYGIKKLQIMMTIVDDLVSVDTLIEDYLCAEPVNEYVQSCDIVAFNKI

SEQ ID NO: 66965 - protein, 222 aa, Zea mays
  Clone ID: LIB4756-053-D12_FLI.pep
PGFSRSPQDTMGRRPARCYRYCKNKPYIKSRYCRGVPEAKLRIFDLGKKKAHVDEFPVCVHMVSLEFEQLSSEALEAARICANKYISKFAGKDGFHMRVRVHPWHVLRINKMLSCAGADRLQTGMRGAFGKPCGVVARVDIEQVLISIRTKESFKAAACEALRRAKYKFPGRQKILVSKNWGFTKFHKEEYNELRASGKIVPDGAHCKLISQHGPITKPHAH

SEQ ID NO: 66966 - protein, 216 aa, Zea mays
  Clone ID: LIB4756-054-G4_FLI.pep
PLHCWMKHGPLSRGAPSLVIIFILLTTLFIILVIDLRLGLVRLLFIFLLFLLGRSLLSCSALALVVGSDGLVVLELELVSLGYIGSLVRLAQGFPPVASSFPHRSDRLVLRVLLLELLAKFLHEHEESAGSPLRLVGVLAGLPFPALGGLLRPLALHRQLGIGLGGALGFGPLHGGFERRHGAQRSDPRLAEGIPVAGGRIGVESRAKLPLAARPG

SEQ ID NO: 66967 - protein, 285 aa, Zea mays
  Clone ID: LIB4756-054-H3_FLI.pep
RDSVVVVSSFCLLWGEGERESERDLVERLARWSSNEDVGGVQRAGGGGAGGAGGGGQPDAVAQDEGVAAGGALPGRLRAGRVRVARRPRPPRLLPHQPGAPPPQVVRGEGRGVLPVRGGAGQPGSSEPAARAVKQGRQRGAPRHRGLQDAARPRALPGQLHARPAHRLLRLRPLRQVHQLPARRIRPRGQGAALLGDHRRRLRRLLRRHRHAQRLMRQVARAVPARLLLLQRPRRAQVLREPQAQGHRCPRRRRRDLRCHFQGGGRVYCPDGAALIYHHQAEAMR

SEQ ID NO: 66968 - protein, 500 aa, Zea mays
  Clone ID: LIB4756-056-G8_FLI.pep
RGHNFRRNGQIRAVLALGHLRPTMGSESEPAKGLLPYLQRADELQKHEPLVAYYCRLYAMEKGLRIPQKERTKTTNSILISLMNQLEKDKKSLTLGPDDNLHLEGFALNVFVKADKQDRAGRADINTAKTFYAASIFFEILNQFGELQPDIEQKQKYAIWKAAEIRKALKEGRKPEAGPPGGDKDEAPVSTTTISQDMGQSPSFSSVHQGSEASPRPVNMDFSRRDSFSAVQPGNNVPHQSTEFNDHPSTQLPYSPPPPSQSQHPSPSQSYSSPSYQATTDYPSSDFHKPSPNYSTPGYTSTDFPTNEVHKPPSNYSPPPYTRTDRPSNDGYNPHSNGKPDVSAYPQAYQPSPYTFDPQHNSQNYYSTEAPAVPYNYPNFQSYPSFQDNTSASVLTHQSSFYPESDGPAATSHTPASNSSVPTHYHPTADCSPQVTPPAAPPASQYRYDSSYQPEVEKIAEAHKAARFAVGALAFDDVSVAVDHLKRALDLLTNPSAEPH

SEQ ID NO: 66969 - protein, 375 aa, Zea mays
  Clone ID: LIB4756-056-G9_FLI.pep
RENINNNPLRSLVLLPTSSQVASCSASSVFRSVGHCCWKSRPLGLPRAFSKSVRLMAMEGPVLCRPAMQAKSPAAALVNNSLTRFGQLGTISKYRNVSRFISPISQPSTKNIGPCCSFSSSSDGNGYMAGNFSDSDEDYVNSTVLEAVEVRSGSEGYVIKMRDGKNLRCVHNNSQGRNIPESAPQPAIVLRIEDGSETLLPIIVLEMPSVLLMAAIRNVHIARPTIYQVVKEMIDKMGYEVKLVRVNKRIQEAYCAELCLTKIDDSTDSITFDLRPSDAINIAVRCKVPVQVHRSLAYSDGIRPVEPARMAVAAGLSDGLLFTELDRPDGQASVEAQEFGLVKNMLIAAVEERYKDAASWKDKLMRLRSKRKNWA

SEQ ID NO: 66970 - protein, 318 aa, Zea mays
  Clone ID: LIB4756-056-H3_FLI.pep
DRHLEAAASAPLRPTLERDRPDDHLVVDGSQRSADEGADPEDPVVSPRMVLVVNYGGAKAPRGVDAGAGDRDGGQVDEEHGKPDWKRGEDRHMGVPGVPLGVGGGEDGVDEDEGADDLGAEAVALGVAGRHDVGAAAVAHVQPLLEPLDDARAADGAQALHDDVKHRPGEGQLPRQEQPEGHRRVDVPAGDAGGAVDEGEDHAAEGPGDALDADGGALGGGLGDAHDGEDGDVEEEEGGDELGDAGAVEGPGLELPGLEERRRRGLLVVLVVRALRRRADGLALRELVGAQADVLLLPLHACAVTFLQQTSLELARRS

SEQ ID NO: 66971 - protein, 255 aa, Zea mays
  Clone ID: LIB4756-057-E5_FLI.pep
ALSTAGFGSSSCLPPRVLAGPEVGLHPRDEEDLAVVDVGVNQGQRQRRRSTDHLALVVVLGSVAWADELVLGAVPRHDAAEVSAHGVDPVGGQRLVLLHHQVRGVTLEPLRERAVVGTVRVEPRLHRDVVAQLVLRVGPAAGVPGAGRDEEGAVGDDHADGGQRDGAEEEEVHQLPLLHVGDAVGGDAARRLAHNAPLGALAAHAQAKPLHRLAQRSAGPAELGGIGGGRERRGGRHGCSRRGSVGVGTIRLVFP

SEQ ID NO: 66972 - protein, 171 aa, Zea mays; identical to SEQ ID NO: 66134
  Clone ID: LIB4756-058-C9_FLI.pep

SEQ ID NO: 66973 - protein, 167 aa, Zea mays
  Clone ID: LIB4756-058-E9_FLI.pep
AALVRLRLGGLLLAALPLRDGVLHAQKEEQSSNQRQILGELRKEACKFCLLHIVVVEVMDDRSDQSKVQQLNVWHSYSQMSRYIFDKHVEFGPKGLSCWSTISTEFIKLLVGGEEESGDEEHPPDEGHEPHLGNGGEATTGRGRGGASAAAMGTWPVELSRMLGSRR

SEQ ID NO: 66974 - protein, 179 aa, Zea mays
  Clone ID: LIB4756-058-G12_FLI.pep
PPRGRDRNRKPEAKMSSVFSGDETAPFFGFLGAAAALVFSCMGAAYGTAKSGVGVASMGVMRPELVMKSIVPVVMAGVLGIYGLIIAVIISTGINPKAKPYYLFDGYAHLSSGLACGLAGLAAGMAIGIVGDAGVRANAQQPKLFVGMILILIFAEALALYGLIVGIILPSRAGQSRAD

SEQ ID NO: 66975 - protein, 171 aa, Zea mays; identical to SEQ ID NO: 66134
  Clone ID: LIB4756-059-D9_FLI.pep

SEQ ID NO: 66976 - protein, 172 aa, Zea mays; identical to SEQ ID NO: 41503
  Clone ID: LIB4756-060-H6_FLI.pep

SEQ ID NO: 66977 - protein, 277 aa, Zea mays
  Clone ID: LIB4756-061-A2_FLI.pep
APCTTSPASPLALLATSSPSPSSCRRCKLLASTLTVSLISFFRLIVLVDPKGCTADECVAAAARLLLAFCTPSSRPTFKRVLKAKSTEQFDGLPYLLSLLNCCICLWYGLPWVSDGGRALVATVNCTGALFQLAYISLFIFYADSRTTRLKVAGLLVLVVFAFALIAHASIAFFDQPLRQLFVGSVSMASLVSMFASPLAVMGVVVRTECVEFMPFYLSLSTFLMSASFAVYGLLLRDFFIYFPNGLGVILGAMQLVLYAYYSRRWKSSDSSAPLLA

SEQ ID NO: 66978 - protein, 317 aa, Zea mays
  Clone ID: LIB4756-061-B6_FLI.pep
RAYTTNFTFPNLMLRTLARMAPKNWTKESFTLNTGAKIPAVGLGTWQSKPGEVREAVKAALQGGYRHIDTALAYGNEKEVGQGIKDSGVPREEIWVTTKLDNPWHKRVEEGINSSLSSLGLDYVDLYLMHWPSSTDPDDLKKHYPDWDFKDTWAEMQKLPESGRVKNIGVSNFAIKNLEKLFADSRFKITPAVNQIELHPNNPSPKLLDYCKEKGIHCTAYSCLGSTDSPLYKNEKLKKLAESKGKSVQQVLLMWGLQRGTSVIPKSVTASRIMGNFELDGWELTDEEMKEISSLPERFKVCGDAWLPVKVFFGDDE

SEQ ID NO: 66979 - protein, 306 aa, Zea mays
  Clone ID: LIB4756-061-C12_FLI.pep
SKNTFRPVDGRGGAMAGLRGPSERVEDGGVERVAQVGGPVVERPLAGGGGLHGEAEEGDHGEPRVLDLRQLQPLLLLRVGRQAERVEVGAAGVQPLLRVELGVALELGVADHEHLDPDERRDGERQRLAQVGGPVHQLHLAGVLPGDAGEPLDGEGAEGGEHGPAAVDELALAEPLEAEHLAVGLQRGGLDFGGLEPGADDAAGLILGQVLVQRVQLELQVLHGLPETERVEPVVADQRAVQVVGRHGAGEPQRPVRGGRCLRHLLRSRLRLAAQPEPEPGHDAPVLWRRVRQAGAQECARRGGHR

SEQ ID NO: 66980 - protein, 276 aa, Zea mays
  Clone ID: LIB4756-061-D11_FLI.pep
GWRLFLKDRNLDDTLYPFSAGINLACRKNIQDYMRHHLHIEESQVADMCLDLYKEYGTTMAGLKALGYEFDNDEFHATVHGTLPYHNLRPDPVLRTLLLSIPQRKIVFTNSDKAHAEEALCRLGLQGCFDGVICFETLNPCNGPSAFRDGNGMLFPDETSPNPDLADLNESDGFRPISPILCKPSVEAMQAVTRIANVDPKKTIFFDDSTRNIASGKAAGFHTVIVGRPTLVPGADHALESIHNMKEALPEIWDGQDRSESDALLSPTAVETPVVA

SEQ ID NO: 66981 - protein, 187 aa, Zea mays
  Clone ID: LIB4756-063-A3_FLI.pep
GTDGGVTEFDLLDHLFHQVAKFLEGLQYYLSKNCLNLVFQHLNLLSPLMKQQLVGWNYEPMKKQARSCQSSILGSLLRIWMGSFSLWSWRWDMFAGSIFLNLQKVLLCMAPNLDDSLGANKSLYLLPVTIKELQGLEELVVLLLRPALPGLGDCVRLPHLLAHFLPRPGRVGLGLRRRRAGGDHQEA

SEQ ID NO: 66982 - protein, 201 aa, Zea mays
  Clone ID: LIB4756-063-F9_FLI.pep
TTSPRSSRTASARSWTSRSSPTATPGSTPGGEISCQHGPYECLLNTVEACAIDAWPDLDVHFSFIYCVEDLVVKRQYKDWESCFEKLGLDAKPVTECYKSEHGHKLELKYANQTDALEPPHRYVPWVVVDGQPLLEDYENFEAYICKAYKGTPPKACEGLERLQMALETAAEARNGVSYNSGVSKLATAEDEGGEHKVGEY

SEQ ID NO: 66983 - protein, 147 aa, Zea mays
  Clone ID: LIB4756-064-E3_FLI.pep
THQVRLRSLLQRKHRMALETKISLEILGNLPDKPLERKLPYEQVSALLILADFTKSNSSRAVTMRLLYSPSCGCRLTSSLGGKLLPRSLPSSGLASSLLSTSHWSLNYGLPENSSASQIPNQQRAVCDPRGLFPPNLRLELAIDFFP

SEQ ID NO: 66984 - protein, 340 aa, Zea mays
  Clone ID: LIB4756-065-A5_FLI.pep
GTLASFSFSIREPRTGAAMAEEPAVVVASSSYEVDLGNLMAYDPSHHVATASREELRQECLRKGTELAQAVADVLFALPPNEDRDGPIIHLPPPTFRLPREKHLPKPKPPTKWELFAKAKGITKRKKNKREWDEQTQSWKRTHGYDRVNDDKDIPIIEAKLTDEPGVDPFAQRRDEKKKRVEKQEKNRLDNLKKAAKVGALPSHIQLAAKALPITGTKADLPKKSRKEDLESVVGMASSATASGGKFDEKLPGEKPPKHPGKHRKFLPVAEGKGMGSLEKQQNDKILNSLLARNSDEPLDVGKAITMYKVKKEKQRRKEKGMSSKSDKLKPQKKPHKKSS

SEQ ID NO: 66985 - protein, 293 aa, Zea mays
  Clone ID: LIB4756-065-G11_FLI.pep
SLHNIANMQIILELTRCRGRNSRGGLHKCAPCTAMPNNKIVAANMEEKGAGGKAAVPHDELPRFTIFLIPNRREPPLDLVELVCLHHRISLGNGVPGSSPVVELAVVLVGVAVECAVQVPTPAVESRKSNPLPAGAAPVRPYLPPFGDRRHPLAGSGNISGLLHVHCLQLNLGNSYYRVAASNNRLHDGVAAVHDAVDRGGSQLGLILLRYHLLVALGAHVHGRRAAEEATVIDAEDGSLGGLAPSLLVLHGFLNSDETALFAIPLRRSPRGRRGGEGRGIAGNSVGFEMGPG

SEQ ID NO: 66986 - protein, 171 aa, Zea mays; identical to SEQ ID NO: 66134
  Clone ID: LIB4756-065-G4_FLI.pep

SEQ ID NO: 66987 - protein, 413 aa, Zea mays
  Clone ID: LIB4756-066-B10_FLI.pep
REQPSFFFTMAQRMLLRASGPRRVYYGFTRSFSTVLDTPVDPGTQQIRLATPRTTVFENALNAKAPRTNWTKEEISEIYNTSLIDLTYASALVHRRFHDPAAIQMCTLFNIKTGGCSEDCSYCAQSSRYDTGLKATKLSSVESVLEAARIAKENGSSRFCMGAAWRDMRGRKTNLKNIKEMIKGVRGMGMEACVTLGMVDAAQAKELKDAGLTAYNHNVDTSREHYPSVITTRTYDERLNTIKNVQEAGIHVCTGGILGLGEKARDHVGLIHTVATLPAHPESFPVNALVPIKGTPLGETQAISFDAILRTIATARLVLPTTIIRLAAGRHTMREEKQILCFQAGANAVFTGEKMLTTACNGWEEDKAMFQRWGLRPMKMEETIGEKRKVPGQEEAEAVVAAAEAEATVQALA

SEQ ID NO: 66988 - protein, 440 aa, Zea mays
  Clone ID: LIB4756-066-B2_FLI.pep
PGGLSPIPSSPAPSTQTPMPLLPLLPVMASTFSPTSAARALLPGSTSRPLFLAASASSGRIQPSRKGLDFRRGRFTVCNVAAPTAAEQEATASAAKETQRPVYPFAAIVGQDEMKLCLLLNVIDPKIGGVMIMGDRGTGKSTTVRSLVDLLPDIRVVVGDPFNSDPDDPEVMGPEVRQRVLQGDTGLPVTTAKITMVDLPLGATEDRVCGTIDIEKALTEGVKAFEPGLLAKANRGILYVDEVNLLDDHLVDVLLDSAASGWNTVEREGISISHPARFILIGSGNPEEGELRPQLLDRFGMHAQVGTVRDAELRVKIVEERARFDRDPKTFRESYHDEQEKLQQQISSARSNLGAVQIDHDLRVKISKVCSELNVDGLRGDIVTNRAAKALAALKGRDSVTVEDIATVIPNCLRHRLRKDPLESIDSGLLVIEKFYEVFS

SEQ ID NO: 66989 - protein, 318 aa, Zea mays
  Clone ID: LIB4756-067-C11_FLI.pep
DRHLEAAASAPLRPTLERDRPDDHLVVDGSQRSADEGADPEDPVVSPRMVLVVNYGGAKAPRGVDAGAGDRDGGQVDEEHGKPDWKRGEDRHMGVPGVPLGVGGGEDGVDEDEGADDLGAGAVALGVAGRHDVGAAAVAHVQPLLEPLDDARAADGAQALHDDVKHRPGEGQLPRQEQPEGHRRVDVPAGDAGGAVDEGEDHAAEGPGDALDADGGALGGGLGDAHDGEDGDVEEEEGGDELGDAGAVEGPGLELPGLEERRRRGLLVVLVVRALRRRADGLALRELVGAQADVLLLPLHACAVTFLQQTSLELARRS

SEQ ID NO: 66990 - protein, 302 aa, Zea mays; identical to SEQ ID NO: 66931
  Clone ID: LIB4756-067-E1_FLI.pep

SEQ ID NO: 66991 - protein, 274 aa, Zea mays
  Clone ID: LIB4756-067-H4_FLI.pep
APAGTRNPGTHGFHQSDAPRDMAVVRLRVSPRLRSIPLLLSQPDAATVRRSFACASASQAPAPARAMAAPSSSSATPSPYTTLVGRVSCEREIKRSKFIAIAAPVPNERAAMAFLDQVKDPRATHNCWAYKLGDQFRYNDDGEPSSTAGKPIYSAIISSGIDKVMVVVIRYFGGIKLGTGGLVRAYGGVASECLKDAPTCLVKPKARVGMEVPFNLLGTVYHQLQHFEAEDIKQDYDTGKDGTVMVMFEVEYEKIENLGNAVNSACSRKIELYL

SEQ ID NO: 66992 - protein, 334 aa, Zea mays; identical to SEQ ID NO: 47994
  Clone ID: LIB4756-068-C8_FLI.pep

SEQ ID NO: 66993 - protein, 263 aa, Zea mays
  Clone ID: LIB4756-068-G11_FLI.pep
GKRPNPPYNQLATHRAVPRSKSPDAQRRSRRRTPSRSKAPAARAAVCGENMAVVSALAKYKLVFLGNQAVGKTAIITRFMYDKFDDTYQATIGIDFLSKTMYLEDRTVRLQLWDTAGQERFRSLIPSYIRDSSVAVIVYDVTDRQSFLNTSKWIEEVNTQRGGDVLIFLVGNKTDLVDKRKVSTDEGEAKAQEHGAMFMETSAKAGFNVKPLFRKIAGSLPGLDALSSGKQEDMVDINLRPASGSSASGAAAQLEQKSGGCSC

SEQ ID NO: 66994 - protein, 422 aa, Zea mays
  Clone ID: LIB4756-069-E6_FLI.pep
PGSHSPRRASESSEPPARPPPSPPPVPKANSFQVAMADQANQPTVLHKLGGQFHLRSIISEGVRARNICPSVSSYERRFATRNYMTQSLLGPSMSVSGGINVPVMRTPLCANAPAEKGGKNFMIDFMMGGVSAAVSKTAAAPIERVKLLIQNQDEMIKSGRLSEPYKGIVDCFKRTIKDEGFSSLWRGNTANVIRYFPTQALNFAFKDYFKRLFNFKKDRDGYWKWFAGNLASGGAAGASSLFFVYSLDYARTRLANDAKAAKGGGERQFNGLVDVYRKTLKSDGIAGLYRGFNISCVGIIVYRGLYFGLYDSIKPVVLTGNLQDNFFASFALGWLITNGAGLASYPIDTVRRRMMMTSGEAVKYKSSLDAFQQILKKEGPKSLFKGAGANILRAIAGAGVLSGYDQLQILFFGKKYGSGGA

SEQ ID NO: 66995 - protein, 251 aa, Zea mays
  Clone ID: LIB4756-070-A7_FLI.pep
RATPCRPPAYPRSASSSCSRCSAPCPPVARSTCSTRCPVASSLPPHTPVVVAAALLVVSLAAYCSTDPLRTGSMVDFPGFESHLVDLPDPDEMPTHADERERLRGAEVRFHGEVQGPESVAFDPQGCTWVSSMAGSSPGTASGGSHSRRPPRAGHRSSAAGPWPRRWSISPASTSAAARSGSVSIRLGTCTSSTPTLVCSKSAPRAGWPRRSQRRPRACASTSPTTPTSTTRETSTSLTPESTTRDGLVTV

SEQ ID NO: 66996 - protein, 374 aa, Zea mays
  Clone ID: LIB4756-071-D2_FLI.pep
QQRPPAVLTSVVIVVVLLLLLLEAGGSTLFAYGQLHVAEGSVDIDLSLDGVSRAPPPDHVPDSGSEVLGPEAEGHLHPGDPLLLDLGGLCELGGGDAVVAEPHLVLEQVEAEVEVVLVLELEVERGGGLLEGEVVELDLLHVDVGLVRDGDLAVLLDRDLDAADDGDVDEEHDADEVGDDAARLDVLVGALDVVEDERHRDLDGLLAVRVDGAGVRDEARHQLAAVAVDEVVDVHERDRDRVRVLDEHVHDEVGAVEADVRDVDAAHVGRGLAEPDDLLDLLADVVDEVLHLVDEAAAALLLVAAVLVLVLASALGHRHRGVVLRRRRHACSARLRAIRTRTKRVETACRAPVPAGKEAGGRWGTGGGLFFFSR

SEQ ID NO: 66997 - protein, 344 aa, Zea mays
  Clone ID: LIB4756-071-D9_FLI.pep
PGAWRLPARIAIATIGDCVGVVCLSRNESLKTRASSDMEEAAVARTTSETQVGDLPEVCLAQAIARTSPRDACRCAAVSPAFRVAADSDQVWRAFLPEQLEAAEDHLDSRRVSPPSQAAHPAATVRGLSKKDAYLSLCDAAGAVAVDGSGCRVWLERASGATCYALSARRLSLPWDDGEFSWRFTHHPRSRFAEVAELVDCTCLDIYGSLPLAALTPATVYAAFLVYGTAPEGAYRGLSYPDQETAVAVGGRVVARHAVCLRPDDAEARKFRGRGAGEEARRPSLRADGWEEMEMGRLRTPPVESGGGGGDVCVVQASFEVLGWYPKRGLVVEGIEFRALHDAS

SEQ ID NO: 66998 - protein, 335 aa, Zea mays
  Clone ID: LIB4756-071-E6_FLI.pep
RGIYSKTTKLEVNASDVIILEGILVFHDQRVRNLMDMKIFVDTDADIRLARRIRRDTVERGRDISSVLDQYGRFVKPAFDDFVLPSKKYADVIIPRGGDNHVAVDLIVQHIRTKLGQHDLCKIYPNVHVVQSTFQIRGMHTLIRDRDITTPDFVFYSDRLIRLVVEHGLGHLPFTEKQVITPTGSVYMGVDFCKKLCGVSIVRSGESMENALRACCKGIKIGKILIHRVGDNGQQLVYHKLPMDIAERHVLLLDPVLGTGNSVAQAIDLLIRKGVPEDRIIFLNLISAPEGIQCICKRFPSLKIVTSEIDYGLNEEFRVIPGLGEYGDRYFGTDN

SEQ ID NO: 66999 - protein, 252 aa, Zea mays
  Clone ID: LIB4756-071-G2_FLI.pep
GFEGRKIQAPRPGNPFVGEAMSSAQDPFYIVREEIQESIDKLQSNFHRWEQTASNTGEYVHLTKELLTSCESIEWQVDELEKTISVASRDPSYYGLDEVELSRRRNWTGSAHKQVGTVKRAIEKGKSNVATSKYQDTSRTNHYSAQDNDDFISSESDRQLLLMRQQDEELDELSESVQRIGGVGLTIHEELSGQERILNDLSLEMETTSNRLDFVQKRVAMVMKKAGIKGQIMLIVFLVVLFIILFVLVFLT

SEQ ID NO: 67000 - protein, 181 aa, Zea mays
  Clone ID: LIB4756-071-G9_FLI.pep
AFHSGDTMGGCCCCCCSARASDSDRAPVRIYHRQNPEEHAPLSSAFDGPSPTSAIVAVDTNLDTPSLDTYRAPPAPLPYDVCFTVSENPDVEKSGIKIKTDGQQSPKVDEFESCEKGAPEDKADEEEDVCPICLEEYDKENPRSVTKCEHHFHLCCILEWMERSETCPVCDQITLIDGMYE

SEQ ID NO: 67001 - protein, 180 aa, Zea mays
  Clone ID: LIB4756-071-H3_FLI.pep
AFHSGDTMGGCCCCCCSARASDSDRAPVRIYHRQNPEEHAPLSSAFDGPSPTSAIVAVDTNLDTSSLDTYRAPPAPLPYDVCFTVSENPDVEKSGIKIKTDGQQAPKVDEFESCEKGAPEDKADEEDVCPICLEEYDKENPRSVTKCEHHFHLCCILEWMERSETCPVCDQITLIDGMYE

SEQ ID NO: 67002 - protein, 363 aa, Zea mays
  Clone ID: LIB4756-072-D10_FLI.pep
PPSRRASIMSAYCGKYKDELIKNAAYIGTPGKGILAADESTGTIGKRLSSINVENVEENRRALRELLFCCPGALRYISGVILFEETLYQKTKDGKPFVDVLKEGGVLPGIKVDKGTIEVVGTDKETTTQGHDDLGKRCAKYYEAGARFAKWRAVLKIGPNEPSQLAIDLNAQGLARYAIICQENGLVPIVEPEILVDGPHDIDRCAYVTETVLAACYKALNEHHVLLEGTLLKPNMVTPGSDSKKVTPEVIAEYTVRTLQRTVPAAVPAVVFLSGGQSEEEATRNLNAMNKLSTKKPWSLSFSFGRALQASTLKAWAGKVENLEKARAAFLARCKANSEATLGTYKGDAAADTESLHVKDYKY

SEQ ID NO: 67003 - protein, 174 aa, Zea mays
  Clone ID: LIB4756-072-D11_FLI.pep
TLGCCTASYTNTRRVHVTSKHMVTFLSAPTRRTPATASTVVEPEYVVLHEETPLLVGHQLKHLAEPQLVLLAGELEGAADEHQDAAGERRRGLAVERAHGVPALLQGQLRQLPADLLGACDGVALEGEHGSLAVEHGQRGAAGVERAVVVVHEGPRHRVAVARARAAAVALAVH

SEQ ID NO: 67004 - protein, 278 aa, Zea mays
  Clone ID: LIB4756-072-G6_FLI.pep
GGLLHGRACMNARSCMLLLNKEAMGENRKITRSRLVTNKLLHRCQQLHGHGSVSGVSETLGKRPLNGNKDTLVYSVFASTWNVGGVTPSDGLDLEDWLDTRANAYDIYVLGFQEIVPLNARNVLGPRKSRVSAKWNSLIGEALNRRCREEGGANTNSSAKDDEGSVEGSQGFRCIRSKQMVGIFTSVWARSSLRPLIRHLDASCIGSGIMGCLGNKGSVSIRFVLHDTSFCFVCCHLASGGKQGDVLLRNLDVADILARTRFPGLAAQELPEKILDHE

SEQ ID NO: 67005 - protein, 188 aa, Zea mays
  Clone ID: LIB4756-073-B6_FLI.pep
GYPHTLLFAHTNPIPIKMSNPRVFFDVSIGGQPAGRIVMELYADKVPKTAENFRALCTGEKGTGKSGKPLHYEGSVFHRVIPQFMLQGGDFTRGNGTGGESIYGEKFEDENFNLRHTGPGVLSMANAGPGTNGSQFFICTVKTSWLDGKHVVFGQVVEGMDVVQAVEKVGSQTGKTSKEVKIEKSGQL

SEQ ID NO: 67006 - protein, 171 aa, Zea mays; identical to SEQ ID NO: 66134
  Clone ID: LIB4756-074-C3_FLI.pep

SEQ ID NO: 67007 - protein, 328 aa, Zea mays
  Clone ID: LIB4756-076-C8_FLI.pep
RRIMARGNQRRHAVLVRPLVYLQFTPPAVLVRREAIDLAAEGGRRSQLGGAGSQHVLVVRRGDGGADEWTHPEDPVVIPGLVVVVDDSSAQAPGRVDAGAGDGDRGQVDHEHREPDGERGKHGDMRVTGVALGVGGGEDGVDEHEGADDLRGEAGALGVAGAELVGAAAVAHVEGALEALDEPDAADGAEALRDDVEQRAHQRDLARQEEAEGDGRVDVPSRHPRGAVDEDEDHAAEGPGDAEHADAAARRVGARRRRVRLVLVPDHRGHRDVEEEQRGHELGDHRAVQRPLGQLLRVHQRRRGRVRVVLALVRRRGLDVLGHSRASR

SEQ ID NO: 67008 - protein, 256 aa, Zea mays
  Clone ID: LIB4756-076-G12_FLI.pep
PGSKPETPERVRKQLPAMATADRVAATFLSSFPTHHPRPFSSVSLVTNPVLPVSLRAAVTGGPRLASRLRVHRVGAAVAQLPTTNPEVASGEKKIRWSSRAVRSFAMAELEARKMRYPTTGTEGLLMGILVEGTSGAAKLLRANGTTLLKVREEAANVLGKSEMFYFSPMHPPLTEAAQRALDWAVNEKLKSGEDGEVTANHLLLGIWSDKESAGHKILYSLGFDDEKASLLAKTAGEEAAMSLREQGEHLIYSST

SEQ ID NO: 67009 - protein, 279 aa, Zea mays; identical to SEQ ID NO: 39398
  Clone ID: LIB4756-076-H4_FLI.pep

SEQ ID NO: 67010 - protein, 350 aa, Zea mays
  Clone ID: LIB4756-077-C7_FLI.pep
LPATAFLARSTAAASRHRPETISGPRSTEAPCVISPRPSRRRRRCRRRHPRWRCCTRVQRRSIRARIDFFLCCTVITELKQFLRGSIAIAMEAGRMDQPFMAAINSQPFVEDIEPVKKASGDMPATTGSGCFECNICLDFASEPVVTFCGHLYCWPCIYEWLRPGVESAASDNSSSARRQCPVCKATLSTDTLVPLYGRGGNSKKSLDGMAIPRRPMVHRETVEQQNAQSNVNDQHYHQSMEDNSQRQPLLQAHHHPIPTGFDFIYPPAPVGRGLIHSTAGGVLGGMAEIVLPLALRGQMPASLYYTNPYHAATQNVDPRLRRHQMEIERSLHQIWFFLCVFVVLCLLLF

SEQ ID NO: 67011 - protein, 286 aa, Zea mays
  Clone ID: LIB4756-077-D7_FLI.pep
KIPSSSSAASACFVGEGERERARERSSREASRWSSNEDVGGVQRAGGGGAGGAGGGGQPDAVAQDEGVAARGALPGRLRAGRVRAARRPRPPRLLPHQPGAPPPQVVRGQGRGVLPVRRGAGQPGSAEPAARAVKQGRQRGAPRHRGLQDAARPRALPGQLHARPAHRLLRLRPLRQVHQLPARRIRPRGQGAALLGDHRRRLRRLLRRHRHAQRLMRQVARAVPARLLLLQRPRRAQVLREPQAQGHRCPRRRRRDLRCHFQGGGRVYCPDGAALIDHQLAEAMP

SEQ ID NO: 67012 - protein, 204 aa, Zea mays
  Clone ID: LIB4756-078-D12_FLI.pep
GTVSARTSKKAKPQACPVFSPFPLKGAMAPRSDHAGGSAAAPVAAQAHFDSMDPLFHVLRVLPFSFLRPPRTRLRLPSNLALPSPMTVFSLILLTYFAVVSGLVYDVIVEPPGIGSAQDPGTGAVRPVVFLPGRVNGQYIIEGLSSGFMFVLGGVGIILLDLAVDRTRPRSLRASFGSAGAVAVLIAYAMAMLFLRIKIPGYLW

SEQ ID NO: 67013 - protein, 224 aa, Zea mays
  Clone ID: LIB4756-080-C11_FLI.pep
PRGENDPQYILDTSVYPREPESMKELREITAKHPWNLMTTSADEGQFLNMLIKLIGAKKTMEIGVYTGYSLLATALALPEDGTILAMDINRENYELGLPCINKAGVGHKIDFREGPALPVLDDLVADKEQHGSFDFAFVDADKDNYLNYHERLLKLVRPGGLIGYDNTLWNGSVVLPDDAPMRKYIRFYRDFVLALNSALAADDRVEICQLPVGDGVTLCRRVK

SEQ ID NO: 67014 - protein, 252 aa, Zea mays
  Clone ID: LIB4756-082-E7_FLI.pep
RERDLILRSAQATMAEDATSSHPSRYVKLTKDQDAPAEDIRPGELNQPVHVPQLEGRRCSECGQVLPESYEPPADEPWTTGIFGCTDDPETCRTGLFCPCVLFGRNVEAVREDIPWTTPCVCHAVFVEGGITLAILTAIFHGVDPRTSFLIGEGLVFSWWLCATYTGIFRQGLQRKYHLKNSPCDPCMVHCCLHWCANCQEHRERTGRLAENNAVPMTVVNPPPVQEMSMLEEVEEKGAEKSEHDDVEVIPL

SEQ ID NO: 67015 - protein, 537 aa, Zea mays
  Clone ID: LIB4756-083-A4_FLI.pep
PPPPSEAAPPPPRLLPRSPRPPPPIDIPPAHRSMAVGGDDDSMERDFAARLRLAHSPSPATPAAAASSSPTAAGGIAFRAPQEQFTADDFVLGKIYGVGSYSKVVRAKKKDTGRVYALKIMDKKFITKENKISYVKMERIVLDQLDHPGVIRLFFTFQDTYSLYMALESCEGGELFDQIVRKGRLSEDDARFYAAEIVDILEYLHGLGLIHRDVKPENLLLTSDGHIKIADFGSVKPTRDTPIKVLPNSTTERACTFVGTAAYVPPEVLNSAPATFGNDLWALGCTLYQMLSGSSPFKDASEWLIFQRIIARDLKFPEYFSAEARDLVDKLLDVDPGKRPGAGPDGYSSLKEHPFFRGIDWKNLRKTRPPKLAIDANVNEDEDSQDSNWLAHMGSVAVNQQSNTVGNNGAPSSSEVRSHISKLASIDSFDSKWQEFLDPGESVVLISKLKKINKLANKKIQLILTDKPQLICVDPSKMVAKGNIIWSDDPSELSVQVSDSSHFRICTPKKVSTFEDAKQRAWQWKKAIEDLQRCQRN

SEQ ID NO: 67016 - protein, 103 aa, Zea mays
  Clone ID: LIB4756-083-B12_FLI.pep
GTITTSTTNEATTKPFPLPSSVLQRESAAAVKMIIPVRCFTCGKVIGNKWDVYLDLLQADYSEGDALDALELFRYCCRRMLMTHVDLIEKLLNYNTLEKTETS

SEQ ID NO: 67017 - protein, 244 aa, Zea mays
  Clone ID: LIB4756-083-D1_FLI.pep
DVETGCKVYGQTTTTDHHSELTDIGIIPSLKGSVPGPKFPYVIFCAPPYRSEDYAGDLRVAASNWNGKGSFLFTSSTAVYDCSDNGFCSEDSPCVPIGQSTRTDVLLKAENVVLEAGGCVLRLVGLYKSDRGPHVYWLSKGTLDVRPDHILNLIHYEDAASLVISIMKKRLRSCIFVGCDNEPLSRLEIMDRVNRSRKFDTQFHGFTGTDGSLGKRMDNSKTRAKLGWQPKYPSFTEFLGLSNL

SEQ ID NO: 67018 - protein, 278 aa, Zea mays
  Clone ID: LIB4756-083-E2_FLI.pep
RALVPKKKIVLGTRRRRSVSGSQRRRGRRQTGSPSSLRRYINMRLNKVEVNLIRLLEAAPRQQNQAKLVYYVTTARELLEQLGAETTPEGISSISKAKLSEYSEKIEALASRLAASVPENENPIIESKDEISYEEAKPESPISLSSGLRRRSTAHAVVGTSHQENKEDIGAPIKLDAEAQAYIEKHRKLQEDLTDEMVELARQLKESSLMMNQSVQETEKILDSTERAVEHSLASTGHATSRAAEVYSLASKTTCFQWLLMFVMTCMFVMVVLLIRVT

SEQ ID NO: 67019 - protein, 309 aa, Zea mays
  Clone ID: LIB4756-083-F11_FLI.pep
RGPKLSLPRPSGSYRSSPSPVELMASSMAAAATATALPLPSGTTQRPSAQGRLLFTAAPARSRSLRLCPAGRRSARSSPRATKAVVAALADPLKVMISGAPASGKGTQCELIKTKYQLAHISAGDLLRAEIAAGSENGKRAKEFMEKGQLVPDEIVVNMVKERLRQPDAQENGWLLDGYPRSYSQAMALETLEIRPDTFILLDVPDELLVERVVGRRLDPVTGKIYHLKYSPPENEEIASRLTQRFDDTEEKVKLRLETYYQNIESLLSTYENIIVKVQGDATVDAVFAKIDELLGSILEKKNEMVSST

SEQ ID NO: 67020 - protein, 270 aa, Zea mays
  Clone ID: LIB4756-084-B9_FLI.pep
ELGIAGGGGSGRGASFCVLEGVMFHGGRPLSLRGSLKALEADIHHANTLAHAIHRAYGGACVQMRLSYSSMAPIFLNLIQWMDCSCSLSYTLPSYLGLLEVLVYKVYVDEDASISTIERRASLKEFYTIIYPFLQQLEDNLMDKDCKDKGWSAAAGGGGGGRKLVAEDDREDECGICLETCTKMVLPNCNHAMCINCYRDWYTRSQSCPFCRGSLKRVRSRDLWVLTGDDDVIDTVTLEKENVKHFLSFIDSLPLIVPDNMLLVYYDYLV

SEQ ID NO: 67021 - protein, 186 aa, Zea mays
  Clone ID: LIB4756-084-D3_FLI.pep
GTSFPIRSGQSTEVTRARARAHIPSLPRCVPSPQTSAMADQLTDEQIAEFKEAFSLFDKDGDGCITTKELGTVMRSLGQNPTEAELQDMINEVDADGNGTIDFPEFLNLMARKMKDTDSEEELKEAFRVFDKDQNGFISAAELRHVMTNLGEKLTDEEVDEMIREADVDRDGQINYEEFVKVMMAK

SEQ ID NO: 67022 - protein, 287 aa, Zea mays
  Clone ID: LIB4756-084-F8_FLI.pep
PGIPSSSSAASACFVGEGERERARERSSREASRWSSNEDVGGVQRAGGGGAGGAGGGGQPDAVAQDEGVAARGALPGRLRAGRVRAARRPRPPRLLPHQPGAPPPQVVRGQGRGVLPVRRGAGQPGSAEPAARAVKQGRQRGAPRHRGLQDAARPRALPGQLHARPAHRLLRLRPLRQVHQLPARRIRPRGQGAALLGDHRRRLRRLLRRHRHAQRLMRQVARAVPARLLLLQRPRRAQVLREPQAQGHRCPRRRRRDLRCHFQGGGRVYCPDGAALIDHQLAEAMP

SEQ ID NO: 67023 - protein, 574 aa, Zea mays
  Clone ID: LIB4757-001-A1_FLI.pep
RVAGVHVCDNAIIIIIIHIHLVWLVLVQRRTRARAIHIYRVCPCMRAGLVLFLDLCSWRRHACVFIIIEHKHDASHVWLHVEPGGNLHPQRRVALGEEVYPDGPELLADLWVSERVGESPHESVLSVGVPGAVPLPWLLEVVGLAYGCLLPPPRDRPGRQWRGRRRLPQRRVPGRVVVHLLVAVHEVHGAVVVVVVVRAARRVDGQHQVVGPQPVALRVGVGEHPALQHLVVRVVDPWHHQPRAERQLLVLVEEVVHVPVQHQPPHGPERQQVLRPRLGVVQRVEVVLLLRVRVHHLHVQRPLREAPRRDGVVQVLRGVAVVPSPDQRRLLVRQDAPHAARRLPVELDVLRLLRRAHERVRVHAEPFHVAVVGRHAHVVEEEEEGVQALGEVRQEVEHPPVLLHVRPRVGLERVDHVGELDAVADEEDGEVVAQQVPVALAGVELHGEPARVADRLRGPPLVDHRREAHDHGRPHAGRAQEVGARQRRHVVGALEEALGGGPARVHHALRDALAREVRHLLDQVVVLQQDGTARPHSQRLVVVPHRSARVRRRHRRVVAAGRTELGRIHCDSAS

SEQ ID NO: 67024 - protein, 558 aa, Zea mays
  Clone ID: LIB4757-004-B1_FLI.pep
PGFIHDDAVAGCSHSWPWPGGVGDALASCNKQRVASSPLAYMTDLAKLISLYKNSVEMEFFTEYGEASQYQIQEVIGKGSYGVVAAAVDTRTGERVAIKKINDVFEHVSDATRILREIKLLRLLRHPDIVEIKHIMLPPSRREFQDIYVVFELMESDLHQVIRANDDLTPEHHQFFLYQLLRALKYIHAANVFHRDLKPKNILANSDCKLKICDFGLARASFNDAPSAIFWTDYVATRWYRAPELCGSFFSKYTPAIDIWSIGCIFAELLTGRPLFPGKNVVHQLDIITDLLGTPSSETLSRIRNEKARRYLSCMRKKYPVPFTHKFRHADPLALRLLERLLAFDPKDRPSAEEALADPYFASLANVEREPSRHPISKLEFEFERKKLAKDDVRELIYREILEYHPQMLEEYMKGGEQISFLYPSGVDRFKRQFAHLEEHYSKGERGSPLQRKHASLPRERVVVSKDGNTERQINDQERSADSVARTTVSPPRSEDADMDDVKPTSLSSRSYLKSASISASKCVVVRNKHPEPEDDGIPEEMEGTVDGLSEKVSRMHS

SEQ ID NO: 67025 - protein, 559 aa, Zea mays
  Clone ID: LIB4757-004-B12_FLI.pep
YTSTWFGLYWYKGGHGHGLYIYIYRVCPCMRAGLVLFLDLCSWRRHACVFIIIQHKHDASHVWLHVEPGGNLHPQRRVALGEEVYPDGPELLADLWVSERVGESPHESVLSVGVPGAVPLPWLLEVVGLAYGGLLPPPGDWPGRQWRGRRRLPQRRVPGRVVVHLLVAVHEVHGAVVVVVVVRAARRVDGQHQVVWSQPVALRVGVGEHPALQHLVVRVVDPWHHQPRPERQLLVLVEEVVHVPVQHQPPHGAERQQVLRPRLGVVQRVEVVLLLRVRVHHLHVQRPLREAPRRDGVVQVLRRVAVVPSPDQRRLLVRQDAPHAARRLPVELDVLRLPRRAHERVRVHAEPFHVAVVGRHAHVVEEEEEGVQALGEVRQEVEHAPVLLHVRPRVGLERVDHVGELDAVADEEDGEVVAQQVPVALAGVELHGEPARVADRLRGPPLVDHRREAHDHGRPHAGRAQEVGARQRRHVVGALEEALGGGPARVHHALRDALPREVRHLLDQVVVLQQDGTARPHSQRLVVVPHRSASVRRRHRRVVATGRTELGRIHCDSAS

SEQ ID NO: 67026 - protein, 411 aa, Zea mays
  Clone ID: LIB4757-004-G5_FLI.pep
IHPELNGIILSRHCYCSLSLSTFQQNSQEGGWGWADQQRHMGRSFSTAAPVRPAALAAPPLLLFLLSLGLLEAAAANVGDSCSTSADCGAGQWCFDCEPELSGSHCVRSAATNPFQLINNSLPFNKYAYLTTHNAYAIVGEPSHTGIPRVTFDNQEDTVTDQLNNGVRALMLDTYDFKGDVWLCHSSGGKCNDFTAFEPALDTFKEIEAFLAANPSEIVTLILEDYVHAPNGLTNVFNASGLLKYWFPVSRMPPSGQDWPLVSDMVATNQRLLVFTSVSSKQSAEGIAYQWNFMVENNYGDDGMDAGKCSNRAESAPLNDNTKSLVLMNYFPSVPAKFTACLQHSQSLVDMVSTCYGAAGNRWANFVAVDYYKRSDGGGAFQATDLLNGRLLCGCQDIRACSQGSGVVCSA

SEQ ID NO: 67027 - protein, 573 aa, Zea mays
  Clone ID: LIB4757-008-B5_FLI.pep
RDSIPPSISSGTDIIYPPPLASSSPPSPTAVRSTQPPPVTELARPTRRAMTWNRSAADGGGSSAGTTAGDDTGLARLRELGYKQELKRDLSVLSNFAFSFSIISVLTGITTLYNTGLNFGGPATMTFGWFVAGAFTMAVGASMAEICSSFPTSGGLYYWSARLSGKRWAPFASWITGWFNVVGQWAVTTSVDYSLAQLIQVIILLATGGKNGGGYLASKYMVIGFHAAILLSHAVINSLPITFLSFFGQFAAAWNMLGVFVLMVAVPTVATERASAEFVFTHFNTDNGAGIRSNLYIFVLGLLMSQYTLTGYDASAHMTEETKNADKNGPIGIISAIGISILVGWGYILGVTFAVKDIPYLLSPDNDAGGYAIAEVFYLAFKSRYGSGAGGIVCLGVVAVAVYFCGMSSVTSNSRMAYAFSRDGAMPFSSVWHKVNKQEVPINAVWLSALVALCMALPSLGSLVAFQAMVSIATIGLYISYALPILFRVTLARKYFVPGPFNLGRYGVLVGWVAVLWVATITVLFSLPVTYPVTKDTLNYTPVAVGGLLFLVLASWLLSARHWFKGPVTNLDG

SEQ ID NO: 67028 - protein, 433 aa, Zea mays
  Clone ID: LIB4757-008-E5_FLI.pep
GTRSTSRRIPSHYHPSRRPPIRSGSSNPGAVMATKRSVGTLGEADLKGKKAFVRADLNVPLDDAQKITDDTRIRASVPTIKFLLEKGAKVILASHLGRPKGVTPKYSLKPLVPRLSELLGVEVVMANDCIGEEVEKLAAALPEGGVLLLENVRFYKEEEKNEPEFAKKLASVADLYVNDAFGTAHRAHASTEGVTKYLKPAVAGFLMQKELDYLVGAVANPKKPFAAIVGGSKVSSKIGVIESLLTKVDILILGGGMIYTFYKAQGYSVGKSLVEEDKLELATSLIEKAKAKGVSLLLPTDIVVADKFAADAESKIVPATAIPDDWMGLDVGPDATKTFNEALDTTKTVIWNGPMGVFEFEKFAAGTEAIAKKLAELTTTKGVTTIIGGGDSVAAVEKAGLADKMSHISTGGGASLELLEGKTLPGVLALDDA

SEQ ID NO: 67029 - protein, 376 aa, Zea mays
  Clone ID: LIB4757-008-H12_FLI.pep
RGAEMVKVIQGRPAEMGFRMPAEWEPHEQCWMGWPERPDNWRENAGPAQEVFARTAIAISKFEPVTLCASAKQYPKVHELMEHQTNIRVVEMSMNDSWFRDMGPTFVTCKGDSGIAEQTIAGIDWQFNAWGGIYDDWSLDSDVAKKIVEIERIPRFPQKIILEGGSIHVDGEGTCITTEECLLNPNRNPNMTKLEIENELKDFLGVSKVIWIPRGLYGDEDTNGHVDNMCCFIKPGVILLSWTDDEKDYQYERSVEALSVLSQSVDAKGRQLQVVKIHVPGPLYMTEEEAQGVVSSGHSVPGPAGTRLAASYVNFYIANGGIIAPSFGDRWDEEAYAVLQKAFPDHEVVMVEGGREIALGGGNIHCITQQQPVRPS

SEQ ID NO: 67030 - protein, 386 aa, Zea mays
  Clone ID: LIB4757-010-G6_FLI.pep
GDGRPTLAFSPSLPTTYTSDFTMADTQKDVLFKTVQIDALVAIKIATASGKSFPSIATGSIVGMEKNNVLEITNSFPFPDVSPAQADGQNETAANLAAAAPRAKQNIAYSNEMIKFLREVNVDANNVGWYTSTSMGNFVNLNTIENQYFYQSQPNERTVALVYDVSRSSQGTLNLRAYRLSPSFVTAYKEGKFTTESLQKSGLRYHDILVELPVTIHNSHLLTSLLHQLPSSAPKEELKFPPNLAALQQDPNIPQPPLFPNYDSLDLSIDPFLEKTCDLLLESIENHHTEINNYQYYQRSLAREQAKITAWQQKRKAENAARTASKQSLLPEDEWQRLFKLPQEPSRLETLLNSRQVEQYSRQVDGFTAGVTSKMFAVKSNLLPGE

SEQ ID NO: 67031 - protein, 149 aa, Zea mays
  Clone ID: LIB4757-013-F11_FLI.pep
VCSKKICLFNHLASDEGQLNIVSSSNGSWRSIWTMEFNYELQFVDIKGNIQVDAHYFEEGNVQLDTNIGRKDSTIMQSPDDCAVSITSIIRHHESEYLSSLEESYLNLSDATFKDLRRKLPVTRTLFPWHNTLAVSLTRDLAKQLALGK

SEQ ID NO: 67032 - protein, 419 aa, Zea mays
  Clone ID: LIB4757-014-C4_FLI.pep
PGLIVSQSSQYSIERDLISFRAIIRSSVVERMDMASSSASAALLLAVSLAALHLCCRHGHGAGDAAGNGITAIYSLGDSITDTGNLVKEAPPGMFETIKHLPYGVTFGYPTGRCSDGLLMIDFLAQDLGLPFLNPYLGKNKSFDHGVNFAVAGATAVDPADQFNLPAVPVPFASKSLKVQLRWFKDFLKYTFGTDEEIRRRLQASLVLVGEIGGNDYNYAFFQAKPVAEVEKLIPGVVKTIVGAAKEVLDMGATRVIVPGNFPIGCVPGYLAMNAASSEPADYDSAGCLRELNDFAAKHNSRLRRAVADLQASYPGAAVAYADYFDSFLTLLHNASSFGFDAASTRKACCGAGAGEYNFDWRRMCGFPGTAACADPSTYLSWDGIHMTQAAYRAMSRLIYHGKYLEPQILSFPEKNGQT

SEQ ID NO: 67033 - protein, 512 aa, Zea mays
  Clone ID: LIB4757-014-D3_FLI.pep
RESSPPAPTPLRLPTTPGSTVARSRSLPSHAMVADRLRLALLLSACLCSAWARPRLEPTIRLPSERAAADDAVGTRWAVLIAGSNGYYNYRHQADICHAYQIMKKGGLKDENIVVFMYDDIAHSPENPRPGVIINHPQGGDVYAGVPKDYTGREVNVDNFFAVLLGNKTALRGGSGKVVDSGPNDHIFVFYSDHGGPGVLGMPTYPYLYGDDLVDVLKKKHAAGTYKSLVFYLEACESGSIFEGLLPNDINVYATTASNAEESSWGTYCPGEFPSPPPEYDTCLGDLYSVAWMEDSDFHNLRTESLKQQYNLVKDRTAVQDTFSYGSHVMQYGSLELNVKHLFSYIGTNPANDDNTFIEDNSLPSFSKAVNQRDADLVYFWQKYRKLADSSPEKNEARKELLEVMAHRSHVDSSVELIGSLLFGSEDGPRVLKAVRAAGEPLVDDWSCLKSTVRTFEAQCGSLAQYGMKHMRSFANICNAGILPEAVSKVAAQACTSIPSNPWSSIHKGFSA

SEQ ID NO: 67034 - protein, 292 aa, Zea mays
  Clone ID: LIB4757-014-E2_FLI.pep
PGRKKMSLSRFLKEISTAPEEEQQRIQNEYALQQQPNHLVQTPIPSFDLPGVQDPIEFLKTHTDDRSADAKIKIKHGTTTLAFRFQHGIVVAVDSRATAGSYIASGTVKKVIEINPFLLGTMAGGAADCQYWETYLGIQCRLHELRNKSRISVAAASKYLSNLVYSYKGMGLSMGTMICGWDGSGPALYYVDSDGTRMKGDVFSVGSGSTFAYGVLDQGYHWDLSVDDALELGRRSIYAAGHRDAFSGNTLNLYHVKQDGWHFINNYDFNKLHYDMAYGYEERLKQEAAVLA

SEQ ID NO: 67035 - protein, 552 aa, Zea mays
  Clone ID: LIB4757-014-F9_FLI.pep
LLDRHRSKIIMSQLQTPPGVTITCAVETPHLAILTPDALKFLATLHRYFEPTRRALLQRRQLEQARLDAGGLPNFHSETKWIRENLAWQAASPAPGLRDRRVEITGPVDRKMVINALNSGAATFMADFEDSHAPTWLNNLDGQINMRDAVRRQISFKAPNGKDYKLNDRIATLIVRARGWHLDEPHLLVDGQPISGGIFDFGLYFFHNAKECIKRGFGPYFYLPKMEHYLEARLWNDIFKIAQDYIHMPRGTIRATCLIETLPAAFQMDEIIFELKEHSAGLNCGRWDYIFSFIKKMRHNPQFVLPDRSDVTMTVPFMDAYVRLLIKTCHSRGVAAMGGMSAQIPIKDNPKANEAAINKVKADKLREVKAGHDGTWVAHPALVKVALDIFNEHMIGPNQYHVRRSEVQVSALDLINTNVPGKITEHGIRENVSAALQYCANWITGVGCVPIANLMEDAATAEIARLQIWQWVRHGSMTDAHKKITAEWIDQILEEESAQAKKTTAKGLPESKVDMAKRYLSGQAHAPVPDDFLTSALMSSLDDMAAPNRSKL

SEQ ID NO: 67036 - protein, 302 aa, Zea mays; identical to SEQ ID NO: 66931
  Clone ID: LIB4757-014-H11_FLI.pep

SEQ ID NO: 67037 - protein, 304 aa, Zea mays
  Clone ID: LIB4757-017-B6_FLI.pep
ISEAINSPFSVSHWSSLSHKLSEVLDFSGHVAPAEKYPGSLLEGFSGVQVSTLAVNEGLVVAGGFQGELIGKDVEGCSVKFCMRTTLSDNAITNAIDIHRSMSGSLHITVSNNDCGVREYDMERYQLVNHYRYNWPVNHTSVSPDKKLLAVVGDDRDALLVDSRNGKVTSTLVGHLDYSFATAWHPDSRTFATGNQDKTCRIWDTRNLSTSLAVLRGNIGAIRCIRYSSDGRFLVFSEPADFVHVYSVAADYKKRQEIDFFGEVSGITLSPDDESLFIGVCDRVYASLLQYRMIRGFDYLDSYV

SEQ ID NO: 67038 - protein, 744 aa, Zea mays
  Clone ID: LIB4757-017-D9_FLI.pep
EIEKMASEILGNVTEKAKDLAGSKSTKMAQLAEVTKDVHDDKWRITSDYGVKQNNTDDWLRVATDDQTGPLLLEDQFAREKIHRFDHERIPERVVHARGSGAFGKFTLFESASDVTSAGILTDTSRETPVFLRFSTVLGSRGSADTVRDVRGFAVKFYTEEGNWDIVGNNIPVFFIQDSMKFPDVIHAGKPEPDCEVPQAQSAHNNFWDFQYMHPEATHMFMWAMSDRTIPRSYRMMQGFGVNTYTLINAKGERHFVKFHFTPELGVHSFVWDEALKIAGQDPDFHRKDLWMAIDSGAYPKWKFGIQVIPEAKEHDFEFDILDATKVWPEELVPVRYIGELELNKNPDEFFTQTEQVAFCTSHIVPGIGFSNDPLLQGRNFSYQDTQLSRLGINWEELPINKPVCPVMNFNRDGAMRHTITKGKVNYWPNRFQTVPPATEKEGAYVEFPEKTAGMKVRMQSKKFREHKSQAELFYNSMSENEKMHMKAAFAFELDHCDDPVVYERLCERLCEIDLELAQSVAEMVGGEQPTKQTRPKHNKKAKGLSQMDFQPEKPTIATRMVAILIADGYDKAAYTGMKAALTAAGALPFTISPRRNKIFADGEDKSGSGVVADHHLEGQRSTMYDSVFVPGGAKSIETLSKNGRAVHWVREAFGHLKAIGGTGEAVSFIKQAVDLPGMEFSTSGDVVNSYGVVTATAVQPESFKEAVNMAKEAKDFVSAYMYAISQHKNFERETAGLNAMVAY

SEQ ID NO: 67039 - protein, 306 aa, Zea mays
  Clone ID: LIB4757-017-G3_FLI.pep
GDQLYRMDYMELVQKHVDDNADITLSCAPVGESRASDYGLVKFDSSGRVIQFSEKPKGAALEEMKVDTSFLNFAIDSPAEYPYIASMGVYVFKRDVLLDLLKSRYAELHDFGSEILPKALHEHNVQAYVFTDYWEDIGTIRSFFDANMALCEQPPKFEFYDPKAPFFTSPRYLPPTKSDKCRIKDAIISHGCFLRECAIEHSIVGVRSRLNSGCELKNTMMMGADLYETEDEISRLLAEGKVPIGVGENTKISNCIIDMNARVGRNVSITNKEGVQEADRPDEGYYIRSGIVVVLKNATIKDGTVI

SEQ ID NO: 67040 - protein, 450 aa, Zea mays
  Clone ID: LIB4757-018-C4_FLI.pep
GLRRMASRVASGLLRRRAGATLGLLRSYAHVRSYNSQLSALVSATSECSNLPRRCYYLPNPSPYQVWSRSFASDNGDKFEAVVPFMGESVTDGTLANFLKKPGDRVEADEPIAQIETDKVTIDVASPEAGVIEKLIASEGDTVTPGTKVAIISKSAQPAETHVAPSEEATSKESSPPKVEDKPKVEEKAPKVDPPKMQAPKPTAPSKTSPSEPQLPPKERERRVPMPRLRKRIANRLKDSQNTFAMLSTFNEVDMTNLMKLRSDYKDEFVTKHGVKLGLMSCFVKAAVSALQNQPIVNAVIDGDDIIYRDYVDISVAVGTSKGLVVPVIRDADTMNFADIEKGINNLAKKATEGALSIDDMAGGTFTISNGGVYGSLLSTPIINPPQSSILGMHSIVQRPVVVNGDILARPMMYLALTYDHRLIDGREAVFFLRRIKDVVEDPRRLLLDI

SEQ ID NO: 67041 - protein, 508 aa, Zea mays
  Clone ID: LIB4757-023-F1_FLI.pep
VATMEDKVLIAVGTVAVVAVLSKLKSAVTKPKLNLPPGPWTLPLIGSIHHIVSNPLPYRAMRELAHKHGPLMMLWLGEVPTLVVSSPEAAQAITKTHDVSFADRHINSTVDILTFNGMDMVFGSYGEQWRQLRKLSVLELLSAARVQSFQCIREEEVARFMRSLAASASAGATVDLSKMISSFINDTFVRESIGSRCKYQDEYLAALDTAIRVAAELSVGNIFPSSRVLQSLSTARRKAIASRDEMARILGQIIRETKESMDQGDKTSNESMISVLLRLQKDAGLPIELTDNVVMALMFDLFGAGSDTSSTTLTWCMTELVRYPATMAKAQAEVREAFKGKTTITEDDLSTANLRYLKLVVEEALRLHCPVPLLLPRKCREACQVMGYDIPKGTCVFVNVWAICRDPRYWEDAEEFKPERFENSNLDYKGTYYEYLPFGSGRRMCPGANLGVANLELALASLLYHFDWKLPSGQEPKDVDVWEAAGLVAKKNIGLVLHPVSHIAPVNA

SEQ ID NO: 67042 - protein, 459 aa, Zea mays
  Clone ID: LIB4757-025-C10_FLI.pep
GNTRCLASHSPATSAQLLSPRRPATITARTTPASLYTLVAQHRMASSSSVQKIKVKNPVVELDGDEMTRIIWQVIKDKFIHPYPDIDLKYYDLGLPYRDETDDQVTLDAAEAIKKYSVGVKCATITPDEQRVEEFKLKKMWLSPNGTIRNHLGGTVFRAPIVIPTIPRLVPGWKQPIIIGRHAFGDQYRAKDRVIPGEGTLEMVFTPKGGKPEVIKVYDFPAEGGVAQTQYNTTESISGFAHASFKMALDKKLPLYMSTKNTILKAYDGKFKDVFQEIYDTQYKKDFEAAKIWYEHRLIDDMVAQMIKSEGGYVIAMKNYDGDVQSDIVAQGFGSLGLMTSTLITPDGKTFEAEAAHGTVTRHYREHQKGKETSTNPIASIFAWTQGLAKRGELDNTPELVVFAETLEKACIDTVDVDKIMTKDLALACGKKDRASWVTTNEYLDAVERRLKSSLKGKL

SEQ ID NO: 67043 - protein, 648 aa, Zea mays
  Clone ID: LIB4757-025-D8_FLI.pep
PGYTSTMAHNLLPVTVVLAVALLMAPAAGYPWLSCGTSSSFAANGTYQDHFNFAAATLPKNASTSPDLFASIVVGTVPEQLSAMALCRGDVNSTTCFSCLTEAFGDLPSACSNDKAATIYYDPCMVHYSDVHTLPDDDDTGPSIDTYPIGDNQYVTADPGQFIRLLAALVNATADYAAYNSTRRFATGQADTGFDPEFPELYALAQCTPDQTPAQCHKCLAGLISQSLGGFQNRDGARMLAVSCTYRYETKPFYNGPAMVRLASPSSGAPAPAPAVNSRVRAADGGRRKYHVPWVAIAIVLPALAAMNLVACLCFRRRRRLLIAQAKHQNPMYSTEAEDTEMVDSMMMDVSALRAATGDFDESNKLGEGGFGAVYKGVLPDGEEIAVKRLSSSSSQGVQELKNELALVAKLKHKNLVRLIGVCLGQQERLLVYEFLPNRSLDLILFDTESEERGRRRLDWAQRYKIINGVARGLQYLHEDSQLKWVHGAGVHDAGELLRQVGRVQLRRHGAGDRDGEEEQRRWLQPLGHSMDALGGRDGGAAGGTEQYGRQLPGGRRAAVRPHRPAVRPGRPRGAAGDVVGRHDARQRHRHPPGSIQAGVLRQEQQRQRSRVDGVTGSLASQQAMGSSPEIGNIYLYRYPVTEMYDSS

SEQ ID NO: 67044 - protein, 431 aa, Zea mays
  Clone ID: LIB4757-025-G11_FLI.pep
LFLSLLGVWRGQRTPSCRFKKKAEPMGSKSGVRLQCAEAKSATDWSCCFLALPPAAPSGVDGDGGFNLSWNLRKSFHPPAGLFASMGQQVGVGFPGTSSRSPSPETPRDPYMKYVSPEVVETPPSGEGVALRDKGKKKAVKLRIKVVNHHLKRLISGALAGTVSRTAVAPLETIRTHLMVGSNGNSSTEVFQSIMKHEGWTGLFRGNFVNVIRVAPSKAIELFAFDTANKFLTPKSGEERKIPVPPSLVAGAFAGVSSTLCTYPLELIKTRLTIQRGVYDNFLDAFVKIVRDEGPTELYRGLTPSLIGVVPYAATNYFAYDTLKKVYKKMFKTNEIGNVPTLLIGSAAGAISSSATFPLEVARKHMQVGAVGGRKVYKNMLHALLSILEDEGVGGLYKGLGPSCMKLMPAAGISFMCYEACKKILIEEEDE

SEQ ID NO: 67045 - protein, 292 aa, Zea mays
  Clone ID: LIB4757-026-D6_FLI.pep
FSQPHPPARLRVSSTVVALHKRNPKRLKYAAERQFTSLWWLGFARTKRGDAGLLRVEVEPSGGDFWKLDPIIDLINRGAVGVIPTDTVYSVVCDLSNNESIERLRRLKGIGDSKPLSILCRSLRDIDTYTTGFPQGTNQGQANIFRVVKRAIPGPYTFILPASKQFPKQCIKHGSSTRYAKRRQVGVRIPDDPICQAILQNLDEPLICTSVKYLSEDEWILDPVIIADLYEPLGLDFIVDGGPRIADPSTVVDMMGANPTVIRQGKGLKLDWMVAKDEEEDEAQSMFSFKSA

SEQ ID NO: 67046 - protein, 436 aa, Zea mays
  Clone ID: LIB4757-027-C5_FLI.pep
KGQLNLCTLQRCHKHPNPSYTCPSIFHQNMWMSIYTQPKKEVSLLNQDRIIETIKNTIEEKLRNCNTTRIFQTQAVNSALTQVYTQKDKGTEVKMAPGVKSQKAPVSQMVRTDPRNPSGSLHAYWHGQSSKLENKYDLVSVRNVVRSRRNPKDAGDLSSRHELLMEIDSHCHPGLLEVIKNCTYVGLADEVSALIQYNTHLYLVNVVNVSKELMYQQALCRFGNFNAIQLSEPAPLQELLLMALKDDESIGDENDEEKLEIAEANSKILKENAEMINEYFSIHVDHDGNLTRLPVVLDQYTPDMDRLPEFVLTMGNDVTWDDEKECFRTAAAAIGNFYALHPPILPNPSGSGVQVYKKNKACMASGEHVDSTDEDDIDHELLAEAETAWSQREWTIQHVLFPSMRLFLKPPKSMATDGTFVQIASLEKLYRIFERC

SEQ ID NO: 67047 - protein, 297 aa, Zea mays
  Clone ID: LIB4757-027-G8_FLI.pep
VNSLYRYFFSHVNMLILFLQPNTENDDGVTALLSAVAAGSLPCLEVLIEAGANPNVKAGGATPLHIAADSGNIEVIKCLLKAGADPNTCDDDELKPVQVAAWRNNREAVELLLPLTSPIPGVSNWNVDGIIEHMLPKEYEEKSQLKEAASLKSGLTQTIEVSSEAKKRSLEAKSRGDDAFRRKDYLVAVDAYTQATELDPTDATVLSNRSLCWLRAGQAERALEDAKACRALRPDWAKACYREGAAHRLLQRFEEAANAFYEGVQLEPENTELVNAFREAIEAGRKFHGVNTPNSTQ

SEQ ID NO: 67048 - protein, 397 aa, Zea mays
  Clone ID: LIB4757-028-D7_FLI.pep
QPGLAVQQRANPLGFRGYTHTGLSCQVLDLIISVLLIRMGVYLSTPETDKLSENGENDRLKFGLSSMQGWRATMEDAHSALLDLDSETAFFGVFDGHGGRVVAKFCAKYLHGQVLKSEAYSTGDLGTAVHRAFFRMDEMMQGQRGWRELSALGDKINKFSGMIEGLIWSPRGSDSNNQQDDWASEEGPHSDFAGPTCGSTACVALIRNTQLVVANAGDSRCVISRGGKAYNLSRDHKPELAAERERIMKAGGFIHMGRVNGSLNLSRAVGDVELKQNKFLPPEKQIVTANPDINVVELCDDDDFVVVACDGIWDCMSSQQLVDFIHERINTESSLSAVCERVLDRCLAPSTIAGDGCDNMTMILVQFKKPVDRNKKAEAAGQSASNVDEAKSRVAEE

SEQ ID NO: 67049 - protein, 553 aa, Zea mays
  Clone ID: LIB4757-028-E11_FLI.pep
FVSSTHQLGCRLRAGRNNLTREMGQCCSRAPAPDSGRGGTNGYGYSNQAKPAQTPSSYNPPQQPAEVRYTPPATNPPVVPPVPVPPKPTADTILGKQYEDVRSVYSLGKELGRGQFGVTYLCTEVASGKQYACKSISKRKLTSKADREDIRREIQIMQHLSGQPNIVEFRGAYEDKSNVHVVMELCAGGELFDRIIAKGHYTERAAATICRAVVNVVNICHFMGVMHRDLKPENFLLASKEENAMLKATDFGLSVFIEEGKMYRDIVGSAYYVAPEVLKRSYGKEIDVWSAGVILYILLSGVPPFWAETEKGIFDAILHEEIDFESQPWPSISESAKDLVRKMLTRDPKKRLTSAQVLQHSWLREGGGASDKPIDSAVLSRMKQFRAMNKLKKMALKVIASNLNEEEIKGLKQMFMNMDTDNSGTITYEELKAGLAKLGSKLSEAEVKQLMEAADVDGNGSIDYVEFITATMHRHKLERDEYLFKAFQYFDKDNSGFITRDELESALIEHEMGDTSTIKEIISEVDTDNDGRINYEEFCAMMRGGMQQPMRLK

SEQ ID NO: 67050 - protein, 177 aa, Zea mays
  Clone ID: LIB4757-028-H4_FLI.pep
LSSSPSLRSLPPKSPGPPPPSSRSAGGHRPAMTSTVTTTVGCGGLPVRPSSTATRGRPRRCAVRAQAAGADASNDKSVEVMRKFSEQYARRSNTFFCADKTVTAVVIKGLADHRDTLGAPLCPCRHYDDKAAEVAQGFWNCPCVPMRERKECHCMLFLTPDNDFAGKDQACCFLLVL

SEQ ID NO: 67051 - protein, 229 aa, Zea mays
  Clone ID: LIB4757-029-E1_FLI.pep
RGLHQVPPPFDFLSPVWPCSPGPRRRHWARRLGGDLKRHGCAALGTRMDGVTQAVENLKEEWGQAVSQLDKNITAIESCGKTGKGTEEANSLPRLNGSAQDALQLLKSLQFQLDLLAQQLPTFDEVQSGQATLKSWDEQYKKLRISLRNANLEAKDNIRQAAEEERALLLGGGEESTIRRRNLQTKAGMTSAAESITESLRRSRQMMVQTNQQVFSRRLKVNIKDIALC

SEQ ID NO: 67052 - protein, 333 aa, Zea mays
  Clone ID: LIB4757-030-F2_FLI.pep
EAQSWPEDYADVWRCCFPTLTDVSDRLTLRHAARLTSSPERRTKIQRAIDFEGEHGPVTHGSVGIPHLKPEQVEKRSREDLHLPVREFLSQADARARLESRELEGALGDEDAGVVQPPLRPELLGARAPQEPHPAHLVRLVVHHVPFLDSVAVRQRVVRKAALDVDGHGRVEPEGLRQRRVQVVHLADGVLGQARDELWSAEAAVARGGGAHLLRDPVLDALVPAEHVEEPRQGPRGRVAAGDHEVEDDVPQVLVVGAAGIALPLHQEPRQDVLFLGVSGKCHRVRTVISSRDPVVPSALHPSCTDYGEVISSGLTNSCWSLSICSIFLSTTA

SEQ ID NO: 67053 - protein, 317 aa, Zea mays
  Clone ID: LIB4757-032-A5_FLI.pep
VARHCSTAKPRSSRVAPEGAEGLDGASPEDVLVVEGRDGSAHEGAHPEDPVVVPGLVLVVDDGGAQAPGRVDAGAGDGDGGQVHHEHGEADGEGSQNRDVGVAGVALGVGGGEDGVDEHEGADDLGAEAGAAGVAGGERVGAAAVPVEVGALERLDEADAADGAEALRHDVEQRAHQGDLARQEEAEGDGGVDVAPRDAGGAVDEDEDHAAEGPGDAQHAHAAARRVGARRRRVRLVLVPDHGGHRDVQEQQRGDELGDHGAVQRPGPQLRRVDQRRRGRVRVVLGSELAAASAALDHVVLAHRLLEPETSLKLRFA

SEQ ID NO: 67054 - protein, 251 aa, Zea mays
  Clone ID: LIB4757-032-A7_FLI.pep
PSLCLSRVFDFSRRRCSSHIPREDACSSPIDTMAVFSDLHTADGLKSLEAHLAGKTYVSGDSITKDDIKVFAAVPSKPGAEFPNAARWYETVSAAVASRFPGKAVGVNLPAGSAPAAAAPADEAEDDDDLDLFGDETEEDKKAADERAAAAKASSKKKESGKSSVLMDVKPWDDETDMKKLEEAVRSVQMEGLTWGASKLVPVGYGIKKMTIMLTIVDDLVSIDTLIEDHLTQEPINEYVQSCDIVAFNKI

SEQ ID NO: 67055 - protein, 527 aa, Zea mays
  Clone ID: LIB4757-032-B12_FLI.pep
RKKKMDAFMGSVLGALLAVLASTLLIGALFFLVWKPYVVTRWFRGQGIGGPSYRFLVGSLPEIKRMKAAGSKITLDVGSHDFVPIVQPQYRRWVSDYGKTFLYWFGAVPTICVAEVGLVKQVLAERTGLFPKDYMNDSMEVLLGKGLVLANGEDWKRHREVVHPAFKPDKLKTMSVVMADLVQRMMQQWRSQIQRASNHEAEIELSSEFSELTSDVIAHTAFGTSYKEGKEVFVAQKELQELTFSTWLDIPAPACLRKLKLPTSKSSRRVEELDKKVRSMLMAIIEGRLAARGTSGYGNDLLGLMLQARALEQEGHQMLTTEEIVDECKTFIFAGQDTTSHLLTWTMFLLSRYSEWQHRLREEVLRECGDAVPNPDTVTKLKLVNMVLLESLRLYSPVVFIRRAVGSDILLRSTRVPKGTMLSIPIALLHRDKDVWGQDADEFNPDRFEHGVSNAAAKHPNALLSFSQGPRACIGQNFAMLEARIGIAMILQRFSFELSPNYVHAPKEAVTLMPRFGLPIILRNLHD

SEQ ID NO: 67056 - protein, 580 aa, Zea mays
  Clone ID: LIB4757-033-C12_FLI.pep
GTASSVEREPHPALHPGARVLRFAMSNSKQHDAADDGGIPAPEAPAKRPPLNKYALACAVLASMNSILLGYGTRTHDAYNSMHPLAVAICSTRTCASCYLYADVSVMSGAQLFMKQDLKITDTQIEILAGIINIYSLVGSLAAGRTSDWLGRRYTMVLAAAIFFAGALIMGLAPSYTILMLGRFVAGVGVGYALMIAPVYTAEVSPTSARGLLTSFPEVFINTGVLLGYVSNYAFHGLPVHLSWRVMFLVGAVPPIFLALGVLAMPESPRWLVMQGRIGDARRVLAKTSNSPAEAEERLADIKNAIGVPDGVGDNDDDVVVVARRNKGSHGEGVWRDLLIRPTPPVRRILIACLGLQFFQQASGIDSVVLYSPRVFEKAGLRSNNNSLGATMAVGATKTLFILVATFFLDRVGRRPLLLTSAGGMVVSLVTLASALRAIDRLPEGQATSLAGVSIAAVLTFVASFSIGMGPIAWVYSSEIFPLRLRAQGCALGTAMNRVMSGTITMSFISLYKAITFAGSFYLYAGIAAAGWLFMFFFLPETRGSNLEDTEKLFGGGDHDEDKEDGHDAQKSTELSSNQQ

SEQ ID NO: 67057 - protein, 267 aa, Zea mays
  Clone ID: LIB4757-033-F1_FLI.pep
PLSMIYYWSYLERGHGGLGLAGRRASRLLPLRLALVDDRVQAVGRRVGGEPLLDGEELLRAPEVGPRDRGLEVVAVPAVVRAGAVGGEVHGAGRLAHAGAPAAEDVQVAALVVVVAGAHEAAPPRQVPDPDARAVGAQQRHADGRVRAALPDGPRPHVHRVHALVLRVRLQLRLRRGARAPDDGRRARRRRRRRVRRGGKEGEEEKAGREELQLHGTPGARNPWLLRSDLNLMNGRLSSRGRRPGGELYGGRPATAPQDSDRFDIPG

SEQ ID NO: 67058 - protein, 450 aa, Zea mays; identical to SEQ ID NO: 66641
  Clone ID: LIB4757-033-G7_FLI.pep

SEQ ID NO: 67059 - protein, 304 aa, Zea mays
  Clone ID: LIB4757-034-G11_FLI.pep
AQEKSLVQTALDWMWNEAMASDGSSSSTFLGLYGNVHGPAVLTGAAFALVALLISLWLILQHLRSYSDPAEQKWIIAVLFMVPVYACESIISLWNSKLSLACDILRNCYEAFALYAFGRYLVACLGGERQVFRLLESRKRDELSQELLDKARARNRSGAYSFFCDPDALGENLYTIIKFGLVQYMILKTLCALLALVLEPFGAYGDGEFKWNYGYPYIAAVINFSQTWALYCLVKFYNATHEKLQAIRPLAKFISFKAIVFATWWQGVGIAIICQTGLLPKEGKVQNALQDFLICIECRWLSQR

SEQ ID NO: 67060 - protein, 411 aa, Zea mays
  Clone ID: LIB4757-034-H3_FLI.pep
ASSYLCSIEYYTLSSHRPTTEPQAGKTAWLPVRVAQTRHSALLGVLGPGPPPCVDVVLVHVGEEPPYRHEHGHDLYTGHPVPEQRHRKHWHQRQRQRARHVREQRRHPHDQPHQAHGRCLPRHRRAHQRQHVPRPPVFERRHLPRDRPPVPRREQPRHGHRRRHQVGVHLHPQHPPRRPHPDHLLEGELEEGQNEREHRRGGQHEDEPQRVLAARHVAGGLVGGGSDAEDRGGEGEHDHGVGDQRREPLRVDEARGDGVEAQLRRGHEREGGHRQVLQRVRVHEVVEADHDPDARVDGNHLERRRPALLRRARRRQEERDDQKRRAARLRQRGHPLAVAAGVEVQAAEEGGHSRPAENHQHVHQHRHPPSEAASRGPPRGGLGSITDVDGFLVRNASDLELNFLSMRHAAC

SEQ ID NO: 67061 - protein, 481 aa, Zea mays
  Clone ID: LIB4757-035-F2_FLI.pep
RDSPTHPQENGKKNRVEATFAAMAGDPPTAAEKETLVSSFIEITAGQTLETATQFLQMTSWHLEEALQLFYIDGEAAHTAAHSVDPSPAAAAPSALAAAAGVEEAMRFAPPPAAALGDAMSHGFGVREDDDVRAPLPVKRETLYGEGIVSVMRPNASAAFRNFEQEARQSAVWDSEQNVASSSGDNLASLYRPPFPLMFNGSFDKAKLEASSLDKWLLINLQSTEEFSSHMLNRDTWGNEAVAQLIRSNFIFWQVYYDTSEGRKVCTYYHLVSMPAILLIDPVTGQKVHAWNGMVHPDRLLEDLLPYLDKGPKGHHAAQPQKRPRKVDQEASTGKQGKIAVEDEDEELARAIAASLEVVIEASDASDDDMAEAEPEEENEPSLNIKPDYPPLPEEPKGSRELLCRVAIRLPNNQRIQRNFLHTDPIKLLWSFCAPQVEDGEKRAFHFVQAIPGASQKLQFGSDLTFRKAGLANSMINLLWG

SEQ ID NO: 67062 - protein, 399 aa, Zea mays
  Clone ID: LIB4758-003-A3_FLI.pep
PSCGQPLRGMEMESTPLLTPYKMGDFNLAHRVVLAPLTRCRAFGNVPQPEHMALYYRQRATPGGFLIAEACAVSESARGYPDVPGLWTHQQVVAWKPIVDAVHASGAVFFAQLWHTGRASPSAHRPVILWPSASGHCWLQQFQPNGQAPISSTDKQIPAQVNHSGDVNTFAVPRRLETEEIPHVVNDFRVAARNAIKAGFDGVEIHAANGYLFDQFMKDSTNDRDDSYGGSLENRCRFTAEVMAAVADEVGANRLGVRLSPFADYMDCHDSNPEALALHVIDETLNPLGVLYCHMVEPRMRVNPDDGIMTLEHMLLPFRRAFRGTFIANGGYDREEGNDAIARGRGYADLIAYGRIFLANPDLPMRFAKNAPLNKYDRSTFYTSDPVVGYTDYPFLDQL

SEQ ID NO: 67063 - protein, 323 aa, Zea mays
  Clone ID: LIB4758-003-F6_FLI.pep
AKMFYGGYAYHGNSFEQTYRCYPASFFDKPHLEGGDKVIMPPSALDRLASLHIEYPMLFELHNDATQRISHCGVLEFVAEEGMIIMPYWMMQNMLLQEGDTVHVKNATLPKGTYVKLQPHTTDFLDISNPKAILEKTLRNFSCLTTGDSIMVAYNNKQYYIDIVETKPASAVSIIETDCEVDFAPPLDYKEPEKPRQPTVPASKAPAEDGNTAVEDEPKFKPFTGFGKRLDGKASKLQASEVPSTALSAPSDSNKRANQQISAPAASGASNYSRQKTGKLVFGSSASNNKEPQKAPAKEEQPAKKDDELRFQAFSGKSYSLKR

SEQ ID NO: 67064 - protein, 181 aa, Zea mays
  Clone ID: LIB4758-003-H5_FLI.pep
QRQRTYSPLCGQHCRGMLLMLDDIFCFLQQLTNALSAVFLAASSTLTFPTATFSFVSEMPFLKSKPVVAAAVMIRSCTVSCGGRCCCCCLASWKMTHRLFTADPTFPATSAILSPADCPACFSLTLDVEKKSVALRRHWGGSASGITTTARYRERSGIAGMNGELEPTEKAGSTRAAIAFP

SEQ ID NO: 67065 - protein, 161 aa, Zea mays
  Clone ID: LIB4758-003-G3_FLI.pep
PGPKKKTLRRLTDHHHRLRSRAATAMAAAAPHAYSSLVPVSAARPLSGSTVSFGASCHKWRKVPAWRLHCVAEDEAEEVKDFGVNMALSMLKFYKREISPLLPSSCRYVPTCSEYSMQAYKRYGVVKGSILTAWRLCRCNPLGGYGYDPPKWFGEEDVPLQ

SEQ ID NO: 67066 - protein, 170 aa, Zea mays
  Clone ID: LIB4758-004-E9_FLI.pep
QFCGDWLKSKGQKAFTIREVGMQNGTVGLPGQLVDWSNWRSRAVHSERSWKRPMLPLLVPFLNPFSRAKGPVVLGKFFANTSIIPFGIQTPVVLDIASKTMPCLVCCREAEVSRCCFYLNLRHLAEGGGEGVETAACSRRKAEPRREVVAMADCNRALGCWSGQPRWLPG

SEQ ID NO: 67067 - protein, 181 aa, Zea mays
  Clone ID: LIB4758-004-G12_FLI.pep
SSHFTLGPYRNGGFLRLHTPFTFLRFLLQFIPPIQKVYAPGVAVSEGNGGLPKIDLKSPHGSEAEIYLFGACVTSFKVPNGKDLLFVRPDAVFNGQKPISGGIPHCFPQFGPGPMQQHGFARNVNWSITDSEVTEGDPAVTLELKDDTYSRSMWDFSFHALYKGRGDFSRIRRLRLPWCTK

SEQ ID NO: 67068 - protein, 275 aa, Zea mays
  Clone ID: LIB4758-006-B8_FLI.pep
PGLLIPSLSAKGKYPLISSHALLPRLLLLPHPHPPPPTRKPPARPPLPGINRTSRPSSFPSNQVHFHSLSTLSLVSGGRWPRLPFPVALMAPSAALAPVAFRSAFSTPLASNPTRNRINIEGAFCLPCSARKRASYRSFRVYSLFGGKKDKDENGDEAPSKAGIFGNMQNLYETVKKAQMVVQVEAVRVQKELAATEIDGYCEGELIKVILSGNQQPIRVEITEAAMELGAEKLSELVNDAYKDAHQRSVQAMKERMSDLAQSLGMPAGLGDGLK

SEQ ID NO: 67069 - protein, 236 aa, Zea mays
  Clone ID: LIB4758-008-G9_FLI.pep
YIGLSIKQGSNQYADVNLNDSSVRQVKFYQYIVLMLNSPPLWMLATPREKKIREERAPALLELLDEGEVVEHLLDLLVPGVADEPAAGLEGGDERGGLAAGVGAEVAERAELELGEAVAAQRLADLAHGVGVLVAAESLHVLQRLLEHLRHLRRRVRLRRRVLLDLLVLVLQDDRHLAVHQALGLEELFADLELRGVLLLLARHRWWLVVLPTGAKSLAGVGRRGMGLGIANCDSR

SEQ ID NO: 67070 - protein, 171 aa, Zea mays
  Clone ID: LIB4758-011-C1_FLI.pep
RARHGLPLLCRRHRPFLRRTRTSPRRGQKEVLHRARLSPQGHRHRRRGNGCQRPACRRCHGPGGAAGRRRRRARLRAQPVHRQGRRHHHIQEQRRLPAQRRLRRRRGAERRRRHQDLAGGVPQRARRDLLRHPHRAGNLRLLLRAASRSRNGRQDHRQLIKLAIDRYPFMY

SEQ ID NO: 67071 - protein, 182 aa, Zea mays; identical to SEQ ID NO: 66835
  Clone ID: LIB4758-011-B4_FLI.pep

SEQ ID NO: 67072 - protein, 275 aa, Zea mays; identical to SEQ ID NO: 66540
  Clone ID: LIB4758-012-D5_FLI.pep

SEQ ID NO: 67073 - protein, 190 aa, Zea mays
  Clone ID: LIB4758-012-E4_FLI.pep
LWPWQPSSWRRARPRTRRRTTWTRTTRRAPTWASGRCPGTTPWPGRLQADPLRRALRREPLLGLRRRRLVGVRRRGLLGVREAVLRPRHQQLRGGAGVRPLHAGGVARLHRHRLCPRRLRQQRRRLHHLQLQPAGQRRRREPLLDCHAYYNYIYIRLILTSACMHIINSVVNSVYHYITMIILLMNIISQ

SEQ ID NO: 67074 - protein, 310 aa, Zea mays
  Clone ID: LIB4758-013-E12_FLI.pep
STAAATSVCATAHGRNPLSVESKGLSSALLESYRVVEIWFRRNARAPTSRISLARPMDRRSGSTMRTAASSSPLAHSLRTSLTTSSVTPAFLARAHLPIPRANRRRRCSSWVSSSVSARVGSRGFFSRRSATLRPSSLAAAHGTARDFSFSTTYWPGSRGGDSSIVRWNAAAAAPPLLVWTEFGLGASESSRGRTRRMMPRTARWVRPPGTPAVRGLAVVLVFFLAGAGLELSVRNLEGVASAGSGGTGGAESRLWVEDPWSHGGGGGAFRDGEKRGSGGGAMWGEGLVAHSASLIRSQRPCAQSVRLGM

SEQ ID NO: 67075 - protein, 167 aa, Zea mays
  Clone ID: LIB4758-013-F8_FLI.pep
AELVHCRFAMAGVAGILFTDLLRVSGIRDLPVWFEAGAAKFDFANTTALFFVQLFLMGFAETKRYMDFKNPGSQAEEGTFIGLEAALAGQQPGYPGGPLFNPLGLAKDIENAHDEKLKEIKNGRLAMVAMLGFMVQASVTHAGPIDNLLTHLSDPFNKNIIHTFSSS

SEQ ID NO: 67076 - protein, 282 aa, Zea mays
  Clone ID: LIB4758-015-E7_FLI.pep
LRPRGQRGFWDGRWEIWRRQRRAGDQTMRPVFCGNFDHDTRQYDLERLFSKYGPISRIDMKLGYAFIYFEDERDAEDAIRRLDNVSFGYNRRRLSVEWSRQVEPVPKSRDRPTGDVKPTRTLFVINFDPIRTKVQDIEKHFEPYGKIANIRIRRNFAFVQYETQEEASAAVKNTDKSTILDRVVTVEYAFRDDDGDRDDRYDIPKQGAYDRRGGSPYMRSPSPRYRRDYGPDYGRRGRYPGYGRRDGAMYERRSPVYDRYGGGRSPAYDRYDRRRSPGYDQY

SEQ ID NO: 67077 - protein, 261 aa, Zea mays
  Clone ID: LIB4758-015-F12_FLI.pep
EVVDGNKLLFFRDSSKVHISLPSLSIHRMHRHTLISLQSLGEELVHLGHLVGDRQVNRAVGNLDNKSTTDLWVDLGHNLKRLAAGYVLRVLDGSLKAADCPVVKGRSAGNGKFDLTTVRTHEYVKLLNNTLQHAQSVVLGESVEQVLDDALLVSAANVLLELLDNLLLIRHRQRRRMEDLVELGILLEDTLEVRQRLGRGLEGVGLCSRGVQSARVGSVNAEEGNRGLDGRARWSGGGVASSSGVAGSNWGAGRTGPESGA

SEQ ID NO: 67078 - protein, 526 aa, Zea mays
  Clone ID: LIB4758-016-H6_FLI.pep
LLGRSAIHRPVLTLPACHYTISLCEREMDRAAKPHFALIPFTGTISHVIPMADLGCLLAAHGAEVTIITTPVNAAIAQSRVDRAQSHGATTTITVTAVPFPAADAGLPEGCERMDLPRSQAEVPRFFVANKGFGEAVSRHCLGEALRRPSCVVSGACQTWTLGLARQLGVPCYVFHGFGAFALLCIEHLYRHRPHEAAALADDELFDVPALPPPFRLRLSRRQLPPHFMPTTSVAGKALQGIRDFDMAADGFVVHTFEELESGSTALLAEATGKKVIAVGPVSLCCAPSLDPRLVSNDDARRCMAWLDAKAPKSVVYVSFGSFGRMPPAQLMQLGMALVACRSPVLWLVKGADSLPDDVKDWLRENTDADGVAGSKCLVVRGWAPQVAILAHPAIGGFVTHCGWGSILEAVAAGVPMATWPFFAEQFINEQLIVHVLGVGVSVGVTKPTENVLNATTDAAGGSQGEADAEVGMEQVKKAMDTLMDQGPKGEERRRKAHELKLKAKSALEKGGSSYTNLDNLILSFL

SEQ ID NO: 67079 - protein, 173 aa, Zea mays
  Clone ID: LIB4758-017-B3_FLI.pep
GTEKMAARLSIALAARRISSVAAKRPSLIVCQKWQQVAPKQRLFSVSAALKEKRYTEDHEWIELSADGKTCTLGISEYAAKALGDVVYIELPQVDMEVAEGDVIGAVESVKSASDILTPIAGVVSEVNEALESAPGSVNKDPEGDAWVAKIAVSAEPKGKTMSKEEYAAFTEE

SEQ ID NO: 67080 - protein, 307 aa, Zea mays; identical to SEQ ID NO: 66483
  Clone ID: LIB4758-017-D2_FLI.pep

SEQ ID NO: 67081 - protein, 172 aa, Zea mays
  Clone ID: LIB4758-018-A5_FLI.pep
SAGAEMLVYQDLPSGDELLSDSFTYKELENGVLWEVEGKWVTQGPVDVDIGANPSAEGGEDESVDDAAVKVVDIVDTFRLQEQPPFDKKSFVSYIKKYIKNLTAVLEPEKADEFKKGVEGATKFLLSKLKDLQFFVGESMKDEASVVFAYYKDGATNPTFLYFSHGLKEIKC

SEQ ID NO: 67082 - protein, 295 aa, Zea mays
  Clone ID: LIB4758-020-D4_FLI.pep
RAFFSLIRIPRQAGRRGGQEDRRPSRAGARDGNGTGPQNLRSFLPARPCPSTRRSCRPRPTSALSSSRGIGYATGCAMVLWVFGYGSLIWNPGFDFDDKILGFIKGYKRTFNLACIDHRGTPEHPARTCTLETDDEAICWGIAYCVKGGPEKELKAMQYLERRECEYDQKISIDFYKEGDPLKPAVTGVLVFVSTPDPIGNKYYLGPAPLQDMARQIATANGPTGYNRDYLFSMEKALASISHEDDSIIELANEVRKVLNRTKETKITGANASLKSHAPLVHLSALPEGTVVDSR

SEQ ID NO: 67083 - protein, 304 aa, Zea mays
  Clone ID: LIB4758-024-H1_FLI.pep
GLTPPVLTPACREQSTAPCLRHRSPWPANMMSGGGYSALDDPIRFADSNLQTFPPSEARGKIAGAYRPPTDADDTFSSKGGGAGSGGRGGSAGSDDAAQGGWFRMFSVAAYKPYFDVDTSDVVERIWESVFPFRGTFTEKTSENPDLYGPFWTCTTLIFVAASIATFVTYLSHKWHKKEWNYDINLVTWSAGLFYGYVTFVPLLLYVILKYLSAPAGLVQLWCLYGYSLFIFIPASLLSIVPIEIFRWVIAGVAGFMSATFVAVNLRAHIVNSGERWFLIVAGIFLLQLGLAVLLKLYFFTITV

SEQ ID NO: 67084 - protein, 173 aa, Zea mays
  Clone ID: LIB4758-025-F6_FLI.pep
LGAGNAHSSKADANAQNFIPAVRLPQITHASRLCLSGELGLAVGDLDTELLRAGDDGDPVLGGDGVSNLGGVGLVVHEEEVEVAGVVDEESLVAGGHHVAGLLVGTVANLGHNSLALEASPHAVVDTLGLPPALANAVEAVTLVTLELRSALLDDRDMLLCGNHFCGICRRSR

SEQ ID NO: 67085 - protein, 164 aa, Zea mays
  Clone ID: LIB4758-027-G3_FLI.pep
MNLLHVCTYSSCFFPQHACILRLAVVDDDLAGAEVADGGEGLLGEVERGLAAGRRAAVDDLDGDGGAGVAGVRGLVGAPDAGDRVHGAARGAAVPERVARRRDQRALVLVPVARRRSVDGVVGGGALVGERRRDKTAEHGGGEQNSSGSGLIRHYVASTAGGCY

SEQ ID NO: 67086 - protein, 176 aa, Zea mays
  Clone ID: LIB4758-029-H2_FLI.pep
PRDSIILYCSISPSERTHSPTQMAAATALVSSSSLRAPAAFSVVVRAASRPAPVVAVVTPLPAAKAAAARGARLRAQATHNVKLITPDGEVQLKMPGDVYILDYAEEQGLDLPYSCRAGACSSCVGKVVSGSVNQFDQSFLDDDQVAEGFVLTCIAYPTSDLVIQTHKEDALVESY

SEQ ID NO: 67087 - protein, 232 aa, Zea mays
  Clone ID: LIB4758-031-B6_FLI.pep
RVTAVYNLPDTNRREPPLDLVELVCLHHRISLGNGVPGSSPVVELAVVLVGVAVERAVQVPTPAVESREPNPLPAGAAPVRPYLPPFGDRRHPLAGSGNISGLLHVHCLQLDLGNSYYRVAASNNRLHDGVAAVHDAVDRGGSQLGLILLRYHLLVALRAHVHGRRAAEEATVIDAEDGSLGGLAPSLLVLHGFLNSDETALFAIPLRRSPRGRRGGEGRGIAGNSVGFEIP

SEQ ID NO: 67088 - protein, 255 aa, Zea mays
  Clone ID: LIB4758-031-E7_FLI.pep
GEALAPSLPRTPMDPPRAVAFLLILLPVLAPVASGVPFVVLHGIGDECGNDGLSSFTKMLGEWSGSKGYCIEIGRGAWDSWLMPLQEQANTVCKKVKKMKELSEGYNIVGLSQGNLIGRAVIEYCDCGPPVKNFISIGGLHAGTASVPLCGDMEDYLKGCKFLPKLNNEIPSARNTTYKERFSSLENLVLIMTKLYTEDWIGLKTLDEAGRVKFVSVPGGHLRITRSDMKKYIVPYLTPEASSKKNIHIHRMLSL

SEQ ID NO: 67089 - protein, 135 aa, Zea mays
  Clone ID: LIB4758-031-G10_FLI.pep
LHHLNRPLLDITSCMILMCTQKGHGKVQLVCLIFHFNSFIDNGDRSSLGHHDLDELLVVDLAVAVNIGLTDHLVDLLVSQLLAEVGHDMAELSSRDETILVLVEDAKGLLKLLLGVGVLQWGSGQGSASQFQAPW

SEQ ID NO: 67090 - protein, 237 aa, Zea mays
  Clone ID: LIB4758-032-F6_FLI.pep
RACDKSFSSRDKTEERTGRASMASSRCFENPPALEPASGGGEVVDDFGGQKAYVSGSAGSKAAVVLISDAFGFEAPNLRKIADKVASLGYFVVVPDFLHGDPYDPSNNAHSNPGTWIQSHNPQTAFEEAKPVIAAIKEKGVSSIGAAGYCWGAKVVVELAKVHEIQAAVLAHPSLLSVDDIKEVKCPISILGAEIDRSAPPELLKQFQQVLSANPEVDHFVKVFPGVAHGWAVRYSD

SEQ ID NO: 67091 - protein, 418 aa, Zea mays
  Clone ID: LIB4758-033-F2_FLI.pep
GPRRASKSSEPPARPPPSPPPVPKANSFQVAMADQANQPTVLHKLGGQFHLRSIISEGVRARNICPSVSSYERRFATRNYMTQSLLGPSMSVSGGINVPVMRTPLCANAPAEKGGKNFMIDFMMGGVSAAVSKTAAAPIERVKLLIQNQDEMIKSGRLSEPYKDIVDCFKRTIKDEGFSSLWRGNTANVIRYFPTQALNFAFKDYFKRLFNFKKDRDGYWKWFAGNLASGGAAGASSLFFVYSLDYARTRLANDAKAAKGGGERQFNGLVDVYRKTLKSDGIAGLYRGFNISCVGIIVYRGLYFGLYDSIKPVVLTGNLQDNFFASFALGWLITNGAGLASYPIDTVRRRMMMTSGEAVKYKSSLDAFQQILKKEGPKSLFKGAGANILRAIAGAGVLSGYDQLQILFFGKKYGSGGA

SEQ ID NO: 67092 - protein, 233 aa, Zea mays
  Clone ID: LIB4758-034-E9_FLI.pep
RVTAVYNLPDTNRREPPLDLVELVCLHHRISLGNGVPGSSPVVELAVVLVGVAVERAVQVPTPAVESREPNPLPAGAAPVRPYLPPFGDRRHPLAGSGNISGLLHVHCLQLDLGNSYYRVAASNNRLHDGVAAVHDAVDRGGSQLGLILLRYHLLVALRAHVHGRRAAEEATVIDAEDGSLGGLAPSLLVLHGFLNSDETALFAIPLRRSPRGRRGGEGRGIAGNSVGFEMAR

SEQ ID NO: 67093 - protein, 171 aa, Zea mays; identical to SEQ ID NO: 67070
  Clone ID: LIB4758-034-G3_FLI.pep

SEQ ID NO: 67094 - protein, 448 aa, Zea mays
  Clone ID: LIB4758-034-H9_FLI.pep
AMGKEKSHINIVVIGHVDSGKSTTTGHLIYKLGGIDKRVIERFEKEAAEMNKRSFKYAWVLDKLKAERERGITIDIALWKFETTKYYCTVIDAPGHRDFIKNMITGTSQADCAVLIIDSTTGGFEAGISKDGQTRGHALLAFTLGVKQMICCCNKMDATTPKYSKARYDEIVKEVSSYLKKVGYNPDKIAFVPISGFEGDNMIERSTNLDWYKGPTLLEALDQITEPKRPSDKPLRLPLQDVYKIGGIGTVPVGRVETGVIKPGMVVTFGPTGLTTEVKSVEMHHEALQEALPGDNVGFNVKNVAVKDLKRGYVASNSKDDPAKEAASFTSQVIIMNHPGQIGNGYAPVLDCHTSHIAVKFAELITKIDRRSGKELEKEPKFLKNGDAGMVKMIPTKPMVVETFSQYPPLGRFAVRDMRQTVAVGVIKSVEKKDPTGAKVTKAAIKKK

SEQ ID NO: 67095 - protein, 149 aa, Zea mays
  Clone ID: LIB4758-036-E8_FLI.pep
GTRTTMASQAIESHRAGAEVVTGGDAICRKKSIELLEELGLPKGFLPLEDIQEFGYNRVTGFMWLVQGKKKVEHTFKKIKQTVSYAAEVTAFAEKGKLRKITGVKTKELMLWLSVVEVYVPEASPEKVTFKTGTGLSDTFDASAFALGE

SEQ ID NO: 67096 - protein, 188 aa, Zea mays
  Clone ID: LIB4758-037-F5_FLI.pep
FIYAEALAGQRSAAHPLCGRRQHSGGGGVAVPAEVGVEAAGLELLVLLAERARLAAEVDEAVAAGGLGEAELGAHLGAVRARVDPLAAREVGQHRVQRPRRAARRRAAVHDLRHAPERDARAPASQAAEAAVVEAVQQAGGPLGGGGRPADGEASHRRRIAAGLGRIHADVLCCAVATVAVAFGLASR

SEQ ID NO: 67097 - protein, 198 aa, Zea mays
  Clone ID: LIB4758-041-B12_FLI.pep
PGENELKTFRYTHRSPFKLNGLPAYRLQTIQPSAKSKRTDPFQTMATTKDPATIGGEPAIGIPYHPAAEAQGHYYYAPPPNPYAAGMPPPNAIYAGAPKGVPLQQTMFRDTPAPFHCQACGEAAVSSVRSKPSLASVVACMMPFMLGVCFLCPSMDCLWHKYHYCPSCGEKVGEFRKSDPCLVVDATRWSEPSFAVPA

SEQ ID NO: 67098 - protein, 246 aa, Zea mays
  Clone ID: LIB4758-044-A6_FLI.pep
PGERDWELRKPHAPRATGAAPFPCTPQRPNPAGSLLLCSSGDRVMPLPTMTHSSAYLLPAPTAPSDPSGAAPTTYALVVLNQRLPRFAPLLWSRARLRVCADGGANRVFDGMPELLAGEDPAEVRTRYKPDVIKGDMDSIRPEVKEYYSKLGTNIVDESHDQDTTDLHKCVSFITSNLPIPENCVFLFLAHLAEGSIMRWGTSMYYTAFQASRSSSYQTTVQSFCSLRHTPTRSILRNRLKVLTVV

SEQ ID NO: 67099 - protein, 227 aa, Zea mays
  Clone ID: LIB4758-044-A7_FLI.pep
LLAFVHPTRTSTISQHIHRRGGGGGGVEDTTKNPCKKGRPNKSVDAAGCSIAGELGDGLGSLGDGVFGELSWEDEAHGGLDLAGGDGGLLVVPRELGGLAGELLEDVVDEGVHDGHGLGGDADVGVHLLQDLEDVDFVGLHALLGLLLPLLLAALLTGGLRGRQALLGLGLLTCGRLLRLLLGRRLLLRWLLLGLGRHRVGVVGVEGDGGGLDAVGWRLGNGGFSSR

SEQ ID NO: 67100 - protein, 133 aa, Zea mays
  Clone ID: LIB4758-044-C12_FLI.pep
GMWWEWEGDGGEAPREETPVDFDFIALLAKPKDYYKILEVDYYASEETIRSSYIRLALKWHPDKKQGQGEENSTSKFQEINEAYQVLSNPAKRQEYDKKGILYVQDQNVVDYLNRHKGLILTCNGLGIRYSVW

SEQ ID NO: 67101 - protein, 264 aa, Zea mays; identical to SEQ ID NO: 65257
  Clone ID: LIB4758-044-G4_FLI.pep

SEQ ID NO: 67102 - protein, 335 aa, Zea mays
  Clone ID: LIB4758-045-F3_FLI.pep
FCWRDKNRSVPDSTSRMRAASSTVYPVYLSLHRHPNSHQASFRPSRANHDNTHKCTKPPKVLRRSLFSLPASFLLLHTSSSLAVDDANMPSTSTIDTTITDRIFMDFSVCPSYFRSDRPLGAELSSCPDSEPLGRVVFGLYGRLLPVTTANFKATCTAAAYRGTLVHKLLQGQFFAAGRQGPRHDKGEVQPPSGLVRNSETVNPKAFELRHARPGTLSLCLGQNDDDDDIKLNPNYHNLEFLVTTGPGPCPELDGQNIVFGTVLEGMDVITSIATIPTYKPAERIRLFNGFAQLIGDGRAQTARAMWDRPLKTVYISDCGELTVTKPSLSPPGLP

SEQ ID NO: 67103 - protein, 148 aa, Zea mays
  Clone ID: LIB4758-045-F6_FLI.pep
HSWSPAEASLGQHMRGSRFLLLLLVVDRAAEQHDVRLRPVDRVVHPPAALLHTHQPPLLLGEKDVPGEELGDLGREDDVPARIKGIPIGFCQPPMTEKMWKGEDREGEGFTSTCIHRCRRSTSRSTGSAPCLPRLLDQLPYRKSLDLQ

SEQ ID NO: 67104 - protein, 212 aa, Zea mays
  Clone ID: LIB4758-046-G3_FLI.pep
GLARTLRVPTPSCHRFVSDCNQNRSTNQSLYKLEKQIVPTNQSDGNEQGLTHLRPSAAPSPSAAPRRRRPVFLPPTSAVPLFFPRFCPNFCIRISHEVVTAMAATGGVSTDDIPILQAENLTSNVKSVHYSRTFLSIIGGVVAGIWGFTGLTGFVFYFLIMMVASIGLLAKSKFSVQTYFDSWTRISIEGVFGGLMSFVLFWTFAYDIVHIF

SEQ ID NO: 67105 - protein, 195 aa, Zea mays
  Clone ID: LIB4758-047-A11_FLI.pep
GTPNQSHRRSSWTTMASPLLKSHSQLAAAAALHSVRRADRCPATIHLGKFHDHGLRSGRSKRSGLAKVGAFPSLDVVPLMVTMVEHVDMSRDYVVTKSIWHLSDVALKSVYTFYAMFTVWGVCFFASMKDPFYDSETYRSQGGDGTVHWYYDRQEDLEASAREELLREELLEEIEQRVGGLRELEEASKEEQLTK

SEQ ID NO: 67106 - protein, 163 aa, Zea mays
  Clone ID: LIB4758-047-B2_FLI.pep
GSSVYHSIVWSFVPGRHVIITTMASGRRKSGIPALGWWLMAVGTIRSAIVWSCLFSSASLCLAVYPEMTGVQERAMAAWTLLSCTLSFLCAFNMESKPLYVATFMSFVYVAGYLLVECFFYHSVRAASIAPYCFIAGTSMVWMLLQWNSHGRGRRPREASKQP

SEQ ID NO: 67107 - protein, 136 aa, Zea mays
  Clone ID: LIB4758-047-G12_FLI.pep
LGKGDAENSKGEGKAKLMAEDQGNAKQMAEDQGNAKQMAEAPSKIESMRKWVVEHKLRAVGCLWLGGISSSIAYNWSRPNMKPSVKIIHARLHAQALTLAALVGSACVEYYDQKYGSSGPKVDKYTSQYLAHSHKD

SEQ ID NO: 67108 - protein, 199 aa, Zea mays
  Clone ID: LIB4758-049-B12_FLI.pep
RDLFSRPPLARSRTPTRHDHQTTRFPEASAPRFSVRASQPPARASERASEGNGHGGGCVLLPGASSPDVVQLRVRRRRPPLLLRGAGHVGVGAAPVSRAVAGADDGQRERRQGAVRAARGGGAQHHRPQALQPAQGEGNRAALAGHHRVLQDHRRRLQAAAGPHPPRQEERREARIPCLRRPCSTHIYKYIIYKYYIIK

SEQ ID NO: 67109 - protein, 117 aa, Zea mays
  Clone ID: LIB4758-049-E2_FLI.pep
GTFRPDIESPVLPQSPAATTPPSSSSRHYAGRRVASCRDVGRVRRASRGLASRPEAGAPPRRRGAPSWAAGLLHIIGARGAGGGLHAPPRLGARRRRYYHNIKGDAFTPESIASRTC

SEQ ID NO: 67110 - protein, 384 aa, Zea mays
  Clone ID: LIB4758-049-H7_FLI.pep
RGVLCAVGPANFLWFLMMDVSQVAAAVALMAFAVAFPASAFPSGFPPGTPSAFPNPWAAFQNLSGCHMGEERQGLAGLKDYLSHFGYLPPAPPSSPFSDAFDQNLEAAIATYQRNFGLNATGALDPSTVSQMVAPRCGVADVINGTSTMARSSSADAHAHGRHLYAYFPGGPTWPPFRRDLKYAITATSAASIDRSTLSDVFARAFSRWAAATNLRFAETASESDADITIGFYSGSHGDGEPFDGPLGTLAHAFSPTDGRFHLDAAEAWVAGSDVSRSSATGAVDLESVAVHEIGHLLGLGHSPVPDAIMYPTIRTGTRKVELEADDVQGIQSLYGSNPNFKGATPTSPATSSREMDSSAGAGCRPDRVFVGVVAAVGLLLLVL

SEQ ID NO: 67111 - protein, 233 aa, Zea mays
  Clone ID: LIB4758-050-D10_FLI.pep
RVTAVYNLPDTNRREPPLDLVELVCLHHRISLGNGVPGSSPVVELAVVLVGVAVERAVQVPTPAVESREPNPLPAGAAPVRPYLPPFGDRRHPLAGSGNISGLLHVHCLQLDLGNSYYRVAASNNRLHDGVAAVHDAVDRGGSQLSLILLRYHLLVALRAHVHGRRAAEEATVIDAEDGSLGGLAPSLLVLHGFLNSDETALFAIPLRRSPRGRRGGEGRGIAGNSVGFEMGR

SEQ ID NO: 67112 - protein, 213 aa, Zea mays
  Clone ID: LIB4758-051-D5_FLI.pep
PQRTIKSNPSPSSCSPKQTEAALYRAPPEPQLCSPTASSSSSPSPRRAAPPSLSRRRTKPSLTTTSRRGSSPRAWSPTRSTTPRAPSRPRSTPPRPAAGPPSASSPSRAPTRSATRPRSPERSPPTTSPTSRASPSRSSSSGSTSSRSPGAATTSSSPSASSPRTSGLKTSSSAPPVAAGSTATTCSCCRSPAPPPPSCACGVPSRTPLLQIW

SEQ ID NO: 67113 - protein, 334 aa, Zea mays
  Clone ID: LIB4758-052-A2_FLI.pep
HSRRSFETATNPSFQDRQHLEAAASAPLRPTLERDRPDDHLVVDGSQRSADEGADPEDPVVSPGMVLVVNYGGAKAPRGVDAGAGDRDGGQVDEEHGKPDWKRGEDRHMGVPGVPLGVGGGEDGVDEDEGADDLGAEAVALGVAGRHDVGAAAVAHVQPLLEPLDDARAADGAQALHDDVKHRPGEGQLPRQEQPEGHRRVDVPAGDAGGAVDEGEDHAAEGPGDALDADGGALGGGLGDAHDGEDGDVEEEEGGDELGDAGAVEGPGLELPGLEERRRRGLLVVLVVRALRRRADGLALRELVGAQADVLLLPLHACAVTFLQQTSLARARRS

SEQ ID NO: 67114 - protein, 182 aa, Zea mays
  Clone ID: LIB4758-054-A6_FLI.pep
RELVITGHVRPPETTMAMETCFRAWALHAPAGSEDRLLVGNLVLPSKRALAPLSVGRVATRRPRHVCQSKNAVDGVVVADEKNWDGLVMACETPVLVEFWAPWCGPCRMIAPVIDELAKDYAGKITCCKVNTDDSPNVASTYGIRSIPTVLIFKGGEKKESVIGAVPKSTLTTLIDKYIGSS

SEQ ID NO: 67115 - protein, 171 aa, Zea mays; identical to SEQ ID NO: 67070
  Clone ID: LIB4758-054-F10_FLI.pep

SEQ ID NO: 67116 - protein, 130 aa, Zea mays
  Clone ID: LIB4758-056-C8_FLI.pep
NTKMAMAAARRALLAHLRVPVVHPAAAAATIPAAGRLLSSTTETKGSFLDKGEVADRVVSVVKNFQKVEPSKVTPSAHFQKDLGLDSLDTVEIVMAFEEEFSFEIPDNDAEKIDSIKTAVDFIASHPQAK

SEQ ID NO: 67117 - protein, 155 aa, Zea mays; identical to SEQ ID NO: 37872
  Clone ID: LIB4758-056-G4_FLI.pep

SEQ ID NO: 67118 - protein, 433 aa, Zea mays
  Clone ID: LIB4758-057-H11_FLI.pep
IAMAKKLVEEALLAAADEHEEENLSVREELKKQLWLAGPMIAGALLQNVIQMISVMYVGHLGELPLAGASMANSFATVTGLSLLLGMASALDTLCGQAFGARQYYLLGIYKQRAMFLLTLCHVRFLQTQNIVVPVMASAGAAAACHVVVCWALVYALGMGSKGAALSNAISYWVNVAVLSVYVRVSSACKETWTGFSTEAFRDALGFFRLAVPSALMVCLEMWSFELIVLLSGLLPNPKLETSVLSISLNTAAFVWMIPFGLSSAISTRVSNELGAGRPRAARLAVRVVVLLSVAEGLGVGLILVCVRYVWGHAYSNVEEVVTYVANMMLVIAVSNFFDGIQCVLSGVARGCGWQKIGACINLGAYYIVGIPSAYLTAFVLRVGGTGLWLGIICGLIVQLLLLAIITLCTNWDSEATKAKNRVFNSSSPASGT

SEQ ID NO: 67119 - protein, 145 aa, Zea mays; identical to SEQ ID NO: 37232
  Clone ID: LIB4758-059-C1_FLI.pep

SEQ ID NO: 67120 - protein, 109 aa, Zea mays
  Clone ID: LIB4758-061-F3_FLI.pep
RDLLRLLARAAARRLPLVSAPRAVVHPCAAKMTAGYIVGSLVGSFAIAYLCDTFISDKKAFGGSTPKTVSEKEWWQATDTKFQAWPRTAGPPVVMNPISRQNFIVKSTE

SEQ ID NO: 67121 - protein, 135 aa, Zea mays
  Clone ID: LIB4758-062-F1_FLI.pep
TQLNRSMDATPTRLFLGALLLLVPAALLLLLRARGRRRLPPGPPSLPLLGSVVWLTNSPAEIEPLLRRLFERYGPVVALRVGARLSVFVADRRIAHEALVDRGATLADRPALASVKFLDESDNTITRALCLGGLT

SEQ ID NO: 67122 - protein, 239 aa, Zea mays
  Clone ID: LIB4758-062-G10_FLI.pep
IQSRQKICCVVPILFRHTVRFAVLRSARGKRSLVTMCRRRPTRAHSAEPRLPETSHSSSSARMLCSGALTEGSMARLGTADRDLALLPSGSSCDPSFTTGKSVLTLVLTEDIFSFHILPSCSIDGSGSGHFTGSSRLIGSTGRSTGLNSTPTSMPWGLSAGTAAAGSDSPVLMLGASVSTASATLLERRWAPAENLEKIPTIVSSPPLLWLQAFSGLNEAARFSCLHSTDRCRSSSDSR

SEQ ID NO: 67123 - protein, 603 aa, Zea mays
  Clone ID: LIB4758-063-A5_FLI.pep
RDSIMTSYYIGVDVGSGSARAALVSDQGDIVAESTHETLTRRDDHDSNIFEQSTGQIWDCISKACKAVLKSSGITKEQVKGIGFDATCSLAVANMETGKPVSVSPKSWQQGADGSAQTEGGHVWDVILWADHRAFKEAKLINSTGSMVLKYVGGTMSLEMEAPKMLWLKNNMPADVFSSSMFFDLPDFLTYKATGDLARSNCSLACKCSYVPPGVEGSKGWNDDFFTQIGLGEFVKTEYKQVGGTPGKSGLILTAGQPVGKGISAEAAEELGLLEGTPVGSGVIDAYAGWVGTVAAPMEGQETTSLEDSKHRLAAIAGTSTCHIVQSPEAVFVPGVWGPYKHAIFPGYWMNEGGQSSTGQLLDFMIDTHPASKRLKELAKEKGTNHFSLLTEILQNMVQEKGVPFMSYLTKDIQLYPDLHGNRSPLADNDMRGIMIGMRLDKNLSDLALRYYATGEAIALQTRQIIDEMNRCGHDVRSIFMSGGLVKNGFLMSLIADICNVPVQLPYSHSASVVLGAAMLGAAAAAEAQNGVIDSQEKAEKGSHDMKERLWDIMVKMSRPGTTVRPSASEKELKLLKVKYETFLECIELQRKWRKKVSDALDE

SEQ ID NO: 67124 - protein, 256 aa, Zea mays; identical to SEQ ID NO: 66847
  Clone ID: LIB4758-063-B8_FLI.pep

SEQ ID NO: 67125 - protein, 146 aa, Zea mays
  Clone ID: LIB4758-064-G7_FLI.pep
PGSDPGVSGVMQFLRGSGGGGGGFPVVAWEVLRRHFSKKRSVDVRRINPKVPKEEAVAISGRLLQILSDHGPLTVANTWNHAKDAGIAGLNSKTHMKILLKWMTGRNVVKLTCVHVGNAKKFLYSPSTESSSSSAGASPSSTSASQ

SEQ ID NO: 67126 - protein, 175 aa, Zea mays
  Clone ID: LIB4758-065-B10_FLI.pep
LCIEQAYPVKNPGSTTSQAMAAAEAWVRQEKVRKFEEFVDQRLKPDLANAIAQRNKVFEQQKTFLDLKRNIENLERNGVTSMRSMVNLGSEVYMQAEVPDTRHIFVDIGLGFHVEFTWQEALQFISVREARLTRQIDEYTHLIASIKAQIKLVCEGIREVLQLPAEKELSPRNTW

SEQ ID NO: 67127 - protein, 382 aa, Zea mays
  Clone ID: LIB4758-066-C3_FLI.pep
PKCLLHVKNQCSRRQVLHTAHIHAHRLQVPAEEPTGVSLFHDAVTQLFHSVKESLMASLSSMTFSAMPDPSALCILRCGFDLHLLKHGQQLRVLKILDQQAGPCVFQHLPGVPRRQANHGHSGSHTGPDPRCRVFKYEGVLRRCVDELERLEVRVRERLGPVALAPDDEHREEVGEPQQRQHQLGVRPRGVRHRRALHVAAFHPSAQLLQPIHGLQLPRRQLSEHSFFVIHEPHRLLVIHAREQRPGEVVVVAPADVGAVELLRDGDTAVEAGLLQELSEGAEVDGVGVAEGAVDVEQDGFQRRQLRQSTAAFGVQKARAEQMSGVPCFRWRTREHAGLGGAPVGRHVRRSSRAHHPRNAAALLPRPCAETTAVAVAAAGTA

SEQ ID NO: 67128 - protein, 234 aa, Zea mays
  Clone ID: LIB4758-067-D6_FLI.pep
ARQSKATPYPIQPSGCSSVRPASAVQDGSEDVGELSRQCAQALGGRRRSPGCCLLYLQVLLHCSRWVEVHSVSRMGQDDGRRRHRWHHGPCSGPPGRGGVRGAAGTRHEGGRGRILRQRGECQGHQRRQLPDLRRGRRGQCQTVRDARPDQHEPVRGRVDDQGEAEQPGGGGRPAGRRQVHQALRGGRRSLDPGPPSQQAWMLTTTVRVGGVDPLSLSLLLQKLHQAVRQCRRT

SEQ ID NO: 67129 - protein, 427 aa, Zea mays
  Clone ID: UC-ZMFLMO17055G08_FLI.pep
LLSLHSKFWICQITICLEKFHQLVPFLYSPLSGSSSSSTGAIAGGVAAGTALLFAVPAISFAYWQRRKPQEHFFEVPAEEDPEVHLGQLKRFSLRELQVATDGFCNKNILGRGGFGKVYKGRLADGSLVAVKRLKEERTPGGELQFQTEVEMISMAVHRNLLRLRGFCMTPTERLLVYPYMANGSVASRLRDRAPAEPPLDWQTRRRIALGSARGLSYLHDHCDPKIIHRDVKAANILLDEDFEAVVGDFGLAKLMDYKDTHVTTAVRGTIGHIAPEYLSTGKSSEKTDVFGYGITLLELITGQRAFDLACLANDDDVMLLDWVKGLLKEKKLESLVDQDLEHNYVDVEVESLVQVALLCTQSNPMERPKMSEVVRMLEGDGLAERWEEWQKAEVVRQEVELGPHRTSEWILDLTDNLHAEQLSGPR

SEQ ID NO: 67130 - protein, 580 aa, Zea mays
  Clone ID: UC-ZMFLMO17089B06_FLI.pep
VQPLPVPAALGLSESDKQCIRDRSCIMARHIFSDQPEEYIQSQVNTLLHSLDIDNRMRGPMHGQYPELQEYWKQSQSSTRPAPTHNAADKWITEFGKQNNNPENWANSFEQQYGPNGWASEFEQHQSQMAMRQMGGANMANLAAMEQSRVLAQTLASNNDPKFQNSKFFQFVSKMSRGELIIEDNQVKEGSASQSSGWADEFQTPYIANANSWADQFAHEELSQGADKWVSEFSSQPNHGALNENWVDEFSKLNVTDEWAEEFSGGGFGESSADPWVDEFQEHLSSFKQSPGASRGVYVFSENNPYVGHPNPMQEGQELFRKGLLSEAVLALEAEVLKNPDNAEGWRLLGVTHAENDDDQQAIAAMMRALEANPTNLEVLLALGVSHTNELEQGEALRYLYRWLQNQPKYGGLVPLQSTDSPYGPDVVRLFNEAAQMSPEDADVHIVLGVLYNLSREYDKAIASFKTALQLKPQDYSLWNKLGATQANSIQSADAILAYQQALDLKPNYVRAWANMGISYANQGLYEDSIRYYVRAVAMNPKADNAWQYLRISLSNASRADMIAACDARNLDALQKEFPL

SEQ ID NO: 67131 - protein, 712 aa, Zea mays
  Clone ID: UC-ZMFLMO17342G07_FLI.pep
ELTRFPIAGSADDAQKLIDLAIGINETLGESKLEEIDKKLLQHFASGSRAVLNPMSAMFGGIVGQEVVKACSGKFHPLYQFFYFDSVESLPVEPLEPSDLKPENSRYDAQISVFGAQLQKKLEQSKIFMVGSGALGCEFLKNLALMGISCSQNGKLTVTDDDVIEKSNLSRQFLFRDWNIGQPKSTVAATAAMTINPELHVEALQNRASPDTENVFNDAFWESLDAVVNALDNVTARMYIDSRCVYFQKPLLESGTLGAKCNTQMVIPHLTENYGASRDPPEKQAPMCTVHSFPHNIDHCLTWARSEFEGLLEKTPTEVNAFLSNPGGYATAARTAGDAQARDQLERVIECLETDKCETFQDCITWARLKFEDYFSNRVKQLTFTFPEDAMTSSGAPFWSAPKRFPRPLEFSSSDSSHLSFLLAASILRAETFGIPIPDWAKNPKKLAEAVDKVIVPDFHPKQGVKIEIDEKATSLSSASVDDAAVIEELIAKLEAISKTLPPGFHMNPIQFEKDDDTNFHMDLIAGFANMRARNYSIPEVDKLKAKFIAGRIIPAIATSTAMATGLVCLELYKVLAGGHKVEDYRNTFANLAIPLFSMAEPVPPKTIKHQDMSWTVWDRWTVTGNMTLRELLEWLKEKGLNAYSISCGTSMLYNSMFPRHKERLDKKVVDVAREVAKLEVPSYRRHLDVVVACEDDDDNDVDIPLVSIYFR

SEQ ID NO: 67132 - protein, 742 aa, Zea mays
  Clone ID: UC-ZMFLMO17247B06_FLI.pep
EPGESVTDDRILGARMTKASLVPPVTRKYEVIEEYLIVADLEEVQRKMRVALPDDYSEKLLSQKNGTENLELPEVKDYQPRKVAGDEILEQEVYGIDPYTHNLLSDIMPADLELSPTDKHIFIEELLLNTLNKQVRHFTGSGNTPMTYNLRPVIEEIQRSAEDNGDKRTSKMCLGMLKTMRNRSEQNFVAYRKGLGVVCNKKGGFGVDDFVVEFFGEVYPSWRWYEKQDGIKHIQNNSEDQAPEFYNIMLERPKGDGDGYDLVFVDAMHKANYASRICHSCNPNCEAKVTAVNGKYQIGVYTLRPIAEGEEITFDYNSVTESKEEHEASVCLCGSQVCRGSYLNFSGEGAFEKVLMEFHGVLDRHSLLLQACETDSVSQQDLIDLGRAGLGTCLLAGLPGWLVAYTAHLVRFIYLERQKLPDEILRHNVDEKRQFLIEINMDSEKNDAEVQAEGVLNSRLQQIVHTLDKVRYVMRCIFGDPKNAPPPLVRLSGKSLVSAIWKGDSSIVAELIQSMEPHVEEEVLSDLKAKIRAHDPSESEDIEGGIRNSLLWLRDELRTLSCTYKCRHDAAADLIHLYAYTKCFFRVRDYKTVKSPPVHISPLDLGPKYADKLGPGFQEYCKTYPENYCLAQLIYWYSQNSEPESRLTRARKGCMSLPDVSSFYVKSAKPSQERAYGNRTVRFMLSRMEKQAQRPWPKDRIWVFKSDPRFFGSPMMDTVLNNSPLDKEMVHWLKTRPNVFLG

SEQ ID NO: 67133 - protein, 315 aa, Zea mays
  Clone ID: UC-ZMFLB73280A10_FLI.pep
MMKLQVNVFEYFDSRQLIVCGNHFRRIREVELKRDYAFIEFSDPRDADDAQYNLDGRDVDGSRIIVEFAKGVPRGSGGSRDYNGRGPPPGTGRCFNCGVDGHWARDCQAGDWKNKCYRCGERGHIERNCQNSPRNLRRERSYSRSPSPRRGRGRSRSYSRSRSYSRSRSPSGSPRGGRRDRDERRSRSLSYSRSASPRRSVSPVKEKERSRTPDGSRSPSPRDKVSPPPKDNGAHNGSDREDSPGGREMSKRSRSPSDGYRSPVGNGRSPSRSPSPKVNNGDDPSPKGNNGDDPSPKGNNGDDEHRGSPRGSQSP

SEQ ID NO: 67134 - protein, 581 aa, Zea mays
  Clone ID: UC-ZMFLB73280B05_FLI.pep
ILLKAKSLDTLGRAADAAEECRTIIDIIESAWPYGVPDGTSEECKLIDIFHSALEYLPKLWMRSGCFDEAIIAYRRALAKPWNLGSQRSAKLQKELAVSLLYCGVEVKFPQEFSQERNLVTPGNNLEEAILLLLMLTRKLFLREIQWDPDLVNHLVYALSLSGHYEVLASHLEMLLPGTYTRSERWYILALCYSAAGMDDSALNIIRNGFSVLERKGKPHVPSLLLGAKLCCKNPKHASEGIKFANKAMKSFRSRDLHFISTTKHFLGVCYGPFSRSSTSYLDKSRLQDNALRLLQDAATTAKYNPEIMYSLAWENAMQRKLNAAVESATECLEMVMGGSVSAWKLLILVLSAQQNLQEAEAVADFAMDEAEKNDQLDILRLKAQIQASRGQFKSAVETFRVLLAAIQVKKEVWKLTTCNEVKCLQKLEMDAWLDLASIYSKLEAWHDSNICLDKAISIDFYYPKCWHVRGLLLEAQFLHKEALMAFSFALSIDPDYVPGMVCMAGILRNIGGDSLSIARTYLRNALRLEPTNHRAWLSLGLVLKAEGSLQEAADCFQAAYELRELSPIQDFSEQLPIMLH

SEQ ID NO: 67135 - protein, 181 aa, Zea mays
  Clone ID: UC-ZMFLB73264E06_FLI.pep
RNLHERDEELSRGVADGLLAVVEALDGGGDEGVEVDLEVVVGDDGGDGERLEAALGDAEVGIPRQIHAGVHQRGDLGRRAPRRGVKRLVQPLDPGQTLLGVLDTPPLAPPPFSPRARGLRRPCRGESSRVPGRGTGGEASRKWPDLMRRERGSDRERTQRDESEMNHRPWFASSTLLGVFR

SEQ ID NO: 67136 - protein, 173 aa, Zea mays
  Clone ID: UC-ZMFLB73304H06_FLI.pep
HTPGGGGGATSVRRRCRGGAGHPQGGVGLRQAAHRGVAELQAGADRTAGGDRDLHPDRCHARAGTGTPTQGNPREEHTTTSHQSATTVLHFLSLSRLLRSLARVASFPAPPPPIPVDRQPPTSASIASELRSTPPSAERERGRDGRVPNPSRAALPARPTLRSCRPMQICSSS

SEQ ID NO: 67137 - protein, 662 aa, Zea mays
  Clone ID: UC-ZMFLMO17018C03_FLI.pep
RFFLFRGSNVVSEAAAAVLHCCCGGPSRPAESTRPWAAEGGRIRPGLRMPGCGVAGRGGVGVSSAARRTPPQGKSRPCLWMTIARGYGRQHELKYCTSPQSKSVLLEARFGRHVTRSTAYLLQNSRSTAMTRLQKSGKFLQPVLDSSRNYLTSTFYNASLKRRVLSRVECFVSSDPINNGWLKPRRSENFTSLESACVQPEYKLPVRTRADCKAEQYEITGSPLSPSDVPADAVMIGDTNEISPWWQEFPKRWTVVLLCFFAFLLCNMDRVNMSIAILPMSSEFSWNPATVGLIQSSFFWGYLLTQILGGIWADRFGGKVVLGFGVVWWSFATVLTPLAAKIGLPCLLTMRAFMGIGEGVAMPAMNNILSKWIPVSERSRSLALVYSGMYLGSVTGLSLSPLLISRFGWPSVFYAFGSLGTVWFALWQSKAHSSPDDDPELSKAEKRHILGGSALKEPVTSIPWRLILSKAPVWALIISHFCHNWGTFILLTWMPTYYNQVLKFNLTESGLLCVLPWLTMAVFANIGGWIADTLVQRGVSVTNVRKIMQSIGFLGPALFLTLLSKVRTPAMAVLCMACSQGSDAFSQSGLYSNHQDIGPRYAGVLLGLSNTAGVLAGVFGTAATGYILQKGSWDSVFKVSVVLYIVGTVVWNVFSTGEKILE

SEQ ID NO: 67138 - protein, 413 aa, Zea mays
  Clone ID: UC-ZMFLMO17321C03_FLI.pep
EKPVAARPPHMATALGGEPNPTADALEVDPPRASADEKHVATIIAGGSDAVTGHIISTTIGGKNGEPKRTISYMAERVVGTGSFGVVFQAKCIETGETVAIKKVLQDKRYKNRELQIMRSIDHCNVISLKHCFFSTTSRDELFLNLVMEFVPESLYRVLKHYKDMKQRMPLIYVKLYMYQIFRGLAYIHTVPGICHRDIKPQNILVDPLSHQVKVCDFGSAKILIKGEANISYICSRYYRAPELIFGATEYTTSIDIWSAGCVLAELLLSQPLFPGESAVDQLVEIIKVLGTPTREEIRCMNPNYTEFKFPQIKACPWHKIFHKRMPPEAIDLVSRLLQYSPNLRCSALEACAHSFFDELRESHARLPNGRPFPPLFNFKQELANAPPELVSRLLPEHARRHSGFGSLFGSGP

SEQ ID NO: 67139 - protein, 288 aa, Zea mays
  Clone ID: UC-ZMFLMO17070D01_FLI.pep
ADFGTVSPIHRYDMWCIVSFAIDLPLGDLGLETKAVDSTEDAIVILGDLLLPGSQNILLRVGEGDLAGALRGQDAHRDDGVRRHDDLVVGGELLRVDGVLAPDVAGVELALQRNRSGHDLGDSGLEAAFDAQPQGPAGVPDLAVADHVLEGQRVLAGHAAGVHRLSSHQGPHLVVQDLGVLEVVVHAVDLPQQDGLLDLQLRLLPDAGYAGVQAALLALVGQPVADVVVAEVPEPVHGVGVIAHPDDLEQGVTVVGAGVVGVAPDPVWAAPPELAEVVRLDADHPLAV

SEQ ID NO: 67140 - protein, 543 aa, Glycine max
  Clone ID: UC-GMFLMINSOY031E04_FLI.pep
YESWDDPEVPKFHYGSHYSSAGIVLFYLLRLPPFSTENQKLQGGQFDHADRLFNSIKDTWLSAAGKGNTSDVKELIPEFFYMPEFLENQFNLDLGEKQSGEKVGDVVLPLWAKGSAREFISKHREALESDYVSENLHHWIDLIFGYKQRGKAAEESVNVFYHYTYEGSVDIDSVTDPAMKASILAQINHFGQTPKQLFLKPHVKRRTDRKLPPHPLKHSCHLAAHEIRKSSSPITQIVTLNDKILIAGTNNLLKPRTYTKYVAWGFPDHSLRFISYEQDKLLSTHENLHGGNQIQCASVSHDGHILVTGADDGLVNVWRVSKFGPRALRRLKLEKPLCGHTGKITCLQVSQPYMLIVSGSDDCTVIIWDLSSMAFVRQLPEFPAPVSAIYVNDLTGEIVTAAGILLAVWSINGDCLAMIKASQLPSDSILSVTSSTFSDWLDTKWYATGHQSGAVKVWQMIHCSNPDNSLSKSGFGGSGGLNLGGLEPEYKLVLRKVLKFHKHSVTALHLTTDLKQLLSGDSGGHLLSWTLPEESLRGSLNQG

SEQ ID NO: 67141 - protein, 466 aa, Glycine max
  Clone ID: 701099955_FLI.pep
GREHFNCLAGTTCATVLTRAIFTEGCKSIAAGMNAMDLRRGISMAVDAVVTNLKSRARMISTSEEIAQVGMISANGEREIGELIAKAMEKVGKEGVITISDGKTLYNELEVVEGMKLDRGYISPYFITNDKNQKCELEDPLILIHEKKISSINAIVKVLELALKRQRPLLIIAEDVESDALATLILNKLRAGIKVCAIKAPGFGENRKAGLQDLAVLTGGALITEELGLKLEKVDLDMLGTCKKITVSKDDTVILDGAGDKKALEERCEQIRSAIENSTSDYDKEKLQERLAKLSGGVAVLKIGGASEAEVGEKKDRVTDALNATKAAVEEGIVPGGGVALLYASRELDKLQTANFGQKIGVQIIQNALKTPVLTIASNAGVEGAVVVGKLLEQENHDLGYDAAKGEYVDMVKAGIIDPLKVIRTALVDAASVSSLMTTTEAVVSELPNDNKDTPAMAGGMGGMGY

SEQ ID NO: 67142 - protein, 407 aa, Zea mays; identical to SEQ ID NO: 40940
  Clone ID: UC-ZMFLMO17333H01_FLI.pep

SEQ ID NO: 67143 - protein, 530 aa, Zea mays
  Clone ID: 700445122_FLI.pep
TSRRRQRASLLSHASRQGRERDRRSPSRRRWCGCPPSSSEICLVTDLSDKMVKICCIGAGYVGGPTMAVIALKCPDIEVVVVDISKPRIEAWNSDTLPIYEPGLDDVVKQCRGRNLFFSTDVEKHVAEADIIFVSVNTPTKTRGLGAGKAADLTYWESAARMIADVSKSDKIVVEKSTVPVKTAEAIEKILTHNSKGINYQILSNPEFLAEGTAIEDLFKPDRVLIGGRETPEGRKAVQALKDVYAHWVPEDRILTTNLWSAELSKLAANAFLAQRISSVNAISALCEATGANVTEVAYAVGKDTRIGPKFLNASVGFGGSCFQKDILNLVYICECNGLPEVANYWKQVIKINDYQKSRFVNRVVSSMFNTVAGKKIAVLGFAFKKDTGDTRETPAIDVCKGLLGDKAQISIYDPQVTEDQIQRDLAMNKFDWDHPMHLQPTSPTAVKQVSCVWDAYEATKGAHGLCILTEWDEFKTLDYQKIFDNMQKPAFVFDGRNIVDSEKLREIGFIVYSIGKPLDAWLKDMPAVA

SEQ ID NO: 67144 - protein, 737 aa, Zea mays
  Clone ID: 700086876_FLI.pep
VLPSLGRFKVNYQLAELLNVEFYGEWIGLVAEFTTRSLLSWQWASNSVYYLLSLWSRLVTSVPYLKGETPSLLDETVPKITEGFITSRINSVQAILADNSLENPLDSVEVLQDQLEFLPFLCRFQYQSSSLYIINIMEPLLQAYTERSRLPAPGDADELSVIEGQIAWMVHIIAAIVKVRQVTGVSQETQELIDAELSARVLQLISVTDTGAHTQRYQELSKQRLDRAILIFVQSFRRSYVGDQAMHSSKLYGRLSELLGLNDHLILLNVIVGKIATNMKCYAESEDVIDHTLSLFLDLATGYMTGKLLLKLESVKFIIANHSPENFPFLAEYKCSRSRTTFYYILGSLVFMEDSPVKFRTFMEPLQQVALNLEATPDAAFRTDVAKRAFVGWMRDLRGIAMATNSRKTYGLLFDWLYPSRMPLLLRAISLCTDEPEVTTPLLKFTYEFVLNKAQRLTFDSSSPNGILLFREVSKIIVAYGSRILLLPNGTDIYGSKYKGIWISLTVLSRALCGNYVNFGVFELYGDRALADALDISLKMTLSVPLSDILAFKKLSKAYFGYMEVLFNNHIKFVLNLDTNTFIHIVSSLESGLKGLDAGISSQCASAIDNLAAFYFNNITSGDSPPSPASVNLARHIGECPNLFPQILKTLFEIMLFEDAGNQWSLSRPILSLIMTSEQMFSELRAHILASQTVDQQQRLSQCFDKLMTDVNRNLEPKNRDRFTQNLTAFRRDFRLK

SEQ ID NO: 67145 - protein, 119 aa, Oryza sativa
  Clone ID: UC-OSROCYP005G07_FLI.pep
KEFDIPKGHIVATSPAFANRLPHIFKNPDSYDPDRYAPGREEDKAAGAFSYISFGGGRHGCLGEPFAYLQIKAIWTHLLRNFEFELVSPFPETNWKAMVVGIKDEVMVNFKRRKLVVDN

SEQ ID NO: 67146 - protein, 611 aa, Zea mays
  Clone ID: JC-ZMXLIB3526P041DF11_FLI.pep
SVPADPVDRTWGWGRPSVSMDEAAGLLLQEEGGGGDQEALLLPLPQDVGLYTGDGSVDVKGRPALKGTTGNWKACFFILGNECCERLAYYGIAKNLVTYLKVKLHLGNLEAARHVTTWQGTCYLTPLVGGILADSRWGKYWTIAVFSSVYFIGLAILTLSASVPALQPPSCLRTVCPEASLLQYGIFFGGLYMIALGTGGIKPCVSSFGADQFDDTDQAERAKKGSFFNWFYFCINIGSFISGTMIVWIQDNTGWGIGFAIPTIFMALAISFFFSASNKYRFQKPGGSPLTRVCQVVIAAFRKWHIEVPHDTSLLYEVDGQTSAIEGSRKLEHTNELEFLDRAAVISSADLKSESFTDPWKLCTVTQVEELKILIRMFPIWATTIIFSAVYAQNSSMFIEQGMVLDKRIGSFNIPPASLSTFDVISVIMWVPLYDRILVPLARKFTGREKGFSELQRMGIGLVLSILAMVSAALVELKRLEIARSEGLIHEKAAVPMSILWQIPQYFLVGAAEVFTCIGQVEFFYDQAPDAMRSLCSALALITVSLGNYISSIILTLVSYITTQGGDPGWIPDNLNEGHLDRFFWLIAGISFVNLIVYMGCAVRYRYKKAS

SEQ ID NO: 67147 - protein, 142 aa, Zea mays
  Clone ID: UC-ZMFLB73249D11_FLI.pep
PTLVARNASSKAGPILSHLSVSPSQPAAAAAASPVSSAHSAIVSAGRAESPSWSRAHPFGTLARSKADGAPAFLDRLLARLLARSRQPSRQPCLWSSSCGFSPSSPSWSSSASPHTSLSVCQIWSMIISTHMIHRLASTLWC

SEQ ID NO: 67148 - protein, 653 aa, Zea mays; identical to SEQ ID NO: 56213
  Clone ID: UC-ZMFLB73285H08_FLI.pep

SEQ ID NO: 67149 - protein, 85 aa, Zea mays
  Clone ID: UC-ZMFLB73296H02_FLI.pep
RHSLKLSRRRLGHLVLGCHPANCDDIFDYVALRCVLYNICLYCCPTNVVSLAMPPVHADDLLGLVRLFLIHMDWRGLIWIGGDFH

SEQ ID NO: 67150 - protein, 225 aa, Zea mays; identical to SEQ ID NO: 47497
  Clone ID: UC-ZMFLB73224A06_FLI.pep

SEQ ID NO: 67151 - protein, 495 aa, Oryza sativa
  Clone ID: UC-OSROM202024B11_FLI.pep
QRRRKKKGGKEKRRKAKRLERDARLHVAAMAARAAAAAFLLLLIVGAATAAPDMSIISYNAEHGARGLEEGPTEAEARAAYDLWLAENGGGSPNALGGEHERRFLVFWDNLKFVDAHNARADERGGFRLGMNRFADLTNEEFRATFLGAKVAERSRAAGERYRHDGVEELPESVDWREKGAVAPVKNQGQCGSCWAFSAVSTVESINQLVTGEMITLSEQELVECSTNGQNSGCNGGLMDDAFDFIIKNGGIDTEDDYPYKAVDGKCDINRENAKVVSIDGFEDVPQNDEKSLQKAVAHQPVSVAIEAGGREFQLYHSGVFSGRCGTSLDHGVVAVGYGTDNGKDYWIVRNSWGPKWGESGYVRMERNINVTTGKCGIAMMASYPTKSGANPPKPSPTPPTPPTPPPPSAPDHVCDDNFSCPAGSTCCCAFGFRNLCLVWGCCPVEGATCCKDHASCCPPDYPVCNTRAGTCSASKNSPLSVKALKRTLAKLNTA

SEQ ID NO: 67152 - protein, 495 aa, Oryza sativa; identical to SEQ ID NO: 67151
  Clone ID: UC-OSFLM202099H03_FLI.pep

SEQ ID NO: 67153 - protein, 911 aa, Oryza sativa
  Clone ID: UC-OSFLM202002F03_FLI.pep
GQVEKNMADLEAGMVAAATDQGNSTRSQDDAATLIPNSGNLGSSNRSTKTARFKDDDELVEITLDVQRDSVAIQEVRGVDEGGSGHGTGFDGLPLVSPSSKSGKLTSKLRQVTNGLKMKSSSRKAPSPQAQQSAKRVRKRLDRTKSSAAVALKGLQFVTAKVGNDGWAAVEKRFNQLQVDGVLLRSRFGKCIGMDGSDEFAVQMFDSLARKRGIVKQVLTKDELKDFYEQLTDQGFDNRLRTFFDMVDKNADGRLTAEEVKEIIALSASANKLSKIKERADEYTALIMEELDPTNLGYIEMEDLEALLLQSPSEAAARSTTTHSSKLSKALSMKLASNKEMSPVRHYWQQFMYFLEENWKRSWVMTLWISICIALFIWKFIQYRNRAVFGIMGYCVTTAKGAAETLKFNMALVLLPVCRNTITWIRSKTQVGAVVPFNDNINFHKVIAAGVAVGVALHAGAHLTCDFPRLLHASDAQYELMKPFFGEKRPPNYWWFVKGTEGWTGVVMVVLMAIAFTLAQPWFRRNKLKDSNPLKKMTGFNAFWFTHHLFVIVYTLLFVHGTCLYLSRKWYKKTTWMYLAVPVVLYVSERILRLFRSHDAVGIQKVAVYPGNVLALYMSKPPGFRYRSGQYIFIKCTAVSPYEWHPFSITSAPGDDYLSVHIRTRGDWTSRLRTVFSEACRPPTEGESGLLRADLSKGITDENARFPKLLVDGPYGAPAQDYREYDVLLLIGLGIGATPLISIVKDVLNHIQGEGSVGTTEPESSSKAKKKPFMTKRAYFYWVTREEGSFEWFRGVMNEVSEKDKDGVIELHNHCSSVYQEGDARSALIVMLQELQHAKKGVDILSGTSVKTHFARPNWRSVFKKVAVNHENQRVGVFYCGEPVLVPQLRQLSADFTHKTNTRFDFHKENF

SEQ ID NO: 67154 - protein, 487 aa, Oryza sativa
  Clone ID: UC-OSFLM202038E10_FLI.pep
RMQVMTIFKVFFGSFSWSIFQWFYSSGSGCGFSSFPTFGLELYKRRFYIDFSATYIGVGMMCPHIVNFGLLFGAIISWGFLYPYLETKHGEWYQTDSPSNLDGLNGYKVFISVTLIVTDGLINFLILVTSAAINFYHIRQQQQQTSGLASYISKNPSMNYDERKRIEMFLSSKIPMFVPVAAYVAWTAISMVAMPAMFDQIKYYHVGVLYLAIPVVGFCNTYATGLTDWSVSNTYAKFSPFIFAAWIARPGAIVASLLVSGITMASLHVSSQAMQDLKSAHMTLTSPRAMIAGQVFGVALSSVVSPCIFRAFEKAAKPGAPLGSKDSVYPCPYAGLYRAICIIGMGGVKGLPKYCVELCVIAVLVTIAIDALVLVSQLKGWRLHLYIPSMTVIALPFFAGSYFTLDMCLGGLLLLLWKKIDTMSAEILSAAVAAGLICGEGLFTLPSALLNMFKVLPPMCMKFLPSGQEVEVVDSFLNSSGGTVPKT

SEQ ID NO: 67155 - protein, 247 aa, Oryza sativa
  Clone ID: UC-OSROM202033C03_FLI.pep
QPNKPLEKTSVIARGSARDGRSWRRRKAVAVEEALAVVPPPERQPERAAAAQGVRPVRPQRRRRDHARRDGVRARRARPRRRPRGAGGHGRGLHPRGRRGAPLRRLRGTPPRARRRALRPRRGGGAREARGGRRRGRHEGGVPGVRRGRRRLHLRRRAAGRAQEARPPRGPEPRHGAGDDLQRRPRLRRPRRLRRVQVHDAGDHRVGRLTAASEAAVLRPLPVCHILKHLKIDLGAITLPLDCFSQY

SEQ ID NO: 67156 - protein, 345 aa, Oryza sativa
  Clone ID: UC-OSROM202033D05_FLI.pep
GRKGEGEQEMRMLSKACSLVASSLPRCSSSAAPTIRGQPSLLPSVRKEWLGKPLLYGIGTLLVMPLRTLHGVGRMFGAGRFLCNMTSVSSSLQIELVPCLQDNYAYILHDVDTGTVGVVDPSEATPIINALEKRNQNLTYILNTHHHYDHTGGNLELKAKYGAKVIGSAKDRDRIPGIDITLSEGDTWMFAGHQVLVMETPGHTSGHVCYHFPGSGAIFTGDTLFSLSCGKLFEGTPQQMYSSLQKIIALPDETRVYCGHEYTLSNSKFALSIEPGNKDLQEYAANAADLRKRNTPTVPTTIGREKQCNPFLRTSSPEIKNTLSIPDHFDDARVLEVVRRAKDNF

SEQ ID NO: 67157 - protein, 411 aa, Zea mays subsp. mexicana
  Clone ID: UC-ZMROTEOSINTE049B04_FLI.pep
RNPGRLNSYLSDQRMVQVLTLMLNIKFQNQSSGAPDPAAAQSNPPPPKQQPEAKAREPEPDPEPEPMEVTEEDKEQKERKASAQKEKEAGNAAYKRKDFDTAIQHYTEAMELDDEDISYITNRAAVYLEMGKYDECIKDCDKAVERGRELHADFKMISRALTRKGTALAKLAKSSQDYDAAIEIFQKALTEHRNPDTLKKLNDAERAKKELEQQEYYDPRIADEEREKGNEFFKQQKYPEAVKHYTEALRRNPKDPRVYSNRAACYTKLGALPEGLKDAEKCIELDPTFSKGYTRKGAIQFFMKEYDKALETYQAGLKHDPKNQELLDGVRRCVEQINKASRGELSEEELKERQNKAMQDPEIQNILTDPIMQQVLTDLQENPRAAQAHLKNPGVMQKIQKLVSAGIVQMK

SEQ ID NO: 67158 - protein, 256 aa, Glycine max
  Clone ID: 700971082_FLI.pep
FGGRGRGGDRGRGRRRGPRREEEEKWVPVTKLGRLVKEGRIRSLEQIYLHSLPIKEHQIIDTLVGPTLKDEVMKITPVQKQTRAGQRTRFKAFVVVGDNNGHVGLGVECSKEVATAIRGAIILAKLSVIPVRRGYWGNKIGKPHTVPCKVTGKCGSVTVRMVPAPRGSGIVAARVPKKVLQFAGIDDVFTSSRGSTKTLGNFVKATFDCLMKTYGFLTPEFWKETRFSKSPFQEYTDLLAKPTGKTLILEEERVDA

SEQ ID NO: 67159 - protein, 269 aa, Glycine max
  Clone ID: 700751721_FLI.pep
KHTPLNYLCLFLHSLFSSSRAMDSGGHYNPRTVEEVFRDFKGRRAGMIKALTTDVEEFYQQCDPEKENLCLYGFPTEQWEVNLPAEEVPPELPEPALGINFARDGMQEKDWLSLVAVHSDAWLQSVAFYFGARFGFDKADRKRLFTMINDLPTIFEVVTGSAKKQTKEKSSENNGNKSKSSSKGRGSEPPKYSKQVKDEEEGLDEEDDDEHGETLCGACGENYASDEFWICCDICEKWFHGKCVKITPARAEHIKHYKCPSCSNKRPRP

SEQ ID NO: 67160 - protein, 268 aa, Glycine max
  Clone ID: 700831088_FLI.pep
FAMDESPANREGKNRAQGNEEQEDDDYMGDLSQFLPSDALFPPKLFSSKKISSKKDPSVNSSKNRLKTHSWQERRKLERERKQQEEDEQTLAKVEAPIAQSNIGFKLLKQMGYTPGSALGKQGSGRAEPVGIEIRRSRAGVGLEDPHKEKRKNEGIMMDRKRRKEEDLMKEFGSRQKSQWQSRRVIINYNKAKAALDQLENREIVEPQKNDDDAEGEEEEEEEITEEDLHDVLMKLRDEFNYCLFCGCQYESSDVLLGNCPGTNEDDH

SEQ ID NO: 67161 - protein, 222 aa, Glycine max
  Clone ID: 700833729_FLI.pep
HDPHLPLPYSFHLASFHPPLFNSFPLLLIYKIQTNLWILIISSFSTTMSSSSGKDLGEGSSSPTENYQQSPGTLSRYESQKRRDWNTFGQYLKNQRPPVPLSQCNCNHVLDFLRYLDQFGKTKVHLQGCMFYGQPEPPAPCTCPLRQAWGSLDALIGRLRAAYEENGGSPETNPFASGSIRVYLKEIRECQAKARGIPYKKKKKASNPSKGNDESSSTMHFS

SEQ ID NO: 67162 - protein, 101 aa, Glycine max
  Clone ID: 700966994_FLI.pep
TYQTHNFNKMKYHSLILCSYFFNTLSTQLEIAEELDKLSARLDNLDEMISSSMASDPQVQSLLSDTADVWMPVITATSEERRNFTAATGDSTLQTDVEKSK

SEQ ID NO: 67163 - protein, 548 aa, Glycine max
  Clone ID: 701152225_FLI.pep
IAGRCRRATIKPMRSLVPKGSSRSMTCLCLTHSLTQTHSHNLLATTFSSSLYNSNNRNPLFQLFSGILRPRIRAFSTDFRSAPTPTASSSAFAQSMANFDADSVTYLKQRDAAEIDETLMGPLGFSVDQLMELAGLSVATSISEVYKPSEYSRVLTICGPGNNGGDGLVAARHLHHFGYKPFVCYPKRTPKPLYAGLVTQLEALSIPFFSVEELPSDLSNGFDVVIDAMFGFSFHGSPRPPFDDLIQRLVSLHNNNNNQIGQKRSVIVSVDIPSGWHVEEGDVDGTGIKPDMLVSLTAPKLGAKKFGGPHHFLGGRFVPPAIAEKYKLILPPYPGTSMCVRIGKPPRIGISALRENYISPEFLEEQVEADPFNQFHKWFNDALAAGLKEPNAMSLSTVGKDGKPSSRMVLLKGLDKEGFVWYTNYESRKARELSENPRASLLFYWDGLNRQVRVEGPVQKVSDEESEQYFHSRPRGSQIGAIVSKQSTVVPGRHVLYQKYKELEEKYSDGSLIPKPKNWGGYRLTPQLFEFWQGQKSRLHDRWLLPRL

SEQ ID NO: 67164 - protein, 133 aa, Glycine max
  Clone ID: 700984068_FLI.pep
ILENNNDLLFDLLSLHFVDLVCSKEWAEALEFAQTKLSPFSVKEQKYMEKIEGFMSLLAYENPVECPMFHLIGLDYRQQVVDSLNQTILAHFNLPIHTAMERLIQQTSVVRQCLSLEDGGPPPFSLKDILKSQ

SEQ ID NO: 67165 - protein, 448 aa, Glycine max
  Clone ID: 701211492_FLI.pep
EEKDMAVSAAKFDVVILGASGFTGKQVLKEALKFLNSNHFTSLAIAGRDPSKLAQTLKWAAQPNPPPQIPILAADTADPPSLRSLCDQTRLLLNCVGPFRRHGEPVVAACVACGCDYLDITGESEFMERVEREYHAEATKKGSLVVSACGFDSVPAEMGFLFHSRQWVGPARPNRVGAYLSLESDKRIVGNFGTFESAVMAVKDLKEMERSRVTRVIPEIPGPPPKGEIIEHQKKIGLWGVTLPSADATLVGRTLSTLTESPHGLPGLNENAEMVEKRKAYWTSVKPAHFGVKIGSKSLLHVFGFILIGIIIGVLGRTSFGRWLLLKYPSIFTFGGFSKNGPSEEEIASASFKMWFVGHGFSNESLAAQGNTKPDMEIITRVMGPEMGYVTTPIIMVQCALVLHGQRKNLPKGGVYTPGIVFGPTDLQERLQQNGISFDVISKSSISS

SEQ ID NO: 67166 - protein, 489 aa, Glycine max
  Clone ID: 700563995_FLI.pep
FGLGLISLLTGHMASDLEWYSHRRSLYSTMDGSYRAPIDVWKSQYSKYYYGCAERGRGYAPAVPERMSNGYLLIGTSGGLNQQRTGITDAVVVARILNATLVVPELDHHSYWKDDSDFIHIFDVDWFISYLAKDVTIVKRVPDKFMRSMEKPPYTMRVPRKSEPDYYLDQVLPILLRRQVVQLTKFDYRLANNLDDELQKLRCRVNFHALRFTKPIQELGQRIVMRMQKMAPRFIAVHLRFEPDMLAFSGCYFGGGEKERRELGEIRKRWTTLPDLSPDGERKRGKCPLSPHEVGLMLRALGFSNDTYLYVASGEVYGGEETMQPLRDLFPNIYTKEMLAEEELKPFLPFSSRLAAIDYIVCDESDVFVTNNNGNMAKILAGRRRYMGHKRTIRPNAKKLSTLLAGRHQMDWDTFAKKVKSCQRGFMGEPDEMRPGRGEFHEFPSSCVCRRPYVDEELSKEVYRSPKLVAINLTAKAYSSSNGIRRGRT

SEQ ID NO: 67167 - protein, 285 aa, Glycine max
  Clone ID: 700684429_FLI.pep
RKPEQKTKQNSKLSFTAMPATPFSCSFLTLQPRFNSYVNPIFRSLTFQLSSSPLPFNANFSSVRLHSSLSRAAETDSPTGGRSGALTPGPAVAGEVQKIDVNPPKGTRDFPPEDMRLRNWLFNHFKEVSRLYGFEEVDYPVLESEALFTRKAGEEIKDQLYCFEDRGNRRVALRPELTPSLARLVIQKGKSVSLPIKWFTVGQCWRYERMTRGRRREHYQWNMDIIGVPGVMAEAELIASIVTLFKRIGITESDVGFKVSSRKVLQEVLLLFSTRKFIWQGLRHY

SEQ ID NO: 67168 - protein, 373 aa, Glycine max
  Clone ID: 700697955_FLI.pep
LLIWKRDKPARVEMATSTCFLCPSTASLKGRARFRIRIRCSSSVSVNIRREPEPVTTLVKAFAPATVANLGPGFDFLGCAVDGLGDIVSVKVDPQVHPGEICISDISGHAPNKLSKNPLWNCAGIAAIEVMKMLSIRSVGLSLSLEKGLPLGSGLGSSAASAAAAAVAVNELFGKKLSVEELVLASLKSEEKVSGYHADNVAPSIMGGFVLIGSYSPLELMPLKFPAEKELYFVLVTPEFEAPTKKMRAALPTEIGMPHHVWNCSQAGALVASVLQGDVVGLGKALSSDKIVEPRRAPLIPGMEAVKRAAIQAGAFGCTISGAGPTAVAVIDDEQTGHLIAKHMIDAFLHVGNLKASANVKQLDRLGARRIPN

SEQ ID NO: 67169 - protein, 537 aa, Glycine max
  Clone ID: 700852313_FLI.pep
KNLYLLLIQMADSTPLLSQPNPSSSSSPDTQEAPPSNQHHPSLGSTVELCIGEFNWSQFLQSILVSLAWIFDAQQTFISVFTDALPEWHCTERGANACKTATTVCSLPKGSWAWDVPTQASIVSEWGLECANSAITGLPASMFFLGCLIGGFVLASLADSSLGRKNMLFFSCLVMAITSLLVTLSPNVWIYSALKFLCGFARATIGTSALVLASELVGKRWRGQISVIGFFCFTIGFLSLPAMAYINRSSSWRNLYLWTSISTMFYCILVKLFVTESPRWLLVRGKTEEAVETLKCITSITQSNLNLAINNMSHKEETWNVDIFSALKILLQKKWSSRRLSLIMAMGIGIGLVYYGMPLGLQNLSFNLYLSVTFNALSELPSALIVLFFVDKFNRRVALLLFTILSGVFSVMSIMEMKTSSWTNNIQIVFELVSFFSACSSFNVYLIYTTELFPTCVRNSALSMARLAVVLGGTFSPLLVSAARGNKFMCYGVFGLVIGFSGVFGIFLPETKGRALCDTMDEEENKEKNMTCDMFLA

SEQ ID NO: 67170 - protein, 450 aa, Glycine max
  Clone ID: 701039084_FLI.pep
QEPLLSATAMTVASAASSRTKRLVKLTLSLLRLGFNSSKCKTAAKMAVARIKLLRNKREVVVRQMRRDIALLLQSGQDATARIRVEHVMREQNVLAANEFIELFCELVVARLPIISKQRECPADLKEGIASLIFAAPRCSEIPELVALKNIFDKKYGKDFVSAAVDLRPSCGVNRQLIEKLSVRTPPGEVKLKVLKEIAKEHQIDWDTTESETELLKPPEELIVGPRAFVSASSLPVKHSSNVSVESNQPATRLSGGGRTEAVYYEDSKSAAEAAAEAAKKAIAAAEVAAYMAMKESIEAPQPYAYNDKLYNSGVNSGTFQSNNPAKCGQNMTPKSTTEEKMYRSQSVPRSDHLNSEDTLPDQYGGNDYRRHSYHPTSAHSDIKFDESDCDEEIEAEEPPVVTMPPNRFPSPVPSSMVKQDSRIHVHPKLPDYDELAARFDALKFKKSQS

SEQ ID NO: 67171 - protein, 534 aa, Glycine max
  Clone ID: 701042019_FLI.pep
LSATSCTNPPFSMGQSPSTSAAPPSDLNRLQIAQLHPNTDSDSTDYTLRLSDDCLAAIFHFLNTADRKRCSLVCLRWRLVDGQRRHRLSLNAQPELLDFVPSLFNRFDSVTKLALRCDRKCASINDEALVLISLRCRNLTRLKLRGCRDITELGMAGVGDNCKALKKLSCASCMFGAKGIAAVLDRCFTLEDLTLKRLRGVHHIGDMAVGAAASLKSICLKELVNGQSFAPLLIGSKKLQTLKVIGCTGDWDETLVRVGCSNNGLVEVHLEKLQVTDVGLVAVSKCLGLDTLHVVKTAECSDVGLCAVAERCKLLRKVHIDGWRTNRIGDDGLVAIAKHCLNLQELVLIGVYPTFSSLAAIASNCGNLERLTLCGIGTVGDAEIECIADKCVALRKLCIKGCPVSNAGIGALASGCPNLVKLKVKKCKRITGKGVEWVREQRVSLAFNYDDSEFEALDGGASDGVGGAQHNTVEFLPNIINQTTVAEAEASSSNNNNRMTMLRSRFGFSAGRNLVPGAFRRWSNSDNVSSSSFG

SEQ ID NO: 67172 - protein, 376 aa, Glycine max
  Clone ID: 700785919_FLI.pep
VGVYCSFNQLLECGFYHADPHPGNLLRTYDGKLAYLDFGMTGEFKQELRDGFIEACLHLVNRDFDALAKDFVTLGLLPPTADKEAVTKALTGVFQNAVAKGVSNISFGDLLGNLGTTMYKFKFRIPSYFSLVIRSLAVLEGIAISFNPEYKVLGSTYPWIARKVLTDNSPQLKSSLETLLYKDGVFRIDRLESLVTESLRAKTEKAIVKQTEGTDSTMVMKEILSFTLTEKGEFVREIIVQEFAKGLDALGLATMETAAARVPFSSFFYSPLMTKEDIINLRNFRRLMLLLLGARRKEESSTESKQASPDKNQILYMEELSLVLNQVESIQDILPIISVILELPPESQQQLLQLPVNLVRKLISRAAARTVRRAFL

SEQ ID NO: 67173 - protein, 510 aa, Glycine max
  Clone ID: 700734511_FLI.pep
GNLKARRVFASMAMAMAEASRITLHSTLLPFFTPKTHVGHRHLSLSSSRKHQVQCSVSAGAAAQTNPVAWGCEIDSLENSSALQRWLSESGLPPQKMGIERVEVGERGLVALKNIRKGEKLLFVPPSLVITPDSEWSCPEAGEVLKRNSVPDWLLLATYLISEASLMESSRWSNYISALPRQPYSLLYWTQAELDRYLEASQIRERAIERINNVIGTYNDLRLRIFSKYPDLFPDEVFNIESFKWSFGILFSRLVRLPSMGGNVALVPWADMLNHSCDVETFLDYDKTSKGIVFTTDRPYQPGEQVFISYGKKSNGELLLSYGFVPKEGANPSDSVELSLSLKKSDASYKEKLELLKNYGLSASQCFPIQITGWPLELMAYAYLAVSPSSMRGDFEEMAAAASNNTTSKKDLRYPEIEEQALQFILDSCESSISKYNKFLQASGSLDLDVTSPKQLNRRLFLKQLAVDLCTSERRILFRAQYILRRKLRDMRAGELRALKIFNGFRNLFQ

SEQ ID NO: 67174 - protein, 225 aa, Zea mays
  Clone ID: LIB4758-067-G8_FLI.pep
MAASSYFLLAAFLAVTASHATASDPSPLQDFCVADIHSPVKVNGFVCKDPMAVTPDDFFKAANLDKARDTMKSKVGSNVTLINVIQLPGLNTLGISLARIDYAPLGENPPHTHPRATEILTVLEGTLYVGFVTSNPNKLFAKVLNKGDVFVFPQGLIHFQFNPVYDKPAVAIAALSSQNPGVITIANAVFGSKPPISDDVLAKAFQVEKGTIDWLQAQFWENNHY

SEQ ID NO: 67175 - protein, 225 aa, Zea mays
  Clone ID: LIB4758-068-E9_FLI.pep
KMSLMIMERGDEELKLLGMWASPFVLRVQLALSLKGLSYEYVEVDISNKSELLLHSNPVHNKVPVLIHNGNPVCESQLILQYIDEAFAATGPCLLPADPYERAVARFWAAYIDDKVLASWMQASRGKTEEDRAEGRNQWLVVVETLEGALRDCAAGKGMMMPFFGGDSVGYVDVVLGSLLGWVSANQEVWGIECFHPRRAPLTASPHCKPSRRWCPKSAGWLSSA

SEQ ID NO: 67176 - protein, 152 aa, Zea mays
  Clone ID: LIB4758-069-C1_FLI.pep
GQSSESILHRHPMAATALSMSILRAPPPCFSSPLRLRVAVAKPLAAPMRRQLLRAQATYNVKLITPEGEVELQVPDDVYILDFAEEEGIDLPFSCRAGSCSSCAGKVVSGSVDQSDQSFLNDNQVADGWVLTCAAYPTSDVVIETHKEDDLL

SEQ ID NO: 67177 - protein, 197 aa, Zea mays
  Clone ID: LIB4758-069-H10_FLI.pep
GSLTPNQSHRRSSWTTMASPLLKSHSQLAAAAALHSVRRADRCPATIHLGKFHDHGLRSGRSKRSGLAKVGAFPSLDVVPLMVTMVEHVDMSRDYVVTKSIWHLSDVALKSVYTFYAMFTVWGVCFFASMKDPFYDSETYRSQGGDGTVHWYYDRQEDLEASAREELLREELLEEIEQRVGGLRELEEASKEEQLTK

SEQ ID NO: 67178 - protein, 273 aa, Zea mays
  Clone ID: LIB4758-070-B12_FLI.pep
REASASSRRLTPSANRRALTLSICAVSHSLPPPPPPYATQKAPQDSPLLKTHSMASATGVSSSEMAVDHATGPGAVDKPRFDALTPNEMSGGRPQFRKVPVPQHRFAPLKRCWMEIYTPVYEHMKIDIRMNLKARRVELKTRQDTPDVSNLQKCADFVHAFMLGFDIADAVALLRLDDLYVDSFEIKDVKTLRGEHLSRAIGRLSGKGGKTKYAIENSTRTRIVIADTKIHILGSFVNIKVARDSLCSLILGSPAGKVYSKLRAVSARLAERY

SEQ ID NO: 67179 - protein, 171 aa, Zea mays; identical to SEQ ID NO: 67070
  Clone ID: LIB4758-070-C3_FLI.pep

SEQ ID NO: 67180 - protein, 199 aa, Zea mays
  Clone ID: LIB4758-071-A6_FLI.pep
HQREAEGERQRGEGRLGRLDMAAKAHVLVLPMPCQGHVTPLMELSHLLVDQGFEVTFVNTDVDRAAVVAALEASGGGGGVAALGGGIHLASIPDGLADDEDRKDISKLVDAYTRHMPGYLERLLADMEAAGRPRAKWLVADTNMGWSFEVAKKLGIRVVSFWPAATACLAFMLKIPKLIQDGLLDDKGNPRLFTCSLNL

SEQ ID NO: 67181 - protein, 470 aa, Zea mays
  Clone ID: LIB4758-071-E7_FLI.pep
RDLISSALSAIQTHPSQQPMAAAAPRLLLAVAGLLTLAVLAAAVSPSLAAGPPVLQDPAELLRLAKEPAFADWMVGVRRRIHENPELGYEEFQTSELVRRELDAMGIPYKHPFAVTGVVATVGTGGPPFVALRADMDALPLQESVEWEHKSKVPGKMHGCGHDAHVAMLLGSAKILQEHRDELKGTVVLVFQPAEEGGGGAKKTIEDRAVENIDAIFGLHIADSVPIGVLASRPGPIMAGSGFFEAVISGKGGHAALPHHTIDPILAASNVIVSLQQLVSREADPLDSQVVTVGKFQGGGAFNVIPDSVTIGGTFRAFLKESFNQLKQRIEEVIVSQASVQRCSAAVDFLSKDRPFFPPTINSPELHDFFVNVAGEMVGSRNVRDRQPLMGAEDFAFYAEAVPSTYYYFVGMYNETRGPQAPHHSPYFTINEDALPYGAAGQAALAARYLLERQQPAAATADKAETHDEL

SEQ ID NO: 67182 - protein, 115 aa, Zea mays
  Clone ID: LIB4758-073-H11_FLI.pep
RAAAAAVVFGLPCSPSRDQVAAAVVPQPSSCRTRRVRRWTSTSPGSARPRTGSSLPRIMPLSRSTLATWMRMACTMVTSPRLLSLGLSVLRVMLTARWTGCGRRRRLRSSSRSCT

SEQ ID NO: 67183 - protein, 186 aa, Zea mays
  Clone ID: LIB4758-073-H4_FLI.pep
GAAPHDFRRVRAHLRAPPPPLDAQRAAMAEQTEKAFLKQPKVFLSSKKSGKGKKPGKGGNRFWKSIGLGFKTPREAIEGTYIDKKCPFTGTVSIRGRIIAGTCHSAKMNRTIIVRRNYLHFVKKYQRYEKRHSNIPAHISPCFRVKEGDHVIIGQCRPLSKTVRFNVVKVIPAGSAAAGKKAFTAA

SEQ ID NO: 67184 - protein, 193 aa, Zea mays; identical to SEQ ID NO: 46899
  Clone ID: LIB4758-075-A5_FLI.pep

SEQ ID NO: 67185 - protein, 277 aa, Zea mays
  Clone ID: LIB4758-075-B12_FLI.pep
SHVSIRWEIHRYFLLGCNRIENKTDGYFLKKKKMTDANNAIRKLYDVCRASLSEKGPLSPRDSLDNVRAALDMVTPSDVGLEREAGAVRAWSPRAALGRKRIFHSSPAIRYRHIYECASFSIGMFCMPASSIIPLHNHPGMTVLGKVLYGAARVRSYRWIESAGSSINLSKARPAKVVRDGEMSAPCGAMVLRPEEGGDVHALRAITPCAVLHILTPPYSSQDGRHCSYFRRRPRSHPSGVLLNRTGGSEFVWLEEYQPRHNFIIRRDLYTGPALKL

SEQ ID NO: 67186 - protein, 159 aa, Zea mays
  Clone ID: LIB4758-075-G4_FLI.pep
SRGRPRVVNDDVCRQCSCSSSSSFPAAARAWWVSVSSSRRPVRGAIIMAAVETVVLKVAMSCEGCAGAVRRVLSKMEGVETFDIDLKEQKVTVKGNVKPEDVFQTVSKSGKRTSYWEGEATAPDAAAAPEAEAAPGTAAEAPPAAAPAAPEITPAKADA

SEQ ID NO: 67187 - protein, 433 aa, Zea mays
  Clone ID: LIB4758-078-D1_FLI.pep
GKNGRGMQRSLPLPLPPQTTPCLQAPATAMSALGTLSGGAAGVSGLLRLRRRVAPALAAPSHHAAGTLNCAALPDAAPLVWGRQLRPSLLLPATLLPSSSQGARRHTPRRPAAAAGEAKSVGFLEKYPALVTGFFFFMWHFLNVIFNILNKKIYNYFPYPYFVSLIHLVVGVVYCLISWSVGLPKRAPINGTPLKLLFPVALCHGIGHITSNVSFAAVAVSFAHTIKALEPFFSAAATQFILGQQVPFSLWLSLAPVVIGVSMASLTELSFNWTGFINAMISNISFTYRSIYSKKAMTDMDSTNVYAYISIIALIVCIPPAVIFEGPRLMQHGFSDAIAKVGLTKFVSDLFLVGLFYHLYNQIATNTLERVAPLTHAVGNVLKRVFVIGFSIVVFGNKISTQTGIGTSIAIAGVAMYSYIKAKIEEEKRKKSA

SEQ ID NO: 67188 - protein, 157 aa, Zea mays; identical to SEQ ID NO: 47761
  Clone ID: LIB4758-079-A9_FLI.pep

SEQ ID NO: 67189 - protein, 136 aa, Zea mays; identical to SEQ ID NO: 36723
  Clone ID: LIB4758-080-C7_FLI.pep

SEQ ID NO: 67190 - protein, 124 aa, Zea mays
  Clone ID: LIB4758-082-B5_FLI.pep
MCANQGSVVVLRLKQAIRAPWELLVADVQIWVRRRLIEVGVALGQVVRRQEGAGHDPGVGDLLPLGRLIGVVVDGGGHAAPQRGGARRQRPETGSRRRRSHGWCRWFGGNGLGCVVRSGERGSR

SEQ ID NO: 67191 - protein, 363 aa, Zea mays; identical to SEQ ID NO: 42242
  Clone ID: LIB4758-083-D10_FLI.pep

SEQ ID NO: 67192 - protein, 169 aa, Zea mays
  Clone ID: LIB4758-083-F10_FLI.pep
ASFPVYDSNDDEMASPLRRSFPSLGRALLTPAPARMLSAEASDALVEIKPREIGMVSGIPEEHLRRKVVIYSPARTASQQGSGKVGRWKINFLSTQKWENPLMGWTSTGDPYANVGEAGLTFNSAESAKAFAEKHGWNYVVRKRHTPLLKPKAYAENFKWKGPPKAEQA

SEQ ID NO: 67193 - protein, 271 aa, Zea mays
  Clone ID: LIB4758-083-H5_FLI.pep
GKIKHSLTIPGSPHCPVPRELLLYTRQREPANPNLLDRRTVPKAAGPSSAMIQLLFSLLAAEAALVLALLFPTPVRRLALLAIDRAKRGRGPVMAKTIAGTMLLVLVSAFYSVAKIRRREGELGQLTPTDQVLASRHLLEASLMGYSLFLGLIIDRLHHYIRELRMLRKDMEAVTGQGRTLEAAKSGSTDEIQGYQKEVASLKEQVQGLQNQSQKKTERLKTAEANSVALQKQSEGLLAEYDRLIAENRDLRDQLQSIDLRLSHSGGKKNS

SEQ ID NO: 67194 - protein, 246 aa, Zea mays
  Clone ID: LIB4758-084-G9_FLI.pep
RGHFTTASPHPLPLPSRQSTACLPLPSPPMATVARTLVAACPARSLLRLRSRRLPSSSSICPARQRAGVGSVRCMARRPDSSYSPLRSGQGGDRAPTEMAPLFPGCDYEHWLIVMDKPGGEGATKQQMIDCYIQTLAQVLGSEEEAKKKIYNVSCERYFGFGCEIDEETSNKLEGLPGVLFVLPDSYVDAENKDYGAELFVNGEIVQRSPERQRRVEPVPQRAQDRPRYSDRTRYVKRRENQSYQR

SEQ ID NO: 67195 - protein, 420 aa, Zea mays
  Clone ID: LIB4759-002-C6_FLI.pep
GLSPRRASKSSEPPARPPPSPPPVPKANSFQVAMADQANQPTVLHKLGGQFHLRSIISEGVRARNICPSVSSYERRFATRNYMTQSLLGPSMSVSGGINVPVMRTPLCANAPAEKGGKNSMIDFMMGGVSAAVSKTAAAPIERVKLLIQNQDEMIKSGGLSEPYKGIVDCFKRTIKDEGFSSLWRGNTANVIRYFPTQALNFAFKDYFKRLFNFKKDRDGYWKWFAGNLASGGAAGASSLFFVYSLDYARTRLANDAKAAKGGGERQFNGLVDVYRKTLKSDGIAGLYRGFNISCVGIIVYRGLYFGLYDSIKPVVLTGNLQDNFFASFALGWLITNGAGLASYPIDTVRRRMMMTSGEAVKYKSSLDAFQQILKKEGPKSLFKGAGANILRAIAGAGVLSGYDQLQILFFGKKYGSGGA

SEQ ID NO: 67196 - protein, 294 aa, Zea mays
  Clone ID: LIB4759-028-E1_FLI.pep
PSLPLCFPLPMESCSFRAATAPSPFPSAPSSSSSPRAPCPILRFPVGDFLLRLPRKGRQIGVRRRASGFDAFASFAGKVFVDEAIGAEYGEGFETFRMDGPLKVDVDYLNEKLQECFLQRIRHAMKPDEAFGLIFSWDNVIADTDSLKLNAWRQLALEEGKDIPSGAHVRKSIIHGAADHVLRKVLYWAKEEDKMEKLKARLIELYYENLFKLDTPVEGLREWLDAVQTAGIPCAVASPLDRRCMIEALDRMALSKYFKAIVTDEDDMESIANRFLSAAMKACSCPTSNRCTSC

SEQ ID NO: 67197 - protein, 306 aa, Zea mays; identical to SEQ ID NO: 59000
  Clone ID: LIB4759-028-E5_FLI.pep

SEQ ID NO: 67198 - protein, 396 aa, Zea mays
  Clone ID: LIB4759-032-A6_FLI.pep
FVFFHKLQNPSAAAAMSSSPSPANRRPRGPLALGLESSANKIGIGVVSLSGDILSNPRHTYVTPPGHGFLPRETAQHHLAHLLPLLRAALAESGVAPADLACVCYTKGPGMGGPLQVAAAAARALSLLWRKPLVAVNHCVAHIEMGRAVTGAVDPVVLYVSGGNTQVIAYSEGRYRIFGETIDIAVGNCLDRFARVLELSNDPSPGYNIEQLAKKGEKFIDVPYVVKGMDVSFSGILSFIEAAAIEKLKNNECTPADLCYSLQETIFAMLVEITERAMAHCDSKDVLIVGGVGCNERLQEMMKIMCSERGGRLFATDDRYCVDNGAMIAYTGLLAYAHGMTTPLEESTFTQRFRTDEVHAIWREKEMPVLNNTHSDAIAEVSKDEASMATPIVIDY

SEQ ID NO: 67199 - protein, 311 aa, Zea mays; identical to SEQ ID NO: 42276
  Clone ID: LIB4759-032-H6_FLI.pep

SEQ ID NO: 67200 - protein, 380 aa, Zea mays
  Clone ID: LIB4759-036-H6_FLI.pep
ARKEAKGTMDSSGGGGGAQIKGMATHGGRYVLYNVYGNLFEVSSKYAPPIRPIGRGAYGIVCAAVNSQSGEEVAIKKVGNAFDNHIDAKRTLREIKLLRHMDHENILALKDVIRPPTRENFNDVYIVTELMDTDLHQIVRSNQPLTDDHCQYFLYQLLRGLKYVHSANILHRDLKPSNLFLNANCDLKIADFGLARTTSETDLMTEYVVTRWYRAPELLLNCSQYTAAIDVWSVGCILGEIVTRQPLFPGRDYIQQLKLITELIGSPDDASLGFLRSDNAKRYMKQLPQFPRQDFRLRFRNMSPGAVDLLERMLVFDPSRRITVDEALHHPYLASLHEINDEPTCPAPFSFDFEQPSFTEAHIKELIWRESLAFNPEPPY

SEQ ID NO: 67201 - protein, 344 aa, Zea mays; identical to SEQ ID NO: 52656
  Clone ID: LIB4759-038-D9_FLI.pep

SEQ ID NO: 67202 - protein, 252 aa, Zea mays
  Clone ID: LIB4759-039-A4_FLI.pep
AACLRRRGKGRGAEPATVFGVAGGDWLRFRIKAGRTLPLLVGDLAESKSLVSGYRGAWFRCKIHNMRVRLGYLECYLEYIDYPGEKKEWVRLFRKNSARSNQNSSDSIHTMIRPSFPKWYFVHEVPEQFPNSDVTAIVDETWQIGDRVDWLKEGCYWSGTITKIINEDLVEIELPAPPIGEGKCYKAKCSDLRPTLEWSLARGWMVPLSQANGKGWHAARLLQHYKSESDDDNDDNDSCDAPANGVQSFKHA

SEQ ID NO: 67203 - protein, 182 aa, Zea mays
  Clone ID: LIB4759-041-E11_FLI.pep
GHLLARHIHRIHLQMSASGDPLDVLPAAVLADVLGRVADAGDIAACRLASRTLLAASYICPRVRLCAADRARRRREGGGGSPAFRATTANLASLLGPHLRSLSLDTAGGQGSPDDAMWVEEGEFDEADGLHLTCGEAVAAWATTSAGTVLRELDIADYWPQACWRKAEALPLISHYCMRAFF

SEQ ID NO: 67204 - protein, 306 aa, Zea mays; identical to SEQ ID NO: 59000
  Clone ID: LIB4759-043-H8_FLI.pep

SEQ ID NO: 67205 - protein, 316 aa, Zea mays; identical to SEQ ID NO: 48083
  Clone ID: LIB4760-001-E6_FLI.pep

SEQ ID NO: 67206 - protein, 257 aa, Zea mays
  Clone ID: LIB4760-001-G4_FLI.pep
YQLATYIVKYTSNILAPMGAKIFALLALLALSASAATSTFIPQCSQQYLSPVTAAGFQYPTIQSYMVQEAIQASILRSLALTLQQPYALLQQPSLVHLYLQRIAAQQLQQQLLPTINQVVAANLAAYLQQQQFLPFNQLAGVNPAIYLQAQQLLPFNQLVGSPYAFLLQQQLLPFHLQAVANIVAFLRQQHLLPFYPQVVGNINAFLQQQQLLPFYPQNVANIVAFLQQQQLLPFSQHALTNPTTLLQPPTIGGAIF

SEQ ID NO: 67207 - protein, 200 aa, Zea mays
  Clone ID: LIB4760-003-A8_FLI.pep
SIIIQSRSAKRQCVERIVEQNSMKMVIVLVVCLALSAASASAMQMPCPCAGLQGLYGAGAGLTTMMGAGGLYPYAEYLRQPQCSPLAAAPYYAGCGQTSAMYQPLRQQCCQQQMRMMDVQSVAQQLQMMMQLERAAAASSSLYEPALMQQQQQLLAAQGLNPMAMMMAQNMPAMGGLYQYQLPSYRTTSCGVSAAIPPYY

SEQ ID NO: 67208 - protein, 214 aa, Zea mays
  Clone ID: LIB4760-004-F8_FLI.pep
PPPLDVSLAISSSTPDWRTRHHEGADRCPCSPGARCERRLQYKRRLWLPDTTVSSTASVLYAASVLSAAAAAAAAMAIPHSTTAAKPVPAVRILRRRQRRQPVPGPVRRVPEAPVQPGGDALRLATVPGAAAAVLPPDQAGGAAAPVPGDIRCGPAVLPAAAAAGRARGADGGPGSAAADGDVRPAAAAARSLPLQRSCRRCLLLRKLCTVVIM

SEQ ID NO: 67209 - protein, 227 aa, Zea mays
  Clone ID: LIB4760-005-D9_FLI.pep
NKSGSPLIIVPDERSEKCIHLLAVLLIQTYELATSSFLMHYALRSYLEGIVPPPRIQGHSATPLMVARLHSASVTRVAANPLCTSRGQPGRSSRRPSSCASGPGGIAPSMRMLSAVHRQYAGMSASSRQHLLFSSGHGRRGPMPQVRLVTYQRQLGSGLCGMAHPGTQEVPALALAAASTESRTAAARMRRRWLLLDDDAINSPVDGLSMDFLVQFALVTWKIRPAS

SEQ ID NO: 67210 - protein, 229 aa, Zea mays
  Clone ID: LIB4760-005-G11_FLI.pep
KLQCCFHIIASILQLYTSHCLIYSIVRTQYIFVNFGENFSFQTTYQALTCGTGTKRPLELFTFRDTTEQQPCTRSLTLSLVEQGESHVVVALFLLLFLLLLLGSFGRSTTRRGGGRAAAAAATNHHRATTDDHLEDGGAGGDHGEGRLDAGRGVGRGGGGDEAALQLVGGGGGRLDLAGVLLGGPLAAAGAAAHEGVDAHLSSLVPCVRACAAARVSGKKGAEALVGEP

SEQ ID NO: 67211 - protein, 214 aa, Zea mays; identical to SEQ ID NO: 67208
  Clone ID: LIB4760-006-C3_FLI.pep

SEQ ID NO: 67212 - protein, 226 aa, Zea mays
  Clone ID: LIB4760-012-F8_FLI.pep
LYHKNKSGSPLIIVPDERSEKCIHLLAVLIIQTYELATSSFLMHYALRSYLEGIVPPPRIQGHSATPLMVARLHSASVTRVAANPLCTSRGQPGRSSRRPSSCASGPGGIAPSMRMLSAVHRQYAGMSASSRQHLLFSSGHGRRGPMPQVRLVTYQRQLGSGLCGMAHPGTQEVPALALAAASTESRTAAARMRRRWLLLDDDAINSPVDGLSMDFLVQFALVTWK

SEQ ID NO: 67213 - protein, 277 aa, Zea mays
  Clone ID: LIB4760-017-D10_FLI.pep
QHRKHNIVPIMAAKIFCLIMLLGLSASAATASIFPQCSQAPIASLLPPYLSPAMSSVCENPILLPYRIQQAIAAGILPLSPLFLQQSSALLQQLPLVHLLAQNIRAQQLQQLVLANLAAYSQQQQLPLVHLLAQNIRAQQLQQLVLANLAAYSQQQQFLPFNQLAALNSAAYLQQQQLLPFSQLAAAYPRQFLPFNQLAALNSHAYVQQQQLLPFSQLAAVSPAAFLTQQHLLPFYLHTAPNVGTLLQLQQLLPFDQLALTNPAVFYQQPIIGGALF

SEQ ID NO: 67214 - protein, 125 aa, Zea mays
  Clone ID: LIB4760-024-F1_FLI.pep
DPTGNCSRHLNFITLVPPITVSPITTVIFGAFVGTKHQGTKTASTCAGKPYCQLSVTKVYSIQPTGYIELCCLFATITTTIQPTSCCEPVAFLHSSSCCRSTRTMWLTQPPSYNCNNCRHSTNLR

SEQ ID NO: 67215 - protein, 131 aa, Zea mays
  Clone ID: LIB4761-005-A1_FLI.pep
FRSLYPLLDPPLPPAFHSRMTTLRNLKIKTSTCKRIVKELRSYEKEVEKEAAKTADMKEKGADPYDLKQQENVLAESRMMVPDCHKRLETALADLKATLAELKESNEQGAEIGEAESTIAEVEAVVKPAED

SEQ ID NO: 67216 - protein, 163 aa, Zea mays
  Clone ID: LIB4761-006-D1_FLI.pep
PVLKAVMILCLVSTNTAFILVLINIHFFCSIFCSMVNHRGVHCPSDMLAHNHQILQGIFQYILCCISCCLKSYVHFLLRRMRDGISTKCYPWVLVEDESGGVGEGVVLVHDGESRRRRVCQRPVLHRRAASLRSGEQRTVILEGGGRPTAAASVSGGCVRPAS

SEQ ID NO: 67217 - protein, 216 aa, Zea mays
  Clone ID: LIB4762-002-E2_FLI.pep
LHHLNRPLLDITSCMILMCTQKGHGKVQLVCLIFHFNSFIDNGDRSSLGHHDLDELLVVDLAVAVNIGLTDHLVDLLVSQLLAEVGHDMAELSSRDETILVLVEDAKGLLKLLLGVGVLHLPCHQVQELWEVNGPIAISINLVDHVLQLCFSGVLAKGAHHSSKLLGSDAAVAILIEEAEGLLELRDLLVRELVRHGRWLRRGHAMGKKGKPRPAS

SEQ ID NO: 67218 - protein, 145 aa, Zea mays; identical to SEQ ID NO: 53346
  Clone ID: LIB4762-011-B8_FLI.pep

SEQ ID NO: 67219 - protein, 155 aa, Zea mays
  Clone ID: LIB4762-016-B9_FLI.pep
SCSDHELAEVDDGGCAEQQEDAAGGGRAGGGGAAGFVRVGGDHLRAGGVVAGAVHPLRDGEGQRAPLVVLQRRQEPQQRGADQRGPPGGVPLPQEPRQQRQERQHGHRRHHPRQVRRLRRIPHQHVHRLQQDQLSYDDQANKPTERTRTSRALHE

SEQ ID NO: 67220 - protein, 175 aa, Zea mays
  Clone ID: LIB4762-016-E5_FLI.pep
VSPCFSLMERRYRSQIIFIKVPCQSCRTGRLWEYMVYWRPCRSQQQPYRGQRRTLALRTATPTPRTCRCAGQGGRCRVPGRACRYPIPTRRSRGGACRGRCGGRRGGPCRRGVGGRKPRRVRRRRPGCGTLPRLASQPSLACSLTDLCESSCNEFGCTARRQPWRQSDRSPGRPR

SEQ ID NO: 67221 - protein, 160 aa, Zea mays
  Clone ID: LIB4762-016-H2_FLI.pep
SRPAGSCSDHELAEVDDGGCAEQQEDAAGGGRAGGGGAAGFVRVGGDHLRAGGVVAGAVHPLRDGEGQRAPLVVLQRRQEPQQRGADQRGPPGGVPLPQEPRQQRQERQHGHRRHHPRQVRRLRRIPHQHVHRLQQDQLSYDDQANKPTERTRTSRALHE

SEQ ID NO: 67222 - protein, 196 aa, Zea mays
  Clone ID: LIB4762-017-F11_FLI.pep
ARHRKHPPPSTSDITTTNSSSATAQALSPLMRRASWMSLGMMVTLLAWMAQRLVSSKSPTRYASAASCSAATAEDWNRRSVLKSCAISRTRRWKGSLRMSSSVLFWYLRISRSATVPGRKRCGFFTPPVAGADLRAALVASCFRGALPPVDLRAVCFVRAIRSGEEEGAVCTPGSGSGGGKGRFEDSRVSRPASRV

SEQ ID NO: 67223 - protein, 166 aa, Zea mays; identical to SEQ ID NO: 48191
  Clone ID: LIB4762-019-E11_FLI.pep

SEQ ID NO: 67224 - protein, 216 aa, Zea mays; identical to SEQ ID NO: 67217
  Clone ID: LIB4762-021-B2_FLI.pep

SEQ ID NO: 67225 - protein, 145 aa, Zea mays
  Clone ID: LIB4762-026-H3_FLI.pep
ISNVKTMIIAPTKVNWGLVHSIKLDLSVLLIGSTSSDNGYSLRRGFQVTYLSGEKSENRVLFPFFLKADHALSQSAEVSPLSLPLLSGEPREQRGEAVAPRTSRNLAVHPYMAGRQDSVDHARGALTRAAEIGNLGVFIKSYRKR

SEQ ID NO: 67226 - protein, 145 aa, Zea mays; identical to SEQ ID NO: 53346
  Clone ID: LIB4762-027-B6_FLI.pep

SEQ ID NO: 67227 - protein, 203 aa, Zea mays
  Clone ID: LIB4762-027-D2_FLI.pep
PRLPSIQLDQGTNREANAARVARSVATLGFTGGGAGMEAQNGSCGGAPLVLNVYDLTPMNNYLYWFGLGIFHSGIEVHGMEYGFGAHQFPASGVFEVEPKSCPGFIYRRSVWMGTTDLSRAEFRSFIENLAGKYNGNTYHLISKNCNHFTDDVCKSMTKKSIPGWVNRLARVGWYHQFNLSLSCHASEFRYLISFPPMFRFIF

SEQ ID NO: 67228 - protein, 145 aa, Zea mays; identical to SEQ ID NO: 53346
  Clone ID: LIB4762-028-E10_FLI.pep

SEQ ID NO: 67229 - protein, 197 aa, Zea mays
  Clone ID: LIB4762-031-G10_FLI.pep
CSLSSSIGCLHSPRRAEAMSSAPLQIAPVPEHVCYVHCNFCNTILAVSVPSHSMLNIVTVRCGHCTSLLSVNLRGLIQSLPVQNHHYSQQQENFTVQNMGFTENYPEYAPSYRMPTTLSAKGDLDHMLHVRGSNDCGFFVMSYMKSYDHNAGVISSFNQPDNSRDLRAHALHQLTFHRINKVLPLPLDIQRFMFARN

SEQ ID NO: 67230 - protein, 383 aa, Zea mays
  Clone ID: LIB4762-032-A2_FLI.pep
GSSSAANKTLLVIRARFPPCRPPVSLSPKHQIFLPLITRRSFSACACRAISRPWRRQDALVSVRARVCVVGVSESESESERTKRFGGRRPMGRAPCCDRTKGLKKGPWTPEEDKLLVDYIQTNGHGSWRLLPKLAGLNRCGKSCRLRWTNYLRPDIKRGPFTSEEQKSIVQLHAIVGNKWSMIAAQLPGRTDNEIKNYWNTHLKKQLRRMGLDEPPPGPAAGCPSARHMAQWETARLEAEARLSLLATAASSSSCGAIAATSASSSSSTVDLKTACARPADIFLRLWSSDIGDSFRRKTAAAPVVKGKDAVIKQESQALLLGPGDDSSAASNETEVAEALEEYQMFLDFAGEELGLFHGRHGGFSLFPPLDVLAEASLDTAFK

SEQ ID NO: 67231 - protein, 229 aa, Zea mays; identical to SEQ ID NO: 66711
  Clone ID: LIB4762-034-H2_FLI.pep

SEQ ID NO: 67232 - protein, 151 aa, Zea mays
  Clone ID: LIB4762-037-D5_FLI.pep
ADMAAAKIAPSMLSSDFANLASEAERMVRLGADWLHMDIMDGHFVPNLTIGAPVIQSLRKHTKAYLDCHLMVTKPSDYVEPFGKAGASGFTFHIEVARDNWQDLIQSIKSKGMRPGVSLRPGGSRKSGRIGSCDDSRAWFWWSEIYARNDG

SEQ ID NO: 67233 - protein, 235 aa, Zea mays
  Clone ID: LIB4762-041-D9_FLI.pep
ENKEKTMAVLLRRAAALLVVAAVCADGASTFYSSDPNLGSARVVFQTNFGDIEFGFFPHVAPKTVEHIFKLVRLGCYNTNHFFRVDKGFVAQVADVMSGRTAPMNEEQKKEAEKTIVGEFSSVKHVRGILSMGRHSDPDSAGSSFSILLGNSPHLDGQYAVFGRVTKGDDTLTKLERLPTRREGIFVMPIERINILSTYYYDIDLESCEAEKSILRRRLSESASEVERWRRKCFA

SEQ ID NO: 67234 - protein, 215 aa, Zea mays
  Clone ID: LIB4762-041-E2_FLI.pep
AGREILSVSLLLRIAIVVEVTCAGCFMGLYLWHIHKYNSLNGQPDILRSLYSALQPSNTLEDRRYHDARLSDQQMALLQYQRENIHYLSEEVLRLQECLSKYQRTAGTTPQVDLAHLLATRDQELRALTAEMNQVHSELQHARGLIDEKDSELQRIRLSNNQYVEENDRLRAILGEWSARAAKLERALEAERVSNVELRKNIAKFRGHLYKEQEA

SEQ ID NO: 67235 - protein, 150 aa, Zea mays; identical to SEQ ID NO: 46166
  Clone ID: LIB4762-043-C9_FLI.pep

SEQ ID NO: 67236 - protein, 132 aa, Zea mays
  Clone ID: LIB4762-044-F7_FLI.pep
TLEAGREFASIPRGTDETTEMKDGTSSGGGAFAAGSDPRQPSTAKPYAPPKLSPQDLPIDYAGFLAVAFGVLGVMLRYKVCSWIAIIFCAQSLANMKNFENDLKQLSMAFMFAVMGLVTNYFGPARPGSTKR

SEQ ID NO: 67237 - protein, 183 aa, Zea mays
  Clone ID: LIB4762-046-F6_FLI.pep
SQVHYTIQVYLLLTVSGTLSLAASREPSLAAQATLLSSISSIPYLYLNPSSPSLSTSGCTATATASVLGSGGFEPVWRGDEEDELAPSDRRREGGGVEEVGLEQPQTLRRAGDQPPQQPGLLLVLGVPQRGVDGVAFLEELLDEVGADEPGATGDAHRHFTATAVHGLLRCCQASLLLDGLGH

SEQ ID NO: 67238 - protein, 145 aa, Zea mays; identical to SEQ ID NO: 53346
  Clone ID: LIB4762-047-A6_FLI.pep

SEQ ID NO: 67239 - protein, 172 aa, Zea mays; identical to SEQ ID NO: 41503
  Clone ID: LIB4762-051-B7_FLI.pep

SEQ ID NO: 67240 - protein, 304 aa, Zea mays
  Clone ID: LIB4762-052-C10_FLI.pep
KTIALPPSPPPLHPMAAVQRLLRAVAPGGSAAAAVRRRMTSLAPEQAPSAAAGFPFAAEQRARRPVAAERNVQWVFLGCPGVGKGTYASRLSRLLGVPHIATGDLVRDELTSTGPLATQLAEIVNQGKLVSDEIIINLLSKRLKKGEDQGESGFILDGFPRTVKQAEILDGVTDIDMVVNLKLREDVIVEKCLGRRICGQCGKNFNLACIDVKGENGLPPIYMAPLLPPNNCMSKLITRADDTEEVVRNRLQIYNDMSQPVEGFYREQGKLLEFDLPGGIPESWPKLLQVLNLEDQEELRLAAA

SEQ ID NO: 67241 - protein, 176 aa, Zea mays
  Clone ID: LIB4762-053-B11_FLI.pep
PQDFMFLSRCLRWRLGPLAADPPCQLNVLWHDGHTLSMDGAQVGVLKQANKVCLSSLLEGKHRMALETQISFEVLCNFPDEPLEGQLPDQQLSALLILADLTEGNSSRAVAVRLLHSTSGGGRLTGSLGGKLLPGSLPSRGLASSLLGTSHLSRFFGLSARFESGGRRARNGRPEK

SEQ ID NO: 67242 - protein, 141 aa, Zea mays
  Clone ID: LIB4762-053-D8_FLI.pep
GRPGHGAMSSRRPSHPSHRNPRRFPSACYLLVLTLALLVVSAAAKSSRRPISDNEIRQKKEACYTDVENGLWGWVCRYSPTEKENCVLRCLSPECYDLIYGGDPLEEGELDYVRGQEYKYCMHKSSLGESLDGVKGSFSYS

SEQ ID NO: 67243 - protein, 177 aa, Zea mays
  Clone ID: LIB4762-058-G3_FLI.pep
NRIRIRSRLLVRCLSLSLSLSLSSPSLSDDRWAAAADAAISQVLRLLLVSSPARSTQQDKATGCWNMDQQGMHDHEGVHVVGFEVPPSPDSSYDNPVPGNEDEGREPPLMPPHLQHTLLSFPPSQDESSPLPQPQTVVLNHLYIEKENTRSMVALGITHRFKAKFVTVVLYKPVLRR

SEQ ID NO: 67244 - protein, 218 aa, Zea mays
  Clone ID: LIB4762-059-B9_FLI.pep
TNTVQQPNKNTVRKQTRFNNQTTLSMKLTSSNTSVLDLLLGPQLVAVTTLLLAAVDSPRVQPCIAFAADHLVLVVLASERLQRGLNDATAEPEHEVERRLLLDVIVRKGAAILQLLPGKDQPLLVRRDPFLVLDLGLDIVDGVAALDLEGDGLPCQRLHKDLHLVGPGRSPGCCDCCDGGFSSPRNRTAAAARAVFLYVVAEAVLGFGGVIWAPAGLE

SEQ ID NO: 67245 - protein, 217 aa, Zea mays
  Clone ID: LIB4762-061-H11_FLI.pep
GLVGLAAPPQSPGRSMEVAAASARPVLRVAAICGSLRKASFNRGLLRAAAEVCEDSIPGLRIDELDISDLPIINTDLETGSGSGTVFPPAVEAFRAKVCQADCFLFGAPEYNYSIATPLKNALDWASRGKNCWADKAAAIVSAGGGFGGGRSQYHLRQVGVFLDLHFINKPELCVQAFQQPPKFDSDGNLVDAEIRERLKKVLLSLQAFTLRLQKED

SEQ ID NO: 67246 - protein, 172 aa, Zea mays; identical to SEQ ID NO: 41503
  Clone ID: LIB4762-062-H5_FLI.pep

SEQ ID NO: 67247 - protein, 210 aa, Zea mays
  Clone ID: LIB4762-066-E3_FLI.pep
RNPSGRSHTPTSKPSHLFPSAAVSALKIAMASEKKQSNPMREIKVQKLVLNISVGESGDRLTRAAKVLEQLSGQSPVFSKARYTVRSFGIRRNEKIACYVTVRGEKAMQLLESGLKVKEYELLRRNFSDTGCFGFGIQEHIDLGIKYDPSTGIYGMDFYVVLERAGYRVARRRRCKSRVGIQHRVTKEDAMKWFQVKYEGVILNKAQNTS

SEQ ID NO: 67248 - protein, 166 aa, Zea mays
  Clone ID: LIB4762-068-B5_FLI.pep
PWSPMIPQATRPPAFPVLLLSSCPPLPRSSGSAWTTTARPMIEWGPARGIWLSVILTLTTPSSPAVTFPRSPAWRSSSSGAPCSLPTGLKCGPVDMQPLVVSPSACTWNPWSPGLRPEILPVTVVGPSPSCEKKMVPLTSVPARTATAFTIVSVIYERNDEKRLEP

SEQ ID NO: 67249 - protein, 231 aa, Zea mays; identical to SEQ ID NO: 41034
  Clone ID: LIB4762-068-D5_FLI.pep

SEQ ID NO: 67250 - protein, 129 aa, Zea mays
  Clone ID: LIB4762-069-C12_FLI.pep
YLCWVKKKKKKLAPLPLSHPAAAAQVALAPATSRICPVALAVVPPTVTMQNEEGKTVDLYVPRKCSATNRIITAKDHASVQINIGHLDANGLYDGHFTTFALSGFVRAQGDADSSLDRLWQKKKVDIKQ

SEQ ID NO: 67251 - protein, 141 aa, Zea mays; identical to SEQ ID NO: 48129
  Clone ID: LIB4762-070-B4_FLI.pep

SEQ ID NO: 67252 - protein, 145 aa, Zea mays; identical to SEQ ID NO: 53346
  Clone ID: LIB4762-071-B6_FLI.pep

SEQ ID NO: 67253 - protein, 231 aa, Zea mays; identical to SEQ ID NO: 41034
  Clone ID: LIB4762-071-H9_FLI.pep

SEQ ID NO: 67254 - protein, 196 aa, Zea mays
  Clone ID: LIB4762-074-F4_FLI.pep
LIWPSPSTSASRIISSTSSSVSFSPRFVMTWRSSAAEMKPFWSLSNTRKASLSSSSESVSFILRAIRFRNSGKSMVPLPSASTSLIMSWSSASVRFCPSERMTVPSSLVVMQPSPSLSKRLKASLNSAIWSSVSWSAMGVVVGRDQIDRSWKRQGLDRGRGKTARALVRWNFPSPNLYALPLERPSHLGRALVYRF

SEQ ID NO: 67255 - protein, 246 aa, Zea mays
  Clone ID: LIB4762-075-C2_FLI.pep
ETPRNRRPIRAAPQQPLLRCLWRPPEPEEEEEGRSRSIQGGEYKMVSSSSPVVNVYPLANYTFGTKEPKMEKDTSVADRLARMKVNYMKEGMRTSVEAILLVQEHNHPHILLLQIGNTFCKLPGGRLKPGENEIEGLKRKLCSKLAVNSPSFPPNWQVGECVAVWWRPNFETVMYPYCPPHITKPKECKKLFIVHLSEREYFAVPRNLKLLAVPLFELYDNVQRYGPVISTIPQQLSRFQFNMVSS

SEQ ID NO: 67256 - protein, 172 aa, Zea mays
  Clone ID: LIB4762-076-H12_FLI.pep
SAGVEMLVYQDLLSGDELLSDSFTYKELENGVLWEVEGKWVTQGPVDVDIGANPSAEGGEDESVDDTAVKVVDIVDTFRLQEQPPFDKKSFVSYIKKYIKNLTAVLEPEKADEFKKGVEGATKFLLSKLKDLQFFVGESMKEDASVVFAYYKDGATNPTFLYFSHGLKEIKC

SEQ ID NO: 67257 - protein, 186 aa, Zea mays
  Clone ID: LIB4762-077-E4_FLI.pep
REYGSLKHKHSSTSWRRLGFSKAAATLSLSFSCLFTDSSLARDPGATLMSTLKCGGKFCINLSRRHRPMTVAILQCCTVGVKVIWMRPSVSSTETDSSDSTLSCSREYGCSGSLMSRTVSDAPHHESPPKTSRGSSTSAAWGCEARSGRSCTTGFALIMPTVIFLLLLLDPAPAVVNGFGRGGGQS

SEQ ID NO: 67258 - protein, 306 aa, Zea mays; identical to SEQ ID NO: 62473
  Clone ID: LIB4762-079-A12_FLI.pep

SEQ ID NO: 67259 - protein, 224 aa, Zea mays
  Clone ID: LIB4762-080-B9_FLI.pep
LEAGREKKKKMRGSMFCGGDLRWWMLAIFFLCTLIAAAEERVVTHLPGFQGPLPFQLRTGYVEVDEDNGVRLFYYFTLSEGSSADDPVMLWLSGGPGCTSFTGLVYQIGPLSFDLDSYMGGLPKLVYRPESWTKVSNIIFLDSPVGAGFSYSVKEQGYNSSDTKAVSHILVFLKKWFDEHPEFLSNPLYIGGDSYAGMIVPTVTSEIAKGLKIVGSKPTMNLKV

SEQ ID NO: 67260 - protein, 188 aa, Zea mays
  Clone ID: LIB4762-083-D2_FLI.pep
SRPAGKKRGSAIRLRLCDSPAQHYNCLSSASPLLLASRRRSNSRREKRSTPKNSKVFHLLERTNTTRRPERLATGAEKEGGGSMADENQAGKKEEEEFSTGPLSVLMMSVKNNTQVLINCRNNKKLLGRVRAFDRHCNMVLENVREMWTEIPKTGKGKKKALPVNKDRFISKMFLRGDSVIIVLRNPK

SEQ ID NO: 67261 - protein, 503 aa, Zea mays
  Clone ID: LIB4759-006-E4_FLI.pep
RGRLQSKTLFSHTLCLGRSKCCPHGFAMPHFVLVPMLAAGHAGPMLDMARALAGRGALVTFVTTPLNLLRLGRARGDGELPIRFLPLRFPCAEAGLPEGYGSADALPGIDFLRNFHDACAMLRAPLVAHLREADPPVSGLVSDTCHPWTGAVARELGVPRLALETFCAFSSFCMRQMSIHSVFEGISDHKRPVRVPGFPIHVEMSRALSPENFSGFGKVFADEVMAENARADGLVVNSFAELEPLFVDAYEAALGKKIWAVGPLSLQHNINMPLSATSGSDDATAVRCGSWLEQKKPRSVVLVSFGSLARSSQPQLVEIAHGLEASNRPFIWVVKPASLAEFERWLSDDGFERRVGDRGLVVTGWAPQKAILSHPATGAFVTHCGWNSVLECVAAGLPMTTWPHFGDQFMNEKLVVDVLRVGVPVGVKDATQWGVEMEGVVATREDVERALEAVMDGGVVGAARQARAAELGRKARDAVARGGSSDRNMALLVDFVEQMKATV

SEQ ID NO: 67262 - protein, 225 aa, Zea mays
  Clone ID: LIB4759-006-F1_FLI.pep
SFLATSRRQKDAQLTPLLRLGAGACAGIIAMSATYPMDMVRGRITVQTDKSPYQYRGMFHALGTVYREEGFRALYKGWLPSVIGVVPYVGLNFAVYESLKDWLLQTNSFGLANDNELHVVTRLGCGAVAGTIGQTVAYPLDVIRRRMQMVGWSHADSIVTGQGKEALQYNGMIDAFRKTVRYEGVGALYKGLVPNSVKVVPSIAIAFVTYEVVKDVLGVEMRISD

SEQ ID NO: 67263 - protein, 363 aa, Zea mays; identical to SEQ ID NO: 42242
  Clone ID: LIB4759-008-C11_FLI.pep

SEQ ID NO: 67264 - protein, 419 aa, Zea mays
  Clone ID: LIB4759-015-H3_FLI.pep
PGPRRASKSSEPPARPPPSPPPVPKANSFQVAMADQANQPTVLHKLGGQFHLRSIISEGVRARNICPSVSSYERRFATRNYMTQSLLGPSMSVSGGINVPVMRTPLCANAPAEKGGKNFMIDFMMGGVSAAVSKTAAAPIERVKLLIQNQDEMIKSGRLSEPYKGIVDCFKRTIKDEGFSSLWRGNTANVIRYFPTQALNFAFKDYFKRLFNFKKDRDGYWKWFAGNLASGGAAGASSLFFVYSLDYARTRLANDAKAAKGGGERQFNGLVDVYRKTLKSDGIAGLYRGFNISCVGIIVYRGLYFGLYDSIKPVVLTGNLQDNFFASFALGWLITNGAGLASYPIDTVRRRMMMTSGEAVKYKSSLDAFQQILKKEGPKSLFKGAGANILRAIAGAGVLSGYDQLQILFFGKKYGSGGA

SEQ ID NO: 67265 - protein, 363 aa, Zea mays
  Clone ID: LIB4759-017-F5_FLI.pep
PPSRRASIMSAYCGKYKDELIKNAAYIDTPGKGILAADESTGTIGKRLSSINVENVEENRRALRELLFCCPGALQYISGVILFEETLYQKTKDGKPFVDVLKEGGVLPGIKVDKGTIEVVGTDKETTTQGHDDLGKRCAKYYEAGARFAKWRAVLKIGPNEPSQLAIDLNAQGLARYAIICQENGLVPIVEPEILVDGPHDIDRCAYVTETVLAACYKALNEHHVLLEGTLLKPNMVTPGSDSKKVTPEVIAEYTVRTLQRTVPAAVPAVVFLSGGQSEEEATRNLNAMNKLSTKKPWSLSFSFGRALQASTLKAWAGKVENLEKARAAFLARCKANSEATLGTYKGDAAADTESLHVKDYKY

SEQ ID NO: 67266 - protein, 363 aa, Zea mays; identical to SEQ ID NO: 42242
  Clone ID: LIB4759-021-C7_FLI.pep

SEQ ID NO: 67267 - protein, 455 aa, Zea mays
  Clone ID: LIB4759-021-G12_FLI.pep
PSAMATSPAASSSSAPTASAVAAATMAVEATDGPVLSVVSKRLRALRKKYNRITQMEESLAAGKTLNREQEEVLRSKPVVAALIDELERLRPPLASALAEELSSRPAPAPSAASSSDSDSSVQDLLALVYFGSLFDVKQQSDFVSLVYTRELERSSCLTYDYVGDDPEDSLAETDLNAVSALASLAALRPPAAAGVSHRDALQACAHHARLWLCRADEPIHPDSTITYAGVRAKLDRIMASGYFTAQLEMRTPLDLAAAVASLGAGGVQVQESMVVSPQAPEAVEESQAVEGHKNEKEDSQATEIYNDHPVVDSEHVEDEVLVHPTDEVPPAETEQEQETFDADVKDQEQKDQQFIQRRSYQNQRGGGRGGSRRGYPNGRGGRGGRGGGYQNGRGGYQNGRGGAGGYYYESGYYQPRNYNRGRGGRSGGGNSYYNSHGGGAQGHHPGSVELGANA

SEQ ID NO: 67268 - protein, 254 aa, Zea mays; identical to SEQ ID NO: 66189
  Clone ID: LIB4759-021-H10_FLI.pep

SEQ ID NO: 67269 - protein, 343 aa, Zea mays
  Clone ID: LIB4759-022-G10_FLI.pep
GVSSSSPASERQRLHPISFSPPHLRRTPITLFPPPAVQLTPTAPPLPLKSRDIADPPALRSARLRTRPIGSRSVDGTLNCGYSSFRGRRASMEDFYDIKASKIDDKQINLFGIFDGHGGSRAAEYLKEHLFENLMKHPEFMTNTKLALSETYRKTDSEFLDAERNTHRDDGSTASTAVMVADHLYVANVGDSRAVISKAGKAIALSEDHKPNRSDERNRIESAGGIVMWAGTWRVGGVLAMSRAFGNRLLKQFVIADPEIQEQEINEELEFLIIASDGLWDVVSNEDAVTLVKMEEEPEAAARKLTETAFSRGSGDNITCIVVKFQHDKPRSGGGDSPSSPRL

SEQ ID NO: 67270 - protein, 455 aa, Zea mays
  Clone ID: LIB4759-023-B1_FLI.pep
EERRKMRECISVHIGQAGIQVGNACWELYCLEHGIQPDGQVPGDKTAGHHDDAFSTFFSQTGAGKHVPRAIFVDLEPTVIDEVRAGTYRQLFHPEQLISGKEDAANNFARGHYTIGKEIVDLCLDRIRKLADNCTGLQGFLVFNAVGGGTGSGLGSLLLERLSVEYGKKSKLGFTVYPSPQVSTSVVEPYNSVLSTHSLLEHTDVSILLDNEAIYDICRRSLDIERPNYSNLNRLVSQVISSLTASLRFDGALNVDVNEFQTNLVPYPRIHFMLSSYAPVISSAKAFHEQLSVAEITSSAFEPASMMVKCDPRHGKYMACCLMYRGDVVPKDVNAAVATIKTKRTIQFVDWCPTGFKCGINYQAPTVVPGADLAKVQRAVCMISNSTSVVEVFSRINSKFDLMYAKRAFVHWYVGEGMEEGEFSEAREDLAALEKDYEEVAAEGGSDDGDEEEEY

SEQ ID NO: 67271 - protein, 128 aa, Zea mays
  Clone ID: LIB4759-024-A6_FLI.pep
SRIYTGGPGSGKGTQCANIVEHFGFTHLSAGDLLRAEIKSGSENGTMIENMIKEGKIVPSEVTIKLLQEAMIKNENDKFLIDGFPRNEENRAAFENVVRPSFLYTKFVDSHASLRNYCSFLLVTQMNS

SEQ ID NO: 67272 - protein, 354 aa, Zea mays
  Clone ID: LIB4759-024-B6_FLI.pep
HCLHHILSIHHLVITNADSSVDCSSHRSSNNRDGRGVVDDPLGGLAAAAVLRVRGAVDGGHGGDVRAVRHGAAAGLPLHALVRRPEGRRLPLPPRAAAQRPLRDQEQRQRLRHRGGVRAVPRHRGQGLRRLLPTQQRPGADSVLRLRRHPCERAQHEPGPGVRAEERGGAGRGGGAGQGHDHVRLRDRADAHHRHRARRGGQARHERHQRRGAAARGGGGARGGREDTAGQARRGGGRVQAPGRRRRRAPAPGHRGRPAPVRARREVRHGHGPRHAVLRHHQGYRRHVARRHRVHPARPRRGARCGCAGPRRRAPGRGVQPLRRNQVTGRRTATVPFRPVFSCFLDMFMCEFET

SEQ ID NO: 67273 - protein, 251 aa, Zea mays; identical to SEQ ID NO: 66744
  Clone ID: LIB4759-024-F3_FLI.pep

SEQ ID NO: 67274 - protein, 481 aa, Zea mays
  Clone ID: LIB4759-024-H7_FLI.pep
AGLHGYRRDNSHRQWNIQGMPVPMNTSYPDVVKFMRSGFALRFPLSYGDNIRECLAENTRAFHEEPRNSTGIREQILDILTFETLWFCVLDQLGSTNNDVKSVLIDIIVGIIPFVLWGLKSAHVICRFVLMPLAVFVFLAYKYWKTRITIDAVEKFLRMQHMLVPMRYAYTNIIAITAHFRDKLGQGGYGTVYKGVLQPGEVHVAVKMLGNSNCNGEEFISEVATIGKIHHVNVVRLIGFCSEENIRALIYEFMPRGSLDKYIFSSEKTFSWDKLNEIALGIARGLNYLHHGCDMQIIHFDIKPHNILLDSNFVPKVADFGLAKLFPKDDNFVPLSAMRGTIGYIAPEMVSRSFGVISSKSDVYSFGMLLLEMTGGRRNADPHAGSSSQAYYPSLVYKQLSQGDANRISEGVDMHELEKKLCIIGLCCIQIKPQDRPTMSEVIEMLEAGVDGIQMPPRPYFCDEEGDSSYSIISELDIIEE

SEQ ID NO: 67275 - protein, 253 aa, Zea mays
  Clone ID: LIB4759-025-C6_FLI.pep
LVARERGCTPRRGETPLPRATVPEHPGEGPARSSLLPELLMLNPRSEIYPTIEYRPIQPSDLEALEKIHLALFPIRYEREFFLNVVSGNGIVSWGAVDTSRSDDRRDEIIGFVTTRMIAAKDSEIEDLFRYNSSRKDLTLVYILTLGVVDGYRNLGIASSLVREVVKYAASISNCRGVYLHVISYNQPAISFYKKMLFKLVRRLPMFYYIRGQHYDSYLFVYYVNGGRSPCSPLCPTIAIQYSCTRCRGAVGG

SEQ ID NO: 67276 - protein, 399 aa, Zea mays
  Clone ID: LIB4759-025-G2_FLI.pep
VCKCKLCTQYTGRFCLKPAAPRPMAISCFNGGAGWPEPVVRVQAVSDTCGDTIPERYVKPLSERPRLSPASDGSGPNIPVVDLSMLDVDATSSAVAAACREWGFFQAVNHGVRPELLRGARAAWRGFFRQPAEVRERYANSPATYEGYGSRLGTAKGGPLDWGDYYFLHLLPASLKSHEKWPSLPSSLRGATEEYGEEVLQLCRRVMRLLSSGLGLEAGRLQAAFGGEGGEGACLRVNFYPQCPQPELTLGVAGHSDPGGMTMLLVDDHVKGLQVRSPDGQWIVVEPVPDAFIVNVGDQIQVLSNAAYKSVEHRVTVSAAEDRLSMAFFYNPRSDLPIAPMAELVGPDRPALYPEMTFDEYRVFIRQRGLAGKAQLESLQVKAAAGGGGCSAAAASSTS

SEQ ID NO: 67277 - protein, 351 aa, Zea mays
  Clone ID: LIB4759-025-H11_FLI.pep
ISEKMARSAGTRRRVARQLKSTHPIPSYRWKSKPMKKPMKKSNRKQVLPTLQKMDWEDANCSVCMEYPHNAVLILCSSHDKGCRPYMCGTSYRHSNCLDQFKKAYTKGALLEEVPANSVGSNLDSAPLTAEKTDSIDLACPLCRGKVKGWTVVEPARSYLNGKRRTCMQDGCSFVGTYKELRKHAKLEHPLAKPREVDPVLEQKWRLLEIERERQDALSTITATMGRAVVFGDYVLGLEDGMDSEDVDSDADNDGRGTENTRRMLLFIMRQVAQHHQNQRLQNATGASDNAEDNYVVSSGANGTTPYSYPLEGEDENGMVVAGGRSTDVLRPERRRRRRRRNRGRLFLGAN

SEQ ID NO: 67278 - protein, 597 aa, Zea mays
  Clone ID: LIB4759-026-A6_FLI.pep
SRRRRRSGAMGMLAAAVAPALLASPQASLVRRRLSGAWTLRLKPAAASHGVAALRVHNFLPKCYITNVEVDVSTVNKEETFDDHPSLAPGRNIPLVNLRGDILDSSPFPLHDRASCPSGFEELPVLSEGEQHTLASTPAHPAGLYALYASYLFGNLVEQLWNFAWPATLAILHPNLLPVAIVGFFTKLSVFVGAPIVGKLMDHFPRIPMYTALNAVQVGTQLISAATVIYALRNLSHASTTAVVLRPWFIALVAAGAIERLAGLALGVSMERDWVVLLAGTNRPVALAQANAVLNRLDLVCETVGASVFGLLLSKYHPVTCLKIASGLMICSFPVLVMLGQLINRVSCHALDSSRTATDESICADLLDVRRIVPNSLRAIKHGWNEYKQQTVLPASAATVFLNFNVALAPGAIMTALLMHRGTSPSIVGAFSGLCSIMGLVATFISSSLVKRVGILKAGAAGLIFQASLLSIALTVYWAGSISQTTPLLIFLASIALSRLGHMSYDVVGTQIVQTGVPASKANLIGGMEVSIASLAELVMLAMAIIANDVSHFGFLAILSVSSVAGAAWMFCRWLTNPTDEQRELFMVDPLYQVQAI

SEQ ID NO: 67279 - protein, 496 aa, Zea mays
  Clone ID: LIB4759-026-B6_FLI.pep
PNHAPPADMDDVVPATAKQTVVLYPGGGAGHVAPMTQLAKVFVRHGYDVTMVLLEPPIKSNASGASFVESFAASNPSITFHLLPPIPPPDLASSTKHPFLVVLELLGQYNDKLESFLRTIPRERLHSLVIDMFCTDAIDVAAKVGVPVYTFFAANAGALAVLTQTVALLDGRQTGLKELGDTPIEFLGVPPIPASHIIREMLEDAEDEVRTAMAKIWKRDTDTRGVLINTFYSLEAQALQAFSDPLCVPGKVLPPVYPIGPLVGKGGSGTDGGEAAERPHECLAWLDAQPERSVVFLCWGSRGLLSEEQLKEIAAGLEKSGQRFLWVVRTPASSDDPKRFWLPRPEPDLDALLPEGFLERTKDRGLVIKSWAPQVDVLSNPAVGAFVTHCGWNSSLEAITAGVPMLCWPQGAEQKINKVLMTEAMGIGLELEGYNTGFIKAEEIETKVRLVLESEEGREIRTRAAEVKKEAHAALEDGGSSKAAFLQFLSDVKNIN

SEQ ID NO: 67280 - protein, 384 aa, Zea mays
  Clone ID: LIB4759-027-B12_FLI.pep
EGRGYLTDGGPRMRALAAAATAVAAPTPTRLRLPLLSRTLRSGHCRSSYSSRLLRFSCSATTMGDETSTSVAPQEQESTVAGSVKQQLSGLVLMSLRATVPEVEVEPMVEVSAKFADYQCNNAMGLWSKVKGSGTSFKNPNAIGQAIAKNLPSSDIIESTSVAGPGFVNIVLSNRWVAQRIQDMLVNGIKTWAPILPVRRAVIDFSSPNIAKEMHVGHLRSTIIGDTLARMFEFSNVDVLRRNHVGDWGTQFGMLIEYLFEKFPNWQEIGSQAIGDLQIFYKASKHRFDNDPEFKARAQQGVVRLQGGEERYREAWKKICDISRSEFDLVYKRLNVVLEEKGESFYNPYIPQVLEELSSKGLIKESEGARVIFIQGHQIPLNSG

SEQ ID NO: 67281 - protein, 450 aa, Zea mays; identical to SEQ ID NO: 66641
  Clone ID: LIB4762-083-E4_FLI.pep

SEQ ID NO: 67282 - protein, 386 aa, Zea mays
  Clone ID: LIB4763-002-A5_FLI.pep
LEAGRDSPSSLFTIPPQNTSCDPRSLRRASIMSAYCGKYADELIKNAAYIGTPGKGILAADESTGTIGKRLSSINVENVEENRRALRELLFCCPGALQYISGVILFEETLYQKTKDGKPFVDVLKEGGVLPGIKVDKGTIEVVGTDKETTTQGHDDLGKRCAKYYEAGARFAKWRAVLKIGPNEPSQLAIDLNAQGLARYAIICQENGLVPIVEPEILVDGPHDIDRCAYVTETVLAACYKALNEHHVLLEGTLLKPNMVTPGSDSKKVTPEVIAQYTVRTLQRTVPAAVPAVVFLSGGQSEEEATLNLNAMNKLSTKKPWALSFSFGRALQASTLKAWAGKVENVEKARAAFLARCKANSEATLGTYKGDAAADTESLHVKDYKY

SEQ ID NO: 67283 - protein, 498 aa, Zea mays
  Clone ID: LIB4763-003-C11_FLI.pep
LEAGRGPGVHPKTIMTRLCPLHLLLIAAAAASASGADEAHVSIAVAEKGLAFAKDVLISEAVRSLTPLRLPGVEKAVRVPFLGGIRVAASNITLFHLDVGDNSTIFPGDSGLLVVASGITANISMHWSYCYDSWLFPIEITDSGTASILVQGMEVGITMVIKNKNGSLALSVSQCGCYVKDLVISLDGGASWFYQGFINAFEDHIKAAVEKAVPENIIEGAGKLDSFLQGLPRTISLDDVAAFNLTFINDPHYGNSSIEFDINGLITSAVAETANLQKHPQLSLACGGASKMLLLSLDEDVFNSALEVHFKAGSMHWVVDKVPDQSLLNTANWKFIIPRLYWNYPNDDILLNISMASSPVIRVTSEKIEATINGDMIIDVVDNKEIVPVACISVIVSASGVVDASGNKVYGRVGLDNFSLALKWSKIGNFHMSLIQGVIRVLLNTVCMPYLNSRLGNGLILPVVHGFTLQDVYVLTSAEQLTLCSDVTFNASSMASLL

SEQ ID NO: 67284 - protein, 433 aa, Zea mays
  Clone ID: LIB4763-008-H12_FLI.pep
NPPRPQRPSTSSLSLSRRRRDREMKVTVMTGDEQIVTLDVDRDESVENLKALLEVETRVPLRQQQIHFNGKEMQNTEKLSAAGVQDGDLVMMFSTSERPSQDGLRVNPDGTAVNPQAFQQHARGDSQLMAQLLQNDPQLAQAILGDDTTELQNILRSRHQQRTELKRKQEEELALLYADPFDVEAQKKIEAAIRQKGIDENWEAALEHNPEAFARVVMLYVDMEVNGVPLKAFVDSGAQSTIISKSCAERCGLLRLLDQRFRGIAVGVGQSEILGRIHVAPIKIGNIFYPCSFTVLDAPNMEFLFGLDMLRKHQCMIDLKDNVLRVGGGEVSVPFLQEKDIPAHIRNEEKLSKLGSLSQATGESSRTREGTPNALQQTPPPGAPAANPPQQGGDFEAKVTKLVELGFDRASVTQALKLFNGNEEQAAAFLFGG

SEQ ID NO: 67285 - protein, 363 aa, Zea mays; identical to SEQ ID NO: 42242
  Clone ID: LIB4763-012-A11_FLI.pep

SEQ ID NO: 67286 - protein, 350 aa, Zea mays
  Clone ID: LIB4763-012-H3_FLI.pep
RLLILALCSSRFLSSIQSSRVTIQIPFPLRRTSREAVGAGREGEALAPSLPRTPMDPPRAVAFLLILLPVLAPVASGVPFVVLHGIGDECGNDGLSSFTKMLGEWSGSKGYCIEIGRGAWDSWLMPLQEQANTVCKKVKKMKELSEGYNIVGLSQGNLIGRAVIEYCDCGPPVKNFISIGGPHAGTASVPLCGSGFLCILIDDLIKSEIYSDYVQDMEDYLKGCKFLPKLNNEIPSARNTTYKERFSSLENLVLIMFEGDAVLIPRETAWFGYYPDGAFSPVLPPQETKLYTEDWIGLKTLDEAGRVKFVSVPGGHLRITRSDMKKYIVPYLTPEASSKKNIHIHRMLSL

SEQ ID NO: 67287 - protein, 245 aa, Zea mays
  Clone ID: LIB4763-013-C11_FLI.pep
LEAGRDHPTLPILLLFKCHSHPPQGLAWWEEDKRRHAHADTMAICSAHTTTSLRSPCTTVSNAGLRQKQVIFVTSNRRSGGGRRHGGARSFQVSCSVDKPVVIGLAADSGCGKSTFMRRLTSVFGGAAEPPKGGNPDSNTLISDTTTVICLDDYHSLDRNGRKEKGVTALDPRANNFDLMYEQVKAIKEGQAVEKPIYNHVTGLLDPPELIAPPKIFVIEGLHPMFDERVRDLLEKERCCVLSSS

SEQ ID NO: 67288 - protein, 193 aa, Zea mays
  Clone ID: LIB4763-014-D2_FLI.pep
HLRVHLRTALTRLPTMSSLNSLFNRSTFGTKCKTCLNLVISRIKLLRNRRELQLINMRKEMVQYLQTGQESIARIRVEHIIREQNILAAYEVVELFCEFVLARVPIVEVQKECPLELREAIASIIFASGRCSDLPELMHLRNLFTTKYGKEFVAGAMELRPDSSVNRTIIEKLSVKAPSGDSKLKVLKAIAQE

SEQ ID NO: 67289 - protein, 360 aa, Zea mays; identical to SEQ ID NO: 53639
  Clone ID: LIB4763-014-E4_FLI.pep

SEQ ID NO: 67290 - protein, 394 aa, Zea mays
  Clone ID: LIB4763-016-F7_FLI.pep
GFRWSLRRRRAPSSSVEMAGGEDIQPLVCDNGTGMVKAGFAGNDAPRAVFPSIVGRPRHTGVMVGMGQKDAYVGDEAQSKRGILTLKYPIEHGIVSNWDDMEKIWHHTFYNELRVAPEEHPVLLTEAPLNPKANREKMTQIMFETFNVPAMYVAIQAVLSLYASGRTTGIVLDSGDGVSHTVPIYEGYALPHAILRLDLAGRDLTDSLMKILTERGYSFTTSAERETVRDIKEKLAYIALDYEQELETAKNSSSVEKSYELPDGQVITIGAERFRCPEVLFQPSMIGMEAAGIHETTYNSIMKCDVDIRKDLYGNIVLSGGSTMFPGIADRMSKEITSLAPSSMKIKVVAPPERKYSVWIGGSILASLSTFQQMWISKEEYDESGPAIVHRKCF

SEQ ID NO: 67291 - protein, 417 aa, Zea mays
  Clone ID: LIB4763-017-C4_FLI.pep
TQTHREGHPSPKIDRSIATNFILATRQQLLTTGGYAFKAPDHGDDQCSHRTAHLPGDDLPALVVALAPLPEHDVGAVAHAAVVLVAVEGVEVEVDVVDHADAAEAVADVAALRPQHRLVLVAGVVGHQLDRVALALGVLDGLAGDPVDEREGRVPFLVLDAVAVAHVLDPVLVLVARVGGREAHGAVADRGAEPFVGLAVDADGGLAAAEAGRVGGAAAAPGVGLVAPGQDLPALVVALGPLPQHHGGAVVHAAVALVAVEGVEVEADVVHHADAAEALAHVAALRPQHRLVLVLRVERHQLHRVGLAEGVLDGEPSGLVDEGERGVALLVLDLGAEAHVLVPVLVLVARVGGGQHHVAVADGEAVPLVGLAEDLEGGLVHAAVRRRVLAVVAVVPEAEHLALFSALGFWGRVWGES

SEQ ID NO: 67292 - protein, 363 aa, Zea mays
  Clone ID: LIB4763-017-F1_FLI.pep
PPSRRASIMSAYCGKYKDELIKNAAYIGTPGKGILAADESTGTIGKRLSSINVENVEENRRALRELLFCCPGALQYISGVILFEETLYQKTKDGKPFVDVLKEGGVLPGIKVDKGTIEVVGTDKETTTQGHDDLGKRCAKYYEAGARFAKWRAVLKIGPNEPSQLAIDLNAQGLARYAIICQENGLVPIVEPEILVDGPHDIDRCAYVTETVLAACYKALNEHHVLLEGTLLKPNMVTPGSDSKKVTPEVIAEYTVRTLQRTVPAAVPAVVFLSGGQSEEEATRNLNAMNKLSTKKPWSLSFSFGRALQASTLKAWAGKVENLEKARAAFLARRKANSEATLGTYKGDAAADTESLHVKDYKY

SEQ ID NO: 67293 - protein, 364 aa, Zea mays
  Clone ID: LIB4763-017-E11_FLI.pep
SRPAGIASLLHTNSLLRDRAKHKAGKKKRIERKNHSRFSHSAIPPPESMEIRAPPTSLSLAPPPASASFRRTPLRTFFLNGSVSLKVVQVRQSNVNRFKCNSIQSNLFDRLTRVARSYANAVLSSFEDPEKILEQAVLEMNDDLTKMRQATAQVLASQKRLENKYKAAEQASADWYRRAQLALQKGDEDLAREALKRRKSYADNASSLRSQLDQQKGVVENLISNTRVLESKIAEAKQKKDTLKARAQSAKTATKVSEMLGNVNTSSALSAFEKMEEKVMAMESQAEALGQLATDDLEGKFALLENSSVDDDLSQLKKELSGSSLKGELPSGRRAASNSGAGRPFPDLEIESELNELRRKAKEY

SEQ ID NO: 67294 - protein, 218 aa, Zea mays; identical to SEQ ID NO: 64477
  Clone ID: LIB4763-017-H10_FLI.pep

SEQ ID NO: 67295 - protein, 234 aa, Zea mays
  Clone ID: LIB4764-001-D2_FLI.pep
PLHCWMKHGPLSRGAPSLVIIFILLTTLFIILVIDLRLGLVRLLFIFLLFLLGRSLLSCSALALVVGSDGLVVLELELVSLGYIGSLVRLAQGFPPVASSFPHRSDRLVLRVLLLELLAKFLHEHEESAGSPLRLVGVLAGLPFPALGGLLRPLALHRQLGIGLGGALGFGPLHGGFERRHGAQRSDPRLAEGIPVAGGRIGVESRAKLPLAARGEREGGKGKGRRRALPAGLE

SEQ ID NO: 67296 - protein, 157 aa, Zea mays
  Clone ID: LIB4764-002-G4_FLI.pep
SALGTLRTTLPTPGTPSVARLVAIASAGAATSVISSFTLIEHSESAVSFRMNSANSSRSRSPSRFTSYSSIMALSFSLDGGSWCGPGKYLLMSLLESEGLLVALLGVLREAVEHLVGDLPHLVLLPPPPLEPILEITPGLTHGRRRRAGGGVPAGLE

SEQ ID NO: 67297 - protein, 245 aa, Zea mays
  Clone ID: LIB4764-002-H12_FLI.pep
ASNTFLYICMPKSHLHVSHGPIAIWIMGATCAKPSQWDGSRASPSRPIHTATTTPLPPQFPPPDTCCHPHDQKQNQAPSTHSHTPHQVKQGARSTATAAFMNSSFIGLKPAAAAAQATAAASSPMKQQVQVAPEGRRAALLGLAAVFAAVTATTAGSAKAEVFDEYLDKSKANKELNDKKRLATSAANFARAYTVEFGSCQFPYNFTGCQDLAKQKKVPFLSDDLEIECEGKEKFKCGSNVFWKW

SEQ ID NO: 67298 - protein, 234 aa, Zea mays
  Clone ID: LIB4764-003-F2_FLI.pep
RVTAVYNLPDTNRREPPLDLVELVCLHHRISLGNGVPGSSPVVELAVVLVGVAVERAVQVPTPAVESREPNPLPAGAAPVRPYLPPFGDRRHPLAGSGNISGLLHVHCLQLDLGNSYYRVAASNNRLHDGVAAVHDAVDRGGSQLGLILLRYHLLVALRAHVHGRRAAEEATVIDAEDGSLGGLAPSLLVLHGFLNSDETALFAIPLRRSPRGRRGGEGRGIAGNSVGFPGRPR

SEQ ID NO: 67299 - protein, 142 aa, Zea mays
  Clone ID: LIB4764-003-G6_FLI.pep
HNVLLANRLSTCTGYSFRVPEDDDDRIPAEEHLAYEPVLVHRESLLLAFTGLWYLGPHLTNVLKNHVAVPIEGSHAAKQLLVVPAVDKNLGIILDAHHEHRERTGAELLFLLFYVGFFRHGRQLEPSIWVGSGETAAARREG

SEQ ID NO: 67300 - protein, 145 aa, Zea mays; identical to SEQ ID NO: 61892
  Clone ID: LIB4764-004-B12_FLI.pep

SEQ ID NO: 67301 - protein, 249 aa, Zea mays
  Clone ID: LIB4764-004-B6_FLI.pep
RGRPGRHFVKIEHCRVLIRSRTNNPASAGRFGGVAAMAASKPILYSAWISSCSFRVRIALNLKGVDYEYRAVTRNDLDYEKINPIKYVPALVDGDFVVSDSLAIILYLEDKYPQHPLLPQDLKKKAINLQIANIVCSSIQPLQCYAVIGLLDGTLGSNQSLQIVRNYTDKGFKAIEKLLEGCDSKYATGDEVQLADVFLAPQMYAGVTRFGIDMSKYPLLERFYKAYMEIPAFQVAVPEKQPDAPASPY

SEQ ID NO: 67302 - protein, 158 aa, Zea mays; identical to SEQ ID NO: 66702
  Clone ID: LIB4764-004-D2_FLI.pep

SEQ ID NO: 67303 - protein, 181 aa, Zea mays
  Clone ID: LIB4764-004-F5_FLI.pep
PQDFMFLSRCLRWRLGPLAADPPCQLNVLWHDGHTLSMDGAQVGVLKQANKVCLSSLLEGKHRMALETQISFEVLCNFPDEPLEGQLPDQQLSALLILADLTEGNSSRAVAVRLLHSTSGGGRLTGSLGGKLLPGSLPSRGLASSLLGTSHLSRFFGLSARFESGGRRARNGRPEKSRPAS

SEQ ID NO: 67304 - protein, 208 aa, Zea mays
  Clone ID: LIB4764-007-A6_FLI.pep
IPMASRRRTLLKVIILGDSGVGKTSLMNQYVNKKFSNQYKATIGADFLTKEVQFEDRLFTLQIWDTAGQERFQSLGVAFYRGADCCVLVYDVNSMKSFDNLNNWREEFLIQASPSDPDNFPFALLGNKVDVDGGNSRVVSEKKAKAWCASKGNIPYFETSAKDGTNVEDAFQCIVKNALKNEPEEELYVPDTVDVVGGNRAQRSSGCC

SEQ ID NO: 67305 - protein, 172 aa, Zea mays; identical to SEQ ID NO: 41503
  Clone ID: LIB4764-007-G12_FLI.pep

SEQ ID NO: 67306 - protein, 236 aa, Zea mays
  Clone ID: LIB4764-015-E12_FLI.pep
RVTAVYNLPDTNRREPPLDLVELVCLHHRISLGNGVPGSSPVVELAVVLVGVAVERAVQVPTPAVESREPNPLPAGAAPVRPYLPPFGDRRHPLAGSGNISGLLHVHCLQLDLGNSYYRVAASNNRLHDGVAAVHDAVDRGGSQLGLILLRYHLLVALRAHVHGRRAAEEATVIDAEDGSLGGLAPSLLVLHGFLNSDETALFAIPLRRSPRGRRGGEGRGIAGNSVGFEMGPAGL

SEQ ID NO: 67307 - protein, 231 aa, Zea mays
  Clone ID: LIB4764-017-B10_FLI.pep
PPSRRASIMSAYCGKYKDELIKNAAYIGTPGKGILAADESTGTIGKRLSSINVENVEENRRALRELLFCCPGALQYISGVILFEETLYQKTKDGKPFVDVLKEGGVLPGIKVDKGTIEVVGTDKETTTQGHDDLGKRCAKYYEAGARFAKWRAVLKIGPNEPSQLAIDLNAQGLARYAIICQENGLVPIVEPEILVDGPHDIDRCAYVTETVLAACYKALNEHHVLLEVPS

SEQ ID NO: 67308 - protein, 172 aa, Zea mays; identical to SEQ ID NO: 41503
  Clone ID: LIB4764-017-B4_FLI.pep

SEQ ID NO: 67309 - protein, 378 aa, Zea mays
  Clone ID: LIB4764-020-C6_FLI.pep
LEAGRGGLEFGSLPAHPSPSLPSCPAGSPARRLCPDPGDMPRYDDRYGGTRLYVGRLAPRTRSRDLEYLFGKYGRLTVCGNPFRRIREVELKRDYAFIEFSEHRDADEARYQLDGRDVDGSRIVVEFAKGVPRGPGGSREYMGRGPPPGTGRCFNCGMDGHWARDCKAGDWKNKCYRCGERGHIERNCQNSPRSVRRERSYSRSPSPRRGRGRSPSYSRSRSRSRSYSRSRSLSGSPRGGRRDRDDRRSRSLSYSRSPVRSPPAKEKERSPTPGGSRSPRSRSPQDQVMSPPPKDNGDRNGSDRGDSPRGREDSRSRSRSPSGGNRSPAANGRSPSPRGDRGPSPMADRSPSPKGNGNNDGGDDDTGRGGSPTGSKSP

SEQ ID NO: 67310 - protein, 425 aa, Zea mays
  Clone ID: LIB4764-020-D6_FLI.pep
RGRPGSHSPRRASESSEPPARPPPSPPPVPKANSFQVAMADQANQPTVLHKLGGQFHLRSIISEGVRARNICPSVSSYERRFATRNYMTQSLLGPSMSVSGGINVPVMRTPLCANAPAEKGGKNFMIDFMMGGVSAAVSKTAAAPIERVKLLIQNQDEMIKSGRLSEPYKGIVDCFKRTIKDEGFSSLWRGNTANVIRYFPTQALNFAFKDYFKRLFNFKKDRDGYWKWFAGNLASGGAAGASSLFFVYSLDYARTRLANDAKAAKGGGERQFNGLVDVYRKTLKSDGIAGLYRGFNISCVGIIVYRGLYFGLYDSIKPVVLTGNLQDNFFASFALGWLITNGAGLASYPIDTVRRRMMMTSGEAVKYKSSLDAFQQILKKEGPKSLFKGAGANILRAIAGAGVLSGYDQLQILFFGKKYGSGGA

SEQ ID NO: 67311 - protein, 317 aa, Zea mays; identical to SEQ ID NO: 60440
  Clone ID: LIB4765-001-D11_FLI.pep

SEQ ID NO: 67312 - protein, 370 aa, Zea mays
  Clone ID: LIB4765-001-H10_FLI.pep
AEQAGPAISPLRRRGEAAPEMGDSGGSVVSVDVERISFGGKEHHIQTNHGPVSVAVYGDHDKPALVTYPDIALNYMSCFQGLLFCPEAASLLLHNFCIYHISPPGHELGAAPISPNAPIPSVDDLADQVADVLDFFGLGSVMCFGVTAGAYILTLFAAKYRERVLGLILVSPLCKGPTWTEWLYSKVTSNLLYYYGMCGLVKECLLQRYFSKEVRGFSEVPESDIVQACKSLLDQRQSMNVWRFVQTMNERYDLSEHIKRLQCRTLIFVGDNSQFHTEAVHLTSKLDRRYCALVEVQACGSLVTEEQPHAMLIPMEYFLMGYGLYRPPSQVVECSPRSPLSPFCISPDLLSPESMGVKLKPIRTRVRLEV

SEQ ID NO: 67313 - protein, 363 aa, Zea mays
  Clone ID: LIB4765-002-H10_FLI.pep
PPSRRASIMSAYCGKYKDELIKNAAYIGTPGKGILAADESTGTIGKRLSSINVENVEENRRALRELLFCCPGALQYISGVILFEETLYQKTKDGKPFVDVLKEGGVLPGIKVDKGTIEVVGTDKETTTQGHDDLGKRCAKYYEAGARFAKWRAVLKIGPNEPSQLAIDLNAQGLARYAIICQENGLVPIVEPEILVDGPHDIDRCAYVTETVLAACYKALNEHHVLLEGTLLKPNMVTPGSDSKKVTPEVIAEYTVRTLQRTVPAAVPAVVFLSGGQSEEEATRNPNAMNKLSTKKPWSLSFSFGRALQASTLKAWAGKVENLEKARAAFLARCKANSEATLGTYKGDAAADTESLHVKDYKY

SEQ ID NO: 67314 - protein, 430 aa, Zea mays
  Clone ID: LIB4765-003-B3_FLI.pep
TPGANAGSVPDSAQMAPRRRRRRSVAGIDQDELLDPEALADPDSGFYEINGVRLHHKVCSHEDEDSSSDQSTGSTIASDSDAVLKSQIGLPILLLHGFGASVFSWSSVMRPLARIVRAKVLAFDRPAFGLTSRASRSADDAKPLNPYSMAFSVLATLAFIDYLGAEKAILVGHSAGCLVAVDAYFEAPERVAALVLVAPAIFAPRKAVKEGQSGEEEGGQQAQRVPNDENSPPNLFARISGGFLELWKHVAGLVLKMITAIRDVVRSLCLKAVVAFLRSSLGVVLVRWVMDKFGILGVRNAWYDPSKVTDHVIQGYTKPLKSKGWETALLEHTVSMIIDSVSASRVPVSKRLSEISCPVLVVTGDTDRIVPAWNAERVARAIPGATFEAIKSCGHLPHEERPEEFLSVVENFLRTTFANPNEQVFQAAVS

SEQ ID NO: 67315 - protein, 452 aa, Zea mays
  Clone ID: LIB4765-003-E4_FLI.pep
HFPSAMGKEKTHINIVVIGHVDSGKSTTTGHLIYKLGGIDKRVIERFEKEAAEMNKRSFKYAWVLDKLKAERERGITIDIALWKFETTKYYCTVIDAPGHRDFIKNMITGTSQADCAVLIIDSTTGGFEAGISKDGQTREHALLAFTLGVKQMICCCNKMDATTPKYSKARYDEIVKEVSSYLKKVGYNPDKIHFVPISGFEGDNMIERSTNLDWYKGPTLLEALDLINELKRPSDKPLRLPLQDVYKIGGIGTVPVGRVETGIIKPGMVVTFGPSGLTTEVKSVEMHHEALQEALPGDNVGFNVKNVAVKDLKRGYVASNSKDDPAKEAASFTSQVIIMNHPGQIGNGYAPVLDCHTSHIAVKFAELITKIDRRSGKELEKEPKFLKNGDAGMVKMVPTKPMVVETFSEYPPLGRFAVRDMRQTVAVGVIKSVEKKDPTGAKVTKAAAKKK

SEQ ID NO: 67316 - protein, 425 aa, Zea mays
  Clone ID: LIB4765-008-H3_FLI.pep
KTPNPPRAPRPRRRRRRPPPPTAAYRRRRNAAGSFSTAISRLTPPRSEAAAMAIPLVLVVLPLGLLFLLSGLIVNTIQAILFVTIRPFSKSLYRRINRFLAELLWLQLVWVVDWWAGVKVQLHADEETYRSMGKEHALVISNHRSDIDWLIGWILAQRSGCLGSTLAVMKKSSKFLPVIGWSMWFAEYLFLERSWAKDEKTLKWGLQRLKDFPRPFWLALFVEGTRFTPAKLLAAQEYAASQGLPAPRNVLIPRTKGFVSAVSIMRDFVPAIYDTTVIVPKDSPQPTMLRILKGQSSVIHVRMKRHAMSEMPKSDDDVSKWCKDIFVAKDALLDKHLATGTFDEEIRPIGRPVKSLLVTLFWSCLLLFGAIEFFKWTQLLSTWRGVAFTAAGMALVTGLMHVFIMFSQAERSSSAKAARNRVKKE

SEQ ID NO: 67317 - protein, 385 aa, Zea mays
  Clone ID: LIB4765-009-G4_FLI.pep
RGRPGRIQISRLLATKYQPRRTGRMPKLSCRVLFAALLIASLAALLVRFPIHRLLNPHAAMDPDSELEFEMPGVLRVYKTGRVERFDGTETVPPCPDGDPANGVASKDIVLDPAAGISARLYLPAGVDAGKKLPVVVFFHGGAFMVHTAASPLYHIYAASLAAAVPAVVVSVDYRLAPEHRIPAAYDDAFAALKAVIAACRADGAEAEAEPWLAAHGDASRIVLAGDSAGGNMAHNVAIRLRKEGGIEGYGDMVSGVVLLYPYFWGKEPLGAEPTDPGYRAMFDPTWEFICGGKFGLDHPYVNPMASPEEWRQLGSRRVLVTTADQCWFVERARAYAEGIKKCGWEGELEFYETKGEAHVFFLPKHGSEKAVKELALVAEFVRRC

SEQ ID NO: 67318 - protein, 492 aa, Zea mays
  Clone ID: LIB4765-012-B1_FLI.pep
SLLAAAADRPTGGGGGEGRTDTMEADSGKLFVGGISWETDEDRLRAYFGRFGEVTEAVIMRDRNTGRARGFGFVVFADSGIAERVTLDKHMIDGRMVEAKKAVPRDDQSIASKNNSSIGSPGPGRTRKIFVGGLASNVTEVEFRRYFEQFGVITDVVVMYDHNTQRPRGFGFITYDSEDAVDKALHKNFHELNGKMVEVKRAVPKEQSPGPIARSPAGGQNYAMSRVHNFLNGFNQGYNPNPLGGYGMRVDGRYGLLTGARNGFSSFGPGYGMGMNAEGGMSAYFGASSGFANSSNGRQIGSYFNSSSNRLGSPIGYVGLNDDSGSILSSMSRNVWGNGNLNYTGNPTNTNSFAPPVGGGGIPGDEISWGNLTSVHGMGNISSLGPGNLGRGTGDNNFGLPSGTYVRSNSTGTIGEPFSASANPYESNNLGAYGSSSIYGDSTWRFNSSEVDIPPFGHDLGNVDPDIKSEISANYMGNYTVNNNQTSRGITS

SEQ ID NO: 67319 - protein, 292 aa, Zea mays
  Clone ID: LIB4765-014-B9_FLI.pep
PGFRHGFQADRSLDLLHCHHRSRLPSLRIRRAHGRRLVERRRHLVRPRQGRWIRRWCVWVPGCRRPTSVLVNDHRRQPIHLPGRQGLRHLLPGEVHRTRVVLRQPGDSGYHRPVPRRYVPGGARPLRPERDGVRCHGEARPGRHAPKRRPPTSPVHSGGVQLERLGHRLQGGRRLKRQLPGHGHRVRVRGRGPARRGAEAERRGGVGAHATLLGRCVAVQVRLHQSAGPPVCPPHLGLRQGSRRQQRHPRRMAARQNLPLRRQLRRKPCITSGIKMSIVCRCLHPTIRCMHI

SEQ ID NO: 67320 - protein, 324 aa, Zea mays
  Clone ID: LIB4765-015-A12_FLI.pep
SDGGSDDSNDQARRLHCSSEGTMSFMSPFPGMDLSKMDPGTLTLLGAAGCVMLTMHFTVQLVSQHLFYWKNPKEQKAILIIVLMAPLYAISSFVGLLDIQGSKTFFTFLDAVKECYEALVIAKFMALMYSYLNISISKNIVPDEIKGRVLHHSFPVSLFLPRNVRLEHKTLKLLKYWTWQFVIVRPVCSILIIALQLLGLYPSWVSWTFSIILNFSVSMALYALVLFYHLFAKELAPHKPLAKFLCIKGIVFFSFWQGFALDVLTQAGVIKSHHFWLDVEHIQEAIQNVLVILEMVVFSVIQQYAYHVAPYSGADRAKFEKKNE

SEQ ID NO: 67321 - protein, 231 aa, Zea mays
  Clone ID: LIB4765-015-C5_FLI.pep
GVMAVSFANLSSEAGLKKLDEYLLTRSYITGYQASKDDLAVYTSFSSAPSSKYINVARWFNHIDALVRMSGITAEGQGVKVESSAVPSAPTPDVAEAQAPVAEEDDDDDVDLFGEETEDEKKAAEERAAAAKASGKKKESGKSSVLLDVKPWDDETDMAKLEEAVRSVQMEGLLWGASKLVPVGYGIKKLQIMMTIVDDLVSVDTLIEDYLCAEPVNEYVQSCDIVAFNKI

SEQ ID NO: 67322 - protein, 389 aa, Zea mays
  Clone ID: LIB4765-017-A2_FLI.pep
LEAGRSNPIQTRQARNPPMAHRVLLLLSLAAAAAVAAAVDAEDPLIRQVVPGGDDNDLELNAESHFLSFVQRFGKSYKDADEHAYRLSVFKANLRRARRHQLLDPSAEHGITKFSDLTPAEFRRTYLGLRKSRRALLRELGESAHEAPVLPTDGLPDDFDWRDHGAVGPVKNQGSCGSCWSFSASGALEGAHYLATGKLEVLSEQQFVDCDHECDSSEPDSCDSGCNGGLMTTAFSYLQKAGGLEAETDYPYTGSDGKCKFDKSKIVASVQNFSVVSVDEAQISANLIKHGPLAIGINAAYMQTYIGGVSCPYICGRHLDHGVLLVGYGASGFAPIRLKDKPYWIIKNSWGENWGENGYYKICRGSNVRDKCGVDSMVSTVSAVHASKE

SEQ ID NO: 67323 - protein, 455 aa, Zea mays; identical to SEQ ID NO: 40951
  Clone ID: LIB4765-017-F3_FLI.pep

SEQ ID NO: 67324 - protein, 223 aa, Zea mays
  Clone ID: LIB4766-002-A2_FLI.pep
LPFFPLTLTASFCFYGSNDRVVEVEGSSSSSSMADVYKGELTPLQRHVAFFDRNKDGVIYPSETYQGFRAIGCGVALSAAAAVFVNGGLGPKTVLENEKPAPFKFPIYVKNIHRGQHGSDSGVYDSNGRFVPEKFEEIFKKYAQTRPDALTGKELQEMMKANREPKDLKGWLGGFTEWKVLYSLCKDKDGFLHKDTVRAVYDGSLFERLEQERNSKKESSKKK

SEQ ID NO: 67325 - protein, 234 aa, Zea mays
  Clone ID: LIB4766-002-G5_FLI.pep
PLHCWMKHGPLSRGAPSLVIIFILLTTLFIILVIDLRLGLVRLLFIFLLFLLGRSLLSCSALALVVGSDGLVVLELELVSLGYIGSLVRLAQGFPPVASSFPHRSDRLVLRVLLLELLAKFLHEHEESAGSPLRLVGVLAGLPFPALGGLLRPLALHRQLGIGLGGALGFGPLHGGFERRHGAQRTDPRLAEGIPVAGGRIGVESRAKLPLAARGEREGGKGKGRRRALPAGLE

SEQ ID NO: 67326 - protein, 119 aa, Zea mays
  Clone ID: LIB4766-003-A11_FLI.pep
GFLWSLRRRRHPPVSTVSLQDKMVSFEMNDLKKIGLGLTGFGIFFSFLGIVFFFDKGLIAMGNILFLSGLGLTIGLKSTMQFFTKPKNYKWVLANTFCVLAEDSYHRLDFPTTICDIVP

SEQ ID NO: 67327 - protein, 154 aa, Zea mays
  Clone ID: LIB4766-003-C11_FLI.pep
RERDSFRATQNPSPSTDPCHGGHHQPGEPPPAEAAQSDGGYFNAIMSFPENYPNSPPSVRFTSEMWHPNVYSDGLVCISILHPPGEDPSGYELASERWTPVHTVESIVLSIISMLSSPNDESAANIEAAKEWRDKREDFKKRVRRIVRKSQEML

SEQ ID NO: 67328 - protein, 82 aa, Zea mays
  Clone ID: LIB4766-003-C7_FLI.pep
SDLILQFVRPRLAMEDEELVDQKKYLEERCKPQCVKSLYEYEKCVKRVENDDTGHKHCTGQYFDYWSCIDKCVAPKLFKKLK

SEQ ID NO: 67329 - protein, 295 aa, Zea mays
  Clone ID: LIB4766-007-A12_FLI.pep
LEMDLILPYKVGDLAESKSLVSGYRGAWFRCKIHNMRVRLGYLECYLEYIDYPGETIVDETWQIGDRVDWLKEGCYWSGTITKIINEDLVEIELPAPPIGEGKCYKAKCSDLRPTLEWSLARGWMVPLSQANGKGWHAARLLQHYKSESDDDNDDNDSCDARQTVCRASNTHEEAPGPMVPAPPSATNNAPSHTYQKDAAVASTEDLLKPGSTSKSPDPRHDAQASAQPAGTGVSMKPEPVIGVSTIKKEDSLTEGEVDGDTEECLEKLGAIKARLKYLMQGTRLEHERSATFRG

SEQ ID NO: 67330 - protein, 172 aa, Zea mays; identical to SEQ ID NO: 41503
  Clone ID: LIB4766-008-C5_FLI.pep

SEQ ID NO: 67331 - protein, 237 aa, Zea mays
  Clone ID: LIB4766-008-C6_FLI.pep
RVTAVYNLPDTNRREPPLDLVELVCLHHRISLGNGVPGSSPVVELAVVLVGVAVERAVQVPTPAVESREPNPLPAGAAPVRPYLPPFGDRRHPLAGSGNISGLLHVHCLQLDLGNSYYRVAASNNRLHDGVAAVHDAVDRGGSQLGLILLRYHLLVALRAHVHGRRAAEEATVIDAEDGSLGGLAPSLLVLHGFLNSDETALFAIPLRRSPRGRRGGEGRGIAGNSVGFEMGPGRPR

SEQ ID NO: 67332 - protein, 212 aa, Zea mays
  Clone ID: LIB4766-008-D6_FLI.pep
RAPSSPHARHALLRFRSRRLPSSSSIRPARQRAGVGSVRCMARRPDSSYSPLRSGQGGDRAPTEMAPLFPGCDYEHWLIVMDKPGGEGATKQQMIDCYIQTLAQVLGSEEEAKKKIYNVSCERYFGFGCEIDEETSNKLEGLPGVLFVLPDSYVDAENKDYGAELFVNGEIVQRSPERQRRVEPVPQRAQDRPRYSDRTRYVKRRENQSYQR

SEQ ID NO: 67333 - protein, 308 aa, Zea mays
  Clone ID: LIB4766-008-H5_FLI.pep
VLMMAKANGAVHASTKEPLFSFGVIADVQYADIPDGRSFLGVPRYYRHSITVLQRAVNRWNEQGNIKFSINFGDIIDGYCPKDKSLWAVQKVLDEFDKFDGPTYHMIGNHCLYNLPRSQLVSLLKIATDSDRAYYDFSPCPGFRIVVLDAYDFSCLGWPHDHPVTIAAMKLLDEKNPNTDKNSPDGLVGVDRRFVKFNGAVGKEQVSWLNDVLQDASTQHQNVIICSHLPMDPGASSPAALMWNYDEVMAIVHQYNCVKACFAGHDHKGGHSVDSHVCTTAPLRLPWSVLLVPALLVTSKCILTGCCL

SEQ ID NO: 67334 - protein, 363 aa, Zea mays
  Clone ID: LIB4766-010-B10_FLI.pep
PPSRRASIMSAYCGKYKDELIKNAAYIGTPGKGILAADESTGTIGKRLSSINVENVEENRRALRELLFCCPGALQYTSGVILFEETLYQKTKDGKPFVDVLKEGGVLPGIKVDEGTIEVVGTDKETTTQGHDDLGKRCAKYYEAGARFAKWRAVLKIGPNEPSHLAIDLNAQGLARYAIICQENGLVPIVEPEILVDGPHDIDRCAYVTETVLAACYKALNEHHVLLEGTLLKPNMVTPGSDSKKVTPEVIAEYTVRTLQRTVPAAVPAVVFLSGGQSEEEATRNLNAMNKLSTKKPWSLSFSFGRALQASTLKAWAGKVENLEKARAAFLARCKANSEATLGTYKGDAAADTESLHVKDYKY

SEQ ID NO: 67335 - protein, 279 aa, Zea mays
  Clone ID: LIB4766-015-G9_FLI.pep
LEAGRAPLSTPSLAWSSTHPSLVIHPVSSPAKRKMSSLHATRAELGLVVLYLNKAEARDKICRAIQYGSKFVSNGQPGTAQEVDRSTTLARKVFRLLKWVNDLHALISPPAKGTPLTLVLLGKSKNALLSTFLFLDQFVWLGRTGIVKNKEATDRVARLSLYCWMASSACAGLVELGELKRLSRSMRKLARELRDTDKYECLSHGHSQNEQYQDKMRQSDERLLALVKAAMDVVVAVGLLQLAPKKVTPRVTGAFGFVTSLISCYQQLPSRAPVAKVKV

SEQ ID NO: 67336 - protein, 160 aa, Zea mays
  Clone ID: LIB4766-016-D10_FLI.pep
RGRPGSCPFRDPLSEPQSLEQQNLQAKPGKQAQHNPEMASASVPMAFSLSSVINNNKPSSEAFFRPLPLRQPKRTLFTTKAVSNSKAQINASLKEKAVAGLTAASVTASMVVPEVAHAAGYEFSPSLKNFLLSIFAGGFVLVAIFGAVIGVSNFDPVKRT

SEQ ID NO: 67337 - protein, 231 aa, Zea mays
  Clone ID: LIB4766-017-E2_FLI.pep
ASKVDGLREHVKKSGLAEKIELVISSPLLRTMQTAVSVFGGEKYTDGVNAPPLMVENARHSGRPAVSSLNCPPFIAVETCREHLGVHPCDKRRSITEYRPLFPAIDFSLIENDEDVLWEPDVREPNEAVALRGMKFMDWLWTREEKEIAIVSHSGFLFHTLSMYSKECHPTIRDEVSKHFANCELRSMVLVDRSMLGSYSSRFNYAGKNPTGLDVPSDIADKKQVDEAQKN

SEQ ID NO: 67338 - protein, 169 aa, Zea mays
  Clone ID: LIB4766-017-H11_FLI.pep
WLRALATDAAGELDVLGHDGDALSVDGAEVGVLEETDEVGLGGLLERQHGVALEPEVCLEVLRDLAHQALEGQLADQQLRALLVLADLAQRHGSGPVPVGLLHAAGRRRRLPRRLGGELLAGGLASRGLAGGLLRTSHPPLLSSSSARRGNLLFGCLDGTSSLRMPGHE

SEQ ID NO: 67339 - protein, 173 aa, Zea mays; identical to SEQ ID NO: 65494
  Clone ID: LIB4766-022-A11_FLI.pep

SEQ ID NO: 67340 - protein, 199 aa, Zea mays
  Clone ID: LIB4766-022-F10_FLI.pep
QGVGFCVAASECHCYPSPDNMVSFEMNDLKKIGLGLTGFGIFFSFLGIIFFFDKGLIAMGNILFLSGLGLTIGLKSTMQFFTKPKNYKGTISFAAGFFLVLIGWPFLGMLLEAYGFVVLFSGFWPTLAVFLQRIPIIGWIFQQPFVTSVCKGSNSFRLLYGKERRLGRIEVTCDSCDAMWLFSSVIPLPGLVWELSFEL

SEQ ID NO: 67341 - protein, 137 aa, Zea mays
  Clone ID: LIB4766-024-B8_FLI.pep
STVPGDRRRFPTHPWPATTSAHYGRMTTLRNLKIKTSTCKRIVKELRSYEKEVEKEAAKTADMKEKGADPYDLKQQENVLAESRMMVPDCHKRLETALADLKATLAELKESNEQGAEIGEAESTIAEVEAVVKPAED

SEQ ID NO: 67342 - protein, 214 aa, Zea mays
  Clone ID: LIB4766-024-G6_FLI.pep
RRGKMSFRAREMYKKVVRRVGGEGKLPAELMNSVKDMLPDSNVIMGRAKRGIFAGRHIRFGNKVSEDGGNKSRRSWKPNVQEKRLFSYIHDRHIRVKVTTHALRCIDKAGGIDEYLLKTPYNKMYTEMGIVWKAKIEKMYSDLGEMEVGFFPPEEEAKVKEGFDEVRAAKKDFRREAKRALAKQRQLEASSAGDDQAGEVTHKKEKVSAAAAEL

SEQ ID NO: 67343 - protein, 416 aa, Zea mays; identical to SEQ ID NO: 57997
  Clone ID: LIB4767-001-F3_FLI.pep

SEQ ID NO: 67344 - protein, 434 aa, Zea mays
  Clone ID: LIB4767-001-F7_FLI.pep
GRERTNSSTIPPPSFPAILPSRQGVSSSSLPPFHPVSSPPPSPGRVEFFHPPHRSTTTTRMLGAARRQLGSGPMLGQVLRRLRPAVAAEVARGYSAAAKEMTVRDALNSALDEEMSADPSVFLMGEEVGEYQGAYKISKGLLDRHGPDRVLDTPITEAGFTGIGVGAAYHGLRPIIEFMTFNFSMQAIDHIINSAAKSNYMSAGQISVPIVFRGPNGAAAGVGAQHSQCYAAWFAHVPGLKVLTPYSSEDARGLLKAAIRDPDPVIFLENELLYGESFPVSAEVLDSSFCLPIGKAKIEREGKDVTITAFSKMVGYALQAAEILSKEGISAEVINLRSIRPLDRAAINASVRKTNRLVTVEEGFPQHGIGAEICMSVVEESFAYLDAPVERIAGADVPMPYAANLERMAVPQVDDIVRAAKRACYRAVPMAAAA

SEQ ID NO: 67345 - protein, 412 aa, Zea mays; identical to SEQ ID NO: 65703
  Clone ID: LIB4767-004-F11_FLI.pep

SEQ ID NO: 67346 - protein, 213 aa, Zea mays
  Clone ID: LIB4767-006-A12_FLI.pep
ADAARPPVQDAATLPSTKKMCATHQPQGAGCCATHVPARPPRPAPRRVRLGLVQHPAGDDGGLYDERDHVDDLVDHAPVPLERGRALPQLGQAVQQRLVAGRAQVVHLCLDAVVVVHAAGVQRVARRLAGAAAVHDAAVLAVPQERRRRAVVRLARAAARLLLARVVAGVLDADVERGGGRREEGRADKGAGDHREPPGTAALHRPHGSSRTN

SEQ ID NO: 67347 - protein, 407 aa, Zea mays
  Clone ID: LIB4767-007-B1_FLI.pep
VEAGRKKKKKKSLATGYTLSESRSLLATDHTLSIDAAQMEAIRKQASKLREQVARQQQAVMKQFGGGYGADGVFADEAEAHQHSKLEKLYISTRAAKHFQRDIVRGVEGYIVTGSKQVEIGNKLCEDGKKYGTENTCTSGSTLSKAALSFAKARSMMEKERGNLLKALGTQVAEPLRAMVMGAPLEDARHLAQRYDRMRQESEAQAIEVSKRQMKLREASGNSDMISRLEAAESKLQELKSNMGGLGKEALAAMTAVEGQQQRLTLQRLIALVESERNYHQKVLQILDQLEREMVSERQRIEGAPPPVVESSMPPPPAYEEVNGIFMRNTVAELVETVEYFLAEAIQSYRAESDTELNLSAGDYIVVRKVSNNGWAEGECRGRAGWFPYDYIEKRERVLASKVAQVF

SEQ ID NO: 67348 - protein, 336 aa, Zea mays
  Clone ID: LIB4767-007-H12_FLI.pep
QRAAADAVAGPHVRLRVPVPARVPVRQDRHAAAAGAGQLRRHRHRLLPVVAGRRARRDRLRVPGQRVRRALHAAHQRVHAGAGAAGAAVPPLVRPHRRLPHLLHPLEPQARHVSRRSLLCFLLLHSYRLQLLHFMVGVHALLLLRQLHGGRHAHQGLPQPGEQGGGVPQEPADAALLQPVERGRLGDAGRARQDGLVPRPLLRLLPRVQGRRLRRRRGRPDPLRRHRRHRGHRRPRLRRRRRGLVQPGAGPHPAAADALGAAQVHDLQLLHRPQALPAGPPRRVLHAVAPGYSSPVQQWRARACVCMWSALLLPLRRSVSITGSRQDERHRNMVDK

SEQ ID NO: 67349 - protein, 297 aa, Zea mays
  Clone ID: LIB4767-008-C2_FLI.pep
LRCAAHPWVGRLRLLVVGGGELLVGVGDEEQLVDDAGEAAADEGADPVHPLVAPLPADEGGAEGHGGVHGRAVEGAAHQDVGPHDEADGDGGDGAQAALLRVHRRGVHRVHQPEGHHDLQHQRLPHRHARQPEGARGLPARREAEQEARHGGPQQLRHPVQEPPEQGDVAAHEGAEGHGRVHVPARDVRAHRHRHEQRERVRHRRRDQARRGRRAAAGQLAEGHAGALAGEDEDEGGDELSERRLEGARVVHLLVAPQGDPIDRHFHGPLASSRALVTTVIGAGVELSSARGVWDAV

SEQ ID NO: 67350 - protein, 455 aa, Zea mays; identical to SEQ ID NO: 40951
  Clone ID: LIB4767-009-F8_FLI.pep

SEQ ID NO: 67351 - protein, 395 aa, Zea mays
  Clone ID: LIB4767-012-A2_FLI.pep
GFRWPLRRQRAPTSSSVEMADGEDIQPLVCDNGTGMVKAGFAGDDAPRAVFPSIVGRPRHTGVMVGMGQKDAYVGDEAQSKRGILTLKYPIEHGIVSNWDDMEKIWHHTFYNELRVAPEEHPVLLTEAPLNPKANREKMTQIMFETFNVPAMYVAIQAVLSLYASGRTTGIVLDSGDGVSHTVPIYEGYALPHAILRLDLAGRDLTDSLMKILTERGYSFTTSAEREIVRDIKEKLAYIALDYEQELETAKNSSSVEKSYELPDGQVITIGAERFRCPEVLFQPSMIGMEAAGIHETTYNSIMKCDVDIRKDLYGNIVLSGGSTMFPGIADRMSKEITSLAPSSMKIKVVAPPERKYSVWIGGSILASLSTFQQMWISKEEYDESGPAIVHRKCF

SEQ ID NO: 67352 - protein, 381 aa, Zea mays
  Clone ID: LIB4767-012-B2_FLI.pep
ASKNQAKKIFAVLRTSRLDKADRPTPNCSVKAESAPPRAVLFGSPLLSPRRRRNPQMEVVVAAKQKAKKHIHLFYCSECEELALKIAASSDAIELQSINWRSFDDGFPNLFINKAHDIRGQHVAFLASFSSPSVIFEQISVIFALPKLFIASFTLVLPFFPTGSFERVEEEGDVATAFTLARILSMIPKSRGGPTSVVIYDIHALQERFYFGDDVLPCFETGIPLLLQRLRQLPDAENITIAFPDDGAWKRFHKLLQHFPMIVCNKVREGDKRIVRIKEGLPEGRHVVIVDDLVQSGGTLRECQKVLALHGAAKVSAYVTHAVFPKQSYERFMASSSAGPGDQFAYFWITDSCPHTVKAIGQRPPFEVLSLAGSIADALQI

SEQ ID NO: 67353 - protein, 452 aa, Zea mays; identical to SEQ ID NO: 60113
  Clone ID: LIB4767-012-H11_FLI.pep

SEQ ID NO: 67354 - protein, 429 aa, Zea mays
  Clone ID: LIB4767-015-F2_FLI.pep
RGRPGPPVLLLHPARRFRNPESSRRARARVSMADGEPSLTRWTFEDFVVHYEARFGLRREADGDDAPPPRGSDHGASRPATARANGGADLAVFEQFERMERKVEISNGAIEDGPLQKSLLPSFESAEMRNLAETLLRDIIRGSPDVKWESIKGLENAKRLLKEAVVMPIKYPKYFTGLLSPWKGILLFGPPGTGKTMLAKAVATECKTTFFNISASSIVSKWRGDSEKLVKVLFELARHHAPSTIFLDEIDAIISQRGEARSEHEASRRLKTELLIQMDGLTKTDELVFVLAATNLPWELDAAMLRRLEKRILVPLPEPDARHAMFEELLPYTPGTMEIPYDVLVEKTEGYSGSDIRLVCKEAAMQPLRRVMAVLEGRKEEVPEGELPEVGPVTTEDIELALRNTRPSAHLHAHRYEKFNQDYGSHVHG

SEQ ID NO: 67355 - protein, 128 aa, Zea mays
  Clone ID: LIB4767-015-G6_FLI.pep
PRSADMLLLAVFLTVHFRINLQFWIVSEMQCLRKVSRPVIHGHIPPRVPRAASPRLHPVRSLFRSIELSLFIPSHYCIEISSLIIFSWVSGKEKTRFMLSILDLQRSTEIHQHTSTFHTEQSRRDDME

SEQ ID NO: 67356 - protein, 407 aa, Zea mays; identical to SEQ ID NO: 40940
  Clone ID: LIB4767-018-C1_FLI.pep

SEQ ID NO: 67357 - protein, 275 aa, Zea mays
  Clone ID: LIB4826-001-B2_FLI.pep
LEAGREHSPRSSIHLSHPLAKRAMAKFALGHHREASDAGCVRAVLAEFILTFLFVFAGVGSAMATGKLAGGGGDTVVGLTAVALAHTLVVAVMVSAGLHVSGGHINPAVTLGLAATGRITLFRSALYVAAQLLGSTLACLLLAFLAVADSGVPVHALGTGVGALRGVLMEAVLTFSLLFAVYATVVDPRRAVGGMGPLLVGLVVGANVLAGGPFSGASMNPARSFGPALVAGVWADHWVYWVGPLIGGPLAGLVYDGLFMAQGGHEPLPRDDTDF

SEQ ID NO: 67358 - protein, 145 aa, Zea mays; identical to SEQ ID NO: 66205
  Clone ID: LIB4826-001-B6_FLI.pep

SEQ ID NO: 67359 - protein, 132 aa, Zea mays
  Clone ID: LIB4826-006-H12_FLI.pep
HTDKKKNSIMSEVKDSNVPAALDGNPQPTDQTEDNSMPSAQQQEEAIKKKFGGLMPKKPPLISKDHERAYFDSADWALGKQGVAKPKGPLEALRPKLQPTRQQQQQRARRPIYTSSENEDGDGAGAEDMNIN

SEQ ID NO: 67360 - protein, 386 aa, Zea mays
  Clone ID: LIB4826-007-F11_FLI.pep
LEAGRDSPFASFTIPPQNTSCDPRSLRRASIMSAYCGKYADELIKNAAYIGTPGKGILAADESTGTIGKRLSSINVENVEENRRALRELLFCCPGALQYISGVILFEETLYQKTKDGKPFVDVLKEGGVLPGIKVDKGTTEVVGTDKETTTQGHDDLGKRCAKYYEAGARFAKWRAVLKIGPNEPSQLAIDLNAQGLARYAIICQENGLVPIVEPEILVDGPHDIDRCAYVTETVLAACYKALNEHHVLLEGTLLKPNMVTPGSDSKKVTPEVIAQYTVRTLQRTVPAAVPAVVFLSGGQSEEEATLNLNAMNKLGTKKPWALSFSFGRALQASTLKAWAGKVENVEKARAAFLARCKANSEATLGTYKGDAAADTESLHVKDYKY

SEQ ID NO: 67361 - protein, 310 aa, Zea mays
  Clone ID: LIB4826-009-B6_FLI.pep
SRPAGTNLSTPRRVRGGAAMASSVAAAASTFLGTRLADPAPQNGRIVARFGFGLGGKAKPAPKKVAKTSTSSDRPLWFPGAVAPDYLDGSLVGDYGFDPFGLGKPVEYLQFELDSLDQNLAKNEAGGIIGTRFESSEVKSTPLQPYSEVFGLQRFRECELIHGRWAMLATLGALSVEWLTGVTWQDAGKVELVDGSSYLGQPLPFSISTLIWIEVLVIGYIEFQRNAELDPEKRLYPGGSYFDPLGLAADPEKKERLQLAEIKHARLAMVAFLGFAVQAAATGKGPLNNWATHLSDPLHTTIFDTFGGSS

SEQ ID NO: 67362 - protein, 167 aa, Zea mays
  Clone ID: LIB4826-009-D3_FLI.pep
TSTTVIMSELSFQVIKCQSNLHCTSHRKDKAVWVVAAFSNLPCGKSNSPNLAHMEQKANTTRSQNSLLHWEPLLVTSTHDLEDITLELLTQSITTDLLGYPSVIKGTQLLVVIDFQLLLAPGGRVRDVELHGDVAARARRERGARALGGEGGGGARARVLDEPGRPR

SEQ ID NO: 67363 - protein, 148 aa, Zea mays
  Clone ID: LIB4826-010-F5_FLI.pep
NYTMINSKMLVQLAKKWQHMAALGRRRLTMTTTIKDGNLYCTSAIANKGHCIVYTADGKRFEVPLAYLSTNVFVELLRMSEDEFGFTSEDRITVPCDAEVMEYVMCLLRRKPSEEVERAVLNSVVMPCNCMSTMTMVSKGLNQSLSIF

SEQ ID NO: 67364 - protein, 137 aa, Zea mays; identical to SEQ ID NO: 47611
  Clone ID: LIB4827-005-B3_FLI.pep

SEQ ID NO: 67365 - protein, 211 aa, Zea mays
  Clone ID: LIB4827-006-C10_FLI.pep
FMFIVSVYAINKPTWFANTSTGAQQQTGELWKMNWVRLLVQSHRVFPERLLLSLVRIHSSWKSASINFRIRHGEEATAGCSSRAWRREAKQFLQVGSDAHGAEEVEEDHGAVGGIVPGQSAVAHPLDERDGREGQLGDGAALEEGVEQAEDDEEHDSDDGARLELGERELPRSVLEAGLDAVHLLSPRRCGLRGGGGGAGGGGGGAGLHGV

SEQ ID NO: 67366 - protein, 192 aa, Zea mays
  Clone ID: LIB4827-006-E3_FLI.pep
IKLRAIHDKLRPPLRSPPSYSDPKERTQGESTMTEGGRPNRPDQRDLGELSAVSDLDHLGGGAVAGAHLLDGLDDVHALDDLAEDDVLAVEPRGRDGADEELGAVGVGPGVGHGEHTGSGVLAHELLVGELLAVDGLAAGAVAAGEVAALAHELGDDAVEHSDVVVAASAEGQEVIRRAGHLIADHLAFDVA

SEQ ID NO: 67367 - protein, 263 aa, Zea mays
  Clone ID: LIB4827-007-E3_FLI.pep
ARRWDPSLITSWSSGGSCGPPKVPPGPNITTNYNGKWLTARATWYGQPNGAGAPDNGGACGIKNVNLPPYSGMTACGNVPIFKDGKGCGSCYEVRCKEKPECSGNPVTVYITDMNYEPIAPYHFDLSGKAFGSLAKPGLNDKIRHCGIMDVEFRRVRCKYPAGQKIVFHIEKGCNPNYLAVLVKYVADDGDIVLMEIQDKLSAEWKPMKLSWGAIWRMDTAKALKGPFSIRLTSESGKKVIAKDVIPANWRPDAVYTSNVQFY

SEQ ID NO: 67368 - protein, 343 aa, Zea mays
  Clone ID: LIB4827-007-G3_FLI.pep
FPSLFSLLRRVRAGSKVGFGPQSSCLWGQRRRWTTPTPSTSSRTPRAPTPGPTRRRPRAPTPASGPPRTTTAIGKMFFKTKLCCKFRAGTCPYVTNCNFAHGMEELRKPPPNWQEIVAAHEEATEQREEHQIPIMTSGSVVAGDGGGGSGGGSQGGRAFKGRHCKKFYTEEGCPYGDTCTFLHDEQSKARESVAISLSPTVGGGGYNAASANGVMVQKPSNWKTRICNKWEMTGYCPFGSKCHFAHGSTELHKYGGGLVDIDGRDILSTPDSKQAGGSAKAPLESAAASTALPPHADVYHLGIQSQRSAIASQRSGQLQRPIQKWKGPDKISRIYGDWIDENE

SEQ ID NO: 67369 - protein, 236 aa, Zea mays
  Clone ID: LIB4827-010-B11_FLI.pep
LDRTDEQRSAQKEKNLGAEMAQAMASMTGLSQGVLPSRRADSRTRTAVVIVRASAEGDAVAQAGRRAVIGLVATGIVGGALSQAARAETVKTIKIGAPPPPSGGLPGTLNSDQARDFDLPLKERFYLQPLPPAEAAARVKTSAQDIINLKPLIDKKAWPYVQNDLRLRASYLRYDLKTVIASKPKEEKKSLKELTGKLFSTIDDLDHAAKIKSTPEAEKYFAATKDALGDVLAKLG

SEQ ID NO: 67370 - protein, 181 aa, Zea mays
  Clone ID: LIB4828-001-E12_FLI.pep
PQDFMFLSRCLRWRLGPLAADPPCQLNVLWHDGHTLSMDGAQVGVLKQANKVCLSSLLEGKHRMALETQISFEVLCNFPDEPLEGQLPDQQLSALLILADLTEGNSSRAVAVRLLHSTSGGGRLTGSLGGKLLPGSLPSRGLASSLLGTSHLSRFFGLSARFESGGRRARNGRPEKSGRPR

SEQ ID NO: 67371 - protein, 351 aa, Zea mays
  Clone ID: LIB4828-002-F2_FLI.pep
KLKAEAEIMDDVHVWFVSLACLGGLYIAAICWRPLAYLALCLRGPKDLHRYGSWAMVTGPTSGLGRSMAMELARRGLNLVLLDLDANNLQETSEAIKSVHPVKIRTVVLDLSLVATPEGDKAIRRLREAIEGLDVGILVNNAAVNTPGAVYLHEADIERFVRMIRVNLWGLTEVTAAVLPSMLARRRGAIVNVGSGSTVAVPSFPLYTVYSSTKKYVAHLSRSLYVEYKSKGIDVQYQVPFYVHTRMLSSAVKAKLRPWFVATAEDYTSTAARWIGNGPVCVPGAAQNLQWCLTGFVPDWVHDWYRIRLHLQHRAVLRGGRAAIASAHSRAEKAVTPDDDDANSVAPKISA

SEQ ID NO: 67372 - protein, 416 aa, Zea mays
  Clone ID: LIB4828-006-C6_FLI.pep
SIDHDKMACTNNAMRALFLLVLFCIVHGEKEESKGIDAKASGPGGSFDITKLGASGNGKTDSTKAVQEAWASACGGTGKQTILIPKGDFLVGQLNFTGPCKGDVTIQVDGNLLATTDLSQYKDHGNWIEILRVDNLVITGKGNLDGQGPAVWSKNSCTKKYDCKILPNSLVMDFVNNGEVSGVTLLNSKFFHMNMYRCKDMLIKDVTVTAPGDSPNTDGIHMGDSSGITITNTVIGVGDDCISIGPGTSKVNITGVTCGPGHGISIGSLGRYKDEKDVTDINVKDCTLKKTMFGVRIKAYEDAASVLTVSKIHYENIKMEDSANPIFIDMKYCPNKLCTANGASKVTVRDVTFKNITGTSSTPEAVSLLCTAKVPCTGVTMDDVNVEYSGTNNKTMAICTNAKGSTKGCLKELACF

SEQ ID NO: 67373 - protein, 274 aa, Zea mays
  Clone ID: LIB4828-011-F10_FLI.pep
SRPAGAPHIIAFPLLTSLLRHAASPRKLHRDTDTGNKGNSHGGNPCPVPPRRGCRGALSHACGRGRGHAGGDLQGNRVPRHLHQHGGERGAERRGVGRHGGVADAGGRVQQAHRGGEGARQGGRRDGVPQGADGAGPVQQPVPGRGGQPGSLPPRHRLQGRRHHPRHHGHGGAGHAELRRAVQADRREEPHGAVRRVARRDVRELPLALQHDLIDLLLHGRQQRAGRFGPSHRLSPLLTFACPCPRARSRATITDELSLFCFDHLTSLFPVEMR

SEQ ID NO: 67374 - protein, 242 aa, Zea mays
  Clone ID: LIB4829-001-A2_FLI.pep
YAMTADSTIPSQAAVASQNNTSNGQPRTKICVYCGSAPGASPAHIEAARALGKAMAENNIDLVYGGGTVGLMGEVAKSLCAINGPDSVHGIIPEALVKYERDGTYGTVNEHNHIVPEESVYGHTTVVKDMHTRKKLMAEEVFAGGPGSGFIGLSGGFGTMEEIFETTTWNQLGIHNRGIVLLNIEGYWDGIVQWMDRAAEQGFVKPANKDILVNADTPEGAIQALRDYKVSDAIYQLQWGSQ

SEQ ID NO: 67375 - protein, 200 aa, Zea mays
  Clone ID: LIB4829-002-C5_FLI.pep
LEAGREKNMPSVVTEDHVRFCFEVLVNHLKKKHYPQPHFPNDTYPLFVTWHIESYGHSKLRGCIGNFSPLKLHEGLLKYALISALKDTRFKPITLEELPRLSCAVSLLTDFEQADDYLDWEIGVHGIWIEFIQQDGEKETATYLPEVIKEQGWTKEEAIRSLLRKGGYYGNITKEYCESSIILTRYQSQKKEFSYKSLFH

SEQ ID NO: 67376 - protein, 253 aa, Zea mays
  Clone ID: LIB4829-002-D12_FLI.pep
RGRPGLLFVVSLNIFNMISLTIGVLALQGGFSEHIDLVRKAAESISCTENISKNKIQCIEVRTKEQLDQCSALIIPGGESTTISFVAAQSGLLEPLRDFVKVQKRPVWGTCAGLILLSDEANATKKGGQELIGGLAVRVHRNHFGRQTESFEAGMNLPFLNDEKPYPGVFIRAPVVEQVIGASDGRQPVEVLAKLPGRVDKMKSGVSQANTKDDSGDIVAVRQGNVLGTSFHPELTKDERIHVWWLKEILNQQ

SEQ ID NO: 67377 - protein, 196 aa, Zea mays
  Clone ID: LIB4829-002-H8_FLI.pep
LEAGRENIRVSVTPDLPLPLRAAAAAVMRIAVVAPVAAAYPCSSSLAAPASATSRAHVAAAGMSYRASSFVGGGLAAVVASVAARPRRAGSGRGDALGCKCLFGLGVPELAVIAGVAALVFGPKQLPEIGRSLGKTVKSFQEAAKEFESELKKEPGEGGDQPPPATPTATGVGGAEKGLEASSSKESTSRRRGLLV

SEQ ID NO: 67378 - protein, 262 aa, Zea mays
  Clone ID: LIB4829-003-A6_FLI.pep
SRPAGRDLDCYVTVPQFLSLIQQTTPLLHPNTAAMDIRLLTNADLPLIQHANLENLPENYFLKYYLYHALSWPQLSYVAVDVSRPKKDPYEYPKIVGYVLAKMEEEPSDGIPHGHITSLSVMRTHRRLGIAEKLMRQSQLAMVETFQAKYVSLHVRVSNAAARHLYENTLGFTNEKTESKYYADGEDAFCMRLDLGDIKKQVDETLAAEEADAADEGDAVGEVGRDPEAGKDKEDGEGRKMKVAVGRGLGVGSLVEKDESKN

SEQ ID NO: 67379 - protein, 169 aa, Zea mays
  Clone ID: LIB4829-003-C10_FLI.pep
LEAGRALLKISPKTSPLEEGSPSERAAMADSSAPTRVMMAVNESSLKGYPHPSISCRTAFDWTLSKLVRSNPGGFHFLFVHVQVPDEDGFDDMDSIYASPEDFHQMKQRDKIRGLHLLEYFVNQCHQLGIKCEAWIRHGDPKEVICSEVKRVQPDLLVVGSRGLGPFQR

SEQ ID NO: 67380 - protein, 219 aa, Zea mays
  Clone ID: LIB4829-004-D3_FLI.pep
SRPAGKYKYTHRTSYPMRFSPFLSNIIFTFSNITRVRPPLTSHLAYRPNLPLRSMSGIPILGALFGTSSSNNSKMSYPDQRSNDEWRAVLNKEQFRILREKGTEAPGSGTFDKHYPDEGVYTCAGCEAPLYKATHKFKSGCGWPAYFDSIPGAVVRHEDRTFGMARTEIVCSNCGGHLGHVFKGEGYDTPTDERHCVNSVSLNFSPNDKIVKDKPESKA

SEQ ID NO: 67381 - protein, 373 aa, Zea mays
  Clone ID: LIB4829-004-F10_FLI.pep
RAPPIANTIIMGAPEVHHLFHNPIADHSFSADQSTLAVARDTSVELYGKVGSAFKLKDSLKGHDKTVTGVDIAPNSGRIVTCSQDRNAIVWEPSPEGYKPTLVLLRISRAATFVRWSPSENKFAVGSGDRVIAVCYFEEENDWWVSKHLKKPIRSTITSVAWHPNSVLLAAGSTDAHARVFSAFIKGMDARPPPGVWGERLPFNTVCGEYLNNSAGWVHSVSFSPSGDSLAFAAHDSSITVVYPSGPDQAPRAVVTVSTQQLPFKSLIWTSEDEIIAAGYDCEAFRFQGGEGGWQLAGPIEQKGGPGLGEHREESALNMFRQMDLKGKAKDDTQLQTTHQNTISTVRPFESSGDRVTKFSTSGVDGRIVLWSA

SEQ ID NO: 67382 - protein, 217 aa, Zea mays
  Clone ID: LIB4829-007-A12_FLI.pep
SRPARKKKKKKGEGKDNFLVTFRAPLPLLAFPHQTLIRAPSPYPLPLAPAFGALTLSGRNPQGSGWVPEASKSLAGDREMAEKEGAKVGAEEMEEREQEGEAEEVEVKFRLFDGSDIGPVRCNAATTTVAALKDRVVADWPKDKQIIPKTASDVKLISGGKILENDKNVAQCRAPFGDLPSSAITMHVVVQPSSAKSKPDKKANKLPKTTRCSCTIL

SEQ ID NO: 67383 - protein, 136 aa, Zea mays; identical to SEQ ID NO: 36723
  Clone ID: LIB4829-007-C6_FLI.pep

SEQ ID NO: 67384 - protein, 249 aa, Zea mays
  Clone ID: LIB4829-008-C12_FLI.pep
PRGRPGSKSKQERQTQIAASRASSSSSSSASSCRAQCYVGRSSRPRARVVARRSIAGNVDQLEGQLQGQLQQRDPRHRHGGAQLQQPAPRVLRPVASGHVPSPPPQEGGLGGGVHVPAGVRDVRGGGDLRQRQGPHLAAGAVGRRRPHRHRDDLRRRPHLRRAHEPRRHARLRRVPPFPLDPGPVLLGGAVHRRHLRVVRAQGRAAPHRRAGHHHAGGAALALAHHRGHRHLQHDVRHPRRRHGHESGG

SEQ ID NO: 67385 - protein, 418 aa, Zea mays
  Clone ID: LIB4829-008-D6_FLI.pep
SRPAGKMSRKIRTAQSVSFDIPAAEQPYLHNRWHPEVPSIATVEPGETVKIECLDWTGGQIGNNDSADDVRDVDLTKIHYLTGPFEIKGSEPGDLLVVNITDIQPFDHSPWGFTGVFSKDNGGGFLSEHYPDAAKAIWDFDGVYCSSRHIPGVRFPGLIHPGILGCAPSAEILAEWNRREGELATSMAGPHPDKVFAQPPCEINAHGGLAKGDVMARIAKEGARTIPGRPEHGGNCDINNISRGSKTYLPVHVPGAKFSVGDLHFSQGDGEISFCGAIEMAGIITIKFDLIKGGVKSRGLKSPVYRPGDMGPTFSPSRYLTFEGFSVDEQGKQHFMDATIAYRQSCLRAIEYLKQFGYSGEQIYLLLSCAPIRGAIAGIVDIPNACTTLGIPMDIFDFDISIESEPVVRNLGACPISR

SEQ ID NO: 67386 - protein, 207 aa, Zea mays
  Clone ID: LIB4829-011-G5_FLI.pep
DPIESGFPSAASAAGAMNSSKQALIYSFVAKGSVVLAEHTAFSGNFSTVAVQCLQKLPPNSTRSTYSCDGHTFNFLVNRGFVFLVVADEAAGRSVPFVFLERVREDFMQRYGSSIDEEGQHPLADDADKDDFLFEDRFSIAYNLDREFGPRLKDHMQYCVNHPEEINKLSKVKAHLSDVKGIMMDNIEKILDRGEKIELLVGKTETL

SEQ ID NO: 67387 - protein, 116 aa, Zea mays
  Clone ID: LIB4829-012-E3_FLI.pep
LEAGRASYNLITMATSIKSIRALAPLLDRVLVQRIKAETKTASGIFLPESSVEKLNEAKVLAVGPGALDKKGNRLPMGVTVGDRVLIPQFGGSPVKAGEEEFQLFRDSEILAKINE

SEQ ID NO: 67388 - protein, 269 aa, Zea mays
  Clone ID: LIB4829-012-G4_FLI.pep
LEAGRDIDFYSAASLLRSMHDKRRMGTEADAAAVDLLRSQIPFQTDGEFVLPPRGVGLVLVDLCNGFCTVGAGNLAPVAPNKQISKMVEEAARLSKLFCDRNLPIFAFLDTHYPDKPEPPYPPHCIIGTGEEDFVPDLEWLEKEPNVTIKRKSCIDGYISCIEKDGSSVFADWIGKYQIKTVLVLGICTDICVLDFASSTLAARNIDRVPPLQDVVIYSGGCATYDLPVEIATNIKGALAHPQDLMHHIGLYMAKGRGAKIVDRVVIEP

SEQ ID NO: 67389 - protein, 182 aa, Zea mays
  Clone ID: LIB4835-002-E8_FLI.pep
RGRPGITITMSGLFARQAWATASKVRSTALRAPKVAFTCRVNNIAPRRSFSVSMNLLARKYTESHEWIDVAADGKTCTIGISNYAAEALGDVVYVELPAVGEETAQGESFGSVESVKSASDINSPVSGSVVEVNDPIVETPADLGKDPEKSGWLIKVEAEDVSALDALMDEAAYAEHIKGEH

SEQ ID NO: 67390 - protein, 139 aa, Zea mays
  Clone ID: LIB4835-005-G5_FLI.pep
SRLRLRLQQQVKEVEGELERRGRCWRRRIRCCGTRWPPSPGLPLWGSAPTARTCSAPRTPRTKRFGTRRPCTISSTPRRCSGRPSPSAPTFSEGSSLLELCSSLERATPWLILKTGSFLHRHHWGALRLLLLGPASSSD

SEQ ID NO: 67391 - protein, 220 aa, Zea mays
  Clone ID: LIB4862-001-C12_FLI.pep
SRPAWPGPPLDVSLAISSSTPDWRTRHHEGADRCPCSPGARCERRLQYKRRLWLPDTTVSSTASVLYAASVLSAAAAAAAAMAIPHSTTAAKPVPAVRILRRRQRRQPVPGPVRRVPEAPVQPGGDALRLATVPGAAAAVLPPDQAGGAAAPVPGDIRCGPAVLPAAAAAGRARGADGGPGSAAADGDVRPAAAAARSLPLQRSCRRCLLLRKLCTVVIM

SEQ ID NO: 67392 - protein, 213 aa, Zea mays
  Clone ID: LIB4862-006-C3_FLI.pep
PPLDVGLAISSSTPDWRTRHHEGADRCPCSPGARCERRLQYKRRLWLPDTTVSSTASVLYAASVLSAAAAAAAAMAIPHSTTAAKPVPAVRILRRRQRRQPVPGPVRRVPEAPVQPGGDALRLATVPGAAAAVLPPDQAGGAAAPVPGDIRCGPAVLPAAAAAGRARGADGGPGSAAADGDVRPAAAAARSLPLQRSCRRCLLLRKLCTVVIM

SEQ ID NO: 67393 - protein, 279 aa, Zea mays
  Clone ID: LIB4862-011-F8_FLI.pep
GPGYYLNVGVPAQAAGLNPPCRRFGSSEEERESESCTRGAGGRIVEYVELVHCRRGLKASHIIDGGRSSRLPAGSGGRRARRPLRRRVVRVPPGAGGQRAAEGAGLRVRRRRRLQAHPAERRLLRPGHRQGPLLLRRQQLLPAQQPEPAGLRLLRHRHAQQQRPERQWLHVPCDPKVGRSGALLMGNGSRAHVLGVGTVILKFTSGKTVPLKSVQHVPSIKKNLVSASMLCRDGYKVVLESNKCVVSKHGIFVGKGYDCGGLFRLSLHDVCNKLVNSVP

SEQ ID NO: 67394 - protein, 257 aa, Zea mays
  Clone ID: LIB4863-003-D11_FLI.pep
RGRPGRGRTLHSPIHRKRQTAGTQLHKPLAKMASSLVLIAAALLALASSWQQAIAYDPSPLQDFCVADKNSPVRVNGFPCKDPMAVTPDDFFNAAMIIDKRRDTNNKVGSNVTNVNVESFPGLNTLGISLARIDYAPLGVNPPHIHPRATELLTVLEGTLYLGFVTSNPNRLFSKVVKKGDVFVFPKAMIHFQMNLDHDKPAAALSSLSSQNPGVITIASAVFGSKPPISDDVLAKAFQVEKKLIDWLQSQFWDTNY

SEQ ID NO: 67395 - protein, 182 aa, Zea mays
  Clone ID: LIB4863-003-F2_FLI.pep
EGEDMGAEEDAAARRERLRALRAAKDLLSTPDGAPTPSTDGEHQNGNHEMAEEPELPGPQDAPGEAAKEDGSPTEEAEEVEDDGELPAMKFRNYLPHDEQLRGGKLAPVSLPKFEDPISAETAEPKEVENLFGNIAPKNPNWDLKRDVQKRIDKLERRTQKALAEIALEQQREKEALEESQD

SEQ ID NO: 67396 - protein, 231 aa, Zea mays
  Clone ID: LIB4865-003-D6_FLI.pep
LEAGRAGVPLVATRRYVRGCRGAALVASPHHAPNPRLRFASAAEGMAAEASTAGAASAAEAKPFAVLFVCLGNICRSPAAEAVFRTLVSKRGLDSKFLIDSAGTIGYHEGNKADSRMRAASKKRGIEVTSISRPIKPSDFRDFDLILAMDRQNYEDILNSFERWRRKEPLPDSAPNKVKLMCSYCKQHTESEVPDPYYGGPQGFEKVLDLLEDACESLLDSIVANNASISG

SEQ ID NO: 67397 - protein, 196 aa, Zea mays
  Clone ID: LIB4865-003-E2_FLI.pep
QHRKHNIVPIMAAKIFCLIMLLGLSASAATASIFPQCSQAPIASLLPPYLSPAMSSVCENPILLPYRIQQAIAAGILPLSPLFLQQSSALLQQLPLVHLLAQNIRAQQLQQLVLANLAAYSQQQQLPLVHLLAQNIRAQQQQQLLPFSQHLLPFYLHTAPNVGTLLQLQQLLPFDQLALTNPAVFYQQPIIGGALF

SEQ ID NO: 67398 - protein, 172 aa, Zea mays
  Clone ID: LIB4865-012-F12_FLI.pep
SAGAEMLVYQDLLSGDELLSDSFTYKEPENGVLWEVEGKWVTQGPVDVDIGANPSAEGGEDESVDDTAVKVVDIVDTFRLQEQPPFDKKSFVSYIKKYIKNLTAVLEPEKADEFKKGVEGATKFLLSKLKDLQFFVGESMKDEASVVFAYYKDGATNPTFLYFSHGLKEIKC

SEQ ID NO: 67399 - protein, 117 aa, Zea mays
  Clone ID: LIB4865-012-G11_FLI.pep
RSYSSPPTRNRRERKGKPAAPAPSNQQIGTSVLRNPSMAEESGRPLPKFGEWDVNDPASADGFTVIFNKARDEKKGGNGQDTDSPSKDPRTERVESYAAKPSTKKWFCCVTSSPTQS

SEQ ID NO: 67400 - protein, 193 aa, Zea mays
  Clone ID: LIB4866-003-E4_FLI.pep
SDSQLRPKVQVEAWKSRRRRRGPSCAWLPSAAPSARPPSTAASSAPPRRCARTPSRGSASTSSTSPTCPSSTPTSRPAAAAAPSSRPPSRPSAPRSARPTASSRGKNCWADKAAAIVSAGGGFGGGRSQYHLRQVGVFLDLHFINKPELCVQAFQQPPKFDSDGNLVDAEIRERLKKVLLSLQAFTLRLQKED

SEQ ID NO: 67401 - protein, 233 aa, Zea mays
  Clone ID: LIB4866-004-H5_FLI.pep
TQRKAPRRRYRAQEHSRSRRKFEDEDQLHCGRTSGMEGQFQVGKEEVIQAWYMDDSEEDQRLPHHREPKEFIPLDKLSELGILSWRLNADDWENDENLKKIREARGYSYMDICDVCPEKLPNYEAKIKNFFEEHLHTDEEIRYCLEGSGYLDVRDQDDQWIRVAVKKGGMIVLPAGMYHRFTLDSDNYIKAMRLFVGEPVWTPYNRPHDHLPARKEYVEKIINRGGNQAVEAR

SEQ ID NO: 67402 - protein, 231 aa, Zea mays
  Clone ID: LIB4866-008-D1_FLI.pep
IQLFPSYIAIAITIRQAPQRQATHLSPFLLPVLRAISAVSAPAIAMEEAKVVESKDGTISVASAFAGHQEAVQDRDHKFLSKAVEEAYRGVDCGDGGPFGAVVVHNDEVIVSCHNMVLKNTDPTAHAEVTAIREACKKLGKIELSDCEIYASCEPCPMCFGAVHLSRIKRLVYGAKAEAAIAIGFDDFIADALRGTGYYQKANMEIKQADGNGAIIAEQVFEKTKEKFQMY

SEQ ID NO: 67403 - protein, 115 aa, Zea mays
  Clone ID: LIB4866-012-E2_FLI.pep
SRPAGPGHLLRLLARAAARRLPLVSAPRAVVHPCAAKMTAGYIVGSLVGSFAIAYLCDTFISDKKAFGGSTPKTVSEKEWWQATDTKFQAWPRTAGPPVVMNPISRQNFIVKSTE

SEQ ID NO: 67404 - protein, 198 aa, Zea mays
  Clone ID: LIB4867-001-E2_FLI.pep
EGYDHVIKNNNNLCRGLFQWEQSRLTKEQKHPGYLQGRRRTAGLNLLTCASYIIGVASTQVRILWNPVLASVRARHLVPLQNKLSFLVSLALLMSSLIFPSNDGSTANTEDIRNSMHSCHHHAIFFYSRSHIGNLMEEVRLPVPAVEGLEEIETTRKASAVVSLTTHIRRGDGENQLGIFFPSFFFFGSEETPARPAS

SEQ ID NO: 67405 - protein, 137 aa, Zea mays
  Clone ID: LIB4867-001-G4_FLI.pep
QVSTRNKQGPSNSFTYRIAIKRVHNPQGQLVAEPSSSAANQSCFASLGVSKELVDSWHDLGGLVVHKASEAMHGVTPPLLMVLKHAGCPPCLVYPDFRVAGDVPEELKPADANGNSHRREQRVHLGSDPAAGHQTRL

SEQ ID NO: 67406 - protein, 128 aa, Zea mays
  Clone ID: LIB4867-006-E12_FLI.pep
MCANQGSVVVLRLKQAIRAPWELLVADVQIGVRRRLIEVGVALGQVVRRQEGAGHDPGVGDLLPLGRLIGVVVDGGGHAAPQRAGAHRQRPETGSRRRRSHGWCRWFGGNGLGCVVRSGERSGPAGLE

SEQ ID NO: 67407 - protein, 173 aa, Zea mays
  Clone ID: LIB84-008-E3_FLI.pep
LQKRESLLFIFRATAASSSDSGILQVCNEISTFLWLFQSREYHLGSRNVLLGIKQVVIQSVLLPNHSHVLVSRRVRVARCCTRLPPKQTIQIRTLLVAGALVDGVALRALGLEDLLASSWVPRGRFRKRRHRYQARSREGRRGRWARARIALAIGGGGRPCCNLEFARLNEET

SEQ ID NO: 67408 - protein, 256 aa, Zea mays
  Clone ID: LIB4185-025-D7_FLI.pep
MDPGAGAHYSARTAEEVFRDFRGRRAGMIKALTNDVEKFYQLCDPEKENLCLYGYPNETWEVTLPAEEVPPEIPEPALGINFARDGMNEKDWLALVAVHSDAWLLAVAFYFAARFGFDKEARRRLFNMINNLPTIFEVATGVAKKQNKEKEPNNTSKSNKPSSKMTTRPESHLKATKVAPPKDEDDESGEEYEEEEERDNTLCGSCGTNDGKDEFWICCDSCERWYHGKCVKITPARAEHIKHYKCPDCSNKRARA

SEQ ID NO: 67409 - protein, 179 aa, Zea mays
  Clone ID: LIB4185-025-E8_FLI.pep
FTFSSPLCWTLGRFRSSAHRRPPSPFKKLEGSSRGRSVPGSSAPSVRPPPRMSDEARRGPAGAAQVVLRASSEDRKPVGSGSPPPAATATAVAHKIQLKSADMKEEMRQEAFEIARIAFEKHSMEKDIAEYIKKEFDKNHGPTWHCIVGRNFGSYVTHETNYFVYFYIDSKAVLLFKSG

SEQ ID NO: 67410 - protein, 352 aa, Zea mays
  Clone ID: LIB4185-028-F2_FLI.pep
QGKKPGLCVCEREGGEGNSGDAMAMAALRREGRRLILSSTVPNPSLAAASSAVTRSSAVSQPEMAPLGARSISTQIVRNRMKSVRNIQKITKAMKMVAASKLRAVQTRTENSRGLWQPFTALLGDAPSVDVKKNVIVAITSDKGLCGGINSTSVKVSRALHKLTSGPEKETKYVILGEKGKVQLLRDSKDSIEMTATELQKNPINYTQVAVLADDILKNVEYDALRVIFNKFQSVISFKPTMVTILSPEVAEKESEAGGKMGDLDSYEIEGGETKSEILQNLAEFQFSCVLYNGALENACSELGARMSAMDSSSRNAGDMLDRLTLTYNRTRQASITTELTEIISGASALEG

SEQ ID NO: 67411 - protein, 225 aa, Zea mays
  Clone ID: LIB4185-028-F9_FLI.pep
YRTRKLITKSKFVFTEAQLVSALAVKRSLVKFTNYYLLVPKFSLFSYKKHETNQETRAYTALVVHSRTILAPSARIFSAILSASSLGTPALSTAGAFSTRSLASFRPRFVNALSSLMILSFAAASNPSSFTSNAIFSSLAFASSPAAPGPTPPPTSGAAPPVRIASGGNWSTPRRPRRASARDEASRRVSPQISSTSAETRGVALTAVEKEAAGTVEGGVMRRRR

SEQ ID NO: 67412 - protein, 306 aa, Zea mays
  Clone ID: LIB4185-029-A2_FLI.pep
ARSQTPSPLRIPHRRLAMEAAAAAFLSPPRVALDARTLFSPPRCLPVSPSSQLRLAARPRALAGAKPRFLSPHREPAVDGGRGARDVVAMVVPFLRGAAWEQPPPDLASFLYKNRIVYLGMCLVPSVTELMLAEFLYLQYDDAEKPIYMYINSTGTTKNGEKLGYETEALAVYDAMRYVKVPIFTLCVGNAWGEAALLLAAGAKGNRAALPSSTIMIKQPIGRFQGQATDVDIARKEIRNVKIEMVKLLARHIGKPMEEIARDIRRPKYFSPSEAVDYGIIDKVIYNEKIQEDGGVVSELKRSNLI

SEQ ID NO: 67413 - protein, 252 aa, Zea mays
  Clone ID: LIB4185-029-F5_FLI.pep
YAVQNHDHKPTQNPGNTDSSFSNRTPQRMHPTAPHPDQTKMDAAATMGSTAATAATDTCDLLTAELGTTTGLWENGGESTAGGIAVGSAGGSDDSGGMGGSGGRAGAKAIGPGAGICVAVSLHWSGTEVELQSLGRETASVRLMGRLKGTLPVRMRQAQSAPVRTISASTPQHCFVGEPPPLVLPVTKLRHGVNVDISDAVHDVATCPDAGAAATSSSSSATAAAAGEGSNLSRRLVIRQDTPAPLESGFRK

SEQ ID NO: 67414 - protein, 135 aa, Zea mays
  Clone ID: LIB4185-029-G3_FLI.pep
LTNFDLQRMHFSKIVGGGSHVSKTIIEPLEKFNCQCISCFYLVFYLLLHQDVPCWICFRLIFLAFSSCHSRYMAKSSARTFGFRFPEVAEELEGFPTRISVRLLSASASDWELNSGGAMVRDRIRRTRGSASASS

SEQ ID NO: 67415 - protein, 218 aa, Zea mays
  Clone ID: LIB4185-030-B11_FLI.pep
RQRTTPPPPPSHALSVAQLLLAQLLLARLGLGCYILPSSMESPPDQAAAAAARQDKEQRDYRLIAKAVDEAYRAVECDGGGYPFGAVVVHGGGDDEVVSSSHNSVRKDADPSAHAEVTAIRQACKKLGKTSLAGCEIYTSCEPCPMCLGLIRLAKIKKVVYGAKSEVAAAAGLNGVLPEVFREYYQKSGVEMRQAEGEAATRIAEEVFEKTKGKFRNK

SEQ ID NO: 67416 - protein, 342 aa, Zea mays
  Clone ID: LIB4185-033-E4_FLI.pep
SDLIWSVSGFLRPCDDADALRGGAHHTLHQLRHAHLAHGPGPASGAEPRAGHVLAHLGADHLLHRGNQLAAERVRRLRRSRLRREGGWSRLRRRGRRGGELLEVAPGAVVVEARRRLVQPRQREGERGERVLVCDCWRGRRAHVCGADGVEASGARDGTEHLRGAAAVAEVAAVRRRRAPRARACALARPLSITAAGGRRGGGELPLERRVPVVLNGVVGAPREKARDGGPPVAQPGVRGQDRGVLLGREGAALHLRRQLVAPPQPARLPRPPRDAAPDRRPVPRAVALHETPQRLVLLGAPGALYPVALRLHSHRCWNTARISSCRWHWHWRCEISSIGTS

SEQ ID NO: 67417 - protein, 202 aa, Zea mays
  Clone ID: LIB4185-033-E8_FLI.pep
LSCYCYASLDRSSKQLTDPPAHPPTHMAASRSALITLLVLVSSVAAASATTFTVGDSSGWSRSVNYDNWASGKTFTDGDQLVFNFATGNHDVVEVDKSGYDGCSTTNAANTIQNGPATVNLTSGTHYYICGFTGHCSAGMKLAVTVGSGSGSGSPTPGGGSPSTPTPTTPSAPTPDTPASASVRLTAGPALAVAATVLVALF

SEQ ID NO: 67418 - protein, 180 aa, Zea mays
  Clone ID: LIB4185-039-A9_FLI.pep
RISVSTDSPMSFAAFSWPFRRRGGAGSSGASKSAATAEEDEELGVTPQLLDFLRTLSPDAFKAAALQLQGGSTEAAAGDLTSWQERHAVLVLSKAKELAKIRYDLCPRHLKDKQFWRIYFLLAKSYISPYELRAIQKEKLRRMETENCKPKQVISVEVEMQESKRTSLSQASEVDLESQV

SEQ ID NO: 67419 - protein, 281 aa, Zea mays
  Clone ID: LIB4185-039-B2_FLI.pep
HYYIHHQLGSISRQQIASNGEVHQSPSVIAQHAGAGTSPRHGHRPRPPAGLLRRRPQRQAVSERVPMPAAVVGRRPVPLLDQDRHGRQPPGQPERLQRDGAGRVRVARREHAGRVHEPRRLRARRHQPAPRPPARHRGRARHPRRAPRGHRRQPRLREQVLLQGGPRRGDVRHPARPRALPVQRRQGGRHHGGVVQQPETGHHLRAPHAVRLLSADPHAGALQGAPGGRQCRGSHQVQVRRWVLRLRPSMHLASALCMRRQWLCVIFLVTEWATSWRSATV

SEQ ID NO: 67420 - protein, 314 aa, Zea mays
  Clone ID: LIB4185-039-B5_FLI.pep
LVLVVLVWLWAEDADVPVVDVLNRPRVLLHAVVHGFPEQLQLVPGHGADPLDDGPDDPLGAGRRGEGAHVAVVDAGPAARAPGVHHADGLLPVLPVGDPVDGRLQRLQERVLGADLVEHADHRRLVRRALVHQVQLHVVRGPHVRTSSLYYIIGSQRRRRDQQTTIHSFSPAAVDGVLGGRVPVHLLQVVRRAVDHQEAGVALEPHHDVVAAVGDGGLGGAVGVGEVAEGPHQRDALVGEVDGGLHPPGAAVAPLRLDAAPVLRPVLVADDVAELLLVLGFFLGSGGRDGNGEQEGRREEPRGGEAAEVTHTLL

SEQ ID NO: 67421 - protein, 300 aa, Zea mays
  Clone ID: LIB4185-042-F2_FLI.pep
LLMASRTALADARRDDALRSNVDGDVSRGRRCGGGVGGGRVRAGAGAGPREAEQHVAEAARVLEQAVHRGDGLPDLVQGLEVAQPGVEAREGVGVHEAHPGHLLEHGEPVGAAAQDDVQQAHLVAAEEAAAPERAVAELGLDQRQDLVHLPHRRLLALPRRREHRAHRRPELVVGEVAPEPRERAVEGVGGEQRAGLRPGVVKVLEDNDGLRERAAAVDEHGHLLVDGVVAQQLVALVPQVLLHVVVLQALEPQRQLHAVRVRARPRPEQHQRGCRRRYGALGRLLHGSLSNTQDAPCFT

SEQ ID NO: 67422 - protein, 336 aa, Zea mays
  Clone ID: LIB4185-046-C6_FLI.pep
RATAKPSSSSWNSYLRACAQERGSELLAVGGAEEIAVRAAMEKPRQVARKFLARPQHEGAGAVVRRSIGRFELRYFDPFLVLDEFTVSAPAGFPDHPHRGFETVTYMLEGAVTHEDFEGHRGTIKAGDVQWMTAGRGIVHSEMPAGPGTSRGLQLWVNLSSANKMVEPGYQEIQSKDIACTSDGDGGVTVRVIAGHAMGVRSPVRTRTPTMYLDFTVRPRGAVRQPVRASWNAFAYVLEGEGVFGAERCAPVGAHHLLLLGHGDGLEVWNKLPDRPLRFLLVAGEPIGEPVAQLGPFVMNTEEEIDMTVNDFECYANGFEKARHWKSQAMLALGVE

SEQ ID NO: 67423 - protein, 251 aa, Zea mays
  Clone ID: LIB4185-046-E7_FLI.pep
AAAYVRGRRAIGMGDGEAAVPSRFRTVCVFCGSNAGRRKVYADAALELGHELVRRGINLVYGGGSIGLMGVIARTVRHGGCHVLGVIPKALMPIEISGESVGEVRVVDDMHQRKAEMARQSQAFIALPGGYGTMEELLEMITWCQLGIHDKPVGLLNVDGYYDPLLALFEKGAAEGFISTDCSQIFVSAPTASELLTKMEQYTRVHQEVAPATSWEISELGYGRGGGGGEGDAAAATPPADAGAEEGKGGS

SEQ ID NO: 67424 - protein, 298 aa, Zea mays
  Clone ID: LIB4185-048-F9_FLI.pep
LTGKTITLEVESSDTIDNVKAKIQDKEGIPPDQQRLIFAGKQLEDGRTLADYNIQKESTLHLVLRLRGGMQIFVKTLTGKTITLEVESSDTIDNVKAKIQDKEGIPPDQQRLIFAGKQLEDGRTLADYNIQKESTLHLVLRLRGGMQIFVKTLTGKTITLEVESSDTIDNVKAKIQDKEGIPPDQQRLIFAGKQLEDGRTLADYNIQKESTLHLVLRLRGGMQIFVKTLTGKTITLEVESSDTIDNVKAKIQDKEGIPPDQQRLIFAGKQLEDGRTLADYNIQKESTLHLVLRLRGGY

SEQ ID NO: 67425 - protein, 302 aa, Zea mays
  Clone ID: LIB4185-048-H10_FLI.pep
QQQHQALPPRRAPRLTPAAAAAVAGMAMPFARRDIEAAGAGASSDDSPAAKKGKPELAGARPALTRSEAFAFAAVLALFTAGIFCVFLTAPRGEFGQILRLPRSLADVRLLKDNLAVYARDYQTNFILGYCSIYIFMQTFMIPGTIFMSLLAGALFGVIKGGILVVFTATAGGSSCYFVSKLIGRPLVSWLWPEKLRYFQSEIAKRKEKLLNYMLFLRITPTLPNTFINMASPIVDIPFHIFFAATLVGLIPASYITVKAGRALGDLKSVRELYDFKTLVVLFLIGSVVVVPTILKRKRTYE

SEQ ID NO: 67426 - protein, 252 aa, Zea mays
  Clone ID: LIB4185-053-A12_FLI.pep
AGGGYLVPWVAALARRCLVSRRDGGGTMLQCLDGVKQLLAVLLKCCHIDLKQPNGLEDPEVLARETVFSVSEVEALYELFKKISSAVIDDGLINKEEFQLALFKTNKKESLFADRVFDLFDTKHNGILGFEEFARALSVFHPNAPLDEKIEFSFQLYDLKQQGFIERQEVKQMVVATLAESGMNLLDEVIESIIDKTFEEADTKHDGKIDKEEWRNLVVRHPSLLKNMTLQYLKDITTTFPSFVFHSQVDDT

SEQ ID NO: 67427 - protein, 311 aa, Zea mays
  Clone ID: LIB4756-008-F7_FLI.pep
RGARHCLVLSKEREKQSGVHPFLSAMTNGYLFREYIGAQSTGVQFSDVPINAFVSFHFILSFAIDYTPVGQQPKPVPTNGVFSPFWDTGNLSPAAVAAIKASHPNVAVMAGLGGDSVQDIVKALFTPTSVDTWVANAVTSLTGIINRYGLDGVDVDYEHFADGADVNTFVECIGRLLTQLKQTMPNIATSIAPFEDPVVQKYYQALWSKYSGVIDYVNFQFYAYGDNTDVPTYVMFYNNQLANYPGGKVLASFKTGNVTGLLSPDQGISGAKELQRQNKLPGLFIWSADSSKKSSYGFKYETEAQQIIANH

SEQ ID NO: 67428 - protein, 330 aa, Zea mays
  Clone ID: LIB4756-008-H4_FLI.pep
QQTTTPMSTSVSAAAVAALVPPLTGRRAPPASRVPQICRRRIRSKPRIFSSSPSFPIVPAAAMATGGAAPTASDAGSKKKLLIFDSEEDLAVSLAKYTAELSEKFAAERGAFTAVLSGGSLIEALRKLTEPPYLDSVDWSKWHVFWVDERVVPKDHVDSNYKLAYDGFLSKVPIPPGQVYAINDALSAEGAADDYEACLKQLVKNGVISMSAATGFPRFDLQLLGMGPDGHIASLFPGHPLVNEKERWVTYIKDSPKPPPERITFTFPVINSSAYVAMVVTGAGKAAAVQKALSDKQTSSDLLPVEMAVLQDGEFTWFTDKAAVSLLQNK

SEQ ID NO: 67429 - protein, 325 aa, Zea mays
  Clone ID: LIB4756-009-G1_FLI.pep
WSRGRCRMALASLAASLPVAATAAAVRFPFRFRIGRAMASAAAGASPARVAVVQMTSVGDVDANYATCSRLTKEAAASGVKFLCFPEVFSFIGSKDGEAMKLAEPLDGPIMQRYCSLAKESSMWLSLGGFQEKGPDDSHQYNTHVLIDDTGKVRSSYRKIHLFDVDVPGNMVYKESRFTAAGDTIVAVDSPFGRLGLTVCYDLRFPELYQILRFKHQAQVLLVPSAFTKITGEAHWEILLRARAIETQCYVIAAAQAGKHNEKRESYGDSIIIDPWGTVIARLPDRLSTGFAVADLDLSKVEAVRTRMPISEHRKFDSDWKPTPL

SEQ ID NO: 67430 - protein, 186 aa, Zea mays
  Clone ID: LIB4756-009-C3_FLI.pep
RSQEQETPPSERGGEKQVQDQEKGKEAQLSLAWSREAEGAKEQQGMEEPVPADPPRIFWKSRRSANGRSLQQEPDKDATEETNEQAQEEPMKTDDATDTAAAAAAATAEPYPKANLSEKRKALFEPLEPINGKRGAAETLLPPPDFEPASYPKGWLVGKKRKLVNVDVVESMRRIAIQEMNRKVHA

SEQ ID NO: 67431 - protein, 119 aa, Zea mays
  Clone ID: LIB4756-009-E8_FLI.pep
QKVLLRCRVMAAKIRVVMKSFMSQSNQVSGLMPFTKKIGLPESRALYTVLRSPHIDKKSREQFSMHVKKQFVEQTAKPHELHRKFFWLKRLRIPGAQYEIQISFKTRLDMAGPRSQAPC

SEQ ID NO: 67432 - protein, 301 aa, Zea mays
  Clone ID: LIB4756-010-B1_FLI.pep
KYTMSSDKGQFEQGFQPDVQHQQVPGLQSKLDPTPKVDELPTPEGGAEKYKAAGKLKGKKAIITGGDSGIGRSIAVLFAMEGADSFIAYLPEEEKDAQETKKMVEEKGQKCYTLAIDLKPKENCKKVIDEAVKAMGGIDILVNNHAYQMMVNDISDLSEDQWLHTFNTNIHPFFFLSKYALPHMKRGATIINNASINAYIGRPNLLDYTSTKGAIISFTRGLSNQYVGKGIRVNAVAPGPVWTPLIPATMNDEAIKQFTAPIGRPSQPSEIATCFVFLASNDSSSISGQTIHANGGTIVNG

SEQ ID NO: 67433 - protein, 172 aa, Zea mays; identical to SEQ ID NO: 36903
  Clone ID: LIB4756-010-F9_FLI.pep

SEQ ID NO: 67434 - protein, 169 aa, Zea mays
  Clone ID: LIB4756-010-E1_FLI.pep
SRPAGKLTSRTTNTAKMGPKPASKTATKTGKQANAAAKAALKGSYANKKRAIRKSTSFHRPKTLELSRAPKYPRKSVPHAPRMDAEKVLIHPLNTESAMKKIEENNTLVFICNVKANKRQIAAALKKQYDVSCVKINTLIRPDGSKKAFCRLTADVDALDIAATKLAIV

SEQ ID NO: 67435 - protein, 296 aa, Zea mays
  Clone ID: LIB4756-011-A11_FLI.pep
PPTSSTMTSIGTGYDLSNSVFSPDGRNFQVEYAVKAVENGGTALGIRCKDGVVLALEKLVSSKLIKPGANKRIATVDRNMGVVSSGLLPDGRHFVSRARDEAAQWRQLYKAPIPSSSLADRMGSYVQAYTLYSSVRPFGITAIIAGWDSEAELPVDGQVGSGPSVGSGGKREGAKHGGPSLYMIEPSGLYWGYYGAATGKGRQVAKSELEKLNLHEGQLSLEEGVKEAARIIYVAHDDNKDKEFELEMTWISNLDGPTKGRHEEVPKDIREEAERLAKKALEGDDDDDDEEEKMEE

SEQ ID NO: 67436 - protein, 237 aa, Zea mays
  Clone ID: LIB4756-011-B7_FLI.pep
RPLAHQPTRPRRSMALSVSSLAAALSHLSLPSTSTPKPHPAPLLRLRSTYRRAVSLALRASAAEAAESFEADLPAEEVMAVEEEAEEDALSGIALRKYVKQRLPGGFAAQRITATGRRKTAIARVVLQEGTGKVFINFRDAKEYLQGNPMWMEYCKVPLMTLGFEKNYDVFVKVHGGGLSGQAQAICLGVARALVKISNANRVPLKSEGLLTRDTRIVERKKAGLKKARKRPQFSKR

SEQ ID NO: 67437 - protein, 335 aa, Zea mays
  Clone ID: LIB4756-012-B6_FLI.pep
RPPTAPSMRQLHLSPQLSPSTVLSSYFSPPPAEASSWRRRLHRGRAFQLPLSSLRDPNKATLRKASSNVPFRLGGGGSGSPKDRRPADDDKAEEEAEGEGGAGALTGTLVAGALLVGFVGGFGAAGYVYKDQINTFLTQFSGFIDGYGPAGYALFVLVYAGLEVLAIPAIPLTMSAGLLFGSVTGTIIVSISGTLAAAVAFLIARYFARDRILKLVEGNKKFLAIDKAIGENGFKVVTLLRLSPLLPFSLGNYLYGLTSVKFLPYVLGSWLGMLPGSWAYVSAGAFGRAIIQEESEIGWGGNGQLWTLGVGLLFTAMAAAYVTRLAKDAVKEIDD

SEQ ID NO: 67438 - protein, 443 aa, Zea mays
  Clone ID: LIB4756-012-E4_FLI.pep
GTKSNAGKYFFWMPSFSDTAHHHLSPCPCPLPLPLPCQGPAAASVDEVGDPPDVGATGVAGNSALPAKPLEHLRAECAAGLHPLHGLLVAAEGDVERVQVGHVAGAGGGPRGGGQAVERAPRRRSVRDRGCRVAAPPARRGRVGPAEAELAERGEDVVDGGPGARPAPTAEVGRQWRGLRRGRLGRRQEGAGRRRAHDALGEVALERLAPERGAVVGLGERGRAGGAPGAGLLLRRGREHAQLVRGVREEADPAAAGRAVLAGLGAVARRVEPALEDAVRHVAAVAALAPALAEVRAGGAGVVVLARVAAPRLLPRVREGALGPVVAARARAPPDLELVHAELVAAVAVHARRHGRRRLILLGLGLGAGVVARQVLAQRREQVRRHLVAFVDAAHRDVVGPRRHAHAFAHHHHDYLGSGSVSFLPSTESLDYGRSGGLGLSVC

SEQ ID NO: 67439 - protein, 387 aa, Zea mays
  Clone ID: LIB4756-012-G11_FLI.pep
SRPAGTHFPSPFPSSHTHGVSNFKMPYPETTDAFAVTDIKNWSNFTRKELPLKKFEEHDVDIAIDACGVCASDVHTISGGWGESIPLPLCVGHEVIGKVIKVGSKVTKVKVGDRAGIGAQIGADLTCDQCKNDQENYCPNSVDTYGAKHTDGTVAQGGYASHIRGHEYFVFKIPDNIETSLAAPMLCAGLTTYSPLKRLGAGPGKKVGIIGLGGLGHFGVLWSVAMGADTYVISHTPNKKDDALKMGAKDFIVTKEKGWSEPWKFHFDFVINTADATDKFDLAEYFSILKVNGTFHMVGFPDNPLPPIPAQIFAPNGCYMGASHIGNRPEMEEMFELASKQNIKSWVQEIQISEEGCKEAVERVYKNDNVRYRITLTGFDKVFGKRA

SEQ ID NO: 67440 - protein, 152 aa, Zea mays
  Clone ID: LIB4756-014-C6_FLI.pep
RGRPGLLTRQPAHSTAKMTKVQSMVASSRRKSRKAHFSAPSSVRRVIMSAPLSKELREKHGVRSIPIRKDDEITVVRGSNKGREGKVSSVYRLKYCIHVNGIVREKSNGQSVPIPIAPSKVVITKLKLDKDRESILERKSAGREEKKKQREA

SEQ ID NO: 67441 - protein, 262 aa, Zea mays; identical to SEQ ID NO: 59316
  Clone ID: LIB4756-014-D4_FLI.pep

SEQ ID NO: 67442 - protein, 483 aa, Zea mays
  Clone ID: LIB4756-014-E3_FLI.pep
QSTQAPAMEAAPTPEPGPHVLVIPFPAQGHALPLIDFVALLAARGLRLTVVTTPANLQLLSSLLAAHPTAVRAATFPFPSHPSLPPGLENTKGCSPVQFPAFVHALAELRGPILAWVKAQPDPVVAVVADFFCGWAQPLAREIGAAGIVFSPSGVLGTAVPHSTFRRLVRRPAECDGDDEFSVSFPAIPGEPSYQWRELLMMYRNYMAGALDEQVGASVRQNFMWNLHDSWGFVFNSFRALEGRYLEQPLEDLGFKRAWAVGPVAPEADAAVARGGQATVELADLSAWLDAFPEGSVVYVCFGSQAVLSPAVAAALAEALERSAVPFMWAVGDAVVPDGFEARAAASGRGSVVRGWAPQVALLRHPAVGWFVTHCGWNSTLEAVAAGVPMLAWPLTGDQFFDARLLVDEARVAVRACKGGLGFVPDAGELASVLADATGEKGHDVRTRAKALAAEAARAMKPGGTSYADLELLVQEIRNRKLS

SEQ ID NO: 67443 - protein, 231 aa, Zea mays
  Clone ID: LIB4756-014-F7_FLI.pep
FRGRPCSSFTASLASRPRPRRPTPPFRPRVSVAAPLSVRVTGGRRGQAVVAMASADARLAGIASSIRVIPDFPKPGIMFQDITTLLLDPKAFRDTIDLFVERYKDQGITVVAGVEARGFIFGPPIALAIGAKFVPLRKPKKLPGEVISEEYSLEYGTDKIEMHVGAVQANDRALVVDDLIATGGTLCAAVKLIERVGAKVVECACVIELPELKGRDKLGDRPVFVLVEADA

SEQ ID NO: 67444 - protein, 356 aa, Zea mays
  Clone ID: LIB4756-015-F1_FLI.pep
LEAGRDSSRWAPGPTGPTPTPLHQVVVALLREPSPPPPTGAPVCSSSLKAMDHDRLNSPSTSAISLEVMGHRLHISQDPNSKHHGTTVWDASMVFVKFLEKNSRKGRFCPSKLKGKRVIELGAGCGLAGFGMALLGGDVTTTDQAEVLPLLMRNVERNRSWISQSNSDSDILANTKTDSVGSITVAELDWGNKEHIKAVEPPFDYIVGTDIVYSEHLLQPLMETITALSGPKTKILLGYEIRSTTVHEKMMEMWKSNFIVKTISRSKMDVKYQHPSIHLYMMDLKAPLIPEVEAADNGNYEEEVEVAANQEEDEDPGVKSESCSGSSPEAKSGSLDDWEIRRCGAMAARLLKDVKL

SEQ ID NO: 67445 - protein, 272 aa, Zea mays
  Clone ID: LIB4756-015-F5_FLI.pep
RGRPGFRGHDEHNPVRHAMPLHARAPPLRRSHLLLTAATARLRPCAAPATKPRRRSLVLVRASSSDPPQQQQQLNLSVLRFTLGIPGLDESYLPRWIGLGFGALVVLNHLLSASPTPAQLRSEAVGLCLAAFSATLPFLGRFLEGADAASRVPLPEGSIQVFVMSENLSAVQKEDMAWASYVLLRNTNTTSVVIAIGDLLCVRGYWNPPANTSKYSMIEWFKSQMQQVGLVDLRDALYFPNSSGKFLLRCQSCCSDQILSLRKFCQMGFFLC

SEQ ID NO: 67446 - protein, 335 aa, Zea mays
  Clone ID: LIB4756-015-F9_FLI.pep
LEVALHPLGINSKCLGLGRGRGVMYLNPRIVGSGERTLVLSHGYGGSQAIWDKVLPHLSRTNKVLLFDWDFSSTAAAAGEEEEDAEHSCYTFSRFAEELVALMDKMKLSGAVYVGHSMAGMVGCIASITRPDLFTHLVLVGASPRYMNSEDYEGGFDELDIKAMLSRISSDFRGWAEGFVPLAIGGSADDQPSAAELLARSFFAMDPRVAHGLARMIFLGDQRELLGDVAVPCTLVHVSGDFAAPPCVGRYMQARMRTASMYTIDSVGHFPQLVTPDEMLRILDRILVGSAASQEEETTAAAAAAAKTETTSSEVVSSGGVADALESKGRIDVAT

SEQ ID NO: 67447 - protein, 189 aa, Zea mays
  Clone ID: LIB4756-015-G3_FLI.pep
RGRPGVHRVIFLQYLSATDPLVMARVLQDVLDTFTPTIPLRITYNNSQVLAGAELKPSAVISKPRVDIGGNDMRTFYTLVLIDPDAPSPSHPSLREYLHWMVTDIPETTSVNFGQELVFYERPDPRSGIHRLVFVLFRQLGRGTVFAPEMRQNFNCRSFARQYHLSIASATHFNCQREGGSGGRRFREE

SEQ ID NO: 67448 - protein, 298 aa, Zea mays
  Clone ID: LIB4756-016-A1_FLI.pep
KARTGVARIAPRSPDHLPLPSFLLILLMALSSAGSFVACSLRPSGASIHAPRSTPHLKPGAAAASFTRTPQRRANATKGGVSTVCEPLGPDRPIWFPGSSPPPWLDGSLPGDFGFDPLGLGSEPELLRWFAQAELMHGRWAMLAAAGILVPDLLARWGFIDAGFSWFDAGSREYFADPWTLFVSQMALMGWAEGRRWADYLRPGCVDIEPRFPNRKNPVPDVGYPGGLWFGWANWGRGSPEPVMVLRTKEIKNGRLAMLAFVGFWFQAVYTGQGPIDNLLAHLADPGHCNIFSAFTSH

SEQ ID NO: 67449 - protein, 169 aa, Zea mays
  Clone ID: LIB4756-019-B11_FLI.pep
FIQLNSFLNSFNFNKFHISKTFWLPKLVSQDCHSVNSSTRIEMLLHFFWSACIVNISNEYRPRIHLLFVFRCGCIGILHILGDLSLHLAERGGFLLHLLEPALHLIELLKLGRVVAGGHVDVLAVNRDLLSVHLVLLVLHGRRTNRVQPRLQGETRFGTESGFGRGEGN

SEQ ID NO: 67450 - protein, 248 aa, Zea mays
  Clone ID: LIB4756-019-C11_FLI.pep
PSWSRIWIILRRGMKQEAATSIVVTQEDVLHHYKEPPPRREDDPPALAASLSLPSSLSEDDGDAMPQPSSYAVLPRREGELVSAEELLLVPPLNFAMVDHGVYRSGFPDASNLPFLETLRLRSVLCLCPEPYPEANLEFLRAHGIKLFQFGIDGSKEPFVNIPEDRIREALEVILDASNHPVLIHCKRGKHRTGCVVGCFRKLQRWCLTSIFDEYQRFAAAKTRVSDLRFMELFDVSSIKHLAFESSV

SEQ ID NO: 67451 - protein, 246 aa, Zea mays
  Clone ID: LIB4756-021-E6_FLI.pep
ALSAAMYGGGGGGHYDGGSGGAGNANALFGGGGFMPSQSTVVPENSGLSKGRSAQTLLPLTVKQTMDAAQTSGDRSNFAINGVEVSTIRLVGRMLGKVERVTDVVFTLDDGTGKIDVNRWENEASDAKEMADANNENYVIVIGGLKGFQGKRHVVAYAVRRVTNFNEITCHFLHCIQVHMELTGLKIYSSAATYGGVAHAPSQPNPVDGNYISNLVLSVFHDPSVMDQEHGLHIKDVIDRLKHQMM

SEQ ID NO: 67452 - protein, 249 aa, Zea mays
  Clone ID: LIB4756-023-H12_FLI.pep
LCNMEVEQAAEVSAPDTADLNKPAKTQAHGDDKENVPNGNTNLQVKETHNDEDDGTGSDGFELIDVEENFDSAKVGEEIAASRSTTVDTSPVTEQSETQEEKITAPEEQSVAANTRHVESSMLNQQTEQLEKLTRRIEELESEKDKLVKDLTEAENKQSMHYSSLQEAQSSLSMKDKELAEATESLKELGSELETSKKRIQEIEAELDSSADKLRKLEELKDERSLHAAQEAKRASELDKMLELAQSNT

SEQ ID NO: 67453 - protein, 233 aa, Zea mays
  Clone ID: LIB4756-024-A3_FLI.pep
RELSALCLGLAELRMAGQGITSMLAAAALLVGIFASIPTAVQSIGVCYGTNGDGLPSAADVVQLYRSNGIAGMRIYSPDATILQALRGSGIDLIVDETNLDSLISDAPGWVQANVQPYKDDVSFKYIAVGNEVEGGDTQKILPAMQSLSDALSAAGLGNIKVSTAVKMSVLATPSSPPSTGAFADPSVMGPIVRFLAGVGSPLLANIYPYFAYRDAAGRSTSTTRCSSQAPRW

SEQ ID NO: 67454 - protein, 212 aa, Zea mays
  Clone ID: LIB4756-024-B12_FLI.pep
SSSSSRIQPEASAVSSVPILHTKPRIALPCSATSSDPDHPTPTPDNRLMEAKMGRFFESVSNFFTGGDHIPWCDRDLIAGCEGELVNAANEEQRNESLMRLSWALVHSRQTDDVNRGISMLQASLDNSASPLQTREKLYLLAVGFYRIGDYSKSRQLADRCLEIQADWRQAISLKKAIEDKIAKDGLIGIGIATTAVGLLVGGIAAAVARKK

SEQ ID NO: 67455 - protein, 30 aa, Zea mays
  Clone ID: LIB4756-024-D9_FLI.pep
RKRQLQNTFIMERTYVRREYTIYNNTSRSS

SEQ ID NO: 67456 - protein, 168 aa, Zea mays
  Clone ID: LIB4757-002-A7_FLI.pep
LEAGRDTLNHPRPPPLSSSLTPAPLLCLYPLLRDFSTLALSIHQQIAPVDFMTTDIQNLKSFDPFAEVDDAGGEVKSTQQNYIHIRIQQRNGRKTLTTVQGLPKKFDQKKILKVIKKKFACNGTVVADSEMGEVIQLQGDQRKDVMDFLTDKKEGLGLDGKTIKVHGF

SEQ ID NO: 67457 - protein, 213 aa, Zea mays
  Clone ID: LIB4757-002-C4_FLI.pep
MSAPNGPAASPMVYPVYLTGTFPQQAGDDQAQGPGIYAIQQNQLAAAMGMGCYAPTTLIPLAYNIPTESVGASAGEENVQDARQQNGPQRQVVVRRFHFAFQLDLALIIKLAAVVFLFSQEGSKQRLFLLILFASLIYLYQTGAITPFLRRLQRAGGAAAHPPQAPARVENRAPLPAQNDGNEQPNGPANPDQAAENPNKMLQLVTRIRKRQR

SEQ ID NO: 67458 - protein, 492 aa, Zea mays
  Clone ID: LIB4757-002-G5_FLI.pep
PPIKKKKKTERERATGGSAAMGHGVSCARTGDEHDYFRAAQVGDLEALEALLDADPSLARRATLYDRLSALHIAAANGRLEVLSMVLDHGVPPDVVNRHKQTPLMLAAMHGKTDCVLKLLQAGANILMFDSQHGRTCLHHASYFGHVGCLQAILTAARTTPVANSWGFARFVNVRDDHGATPLHLAARQGRPGCVQALLENGAIVSALTGSYGFPGSTSLHLAARSGSLDCTRKLLAWGADRLRRDSAGRIPYAVALKRNHEACAALLNPSAAEPMVWPSPLKFISELEPEAKALLEAALTEANREREEKILRGTKHSPPPPTWDHASDAADADAIDDAASDASASDAELCCICFDQACTMEVQDCGHQMCAPCTLALCCHSKPDPVTLALPSPACPFCRGSISRLLLVARASSDDADTEKSAAAAAAAAASSPQLVRRRSRRSHNLSDGGSSSFKGLSSAVAGSFSKIGRGSSRTMADSDGCGVDKPEHDP

SEQ ID NO: 67459 - protein, 491 aa, Zea mays
  Clone ID: LIB4757-002-H6_FLI.pep
EASRAVPSAPCLLCWSRRCRLAPSVRPSVSSLDPRQAMAMEEEQTPPELRYLSGLGNTFTSEAVPGSLPVGQNNPLVCPLGLYAEQLSGTSFTTPRARNLRTWLYRIKPSVTHEPFYPRNPTNERLVGEFDRTTTVATPTQLRWRPADVPLHPGLDFIDGLYTVCGAGSSCLRHGYAIHMYAANKPMDGCSLCNADGDFLIVPQQGRLFITTECGGLLVSPGEIVVIPQGLRFAVDLPDGPSRGYVSEIFGAHFQLPDLGPIGANGLASPRDFLSPTAWFEQEHHPGYTIVHKYGGELFSATQDFSPFNVVAWHGNYVPYKYDLSKFCPFNTVLLDHGDPSVNTVLTAPTDKPGVALLDFVIFPPRWLVAENTFRPPYYHRNCMSESMGLIYGMYEAKADGFLPGGASLHSCMTPHGPDTKTYEATISRAAANEPSRLSGTLAFMFESWLIPRVCPWALDSPCRDLDYYQCWIGLKSHFSPPAAAVDDENE

SEQ ID NO: 67460 - protein, 510 aa, Zea mays
  Clone ID: LIB4757-004-A1_FLI.pep
TSVHYLCLFLALILPLLLLRLLRGRRSDSGVRLPPGPWRLPVIGSLHHLVGKPLVHRAFADLARRLDAPLMYLRLGEVPVVVATSRDAAREVLRTNDVTFATRPWSPTMKIMMQDGLGMVFAPYGDHWRQLRKISILELLSARRVQSFRHVREDEVARLVAAVAATAPGQPVNVSHRIAVLVADSAVRAMIGDRFSRRDEFLVSLEEGLKLVSGFSLGDLFPSSPFMNFLSGTARRAHANHRKNFELMECAIKQHEERRAQAAVNGAAVQEEEAEDLVDVLLRIQKDGGLDMPLTMGIIKAVILDLFSAGSETSATTLNWAMAELMRCPDVMKKAQAELRDSLNGKPKVTEDDLVEMKYLKLIIKETLRLHPAAPLLVPREARDSCKILGYDVPKGTTVFVNAWAIGRDPEYWDDAEEFKPERFECGTVDFKGMDFEYIPFGAGRRICPGMVFAQANIELALAALLYHFDWKLEEGLEPSELDMTEDIGLTVRKKNDMLLHPSVRVPHKY

SEQ ID NO: 67461 - protein, 607 aa, Zea mays
  Clone ID: LIB4757-004-C2_FLI.pep
LLCYLLCLSSPQPYIHQLAKEGFMAMAYLPVFVFLFMVVLCQSDDRLTPAKPLLPNEVLISGGGVFALGFFSLKNSSRFYVGIWYNNIPERTYVWIANRDNPITTNVPGKLVFTNSSDLVLLDSTGRTIWTTTNNYTAGGGGETASILLDSGNLVIRLPNGTDIWESFSYPTDTIVPNVNFSLNVASSATLLVAWKGPDDPSSSDFSMGGDPSSGLQIIVWNGTQPYWRRAAWGGELVHGIFQNNTSFMMYQTVVDTGDGYYMQLTVPDGSPSIRLTLDYTGMSTFRRWNNNTSSWKIFSQFPYPSCDRYASCGPFGYCDDTVPVPACKCLDGFEPNGLDSSKGCRRKDELKCGDGDSFFTLPSMKTPDKFLYIKNRSLDQCAAECRDNCSCTAYAYANLQNVDTTIDTTRCLVWMGELIDAEKFGNTFGEILYLRRPSSPVSKNKKSTTLKIVLPVMAGLILLITCTWLVFKPKDKHKSKKSQYTLQHSDASNRFENENLEFPSIALEDIIVATNDFSDFNMLGKGGFGKVYKAMLEGGKEVAVKRLSKGSTQGVEEFRNEVVLIAKLQHRNLVRLLDCCIHKDEKLLIYEYLPNKSLDAFLFGTF

SEQ ID NO: 67462 - protein, 437 aa, Zea mays
  Clone ID: LIB4757-004-G12_FLI.pep
KKKKKEVQFSSQSVSPRSDILSSLQRLQLRSIPFHPSSCSRAMTMAATTTMMSAAAQAATSQLPPGFRFHPTDEELILHYLRNRAASAPCPVPIIADVDIYKFDPWDLPAKALYGDGEYYFFSPRDRKYPNGIRPNRAAGSGYWKATGTDKPIHDAATGEGVGVKKALVFYKGRPPRGSKTNWIMHEYRLAAVAGCTSPLAAYRPPSKFRNVSMRLDDWVLCRIYKKSGHASPMVPPLADYEHLDRDGPSPGGFFDDYFCGSTSLYAAAAPAIGGGAAAAGTTNTTTTPAVVMQQHQQPAALPRLPKIPSISELLWDEYALAQILDPPADVAADHASFAVHPSLNQLLAVGDDGSDLMMFSPPPAAAAGGKRKAMVAMNMSPADECAATAHQHQSPAAKRLNGGSCFDDAPQPASGLPATMSSVLGGGLNHHMLPQF

SEQ ID NO: 67463 - protein, 529 aa, Zea mays
  Clone ID: LIB4757-007-C4_FLI.pep
PAGPTVGSDCGKATPVQYAHSKKLSRGRRCASLHARSNLTGHQLAPMAARFLLVVAVALLLRPGDASVHEYRGLSFANKGNAFILHAGSEGLYAASHANTTAEDAAAVAEAFIRFDKITFRRSEDTNNSVKETSSAKVQVLIFEIEDREMIGGSAYGGQKAICCTSDLAKLGACTEGSVIYRPSQVNPGWPKLFVASFDGSDLIATLPSRTIPITKTGIYNMYFIHCDPSLASLEIEGKTIWKNPTGYLPGRMAPLKNFFGLMSFAFVVLGIYWFYQYMKSWREVLPLQNCITLVITLGMFEMALWYFEYAEFNETGVRPKGITFWAVTFGTVKRTAAEVIVLIVSMGYGVVTPTLGGLTSKVVMLGGTFFLATEILELVENLGAVNDLSGKARLFLVYPVAILDAAFVIWIFISLAKTIGKLQIYSKSTDVFNERWQHARIIPAFWHVLSFLLLCVICYLWAPSQNSMRFSYDASEFFDRKDNISLIRPAPSASKNGWNLSSTPEPKATKDVNTVADFEGDDEENKRE

SEQ ID NO: 67464 - protein, 284 aa, Zea mays
  Clone ID: LIB4757-007-D2_FLI.pep
WPCSSTRRRRRAPAWGCTFSPRPRPSGRPPTPRFSWAGSPGRPAATGSGASTSASGTFSRPSSSPTATLAAPRDTDSSVTFREAESASKACEDPTPVIDGRRANCNLASLGRAQHPVPPGRPRSAGSYLGVPVPKAFYLGGYSHHRPFPLGYYQGFPVPQYSYPSYGTEYIYPQGTLNSYSGQQYLPIYGVSAAGNTSNQAFSQLSPSVSGGGNGYLSVHSYNVPGNQYVQLTGSNFSGASPTARPSIQTSFLVATPVPAHPHLIIPAPSPQFTQASGSDQSAS

SEQ ID NO: 67465 - protein, 519 aa, Zea mays
  Clone ID: LIB4757-007-F9_FLI.pep
PRGRDRRAMAAPGGLDQDCAQDAAIKLFGRSIPVLHSSVFAATAAAESEVSTKLANDVRSKDGMPCLPNMSLIVKTNPFPSKSNMKNGLQAISSQHGKMEADSNSEEAKNSLQAIISQPGKRYDSKSEEAKTESGGSGQEKVLKKPDKILPCPRCNSMETKFCYFNNYNVNQPRHFCRNCKRYWTAGGTMRNVPVGSGRRRNKDPSHHHHFTKVCDYTIATNGDVSDATQRQSVAAKLCLLQGSGKQNETACKSVSPVSNIKEQNNADLISLVSGDNKEEKSCASSAVVSGSSENWMPENTVKKEEDNTSAYGDGVKLPDHKMQSHHAGPVSVFSRNPAAVMVTNQCSEDGIHTPGNGTVSPLSLPPPPMVPTPGICAPAVPFPFPLVPAFVSCIPGWPSGLWGAPWPGSSAPTLLSLPPNGLAGSNSGVLGKHTRVANLQEEQKAEKKFWVPKALRIDNPEEAAKSSIWASLGIKPDDRIIFKSFQSKDLKNSATKMPESLQANPAAFSRSLTFQERA

SEQ ID NO: 67466 - protein, 564 aa, Zea mays
  Clone ID: LIB4757-008-D7_FLI.pep
GRPGGLCPSPTSRAHQTQSPGLSVPNPPSGLHTMSSQCPYCRASGPARCATTQPPLSRAVSECSACARIVLERHLHTHPFFPLLPSLHPLPLVTPDLATAIDPAPSPSPGDEDDEDPFLPAGFVSAFSAFSLERHPVLARSASTFSGHLAELERALAVDSATAASNPDPAGPMVSVDSLRAYLQIVDVASILRLDRDIADHAFELFKDCSSATCLRNRSVEALATAALVQAIREAQQPRTLQEISTASNLPQKEIGKYIKILGESLKLSQPLNSNSIAVHMPRFCSLLQLNKSAQELAAHIGEVVVNKCFCTRRNPISISAAAIYLACQLEDKRKTQAEICKVTGLTEVTLRKVYKELLENWDDLLPPDYTPATPPEKAFPMTNIYSGRSASGKDMYQDKIFESIKQKCPEPAEPDHMVVVKEEEDKKTAALGRPPTKLDHPELGKVFRPPNAPFSTSPKSDRDKTETSLRGFNLNEVSCAMDSDRTDITVKPTFGDRLSNDPNANPSPNRQPLPWQLKQGAPATAPSYSRLREQQSGLDLVAALKGVGKRSPGDSDVRDKEGK

SEQ ID NO: 67467 - protein, 303 aa, Zea mays
  Clone ID: LIB4757-008-E9_FLI.pep
AGRETSPKPHSAMRPAAAAATATTAALRLRAASLSPSLAASLSPSLAALLSHRRSSLILPPLRRICSLAPPHSSAAPNSQPPPQLLSPIMDAQFELFRAQLDESSTLRDRIRAVVAEIESASRVATAALLLVHQPVPLADVLVKAKAQVEVIKALYARLAEVLKECPGQYYRYHADWRTETHMVVSMLAFMHWLETGGLLMHAEAQEKLGLCSGEFGLDVEDYLTGLCFMSNEFPRFVVNRVTAGDYDCPKRVLGFLTDLHASFRMLNLRNDFLRKKFDGMKYDLRRVEEVYYDVKIRGLVPA

SEQ ID NO: 67468 - protein, 642 aa, Zea mays
  Clone ID: LIB4757-008-H5_FLI.pep
NRIVASRSQGDMARSREVAGWGTVAGGGAAAVEKAVRCLGRGVDMTGDLRLKHCKDAGGCLVVRSAGRKAAEEKAVVPGFGVVADLPADVRCGKGDRIRFRSDVLEFNKMSEAFNHRNSLAGKIPSGLFNSCFDLESGSWAEDAAATKCLAFDGYFISLLDLRLDCRPLALADHVVGDVPAAWDPAAIASFIERYGTHIVVGLGLGGQDVVYVKQDRSSPLSPSEIKEHLDRLGDQLFTGTCTLPPSNRKLREHKSKVPEAFNVFDAQVTQQGLQGLMATPVSCKEGVTVIHSKRGGNAAASDHSEWLLTVPATPDAISFKLVPITSLLKGVTGVGFLSHAINLYLRYKPPTGELRYFLDFQHHRLWAPVLGDLPLGPCSNRQAATPALNFSLVGSKLYVSSSEVVVPRLPVTGMRLHLEGKKNNRLGIHLQHLSNTPAFIGGTPANEQPAAAVWRGSETISDARYYEPVQWRMFAHVCTVPVKYDPRWAGAGAGPPSAYVVSGAQLHVKAHDSTNILHLRLLYARLPGHAVVQSRWAHGAATRLSSGRGSFFLSKSLASGSGGVDKEQQHPGRVHVDSGVFAGGPPVPVGTQRLLRFVDTSQVTMGPQDSPGYWLVTGAKLDVEKGKISLRVKFSLLAPVS

SEQ ID NO: 67469 - protein, 606 aa, Zea mays
  Clone ID: LIB4757-008-H8_FLI.pep
PAASSRSRPLSKLSPSHLVPLDLSTSWCCTPHGLGGHAPPSSSSSSSSHPSSPARAAAHHMDPPPTSSTVASSYATPPQPSYAPSYPTSYTKFNSALNAGLLNPMSPPPLPLGKTRSSPTLFDMMANEQDYHPRTAAGIHSIPAPPQPHQLPPARSMDRQMLLQDRIADLIGSCSPGNQFNDADSSDVRLTLSSKDGLSVTLCVHRHILVAHSRFFAAKLSDRWSKQQRTLPHIVEISDCDDVEVYAETLRLMYCKDLRRRLMREDVNKVLGILKVSAAIVFDAGVLSCLEYLEAAPWAEDDDEKVATLLTQLHLENSGAGEVLKRVSLELAPSALVEEADEGGSCNGGNSSGGEEVLLRLLQVVLEGKDEKARREMKGLVSKMLRENSTSRGGAIGGDLRKESLYSACNGCLSLLCEQFVRASEGDHSEVARIARQADNLHWMLDILVERQIAEDFLRTWATQTELAAMHRKVPAIHRYEVSRVTARLFVGVGKGQILVSKEARCQLLSTWLEPFYEDLGWMRRACKGLDRHLIEDGLANTILTLPLATQQEILLAWFNRFLNSGEDCPNIQRGFEVWWRRAFWKRNSEPEPPSRLRITAICENS

SEQ ID NO: 67470 - protein, 557 aa, Zea mays
  Clone ID: LIB4757-009-E8_FLI.pep
RLARRNSAANTAMSSAASAAPPSRRTRSRPPSASSRKSDDSSAAAANGNGNRKVATKPASPHQLTGERTVKKLRLSKALTIPEGTTVLDACRRMAARRVDAVLLTDNQGLLSGIVTDKDIATRVVAEGLRVEQTIMSKIMTRNPVYVMSDTLAIEALQKMVQGKFRHLPVVENGEVIAMLDIAKCLYEAIARLEKAAEQGSAIAAAVEGVERQLGGNFSAPSALIETLRERMFKPSLSTIVTENTKVAIVSPTDPVCVAAQKMREFCVNSVVVSTGNTLQGIFTSKDILMRVVSQNISPELTLVEKVMTVNPDCATLETTILDTLHIMHDGKFLHIPVIDKDGQIAACLDVLQLTHATIQLVEGGNGTVNNVANSVMQRFWDSALALEPPDEEFDSHSEVSLLLQSEAGDGKSSVYPPVVGNSFSFKLQDRKGRVHRFTCGSESLDELVSSVRQRLSIADEKEAVQLLYEDDEGDRVLLTTDADLAGALLHAKSSGLKVLKLHIEDPSLNTEVTKPSQELAPPPLKSGISMVHVGLTAGVVALSGAAVMVYLKRSQL

SEQ ID NO: 67471 - protein, 271 aa, Zea mays
  Clone ID: LIB4757-009-F9_FLI.pep
RGRPGSVPTDRRVRHEPDEQGNEAISTGQTRRSKQSSPPLAESARSLPRSSASSLLSRAMDVDDVLSNLRVVGVPTKSAIYIWGYNHSGQTARKGKECHLRIPKSLPPKLFKLGNGKSLRWTDIACGREHTAAVASDGSLFTWGANEFGQLGDGTEDSAKEPKKVKSLETEFVKSVSCGAHCTAAVAEPRENDGTVSKSRLWVWGQNQGSDYPRLFWGAFTPNTVIKQVSCGAVHVMALSEDGLLQAWGILGDWEAWGSLGIAPSNLEIMS

SEQ ID NO: 67472 - protein, 292 aa, Zea mays
  Clone ID: LIB4757-009-H12_FLI.pep
IAIMDLEWFHWLTYTSDSDDEEEEDDRSDASADDKPATKNPTSSPPGSRANDEDLEIIIVRDVNEGEEVYNTYGTMGNAALLHRYGFTELDNQYDIVNIDLALVTKWCTSIFSGRHTRARVSLWRNLGYSGCTSQDTEYFEIAYDGEPQLELSILLYIINMKPDVYDKLICVAHGFVSDEEHETICNVFKFVKATSSNQNSEVNGLEKLPDVKKLLHSESVCSALLSLADMRESLYGSNTLEDDEEELHACCVVNERKLYHSLVLRVSERRILRRLREFASSGSKGRKRKHP

SEQ ID NO: 67473 - protein, 553 aa, Zea mays
  Clone ID: LIB4757-010-H10_FLI.pep
FAFSGTVGSPRRLGMGNCCVTPKAADDAGGGKKPKEPKQKKGKKPNPFSIEYNRSGQASAPKLVVLRDPTGRDIAARYELGAELGRGEFGVTYLCTDRASGEALACKSISKKKLRTAVDLEDVRREVEIMRHLPKHPNVVTLRDTYEDDNAVHLVMELCEGGELFDRIVARGHYTERAAALVLRTIVEVVQMCHKHGVMHRDLKPENFLFANKKESAALKAIDFGLSVFFTPGERFSEIVGSPYYMAPEVLKRNYGPEVDVWSAGVILYILLCGVPPFWAETEQGVAQAIIRSVIDFKRDPWPRVSDNAKDLVRGMLNPDPKRRLTAHQVLGHPWLQNIKKAPNVNLGETVKARLQQFSVMNKFKKHALRVIAEHLSVEEAADIKDMFEKMDLNKDQMLSFEELKLGLHKFGHQMPDADVQTLMEAADADGNGSLNYGEFVTLFVHLRKIGNDEHLHKAFAYFDRNQSGYIEIDELRESLADDLGQNREEIINAIIRDVDTDKDGKISYDEFATMMKAGTDWRKASRQYSRERFTSLSLKLQKDGSLQMTSTR

SEQ ID NO: 67474 - protein, 524 aa, Zea mays
  Clone ID: LIB4757-011-C3_FLI.pep
HVYVPSLVRLYEIVLDRERTVPLEHEGVAVDVVDPSELVHVGVGEPLRRIGVDAVGPCSPVVGHVAGDLPDAAVALEPGPERDHEHPVPDLEPALGFHVRQHVPQAARRRVTPPVQRHPRRLHVLVLQAQALLHRLDDGRAAGVEAEVVHPGLEVDLGRGRSVALVLAGRRVLLQVREEPPGEEARGEPRELGDGEHARREAAQVDGEGAHGGLGERLAEADPDAALGVLALLRARVRVVAGADVGAHEAAELHLGAPAAGRVVSDQHRGAAAAEQAVGQHHGLVGAGVPVGRDGLGRHHERQRAGARPQRVPGQVQRDQPRAAPHPREVVRRHVLAQAVAARDPGRQGRRRGEHGDVEDEHVNVAGRDVGPGEELGDGLVEEGVHLVHRVPQRGRVLAALQDVARGVGLLADAGADDDAEEEAVVCQPQPRVALDHGAGRLRGQLAVFAGLVAHVVQEVAPRLPAARGGHPGQVGHGVRKEEPREQRKQLHIDQWILLGRSGTVSRGAECVIYYLHAYPGRPR

SEQ ID NO: 67475 - protein, 560 aa, Zea mays
  Clone ID: LIB4757-011-F12_FLI.pep
GPNPPHSVTPPAMEAATAATAAMMWFRKGLRVHDNPALDAARRHGVGAASARLYPVFVLDPRYLRPDPVAASPGSARAGVARIRFLLESLSDLDARLRRLGSRLLLLRARDDVADAVCAALKDWNIGKLCFESDTEPYALARDKKVTDFALASGIEVLTPVSHTLSDPEEIIKKNGGRPPLTYQSFVSIAGEPPAPAMEEYSELPPLGDTGEYELLPVPTVEGLGYGDISQEEIPPFHGGETEALRRMKESLQNKEWVAKFEKPKGDPSAFVKPSTTVLSPYLKFGCLSSRYFYHCIQDVHRSVRNHTKPPVSLTGQLLWRDFFYTVSYGTPNFDRMKGNKICKQIPWSENEDLFVAWRDGQTGYPWIDAIMIQLRKWGWMHHLARHSVACFLTRGDMFIHWEKGRDVFERLLIDSDWAINNGNWLWLSCSSFFYQYHRIYSPITFGKKYDPNGNYTRHFIPVLKDMPREYIYEPWTAPTSIQKKANCIIGKDYPKPVVDHETASKECRKRMGEAYASSRVDAKPSKGKTLNSRRKMLHGDRDTSNSTIAKRLKRNSRVE

SEQ ID NO: 67476 - protein, 515 aa, Zea mays; identical to SEQ ID NO: 63395
  Clone ID: LIB4757-012-A11_FLI.pep

SEQ ID NO: 67477 - protein, 613 aa, Zea mays
  Clone ID: LIB4757-012-B11_FLI.pep
GGRLCALRSHPPTVPHHLHISVRPCQVKVAPQVCRGWHWWWCGDPAMAAERDIDDLPRNDANYTALTPLWFLERAALTHPARASVVHGPVRYTWADTYSRCRRLASALARRSVGHGSTVAVIAPNIPAIYEAHFGVPMAGAVVNCVNIRLNAATVAFLLEHSSAEVVMVDQEFFTLAEDSLRIIADKKKGTFKQPLLIVIGDATCDPTALQDALRKGAIDYEAFLESGDPEFAWRPPQDEWKSIALGYTSGTTSNPKGVVLHHRGAYLMSLSGALIWGMNEGAVYLWTLPMFHCNGWCYTWTLAALCGTSICLRQVSAKAIFSAIANEGVTHFCGAPVVLNTIINAPPADTILPLPRVVNVMTAGAAPPPSVLAAMSKLGFRITHTYGLSETYGPSTVCAWKPEWDRLPADERARLHARQGVRYVGLEGLDVVDPKTMVPVPADGTTMGEIVMRGNGVMKGYLKNPEANAEAFENGWFHSGDLSVRHGDGYVEVRDRAKDIIISGGENISSLEVEKAVYLHPAVLEASVVARADERWGESPCAFVTLKDAADRSDEAALARDIMRFCREKLPGYWVPKSVVFGPLPKTATGKIKKHELRAKAKELGPVGKSRM

SEQ ID NO: 67478 - protein, 288 aa, Zea mays
  Clone ID: LIB4757-012-E7_FLI.pep
LAARVVVVPQGLGNNTGDYARLAAALRDDHGLPAAVVARVTRPDWLRNAAGLADDSYWRGTLRPRPVLDWYLKRVDDAVSEARELCAPGGKISLIGHSAGGWLARVYMAEFDASDISLLLTLGTPHLPPPKGVPGVIDQTRGLLNYVEENCAPAVYTPELRYVCIAGRYIQGAPLLGNSAAASDEILAVDTPSEGGDAVIVSSSDNSTSTPSAVSWRARFVGQGYKQVCGRADVWGDGVVPEMAAHLEGALNVSFDGVYHSPVGSDDEQRPWYGSPAILKQWVHHLLS

SEQ ID NO: 67479 - protein, 566 aa, Zea mays
  Clone ID: LIB4757-013-H3_FLI.pep
RPGNGPVRKQEIKIYTHMATTGTTSMPAPVFHPTVWGDYFIKFVPEPLQVSDETMAERIRHLREEVSGMFQACKNVVDKTNLVDVVQRLGIDHHFEEQIATALASIHSAGLFNSSSLHEAALRFRLLRQQGFWVPADELVKFIKNEDGSFIDGITNDPKGLLSLYNAAHLVTHDEGTTTLEDAIAFARQHLEAARRCSLKSPLAEQVGRALGIPLPRTLKREEAIAFIPEYSSSQQDQQVYSPVILELAKLDFNLLQRLHQEELKEISQWWKDLSGEIGLGYVRDRIVECYFWSYTVHYERGQARARMILAKVFMLTSLLDDTYDVHATLEEARELNKAIQRWDESDVSLLPEYLKKFFVKVISNFREFEDELESHEKYRNVYNIKGFQTLSKHYLQEAEWFHHGCTPSFKDQVNVSVITGGAQVLSIGLLVGMGHEATREAFEWAIGDTDAIWACGEVSRFMDDMSAFKNGRNKMDVASSVECYIKEHNVPSEVALARINSLVQDAWKTINQAPFKYPALFPVVQRVTSLAKSMTLLFLDKRDAYTYSKDFQTTLETHFVRHIPL

SEQ ID NO: 67480 - protein, 505 aa, Zea mays
  Clone ID: LIB4757-013-H7_FLI.pep
PAGISSIIAPVKSRLCTGGNSLQPSSLCSLRVAKTMATAAAARHVVAVPYPGRGHVNPMLVVCRLLAAADAALSVTVVVTEEWHALLAAAGVPGTLPDRVRLATIPNVIPSERVRGADFAGFVEAVHIKMVAPVERLLDRLSLERKPDAIVADTFLAWGVGVGSARGIPVCSLWTQPATFFLALWHLDRWPPVDGHQGEEGLSCRSLDQYLPFPALAPVKCSDMKTLRSMVLPMKRLAQVFSNLRKAQCVLFTSFYELETGAIDGTSQVVPCPIYAVGPSIPYMPLEGDSGEFHHEEDYFGWLDAQPRSSVLYVSFGTHVSMPSSQLEEVALGLHESTVRFFWVARDRASTATLEQISAGGKGLVVPWCDQLKVLCHPSVGGFLSHCGWNSTLEAVFAGVPMLAFPVAWDQLVIGHLVADEWKIGVDLRERRREDGVVGRAAICDTVTKLMDLTDDDSLEMRRRAAELREASRRAVQEGGSSRCSLNSFVRDVIEGRLNVAETSR

SEQ ID NO: 67481 - protein, 443 aa, Zea mays
  Clone ID: LIB4757-014-A3_FLI.pep
RGPSPSSPHPMSTATAPSPSPSPSPSSGTRPLLRIGAARRFAMAFPPWAALLFAGVLVVVLAAAGAEAGGGSVCFDRMFSFGDSLTDTGNFLLSVPDDFPDPARNLPYGQTFFGRPSGRYSDGRNLLDFFAEAFGLPYVPPYLGGGDFQNGANFAVGGATALNGSFFRERGVEPTWTPHSLDEQMQWFKKLLTSIAPLETEQNKIISKSLFFVGEVGGNDYNHLIVRDKSVDELHEVVPNVVGAISSAITDLINLGAKKLVVPGNFPIGCVPLYLAIFQSQKEDYYEEQTGCIKWLNDLAEYHNKMLQEELEKLRNLHPDVTIIYADYYGAALNIFRAPLQFGFTVPLNACCGSDAPYNCSPSISCGRPGSTVCPDPSKYISWDGLHFTEASYKVVIQGVLGGYAKPPLSETCKGAEFKVSQLHQCTDNPTNTVSYDALSSFI

SEQ ID NO: 67482 - protein, 509 aa, Zea mays
  Clone ID: LIB4757-014-D7_FLI.pep
RRMEIDQAVRGCSDRRMRTKYSNAVYVVQRAFALYPFEEVAFSFNGGKDSTVLLHLIRAGYYLYKKDSGDVAQTDAVKNCPLRTIYFESPCAFPEINSFTYEIVSTYGLPLETIHSDFKSGLEGLLKEKPTKAIFIGTRIGDPNAVGQEQFSPSSPGWPPFMRVNPILDWSYRDVWSFLITCKVKYCSLYDQGYTSIGSIHDTVPNALLSDSSSEKSFRPAYMLTDGRLERAGRTKKINPKVEMNSAASNGINDTEGGRMISRAASIIVVGDEILFGTTEDNLGAALCKKLHAIGWRVSHVAVVRNEIDSVAEEVERCKSTDDMVFIFGGLGPLHSDVSLAGVAKAFGVRLAPDEEFEDYLSQLMGNNYTGDRNEMAQLPEGITELLHHKTLPLPLIKCRNVIALAATNMDEVDTEWDCLLGTQESGLMPSKPFVSKHLSTTLSDVQIASVLAKLCLEFSDVYIGCHRISRAGPLVVNLTGKDNQRVDAAAEKLTSSFEGQFSQLNSCK

SEQ ID NO: 67483 - protein, 475 aa, Zea mays
  Clone ID: LIB4757-014-E10_FLI.pep
ITGGASLQVCTRTDERGRPAGRSHNPSAALCLPPLRLSSRPASAFHSTARRCRVPTSSPPKFLVSGLDLSESERARMGGGNGETTQLGEPLLAKKAKAYRPRCPGCRVDRLNAEREGVFPLKDLFLIWLVTITCTLPIQSLFPFLYFMIRDLHIAKQTQDIGFYAGFVGASYMCGRAVSSTVWGIVADKYGRKPVIVLTLIAIVIFNTMFGLSSNYWMALITRCLLGIMCGYLGPIKAYATEVCRKEYNHLALAVVSSSRGIGLIIGPAIGGYLAQPADKYPSIFSQTSIFGRFPYFLPCLCISILAVIALIACIWFPETLHKHNGDAVDNSVETVEESLAGTDTEGNGGGGCLKLFTNWPLMSAITLYCIFSLQDVAYAETFSLWAVSDRSFGGLSFTTTDVGNVLAMSGLFLFLYQMLIYPFLAKTVDHITLVRAVALLTLPVLASYPFFPSLSGFGLMVVVNCASFLKIHSR

SEQ ID NO: 67484 - protein, 429 aa, Zea mays; identical to SEQ ID NO: 57924
  Clone ID: LIB4757-015-G1_FLI.pep

SEQ ID NO: 67485 - protein, 626 aa, Zea mays
  Clone ID: LIB4757-016-F8_FLI.pep
NVMMDSVSMKLLAFVFLLLRCQRASLALAVDFQVEALVEMRTQLGDKRGVLSDWKDNQMSPCYWANVSCQDNKVTTIILSSSGLTGSLSPSIAKLTTLQQLILDNNNITGGIPPEFGNLSSLTILNLGRNNLNGSIPDSLGQLSKLQNLDLSHNYLTGNIPSSFSNLLSLSDINLAYNNIRGAIPQHLLQVAQYNYAGNHLNCGQNLSACERGSTLTGGSKNSKLKVVIGSIAGAVTLSVTIVLVLLWWQRMRYRPEIFIDVSGQNDHMLEFGQIKRFSWRELQIATSNFSEQNVLGKGGFGKVYKGVLPGPNSIKIAVKRLLNVDSRDGEMAFLREVELISIAVHKNILRLIGFCTTPTERLLVYPFMENLSVASRLRDIKLNEPALDWSTRMRIALGAACGLEYLREHCNPKIIHRDVKAANVLLDGNFEAVVGDFGLAKMIDIGRNTVTTGVRGTMGHVAPEYIKTGRPSVKTDIFGYGVMLLEIVTGERAIAFHPDRIEETGEILLTDQVKLWMEEGRLLDLVDRNLGGVYNLEELEKVTQIALLCTHMDPEQRPTMSEVVQMLEGEIVPAERWEEWQLAELQRRQQHEMRQQGKLFNFSEESQNIQEAIELSAGRWAVIRK

SEQ ID NO: 67486 - protein, 402 aa, Zea mays
  Clone ID: LIB4757-017-G10_FLI.pep
RCSCALGFVPPGIVPGKLLLAAAAMASSTSEMAEGKEKLKRSGSLGSNDTYVRADKIDLTSLDIQLENQLTKTWGKANLKSQGPKEEWEIDLAKLEIRYVIAQGTYGTVYRGTYDGQDVAVKLLDWGEDGFATEAETAALRTSFKTEVAVWHKLSHPNVTKFVGASMGTTDLKIPSNNSNGAARTNLPARACCVVVEYLAGGTLKQYLIKNSRRKLAYKVVVQLALDLARGLSYLHSRKIVHRDVKSENMLLTPQRNLKIADFGVARVEAQNPKDMTGATGTLGYMAPEVLDGKPYNRKCDVYSFGICLWEIYCCDMPYPDLSFADVSSAVVHQNLRPDIPRCCPSAFANVMRKCWDANPDKRPDMDEVVQLLEALDTSKGGGMIPDGQSSGCLCFTKARGP

SEQ ID NO: 67487 - protein, 277 aa, Zea mays
  Clone ID: LIB4757-018-A2_FLI.pep
SLTRPQGGIFAGPAAPEDEVCGEAALPYQKADRGPRKEAGIRLCSATMSSLYDVSCFAAGLAGNVFALALFLSPVPTFKRVLKAKSTEQFDGLPYLLSLLNCCICLWYGLPWVSDGGRALVATVNCTGALFQLAYISLFIFYADSRTTRLKVAGLLVLVVFAFALIAHASIAFFDQPLRQLFVGSVSMASLVSMFASPLAVMGVVVRTECVEFMPFYLSLSTFLMSASFAVYGLLLRDFFIYFPNGLGVILGAMQLVLYAYYSRRWKSSDSSAPLLA

SEQ ID NO: 67488 - protein, 403 aa, Sorghum bicolor
  Clone ID: LIB3476-029-E9_FLI.pep
SPHNPRPLPPPHPLPLGFPRGEEEETMDSSGGGGGGGGGGAQIKGMATHGGRYVLYNVYGNLFEVSSKYAPPIRPIGRGAYGIVCAAVNSQTGEEVAIKKVGNAFDNHIDAKRTLREIKLLRHMDHENILALKDVIRPPTRENFNDVYIVTELMDTDLHQIIRSNQPLTDDHCQYFLYQLLRGLKYVHSANILHRDLKPSNLFLNANCDLKIADFGLARTTSETDLMTEYVVTRWYRAPELLLNCSQYTAAIDVWSVGCILGEIVTRQPLFPGRDYIQQLKLITELIGSPDDASLGFLRSDNAKRYMKQLPQFPRQDFRLRFRNMSPGAVDLLERMLVFDPSRRITVDEALHHPYLASLHDINEEPTCPAPFSFDFEQPSFTEAHIKELIWRESLAFNPDPPY

SEQ ID NO: 67489 - protein, 429 aa, Zea mays
  Clone ID: LIB3116-034-C8_FLI.pep
PARRPAAAQPPPPGAGGRRLAQAQAARRGELPPAASKERTRGRGSRDGAAADGRGEPAPGGGAGRGGLQVRGAAGAVHGDGGRGGHGLREPPVVHVGGRVRVAVAEAQEREHGHRAARAAATAPALPGGGAGPDGVHLGRAVQAHPGGGVQAQGVEAARARRPGRPQPGGQGRVPVAQVRAEGYQGQPLPAGLLPLLLRPGLPSQEEGAAQRRRPHHPGRHVRGRPQPRPAPATGAGAARRLQPWRQQEAAVAAEAGRRRSGAAPPPAGPAAPAAAGGWRGEMRAARGRGGVGAHPAEPRGADGHDADAGPQLQGGVRHRAVRPALRDVADQGLTERIGWIGRLASQEILDQIVFERTPQWSTAQRWLGCQSETAVTEQDTRGLHSAVVQEEEQTQGEDGARPDMAWNRDRRHRRRGCGRRRDMRNTTC

SEQ ID NO: 67490 - protein, 358 aa, Oryza sativa nipponbare
  Clone ID: LIB3474-004-B12_FLI.pep
VVGSVINRSPMDPWISTQPSLSLDLRVGLPATAAVAMVKPKVLVEEDFFHQQPLKKDPEVAALEAELKRMGAENRQLSEMLAAVAAKYEALQSQFSDMVTASANNGGGGGNNPSSTSEGGSVSPSRKRKSESLDDSPPPPPPPHPHAAPHHMHVMPGAAAAGYADQTECTSGEPCKRIREECKPKISKLYVHADPSDLSLVVKDGYQWRKYGQKVTKDNPCPRAYFRCSFAPACPVKKKVQRSAEDNTILVATYEGEHNHGQPPPPLQSAAQNSDGSGKSAGKPPHAPAAAPPAPVVPHRQHEPVVVNGEQQAAAASEMIRRNLAEQMAMTLTRDPSFKAALVTALSGRILELSPTKD

SEQ ID NO: 67491 - protein, 196 aa, Triticum aestivum
  Clone ID: LIB3833-009-G5_FLI.pep
LASFAVAARPHRHPPAMAAHVDPLVVGRVIGDVVDMFVPTMPVTVRFGTKDLTNGCEIKPSIADAAPSIQIAGRAGDLFTLVMTDPDAPSPSEPTMKEWLHWLVVNIPGGSDPSQGEEVVPYMGPKPPLGIHRYVLVLFQQKARVLAPAPGGDTAASAMRARFSTRAFAERHDLGLPVAAMYFNAQKEPANRRRRY

SEQ ID NO: 67492 - protein, 196 aa, Triticum aestivum
  Clone ID: LIB3853-006-G10_FLI.pep
LASFAVAARPHRRPPAMAAHVEPLVVGRVIGDVVDMFVPTMPVTVRFGTNDLTNGCEIKPSIADAAPSIQITGRAGDLFTLVMTDPDAPSPSEPTMKEWLHWLVVNIPGGSDPSQGEEVVPYMGPKPPLGIHRYVLVLFQQKARVLAPAPGGDTAASAMRARFSTRAFAERHDLGLPVAAMYFNAQKEPANRRRRY

SEQ ID NO: 67493 - protein, 178 aa, Triticum aestivum
  Clone ID: LIB3853-021-D9_FLI.pep
LFPSAAACRCLPLRVEVDGSHREAKVVLVGEAARVEVVPGGGRVHGLPLLLLEQHEGEPVNANVGLGALVAHHLPSKRSICGARNITDDPVEMLPKVWITRPWHIWVRHDQSEEGSHVAALDLNAWLGHDCRREELVAVEHLLVGAVGHRHLHCGVEVVDDLPDDLSNDERLQHPSHG

SEQ ID NO: 67494 - protein, 201 aa, Oryza sativa
  Clone ID: LIB4370-046-D11_FLI.pep
VAVAVHGWMDGRRRARGGRLVAAAAVGGLLLGVEVEGGDGEAEVVAVGEGARAEPGARGVLVGRRRRHARLLLEQHHHVAVDPHRRPWPHVRHHHIPLRRICSTWYVNHQPVKPLSHSRLAGARSIWISHDQSEELVDPAGDLHGGRRGGDGRLDLAAVGEVLGPEPHRHGRRRHEQVHHVADHPPHHQRVHMRCHGRLAS

SEQ ID NO: 67495 - protein, 186 aa, Triticum aestivum
  Clone ID: LIB3853-024-H4_FLI.pep
FVVRREQPSWAEGDLVVIIATAGVCGLVVGVLVGLRRRAAGIPALERVAGAAREVHGKVEAVDHRDVVEVLGAAAADGVLGQRCWWPPGEGAGQLAAAVAGPAAPAAAIEGAPGASPYPPGFGARGHVDAGRLACAQLEAPTHRDARRPNCGAAVVLDVEGGRAGTGGKNSEEEEEHRGGRHCWKL

SEQ ID NO: 67496 - protein, 134 aa, Triticum aestivum
  Clone ID: LIB3853-026-B5_FLI.pep
LEVDDLEVVAVLDDDVIHVDGAEPGEVPGNGDEVDAAALVELHDGAVLVVALPPQRPQPPLQRLQRPHRLVRRHVHQRLPARRLLLQLHHPVLEHPHAACRHLSSSSCSSLLASYLRSIDLASLVLHYLLLVGC

SEQ ID NO: 67497 - protein, 242 aa, Triticum aestivum
  Clone ID: LIB4126-013-C10_FLI.pep
LKMGRGKIVIRRIDNSTSRQVTFSKRRNGIFKKAKELGILCDAEVGLVIFSSTGRLYEYASSSMKSVIDRYGRAKEEQQLVANPNSELKFWQREAASLRQQLHNLQENHRQLTGQDLSGMGVKELQTLENQLEISLRCIRTKKDQILIDEIHELNHKGSLVHQENMELYRKINLIRQENAELQKKLSETEAATEVNRDSRTPYNFAVVEDANVSVDLELNSPQQQNDVEHTAPPKLGLQLHP

SEQ ID NO: 67498 - protein, 169 aa, Triticum aestivum
  Clone ID: LIB4126-025-C10_FLI.pep
AKEEQQLVANPNSELKFWQREAASLRQQLHNLQENHRQLTGQDLSGMGVKELQTLENQLEISLRCIRTKKDQILIDEIHELNHKGSLVHQENMELYRKINLIRQENAELQKKLSETEAATEVNRDSRTPYNFAVVEDANVSVDLELNSPQQQNDVEHTAPPKLGLQLHP

SEQ ID NO: 67499 - protein, 241 aa, Triticum aestivum
  Clone ID: LIB4126-025-F11_FLI.pep
KMGRGKIVIRRIDNSTSRQVTFSKRRNGIFKKAKELGILCDAEVGLVIFSSTGRLYEYASSSMKSVIDRYGRAKEEQQLVANPNSELKFWQREAASLRQQLHNLQENHRQLMGQDLSGMGVKELQTLENQLEISLRCIRTKKDQILIDEIHELNHKGSLVHQENMELYKKINLIRQENAELHKKLSETEAATEVNRDSRTPYNFAVVEDANVSVNLELNSPQQQNDVQHTAPPKLGLQLHP

SEQ ID NO: 67500 - protein, 362 aa, Triticum aestivum
  Clone ID: LIB3400-020-G11_FLI.pep
DNTRTGTSPSPVVAVSSGEPVIGLKLGKRTYFEDVCGGQNVKSSPSGAASAPNKSPALGKKAKAEQQKPHNSYCQVEGCKVDLSSVKDYHRKHRVCELHSKAPKVVVAGLERRFCQQCSRFHALAEFDQKKRSCRRRLNDHNSRRRKPQPEAISFSSSRMSTMFYDARQQPNFLFGQAPYVQMRSCGSSSWDDPGGFKVTHTKAPWLKPTTAAGVHGIHLSSQQMSDNIMPHGAHHGFDGFMAFKGTCTKFPNQGVQASAVASDSSGAPDLQHALSLLSSNPVGAANLQPSPQMHSGVAAIAGAPNPAMHALGSSTGLWLDGSQPLDDHPRFQVFERLGDHDSELQLPKPSYDHASHFDRMH

SEQ ID NO: 67501 - protein, 374 aa, Sorghum bicolor
  Clone ID: LIB3476-030-H12_FLI.pep
PISSSPQSTLFTSSPLSSSLRSPNPELTSPNRRRPGRMEWTAPKPASSPSSPPLLWDWGDHAATGSGSSSGDAPARRGAGKEREAKRARGEDGGGGAEVRCQVEGCGLDLTRVKDYHRKHRVCEAHTKSPRVIVAGQERRFCQQCSRFHALSEFDQKKRSCRRRLSDHNARRRKPQPDAFTFASARLPSSLFDDRRQISFVWNKAPVSHVRPFTSPWDSSSDLKLPHAKETREVSTKVGTITGQVHLDKSHMSNAIPTLSHGKDEPWPMKGPDMSITASKFDGAPDLQRALSLLSVGACGLPDPVHQTSCVIQFTGASENSGDLHLSHGGNSGPASCADGQHIAAQSQSQLVRFTMDTSNNVYEPSFFGVNQIN

SEQ ID NO: 67502 - protein, 153 aa, Zea mays
  Clone ID: 700430855_FLI.pep
HKFHTFTSSSAPKVGTCLHSMLELMLTHTEWPYTHRRGSISCREQTQQKSSGVHYSYRLPGHGPGMGSLQPTSVSFMILLGRDEGEELVLGLVLVLGRRRRRLDGAGGGEAVLPELLAHELVVDEGGAPEVGEHEPRDEQQLELVPDGDPVYE

SEQ ID NO: 67503 - protein, 342 aa, Triticum aestivum
  Clone ID: LIB3399-014-A6_FLI.pep
PAWALGELNRSTSRAAMIKAEPELRGQLRGGGGMLQQRCDSCRSAPCAFYCRADSAALCAACDADVHSANTLASRHRRVPMGAVAPASPAGGPFVVRPGGVNSSWPIREGRRSYYDDGEGEEEEEEEATSWLLLDPLRGSEGDAPAFGDALVADFLDLGRAGEKDASSKEYRGHGVESHEGSHELVVPGEPVAQLHERQGFTAEMSYDAQNSNHGYGFGATFQRSLSMSSSPDNSSTVQDVTSSYMRSSESSVDLFSAAAHMSPQFMGMAMDREARVHRYREKRKMRRFEKTIRYASRKAYAETRPRIKGRFAKRADADLEVDQYFSAAALSDSSCGVVPTF

SEQ ID NO: 67504 - protein, 446 aa, Triticum aestivum
  Clone ID: LIB3399-057-E8_FLI.pep
DRCDYTIPEEALLLRWRWSGLYVLEAAEMGGSDQKAAGGAVGGKAARACDGCMRRRARWYCAADDAFLCQACDTSVHSANPLARRHERLRLRATSPLPAEGVAAVKGSPATTSKCLDVAPAWPKRKARTRRPPVKSVGQLLSRRLVVPEVGAGESSTSDERRAPEEEQLLYRVPVFDPALAEFCSPPPIDDSRHGEDVEGAVEDTKEHMATPSPVQELPDCFASFGPTDADLREFAADMEALLGQGLDDGNELEDSFYMEALGLISPPGEHGGRVKVEADGSLVSRSNGVLASGHDLKREFNGSPPTLVDDDDSFEHKTSTASNGDAVDDAQFLKRSLDLRLNYEAVMESWGSSPWTDGRRPSGQLDDLLLHDHAGMWTAGGGGRHGDAAWPPRPRTDEWREARVSRYREKRRTRLFAKKIRYEVRKLNAEKRPRMKGRFVKRTGG

SEQ ID NO: 67505 - protein, 249 aa, Oryza sativa nipponbare
  Clone ID: LIB3433-026-D1_FLI.pep
ARNNIYYVQTMASIALVSPVGVGRSSGRPGSLAAGGKLIRVHLRHPPLPASRRRVAGDEAVAAQLLLRHPRRVAGGFLQPSDPCYPLTRPVRGDAGRGGGGGGGGLGSGVVDEEVLDVPPGQRGEVLGDAAAAAAPAVARGGRRRGRHGVVGAAAEAAAVLLLRRRRRGRGRLRGEPHAGEEVPAVAHGELARRVHRHVALAAQDRPVLLAEQETPLLLADVAERRRRRCRRAAGRRGVEQREPAVLPG

SEQ ID NO: 67506 - protein, 326 aa, Triticum aestivum
  Clone ID: LIB3910-027-D8_FLI.pep
MIKAEPELRGQLRGGGGMLQQRCDSCRSAPCAFYCRADSAALCAACDADVHSANTLASRHRRVPMGAVAPASPAGGPFVVRPGGVNSSWPIREGRRSYYDDGEGEEEEEEEATSWLLLDPLRGSEGDAPAFGDALVADFLDLGRAGEKDASSKEYRGHGVESHEGSHELVVPGEPVAQLHERQGFTAEMSYDAQNSNHGYGFGATFQRSLSMSSSPDNSSTVQDVTSSYMRSSESSVDLFSAAAHMSPQFMGMAMDREARVHRYREKRKMRRFEKTIRYASRKAYAETRPRIKGRFAKRADADLEVDQYFSAAALSDSSCGVVPTF

SEQ ID NO: 67507 - protein, 312 aa, Oryza sativa
  Clone ID: LIB4371-035-C11_FLI.pep
LSKQDLVEEMMASDGSASPASCGGAACGVCGGAATVYCAADAAALCVPCDAAVHAANPLASRHDRVPLAVAMAAASSGVYDHLFAPDDDAASSWAAAAAAGAAVQGQGQGSPNDSSSSFTNDSAGGGGGGGAERSLFDLLSDVDIMSCGGGGLASSFDGAAAPPLWLHPGQLAALTPWSPADSVVVPTSAAGAVAAAAAAREERVRRYREKRKNRKFQKTIRYASRKAYAEARPRIKGRFVKRATTAAASSSSDDDSTAAAGVSGAGGAGAAATKEAKFWLSFSDDGRADGVGFYMDSTTAATAAYGVVPTF

SEQ ID NO: 67508 - protein, 262 aa, Triticum aestivum
  Clone ID: LIB4600-012-A1_FLI.pep
RGRSEGEQSRAEQRAMKIQCNACGAAEARVLCCADEAALCAACDEEVHAANRLAGKHQRVPLLPDAAAPPKCDICQEASGYFFCLEDRALLCRDCDVAIHTVNSFVSAHQRFLLTGVQVGLDPADPVPPVADKHVNTSGGSVDSLPKHLPKKNPTALFSGENSASIPSQNVISGDYSRQISAPNTKTGMTNWTMDNSALRLAEPPPKYLSDGNSKLLLSNQTTTALSNQMNRDSGRAYNLPFSGGNGSDSLPDWPVDEFFSN

SEQ ID NO: 67509 - protein, 120 aa, Sorghum bicolor
  Clone ID: LIB3476-040-H2_FLI.pep
LSCENQASAAASALRFLASSMMLSLIPLPLGRDTHGFLSLPMVNTLPMRVANWWPRESSTWMVSKLPLCFSLLFITPTRPVFLPPVTITTFPTSNLMKSTILLVSRSILMVSLALMRGSG

SEQ ID NO: 67510 - protein, 415 aa, Triticum aestivum
  Clone ID: LIB3281-016-D6_FLI.pep
CCSSILLRYKRREEFTLPNLKIPYNNRLGFYFIIPQRDITEKLPNKFIQVVRHGKNVHCSSFELASLNVRNKSAAAECFLRTELCLEGLISEIREDIRILTMLAEVLCLLDMIVNSFAYTISTKPVDRYTRPEFTGDGPMAINAGRHPILESLHTDFVPNNIFLSEASNMVLVMGPNMSGKSTYLQQICLIVILAQVGCYVPAQFASLRVVDRIFTRIGTGDNVENNSSTFMTEMKETAFIMQNVSSRSLVVVDELGRATSSSDGLAIAWSCCEHLLSLKGYTVFATHMEGLSELATMYPNVKVLHFEVDLRNGRLDFKFRLKDGVRRVPHYGLLLARVAGLPASVIDTATSITSRITEQEMVRMDANCVQYQPLRMAYQAAQRLICLKYSNQGDDYIREALQDLKESYAAGNLI

SEQ ID NO: 67511 - protein, 174 aa, Glycine max
  Clone ID: LIB3051-107-E10_FLI.pep
NKNILAFNILLDNMTTTLERGFSEEQEALVVKSWNVMKKNSGELGLKFFLKIFEIAPSAQKLFSFLRDSTVPLEQNPKLKPHAVSVFVMTCDSAVQLRKAGKVTVRESNLKKLGATHFRTGVANEHFEVTKFALLETIKEAVPEMWSPAMKNAWGEAYDQLVDAIKSEMKPPSS

SEQ ID NO: 67512 - protein, 91 aa, Glycine max
  Clone ID: LIB3108-017-B4_FLI.pep
NKNILAFNILLDNMTTTLERGFSEEQEALVVKSWNVMKKNSGELGLKFFLKIFEIAPSAQKLFSFLRDSTVPLEQNPKLKPHAVSVFVMVS

SEQ ID NO: 67513 - protein, 136 aa, Oryza sativa nipponbare
  Clone ID: LIB3431-029-E7_FLI.pep
ELKSLCERNMASSGAGRDERWILAGATALVTGRSKGIGRAIVEELVGFGSTVHTCARSEAELSRCQEELTAKGLAVSFSVCDVSVRTDREELVSRVRELFGGKLNILVSLIISCHHDFQRSNGICKIRGAVHIAPT

SEQ ID NO: 67514 - protein, 292 aa, Sorghum bicolor
  Clone ID: LIB3478-008-E12_FLI.pep
EPLRLRNPSKKPNKGLVGFRTRDPSACCRGWHVQRFAHRVPAVDDQILSVHVLGLVGRQVNRRPGNVLRLQHRPGHLVHVPLEDPPMLLDAPIGEPLRHSSHRQRRRDSVRGDGVDAHPGARHLSGHGAHDSNDRHLGDAVGRRGHVAQHSGGAGGADDAAGAARHHDARGVLHAGQHAPGVDGHDAVEVGQVDGAQRGRRHVAADARVVVHHVEAAVELDGEVDGRGDLRLVRDVAAGVSHGVGAQLGSYGVSEVVLDVGDDDPRPVPDKLSCRRLPDPARAAGDHRYLSS

SEQ ID NO: 67515 - protein, 322 aa, Sorghum bicolor
  Clone ID: LIB3478-023-A4_FLI.pep
VLCSRWSPWCTLMEAAIPNPSALKTRIAVVTGGNKGIGLEVCRQLAGDGATVVLTARDETRGAAAAEKLREAGLSNVIFHQLEITDAPSIARLFEFLKTRFGKLDILINNAAIGAVEYVQDPADSPASEEKFSGMDQGQRLECMFKGVRETYDAAREGVKTNYYGVKHVIEALLPLLQASSDGRIVNVSSEFGLLRLINNEELRQELNDVEKLTEERLDEVLATFLRDFEAGEVEARGWPMAFSAYKVGKVAMNAYSRILARRHPELRINCAHPGYVSTDMTIHTGPLTPEEGAANLVKVALLPEGGPTGAYFAWGVEAPFV

SEQ ID NO: 67516 - protein, 283 aa, Sorghum bicolor
  Clone ID: LIB3481-037-C7_FLI.pep
LRTINRWRMLACCVTVTELHVLRRAVVEELAALGAAVHTCSRNEAELRDRLAEWEAAAKTNGGGGVVTGSVCDVSARDQRERLLRDVAERFGGKLNILVNNVGTNFGKPTAEYTAEDYAFLMSTNLESAYHLCQLAYPLLKAPAASAGNGNGGSVVLVSSVCGGVAVCTGSVYAMAKAGMNQLARNLACEWAGDGIRANSVAPWYTRTPLVEGDLSRGQYVEEILRRTPQRRVGEPEEISSLVAFLCMPCASYITGQTIAVDGGMTVNGLYPSSSPSGLSYSN

SEQ ID NO: 67517 - protein, 277 aa, Zea mays
  Clone ID: LIB3596-038-C2_FLI.pep
LQKGVFETSGPTLKLKLKRSACAAMDVKCRRLEGKVAIVTASTMGIGLAIAERLGLEGAAVVISSRKQKNVNEAVEGLRAKGITAVGAVCHVSDAQQRKSLIETAVKSFGHIDILVSNAAANPSVDSILEMKESVLDKLWDINVKASILLIQDAAPHLRKGSSVIIISSIAGYNPEQGLTMYGVTKTALFGLTKALAGEMGPDTRVNCIAPGFVPTRFASFLTENETIRKELNERTKLKRLGTVEDMAAAAAFLASDDASYITAETIVVAGGVQSRL

SEQ ID NO: 67518 - protein, 279 aa, Oryza sativa
  Clone ID: LIB4309-036-A6_FLI.pep
SLKRREIETSRLQPYMAMATTSSKNERWSLAGATALVTGGSKGIGRAIVEELASLGATVHTCARTEAPLNRCREELTAKGLAVTVSVCDVSLRADREALAGTVRELFGGKLSILVNCAGMSFLKPAVELTPDDCSQVMGMNFESCFHLSQLAYPLLKASQRGCIINISSIASVVAFCSLPNAVYSAAKGAMNQVTRNLAAEWANDGIRVNCVAPGFIRTPLLSEFVEGNELGRAEFSRVPMGRLGEPEDIASLVAFLSMPASSYITGQVICADGGRCLS

SEQ ID NO: 67519 - protein, 357 aa, Oryza sativa
  Clone ID: LIB4370-036-A6_FLI.pep
QAMAALAQLAGAAVRVALAALLALLLPAYRVYRLTASFLGALLAAAADDDVAGKVVLITGASSGIGEHLAYEYARRGAYLALVARREESLREVGDAALAAGSPGVLVVAGDVSSPDDCRKFVDDTIRYFGRLDHLVNNASIWQVGKFEELTDVNHFRKLMDINFWGHVYPTRHAIPHLKKTRGRIVGVTSNSSYIFMPRNTFYNASKAAAANLYETLRMELAGDGIAITEVIPGVVESEITKGKMLTKEGDMRVDQDERDAILGAAPVERAGEFARAAVRGVCGGERYVFEPRWYRAAYTLRVCFPEALEWCARLLTVWRLGPATTDTVGRWLLLGVPGQRWLSQPASLRSPEIKAR

SEQ ID NO: 67520 - protein, 426 aa, Zea mays
  Clone ID: LIB143-023-B2_FLI.pep
RSAEAPRMAPEIQSLCPSTTAALLLLAACLAAAVAALDAADYARPPLPAGGGGRRVLFANGLGLTPQMGWNSWNHFQCDINEAVVRSTADALVATGLAKAGYTYVNLDDCWADSERTKEGYMVANPKTFPSGIKALADYVHSKGLKLGIYSSAGTRTCSNRMPGSLGYEERDAKMFASWGVDYLKYDNCYRDGTPETVRFGRMSRALVNSGRPIFYSLCEWGFMEVPKWGGMYGNSWRTTGDINDTWSGMLDNIDLNDAYARYAKPGGWNADPDMLEVGNGGMAYNEYVVHFSLWAIAKAPLIIGCDVTRVSNETLGILSNAEVIAISQDRLGVQGQKVSKYGNDLEVWAGQLSGHRKAVLLLNRGATRSASITAAWPDVGIRRGVAVQARDVWKHETLPGWFTGSLTAVVGPHSCKLFVLTPVPS

SEQ ID NO: 67521 - protein, 283 aa, Zea mays
  Clone ID: LIB143-005-B9_FLI.pep
TIQPIMASSSRSTVFSLLLLVALLLSCSGMSSAARLLEEAPPKEEHPHPAVPELPEPELPPHPTDVVPPELPKPELPPHPAVVPELPKPEVPHQVPEQPKPELPPHPTAVPELPKPEVPHPVPELPKPEVPPHPTAVPELPKPEVPHPVPELPKPELTPHPAAVPELPKPEVPHPVPELPKPELPPHPTAVPELPKPEVPHPVPELPKPELPPHPAVPELPKPEVPHPVAPELPKPELPPHPTVPELPHPEVPEVPNHELPPLPKAELPPKPEGHYPEPEAKP

SEQ ID NO: 67522 - protein, 409 aa, Zea mays
  Clone ID: LIB143-033-F5_FLI.pep
RPDRLPFPASGAQGQANSFEVVMADQANQPTVLHKLGGQFHLSSSFSEGVRARNICPSFSPYERRFATRNYMTQSLWGPSMSVSGGINVPVMPTPLFANAPAEKGGKNFMIDFMMGGVSAAVSKTAAAPIERVKLLIQNQDEMIKSGRLSEPYKGIADCFKRTIKDEGFSSLWRGNTANVIRYFPTQALNFAFKDYFKRLFNFKKDRDGYWKWFAGNLASGGAAGASSLFFVYSLDYARTRLANDAKAAKGGGDRQFNGLVDVYRKTLKSDGIAGLYRGFNISCVGIIVYRGLYFGLYDSIKPVVLTGSLQDNFFASFALGWLITNGAGLASYPIDTVRRRMMMTSGEAVKYKSSLDAFQQILKKEGPKSLFKGAGANILRAIAGAGVLSGYDQLQILFFGKKYGSGGA

SEQ ID NO: 67523 - protein, 274 aa, Zea mays
  Clone ID: LIB143-035-E11_FLI.pep
VPTKNKGSIRGSAIAMEIEQAMRGSSDVRLRAKYDAAVYIVRRAYALYPFEELAFSFNGGKDSTVLLHLLRAGYYLHRASSGGDVDDDSTVLQTVKNCPMRTIYFEDPDAFPEIDCFTYETASTYGLPLESIRTGYKSGLEALLKEKPTKAILLGTRNGDPNAVGQQEFSPSSPDWPPFMRVNPILDWSYSDVWSFLLTCKVQYCSLYDQGYTSIGSVHNTVPNQLLRDGPGGSYRPAYTLSDGSLERAGRAKKTGKRDGSANGTKNNGNETKQ

SEQ ID NO: 67524 - protein, 227 aa, Zea mays
  Clone ID: LIB143-044-B3_FLI.pep
GTIHKPYTGKTNTTQTSQMHRRRSEHPPLQRNMQDIHGPVAAQQTSNRRPTDAQPEISIAFTSGFFTSVLGTVTVSTPFSRPAFTSSSLAFSGRRKRLTNWPLLRSTRCHLSSFLSSSSLLRLPLMTSTLPPSTSTLTSSFLTPGRSALNTCASGVSFQSTRALAKAAVSEPPPEEAADGTMERNMLKGSQRSREKGSNTLLLRRLTSDIVVDDAMLYLCVRLRVNH

SEQ ID NO: 67525 - protein, 656 aa, Zea mays
  Clone ID: LIB143-047-B5_FLI.pep
SHPVVPSSRSRRRSKGYGTLPSTRRQDRHPPHHRKHRQSPKPANSDAMADVDDDAVLSDVDEDPLPPPSTSSASSHKSLPQAQPQSQSDAQAQQQRLLDLAAELEEERRLRRAAEASLAEAEPRVARFKAFAQEALRKRDDLTAQAAASARSLAALQAEAATASSMLSSGFERISAKASPSSPPAPLPTSQKYSSGLPALAYGVLKRANDIVDELLAQIDAANRDRDRAREQMEHRNYQIAIEVSELEASLASRSAEGESLSKSLSQREAEISELRDKITSLEGKLAAQRPVLAEQIGCTSKLYHEMREVVKLVDAEAVSALSDSVFVWKETDVEESLKVSLEGTKLAYELAAIALEKVGACIDDKESKLRRLENMVDGLIKEKEHISVLLRNALQATTSEVLKVAEDGLREAGIEIGLNERKEHMLGSVEKDEVYTLAGALENTMKESQVKIIELQHLVEALRAESGLLRTRLEGQEKEIGQLRKQIKNLEEKEKVANESVEGLMMDVTAAEEEIKRWKMAAEEEAEAGRSIEQEFQIQISSLRKELDEANRAMVELENKLKFKEETAAAAMAARDAAEKSLKLADTRSSRLRERLEELNKQLEESDTRTESVNRNGHRYMCWPWQWLGLNYVQLPLAETDQTSNEMELSEPLII

SEQ ID NO: 67526 - protein, 182 aa, Zea mays
  Clone ID: LIB143-051-B5_FLI.pep
KIELQQQQVKFGRERDTDRSMAMMKKKGGAATTAVAAVALVLLAAAAVRADVNCADVDASLRPCVGYVTGKEAAPAAECCAGVKRIRAMPSGPAERRQACECVKQAAANYQPLNADAIRDLPAQCGAPLPFPLTLNFDCTTCVYIYILGLGPPWRKASPFAAPRAIFILLDQGTQGPSAPQQ

SEQ ID NO: 67527 - protein, 183 aa, Zea mays
  Clone ID: LIB143-065-F9_FLI.pep
ASARLIPAGSSSSAKRAYRRPDPGPKMTESLVRNKPGMASIKEMPVVQDGPPPGGFAPVRFARRIPTSGPSATAIFLTTFGAFAYGMYQVGQGNKVRRSPVLATWGWNHACRALKEEKIAARSAILPMLQAEEDERFVKEWKKYLEEEARIMKDVPGWKVGESVYNSGKWMPPATGELRPEVW

SEQ ID NO: 67528 - protein, 368 aa, Zea mays
  Clone ID: LIB148-025-D2_FLI.pep
LVPPYPRPATHAVAAVLARPPPLLSKVPSSELAFGEVVRHDLLTAPNQPGRASTVVIQSDEEEEERERGSHKTKMSCCGGAEEDSYGPPANQAVPPPNANAPGNRGGPRGPGAPRVGGPAKPVSIDVPAIPFDELKRITNNFSDRALIGEGSYGRVYNATLSDGRAAVIKKLDTSASQDSDTDFAAQIAMVSKLKNEYFLELLGYCLEDGNRMLTYQFATMGSLHNILHGSPGRGARSRPQLGSASQDSLRGSERAGVPAREGPAVHRPPGHPLQQRPHLRRLQLQDRRFQPHQPGHRHRRAVALHSRARDFRIPRPRIRYDRPDQPKERRLQLRRDSSRVADRKEAGRPHNAERPAESCYLGHSEVE

SEQ ID NO: 67529 - protein, 271 aa, Zea mays
  Clone ID: LIB148-044-D12_FLI.pep
SLPFGERTNQSAACPLANFEYVLLLRLVLLSSPSPLVLSRHTVIRSLSTALGAAQPMDDNEREKENENEKEKHYGTDVEDEEEDEEGNKRVVVLGPQVPLKEQLELDKDDESLRRWKEQLLGQVDTEQLGETAEPEVKVVDLTILSPGRPDLILPIPFQADEKGYAFALKDGSPYSFRFSFIVSNNIVSGLKYTNTVWKTGVKVETQKMMLGTFSPQLEPYVYEGEEETTPAGIFARGSYSAKLKFVDDDGKCFLEMSYYFEIRKEWPGTQ

SEQ ID NO: 67530 - protein, 534 aa, Zea mays
  Clone ID: LIB148-047-E1_FLI.pep
TTPTKQRWLLQKQPFPVSSPVHPPPLSPPWLPLSSAPFFIARSHTFWKERERDRGRDWREAPAQGKRNRGARRGRKGRRRRANKMREIISIHIGQAGIQVGNACWELYCLEHGIEHDGTMPSDSSVGVAHDAFNTFFSETGSGKHVPRAIFVDLEPTVIDEVRTGSYRQLFHPEQLISGKEDAANNFARGHYTVGKEIVDLCLDRVRKLADNCTGLQGFLVFNAVGGGTGSGLGSLLLERLSVDYGKKSKLGFTIYPSPQVSTAVVEPYNSVLSTHSLLEHTDVAVLLDNEAIYDICRRSLDIERPTYTNLNRLISQIISSLTTSLRFDGAINVDVTEFQTNLVPYPRIHFMLSSYAPVISAEKAYHEQLSVPEITNAVFEPSSMMAKCDPRHGKYMACCLMYRGDVVPKDVNAAVATIKTKRTVQFVDWCPTGFKCGINYQPPSVVPGGDLAKVQRAVCMISNNTAVAEVFSRIDHKFDLMYAKRAFVHWYVGEGMEEGEFSEAREDLAALEKDYEEVGAEGADDEGDEGDDY

SEQ ID NO: 67531 - protein, 424 aa, Zea mays
  Clone ID: LIB189-005-E7_FLI.pep
SAMATVAMDISKPTPVASGDEAAAAAKGRSGGGGEGLRQYYLQHIHDLQLQIRQKTHNLNRLEAQRNDLNSRVRMLREELQLLQEPGSYVGEVVKVMGKSKVLVKVHPEGKYVVDIDKSIDITKITPSTRVALRNDSYMLHLILPSKVDPLVNLMKVEKVPDSTYDMIGGLDQQIKEIKEVIELPIKHPELFESLGIAQPKGVLLYGPPGTGKTLLARAVAHHTDCTFIRVSGSELVQKYIGEGSRMVRELFVMAREHAPSIIFMDEIDSIGSARMESGTGNGDSEVQRTMLELLNQLDGFEASNKIKVLMATNRIDILDQALLRPGRIDRKIEFPNPNEDSRFDILKIHSRKMNLMRGIDLKKIAEKMNGASGAELKAVCTEAGMFALRERRVHVTQEDFEMAVAKVMKKDTEKNMSLRKLWK

SEQ ID NO: 67532 - protein, 179 aa, Zea mays
  Clone ID: LIB189-009-B10_FLI.pep
LHHTTHTRRRSHTRRRSSSFDRDRDAGSYKLAKTGIIMAASTVASLSVPVTTTTFAAAGGADVLIVVPRRAGAGRVVWFPAAARRGGGSGRLVAVRSSGPATPPEISDKVSESIKQAEETCADDQKGDAECAAAWDEVEELSATASHARDSLKETNANDPLEKYCKENPDSEECRIYDN

SEQ ID NO: 67533 - protein, 321 aa, Zea mays
  Clone ID: LIB189-029-G7_FLI.pep
TPPESMEIRAPPTSLRLAPPPASASFRRTPLRTSFLRGSVSLKVVQVRQSNVNRFKCNSIRSNLFDRLTRVVRSYANAVLSSFEDPEKILDQAVLEMNDDLTKMRQATAQVLASQKRLENKSKAAEQASADWYRRAQLALQKGDEDLAREALKRRKSYADNASSLRSQLDQQKGVVENLISNTRLLESKISEAKQKKDTLKARAQSAKTATKVSEMLGNVNTSSALSAFEKMEEKVMAMESQAEALGQLATDDLEGKFALLETSSVDDDLSQLKKELSGSSLKGELPPGRTAVSNSGAGRPFPDLEIESELNELRRKAKEY

SEQ ID NO: 67534 - protein, 134 aa, Zea mays
  Clone ID: LIB3059-017-G12_FLI.pep
PVPDYEEAPSLASEAVEGAALALERVDDVHGGHGLAARVLGVGDGVADDVLEKDLEHAAGLLVDEPRDALHATPPSQPPDRRLGDALDVVAEHLPVALRAALAQTLAALAAPRHRRRLSDADQRTGDFSGVGEG

SEQ ID NO: 67535 - protein, 177 aa, Zea mays
  Clone ID: LIB3059-025-D6_FLI.pep
RSLSLSTGDDSATAAALRETPRSSPTTSIRVREEEIATETMAADSGARRQPSFTKVDQLRPGTHGHNLILKVVDSKMVVQRGREGGPQGRQMRIAECLVGDETGIIVFTARNDQVDVIRPGTTVELRNAKIDMFKGSMRLAVDKWGIVKAAESSAEWTVKEDNNLSLIEFELVTVTE

SEQ ID NO: 67536 - protein, 97 aa, Zea mays
  Clone ID: LIB3059-030-G5_FLI.pep
KWWQECRGLIRRITGRDSAGNKEQAQYVQISSNRNIRLFSSLFWMLLITVIDNIQNNELNNLMLSITVIKGRKVDMVASIEQVMHGTRSQSCSGQSP

SEQ ID NO: 67537 - protein, 107 aa, Zea mays
  Clone ID: LIB3059-062-B3_FLI.pep
IIKKMAPCKVAAALLLLITTISVNTVTGSRCNAQEKNQIVSLCQMYIQRGTLVQLPSQTGPCCAAVRELERVHRGMQMKCIADLLNAGDLQKYDPTKIKHLDISCYT

SEQ ID NO: 67538 - protein, 251 aa, Zea mays; identical to SEQ ID NO: 40987
  Clone ID: LIB3059-062-H11_FLI.pep

SEQ ID NO: 67539 - protein, 227 aa, Zea mays
  Clone ID: LIB3060-052-F10_FLI.pep
CTLIYYCANPNQNYSCKIQITSPCKCRAYSGRSRAEGDLVVAVAATCMGLHVGGVVVRVGASRVRAHQPHAGAAGEGHGEVVAVDDRDVVEVLAAADGELGQRQRRLPRQRAGQRAAAVACLAAPAVAVEGAAGAAPHAAGAGASRHVDGPRPARVQLRAPAHRGGRGPHGEPAVVGDGEGGGVGAHASQGGGQEQQEDRGRGGGGHCWCSALFLVESKQYSSYRAR

SEQ ID NO: 67540 - protein, 258 aa, Zea mays; identical to SEQ ID NO: 53230
  Clone ID: LIB3060-058-A3_FLI.pep

SEQ ID NO: 67541 - protein, 277 aa, Zea mays; identical to SEQ ID NO: 43397
  Clone ID: LIB3060-059-A10_FLI.pep

SEQ ID NO: 67542 - protein, 224 aa, Zea mays
  Clone ID: LIB3060-061-H10_FLI.pep
WYGVGACVHQSSPGPLSVVVVFFFFLFPFLHSTARAHAESRIMAAGLKVPEMALRLCVVPLSLASLWEMATNAQADDTYGEVKFSDLSGFSYLVGVNAVTAAYAVASVLASSFKRPLAARYDWVVLVMDQASAYLLVTSASAAAELLQLARHGDRGVSWGEACSYFGRFCGKATVSLALHAAALACFAALSLVSAFRVFSSRCHPPPDADGQPPKHARDEEQRV

SEQ ID NO: 67543 - protein, 229 aa, Zea mays
  Clone ID: LIB3060-063-D9_FLI.pep
SSMILSVSFGPSFCLEQTLGPRIGYLPLLIPVIRAHFSNALPPGVDTVWFEYKGLPLKWYVPIGVLFDLLCADPERPWNLIVHFRGYPSEILSPCEGEDSVKWSYMNSLKEATFIITGNSKSVMNMSHADQVALWESVMKGNLDGYKNISTRLKLGPFEDDVLVRTASVERQRQQNSDEPESPGSSKPCMLFCSGTFILSSMLKVHVLTRVQYGNPYLLSFRRVSVLSK

SEQ ID NO: 67544 - protein, 203 aa, Zea mays
  Clone ID: LIB3060-064-D4_FLI.pep
IRRSYCTTTSLPVILPPPPHLQVTSPCPASAPSSAPGPLGTVTTSWPSTYPATAMAGQVGSGSRDRHLSSSMLSLAASSSAARSAAPACTTTLVTPGWILTVRTRTVAAARAPAAGAATKWKASGPSNTWTSVSAGSGSSSTLLYTCGRRRRSFLPPAVGDAGWILMWSRDRSRRCKSKSEGSSLLDLSLGSFPFVVSLVLSF

SEQ ID NO: 67545 - protein, 449 aa, Zea mays
  Clone ID: LIB3060-066-H9_FLI.pep
HLQVLPVAGQEHPLPPPAYRTVFPPNPRNRIPSSRSASTMGASWITTCSPWSAFATLAALTTSALVLGYVSSSLLGQQAAYEYDDAYSPDAEPSGPAAPPRRGAGYPPVFAYYITGGRGDCLRMTRLLKAAYHPRNRYLLHLDAGAGAYERARLARYVRSEQVFLEYANVHVVGKGDALDGRGPSAVAAVLRGAAVLLRVGAEWDWLVTLSAADYPLVTQDDLLYAFSSVPRDLSFIDHRPDSETHHVVVLDQNLLQSTNAEISIASGHREKPDAFDLFRGSPWPILSRAFTEHCVAAPDNLPRTLLMYFSNSLEAKEFYFQTVMANSPRFRNSTVNHSLRVNVPPPPPPQSAGQQARYDALVGGGAAFAGRFGDDEALLQRIDEEVLRRPLDGITPGEWCAVGGGEDGAGECSVGGDIDAVRQGAAGRKLASLMAGLVGTAPCGGCNS

SEQ ID NO: 67546 - protein, 260 aa, Zea mays
  Clone ID: LIB3060-069-A8_FLI.pep
ALSTAGSGSSSCLPPWVLAGPEVGLHPRDEEDLAVVDVGVNQGQRQRRRSTDHLALVVVLGSVAGADELVLSAVPRHDAAEVSAHGVDPVGGQRLVLLHHQVRGVTLEPLRERAVVGTVRVEPRLHRDVVAQLVLRVGPAAGVPGAGRDEEGAVGDDHADGGQRDGAEEEEVHQLPLLHVGDAVGGDAARRLAHNAPLGALAAHAQAKPLHRLAQRSAGPVELGGIGGGGERRGGRHGCSRRGSVGVRSRDNTAGVHSLA

SEQ ID NO: 67547 - protein, 325 aa, Zea mays
  Clone ID: LIB3060-073-G2_FLI.pep
QARNPPMAHRVLLLLSLASAAAVAAAVDAEDPLIRQVVPGGDDNDLELNAESHFLSFVQRFGKSYKDADEHAYRLSVFKANLRRARRHQLLDPSAEHGVTKFSDLTPAEFRRTYLGLRKSRRALLRELGESAHEAPVLPTDGLPDDFDWRDHGAVGPVKNQGSCGSCWSFSASGALEGAHYLATGKLEVLSEQQFVDCDHECDSSEPDSCDSGCNGGLMTTAFSYLQKAGGLESEKDYPYTGSDGKCKFDKSKIVASVQNFSVVSVDEAQISANLIKHGPLAIGINAAYMQTYIGGVSCPYICGRHLDHGVLLVGYGASGSPPFA

SEQ ID NO: 67548 - protein, 158 aa, Zea mays
  Clone ID: LIB3060-073-G5_FLI.pep
LVVGGDSIGEMGMVASMCTEPIKRHRVERDLDGKVADALRERTRSRQRTFRSVNSITMRLPRFKEGLRDVKNIFDQYDEDSDGTIDSEELQSFGSRVRVHMSEEEMSNLHRYCDIDSRKGVQFQEFVVLLCLAYLLFGPDVTRRVRTYGSVSSSLFLS

SEQ ID NO: 67549 - protein, 233 aa, Zea mays
  Clone ID: LIB3060-077-H6_FLI.pep
KSASGSPHSPPKIILRTKSAAAEMGAECRYEVAQAAYIKLALHALKHPATAVNGLLVGRLVEPSSSPAVVSVIDAVPLSHHPHHLPLLPTLELALTLVEDHFATQGEGLAVVGYYHANPRCDDTELPPVAKRVGDHIFRYFPRSAVLLVDNKKLEEAVKGKFSDAVIQLHTRDSSKSWRQAGSDGSSQLILKEPSTNVVLADHVTTKKWEKIVDFDDHLDDISKDWSNPGLLD

SEQ ID NO: 67550 - protein, 253 aa, Zea mays; identical to SEQ ID NO: 62537
  Clone ID: LIB3060-078-C12_FLI.pep

SEQ ID NO: 67551 - protein, 315 aa, Zea mays
  Clone ID: LIB3060-078-H6_FLI.pep
QQQEIDGLCHRAQVLLPSQEVRMGRHQAGRRAILFEETLYQSAVDGRKIVDILAEQGIVPGIKVDKGLVPLAGSNNESWCQGLDGLASREAAYYQQGARFAKWRTVVSIPNGPSELAVKEAAWGLARYAAISQDNGLVPIVEPEILLDGEHGIERTFEVAQKVWAETFYAMAENNVMFEGILLKPSMVTPGAEAKDRATPEQVAAYTLKLLHRRIPPSVPGIMFLSGGQSEVEATQNLNAMNQGPNPWHVSFSYARALQNTCLKTWGGQPDKVKAAQDALLLRAKANSLAQLGKYTSDGEAAEAKEGMFVKNYSY

SEQ ID NO: 67552 - protein, 287 aa, Zea mays
  Clone ID: LIB3060-081-H7_FLI.pep
HDVYALLWDYHSEMEQRGRGHPNLGCTAQRAKVQPVLIQQYMSVGGETSCSRITSHLRGEELLTAGLVGGEEPVPVGQGRLHHVKGEEPTEPGLHQRQLLVGDDAGAGHLLDDGEPVREPPDDDVEVAHGVAAEELLPLQGRLQGLEALLGLVHRLALRLAGRGEDRVQSSVALVFREPGPEPRLGALVGVARHDGVAALPDLVDVLHDDGGLRDRLAVVDEHGHLLGHRVVAEQVGALVGEVLVDVLVLDALQPQRPLHPDHHGARPHPQHLHALLGHYCWSSGAA

SEQ ID NO: 67553 - protein, 141 aa, Zea mays
  Clone ID: LIB3060-081-H8_FLI.pep
DFHHGTTCSIQIYRRHLLLSDIEKLYVAMLLNSIHHGALHHHGALHHQDSDHHHAHLQSLHLLHSHHRHHIPHHNRHRILHHTRHRIHIRTCSPCHIWACILHHIHHHSPVFHIHLPISHPLIQSFLLVSCSFPHPHYWPQ

SEQ ID NO: 67554 - protein, 183 aa, Zea mays
  Clone ID: LIB3060-088-H6_FLI.pep
ASGMEDERVSGEVREQEDDDDNVPQLSAAAMEALREFLAEQHRPEEQNEAGGGEDGVELVPEDWRLSQFWYDERTARELVEEVVRLVSPSGSGSAAGAVACIACPTLYAYLKKTDPGVPAQLLEYDERFGQYGGDFTFYDYNRPEELPAAMKHAYRVIVADPPYLVLFLPYQRLPIKKCLISS

SEQ ID NO: 67555 - protein, 346 aa, Zea mays
  Clone ID: LIB3060-089-B10_FLI.pep
IKSERGREERPSNAALQLLRLHLRSRRQAPAVRRLVQAPHHGGGLRGDNCADAQCSDGDASRGHNNEPSAVSAPAGAAVAGEGQDPEPGADGRGLWARAGAEPGAPRRGAGVHPRGGVVPPVPRAPVQGPGPRLRHVPVRADRQRPRRPPPRVRLPLRGPGRAGVGAPARGDQVPARAGLQRPRPAPPRAHLPPPPGLPGQPRAGAAGPDPPRLQRGAHPGAEAGVPGRARHVPRRRGRHGAALPGALHLQHRAELPAQVRVPGGRHGRRRRGRQGLPAVLRLQPREADRAAPPRRGGRRRRAAASGHAQGHRRGVQGDARQGAGAARAGSDDGLIDRGASTAVCT

SEQ ID NO: 67556 - protein, 303 aa, Zea mays
  Clone ID: LIB3060-092-E6_FLI.pep
FPYPLPLRLPSWLPFFAMATMSLRCLAMAMADTALPPAHKLLPTVSLPLLSSSTRAAPLLLFARRRLPLAPLVTSSDAVEAKSADEEEEKAGEPVEMEAGEFEEVLASGGEGEGQYAAVEPPEEAKVYVGNLPYDVDSEGLAQIFDQAGVVEVAEVIYNRETGQSRGFGFVTMSTVEEADKAIEMFSRYDISGRLLNVNRASSRGTRMERPQRQFAPAFRAYVGNLPWQVDDSRLVQLFSEHGEVVDAKVVYDRETGRSRGFGFVSMVSKEELNDAISALDGQELDGRPLRVNVAAERPQRGF

SEQ ID NO: 67557 - protein, 248 aa, Zea mays
  Clone ID: LIB3060-093-D8_FLI.pep
PRRGRRHGERLVSRRFVARAAAVHAAPAASAPAPARATPRSPPPCQEHGRRSGGGGTRGGGRGRGRRLARAAAAAGAGGVAAAGVEARGGGRRRGGVPSGRLRRLGGERRGGEGAEPDRRRPGGAQGVRGSGVRLQLPRDPRAVRHAAGPRPLLLHEPALPGRAPPPAAGQGGGGAAARSGLAGAAGRHHQLEDLQPWRQPGRGEGEAQVLGAGGGVHRQALQLADQRRGSGGGGGGGATINQSWHKR

SEQ ID NO: 67558 - protein, 357 aa, Zea mays
  Clone ID: LIB3060-095-C12_FLI.pep
CSHLSTAWSSSALASSASTTRRRSPPRSGLLVRCSLRELRTRIDSVRNTQKITEAMKLVAAAKVRRAQEAVVSSRPFSEALVEVLYNMNQEIQTEDIDLPLTRTRPVKKVALVVLTGERGLCGSFNNNVLKKAETRIDELKQLGLQYTVVSVGKKGNAYFQRRPYIPLERDLEVSSVPTVKDSQAICDLVYSLFVSEEVDKVELLYSKFVSLVRSDPIIQTLLPMSPKGEICDVNVVCVDATEDELFRLTTKEGKLTVEREKVKIETQPFSPVVQFEQDPVQILDALLPLYLNSQILRALQESLASELAARMSAMSSATDNAIELRKNLSIAYNRQRQAKITGEILEIVAGADALAG

SEQ ID NO: 67559 - protein, 404 aa, Zea mays
  Clone ID: LIB3060-097-D7_FLI.pep
PLKSGSPRGHAADTGSEPSWPRRLLGKRARVAPRHAIPLPPTAIQARSPAMSVAVLRVRAMELLARPAAAASSCCARTSLQLPAPGTSRPRRPGFPTLRAAAAAAIAAEPQSNEQQNVIMETEVFACPVCYEPLMRKGPPGINLPAIYRSGFKCSKCNKSFTSKDIFLDLTVTAGTKEYSEQKPARTELFRSPLVSFLYERGWRQNFNRSGFPGLDEEFQMAQDYFQPIAGGILLDVSCGSGLFTRKFAKSGTYSAVIALDFSENMLRQCYEFIKQDDSLLNANLALVRADISRLPFASCSVDAIHAGAAIHCWPSPSNAVAEISRVLRPGGVFVGTTFLSSPRNNPFSVEALRPLRQIVGPVNTSYNYFTEGELEDLCKSCGLVNYSSNVQRSFIMFSGQKPY

SEQ ID NO: 67560 - protein, 162 aa, Zea mays
  Clone ID: LIB3060-102-B3_FLI.pep
ALRSTCSLPTTEPMADQLTDDQIAEFKEAFSLFDKDGDGCITTKELGTVMRSLGQNPTEAELQDMINEVDADGNGTIDFPEFLNLMARKMKDTDSEEELKEAFRVFDKDQNGFISAAELRHVMTNLGEKLTDEEVDEMIREADVDGDGQINYEEFVKVMMAK

SEQ ID NO: 67561 - protein, 265 aa, Zea mays
  Clone ID: LIB3060-104-E4_FLI.pep
GTTSTNRAPSSSRTHGRLGGTGAGEDRPEGGGDLRLAAQGVGQHRPHPRRRGDLQGVDPGAGGGARGHLGAAAAEHRPGGPGPRRVPGGRRGVPRQGARRRLLPVRVARVQLLHLGPAQERAGLGVAPAQLLGRQGRRHPQRVGRVGGQPLAVPRPPGRRLPRPPLRQQARGVHQGAPAAQQVRRRRQPRRPGHQGPGHQGAPGAAGSRAQAAPGEARCCCTLFLNVVVVGGALNYTTHRRRAPNAVPCPCVRASINSRRPTFNE

SEQ ID NO: 67562 - protein, 258 aa, Zea mays; identical to SEQ ID NO: 53230
  Clone ID: LIB3060-107-D7_FLI.pep

SEQ ID NO: 67563 - protein, 266 aa, Zea mays
  Clone ID: LIB3060-109-B3_FLI.pep
HTPAICRRPRRSPAMASPEGTTWVFDCPLMDDLAVAADFAAAPAGGFFWAAPPSLQPQAPVQSVVAASAPNPCMEISSSVDCGQEKEQPTNKRPRSESTTESSTKASREKIRRDKLNERFLELGAILEPGKTPKMDKTAILSDAIRVVGELRSEAKKLKDSNENLQEKIKELKAEKNELRDEKQRLKAEKESLEQQIKFLNARPSLVPHHPVIPASAFPAPQGPAAAARHKLMVPVIGYPGFPMWQFMPPSDVDTSDDPRSCPPVA

SEQ ID NO: 67564 - protein, 252 aa, Zea mays
  Clone ID: LIB3061-054-H4_FLI.pep
KVEYSSKNRATMAAKIFSILMLLALSACVANATIFPQYSQAPIAALLPPYLPSMTALVCENPALQPYRIQQAIATSNLPLSHLFFQQSPALSLVQSLVQTIRAEQLQQLVLPVISQVALANLSPYSQQQQFLPFNQLSILNPAAYLQQQQLLPFSQLATAYSQQQQFLPFNQLAALNPSAYFQQQILLPFGQLATTSPASFLTQQQVLPFYQQFVANPATLLQLQQLLPFVQLALTNPAAFYQQHIIGGALF

SEQ ID NO: 67565 - protein, 192 aa, Zea mays
  Clone ID: LIB3061-063-C11_FLI.pep
AKRQCVERIVEQNSMKMVIVLVVCLALSAASASAMQMPCPCAGLQGLYGAGAGLTTMMGAGGLYPYAEYLRQPQCSPLAAAPYYAGCGQPSAMFQPLRQQCCQQQMRMMDVQSVAQQLQMMMQLERAAAASSSLYEPALMQQQQQLLAAQGLNPMAMMMAQNMPAMGGLYQYQLPSYRTNPCGVSAAIPPYY

SEQ ID NO: 67566 - protein, 150 aa, Zea mays
  Clone ID: LIB3061-068-A3_FLI.pep
RPVLSYLLHSPRLFAMVAISAHLIATLPSLPTLRPCPRRLQPSAFAASEASHRAPAPGVALRGCSRRCSPSVRRFHGFQNAISFGKEHNRQALFASGRGSPSSSDDGSSSPDGPPVLTILAGVTVFLLVLWVVGSVVTWIVGLVFGAAKS

SEQ ID NO: 67567 - protein, 188 aa, Zea mays
  Clone ID: LIB3061-075-G3_FLI.pep
ALWENPIVQPYRIQQAIATGILPLSPLFLQQPSALLQQLPLVHLVAQNIRAQQLQQLVLANLAAYSQQHQFLPFNQLAALNSAAYLQQQLPFSQLVAAYPQQFLPFNQLAALNSAAYLQQQQLLPFSQLADVSPAAFLTQQQLLPFYLHAMPNAGTLLQLQQLLPFNQLALTNSTVFYQQPIIGGALF

SEQ ID NO: 67568 - protein, 231 aa, Zea mays; identical to SEQ ID NO: 43391
  Clone ID: LIB3061-076-C11_FLI.pep

SEQ ID NO: 67569 - protein, 225 aa, Zea mays
  Clone ID: LIB3061-080-F7_FLI.pep
EAVARVAVDARGGSTASRHWGTKPAETERYAREPSIMRYIKIAAMLPNRTIRDVALRCCWATGKERRKKPDGFYTGKKMRDVKPIQDKMVASVPIANFHMTPTTNVIPFSVSTQHPNQQSQVPKEAPVVDSATQRLLEENNQLLNQISANNETFKTVENTDLFLRTSNNIKTILSRMSETPGIMSQMPPLPLSINEDHINSLIQLNRLVASYGTTSISHHTKQEP

SEQ ID NO: 67570 - protein, 118 aa, Zea mays
  Clone ID: LIB3061-085-C12_FLI.pep
TDETTEMKDGTSSGGGAFAAGSDPRQPSTAKPYAPPKLSPQDLPIDYAGFLAVAFGVLGVMLRYKVCSWIAIIFCAQSLANMKNFENDLKQLSMAFMFAVMGLVTNYFGPARPGSTKR

SEQ ID NO: 67571 - protein, 277 aa, Zea mays; identical to SEQ ID NO: 67213
  Clone ID: LIB3061-103-F4_FLI.pep

SEQ ID NO: 67572 - protein, 112 aa, Zea mays
  Clone ID: LIB3062-022-G12_FLI.pep
VYHSLAPDSSVNNAFPVQHFSPRHTQAMPDFARVYNFLGSIFDPETNGHLQKLKEMDPIDAETVLLLMKNLSINLTSPNFEEHRRLLSSDASSMDQKSGSSRVHLPFMITSK

SEQ ID NO: 67573 - protein, 477 aa, Zea mays
  Clone ID: LIB3062-037-C6_FLI.pep
SLHPPRPPSRVAMATAAAAAAAACPLLLLAALLLAVSATTSALTDDVLALVVFKMDISDPSGRLATWTEDDDRPCSWPAVGCDARTGRVTSLSLPAASLSGRLPHALLRLDALLSLALPRNNLSGPVPPNLLTALPRLRALDLSSNRLAAPVPAQLFAQCRAVRAISLAHNQLSGYIPPAVASCASLVSLNLSSNRLAGPIPDGLWSLPSLRSLDLSGNELSGSVPGGFPRTSSLREVDLSRNLLAGEIPADVGEAALLKSLGLGHNLFTGSLPDSLRRLAGLQFLGAGGNALAGELPAWIGEIRALERLDLSGNRFAGNIPYTIANCKNLVEVDLSCNALTGDLPWWVFGLPLQRVSVAGNQLNGWVKVPDDAAMTLRVLDLSCNAFSGEIPLRITAFAGLQSLNLSSNSFSGQLPAGIGGLRLLEVLDVSANRLEGTVPPEIGGAVALRDLRMGRNSLTGRIPAQIGNCSSLVAL

SEQ ID NO: 67574 - protein, 178 aa, Zea mays
  Clone ID: LIB3062-054-B9_FLI.pep
GYAELCLRSIHLHCILFSHAHVWFFLTLNASSILILQFGQVGVGNNDDHSSPGQVSFPEDQKISQVACGWRHTLALSEKKNVFSWGRGTSGQLGNGEIVDRNTPVLIDALSSDGSACKKLESSTAAPFAAKVWVSPSERYAIVPDENVRKAGGGTARGNGADANVPENDVKRMRVQSS

SEQ ID NO: 67575 - protein, 508 aa, Zea mays
  Clone ID: LIB3062-054-F3_FLI.pep
IHPSAMLHGAQQASASSTAGPRPKSTAILQSDQPPRAAAAREGGRGGTGPESLVRGSVVAPCVSCGICGGLLRDATAFTECLHAFCRKCIYDKVAKDNIKCCPKCGIFMGNPLEKLRPDHSLEHIRPLIFPAKRRKVVTMKKRKERVSSESTLPSVVGTTAEESTALIPAASESKAQKDLTPVGRDALSRIRGRDFDSACGLTEDTGALIVWQAPPILEETAAHNQLDSKQDPDSFRPPATSDIEYQRQGPTAQMTNISFMVGNSSHARPTDQDDENMRGDILTLINESNARIMEMYDAHISKLKAGNIKLIEQLENERAAALERTRILEERLQQELENERTVAAERTRLLEKKLQRELEHEREAAIERTRVLDERLQRESEIARTAASRNEALKEEIFKLQEELEHGRAYNQALMSDILEKSEELATLTYYSNLLESEKTYLENQVDHLNEELKCTRKEHAAYVRKVLDAARAIPNDLEPINSATPMLCRDRGARRGSVSQPQAGHG

SEQ ID NO: 67576 - protein, 241 aa, Zea mays
  Clone ID: LIB3066-023-E11_FLI.pep
RHNTIKQIDFCITINYYMANSAYMLAISETVFSSSHQHRYPVSILQAMHTCESNIDFVLQIHPAKMKTTGKRKQKKNLFIPKIAEQQSWRVLYNICAWCSADSSYYNLRGAFVRTALGEARSVAVAAAAAVAVTITMVMAFPVLLLFLLLLIFLLLMVFVLVVAGLVAVLAGDLVLDLLHDALLVLPVVLLVVLLALLVVLLALLVLVLLLVVAPDVERLLDLVDDARHACGYFSLLREGK

SEQ ID NO: 67577 - protein, 324 aa, Zea mays
  Clone ID: LIB3067-044-H6_FLI.pep
TTSAGGRPPAPMSPFYLARGASKLVRRITSETSVELKILSEKWRLLLAGVIFQYIHGLAAHGVHYLHRPGPTLQDLGFMILPELGKERGYISETLFTFIFLAFVLWTFHPFILQTKRFYTVLIWRRVLAFLCVSQFLRIITFYATQLPGPNYHCREGSHLARLPPPQNAAEVFLINFPRGVIYGCGDLIFSSHMIFTLVFVITYQKYGSMRFCKMLAWCVAIVQSLLIVSSRKHYSVDVVVAWYTVNLVVFFVDKKLTELPDRSVGSTSILPLSAKDKDTKLKEENTRLLNGNSMDSADRRPRTQMNGKQIDNESQVDSETVKA

SEQ ID NO: 67578 - protein, 267 aa, Zea mays
  Clone ID: LIB3075-018-G1_FLI.pep
GGVIVNRHINQLDRSRATASRPSVMADVLVGSERRVLISGYGYGLPPQPPPPPPPAESQLLGRLDQIDLRLRQLEEQQQRRPSHADPAPAPARRAPAAQHQHTKSLPAALQHVQVRSDLMDRLNLLESRIRQLSSELDLDVGGKAAGHAAHQLVLGTSSSVPPVEDPATWSDLAPVAVVDPAPAAAFGGGGGGNESKSKPAAAAAGGSWSAVEILQRGARQLHRSTSSKPNALTKVKKLQETKCACQKEKRKAERSKTSRRWFMVGC

SEQ ID NO: 67579 - protein, 109 aa, Zea mays
  Clone ID: LIB3075-056-C4_FLI.pep
TPQHGGIACELRSTWCKQAHRARRRTHPSASLYQGTRSISSFSASTRHQERRRWRQMTLLRSQLGFQVAIRRSSFSAAVLKGATIILPGGKNLPTFVEPWGRGAGAGRL

SEQ ID NO: 67580 - protein, 194 aa, Zea mays
  Clone ID: LIB3076-055-G11_FLI.pep
DGTRGWLLAGGEGVNGEGLGDAGEALEVDLAGGGRVVVDGHLVDGRPEHELLGLDPLEPPDAPGPDVSGDLDVVAHLLADLAEPVLHLLALREPEVAGGPHEPHLRHVLQRQQPRREPELLQQRRRRLHPLVVALGHHRALLLGRHAYLRPAWLLRSIDRRRLFFAVGCAYTLGVAMACIYGGRARAGQRQTSP

SEQ ID NO: 67581 - protein, 224 aa, Zea mays; identical to SEQ ID NO: 37673
  Clone ID: LIB3076-059-D4_FLI.pep

SEQ ID NO: 67582 - protein, 303 aa, Zea mays
  Clone ID: LIB3079-008-G2_FLI.pep
LNPHAAAATSSAGGMDSLRGVKLPGVPKGGSALVKVALLGGAGLYAVLNSFYNVEGGHRAIVFNRLEGIKDKVYPEGTHLMIPWIERPIIYDVRARPNLVESTSGSRDLQMVRIGLRVLTRPMPDQLPKIYRNLGENFNERVLPSIIHETLKAVVAQYNASQLITQREAVSREIRKILTERANNFNIALDDVSITSLSFGKEFTHAIEAKQVAAQEAERAKFIVEKAEQDKRSAVIRAQGEAKSAELIGQAIANNPAFLALRQIEAAREISHTMAASSNKVFLDSRDLLLGLQQLNVGGKQKK

SEQ ID NO: 67583 - protein, 70 aa, Zea mays
  Clone ID: LIB3117-025-B2_FLI.pep
CINRPLPPHISLNIDFILYNPKKVDRLQQLKSKDYVKRFPLAISSVCWNLVASALEAMLKWPLTLLSNIH

SEQ ID NO: 67584 - protein, 263 aa, Zea mays
  Clone ID: LIB3117-038-H6_FLI.pep
QAPPEKTARRGADGRSRGRTRESRVRRCSSQLRVPARNLPKSGPAMRAEVTQISALTAVAAHVLCSAGLAAAHALAGRGALVSDPALALRLLMVCEAPIVIAVFSYLRRDAKSCSFFRAVARGLIGLPVGAFLNAFGAIILGAPVGVKYWIATIYWSLVMSLFTFVPAACVFGASRIDWQDVLSHSIYFTPTDVENYMISAPCHGAVLGAWLGAWPMPLDWERPWQEWPICVTYGAVAGYLIGMAVSLVLTALHKRRVRAKAD

SEQ ID NO: 67585 - protein, 98 aa, Zea mays
  Clone ID: LIB3150-023-A6_FLI.pep
NDYSVVYSEILNFVGVDISMNTHLKTVKLTLKGKNPVTLDHLSVRGNNIRYYILPDSLNLETLLVEETPRVKPKKPTSGKPLGRGRGRGRGRGRGRGR

SEQ ID NO: 67586 - protein, 253 aa, Zea mays
  Clone ID: LIB3151-027-D8_FLI.pep
FKLLDFHFVNTVQHYATMPLYVREGSCQSYHGRNPAWAGGDLRYRLSRNGRMAVRASEPSLGDEPVHGLRQVDAVPGLVPRRVPARGGALHAAPRVELEVVLAATSAAARRDGASCEAEARRAAHQPVDVGVVVGVHDPRRGIPCLEGGEPALEQGVLVDGQLVERPQAPVPVVVGRVVAREKREVDGEAPHGQRSRDDDVHCAQLDELLDAAGDGVDDLGRVVPCLIHGEPEEEHGIVVVPSEGAEDEQGSG

SEQ ID NO: 67587 - protein, 125 aa, Zea mays
  Clone ID: LIB3152-042-A8_FLI.pep
TISFIYSRAQKNPIDTMRVLLVALALLALAASATSTHTSGGCGCQPPPPVHLPPPVHLPPPVPGDLRLGPPVHPAAAAAKRPGRGAVGGADSAATDGDVRPAAADSMPLRCCRRCPPLKKLCAVV

SEQ ID NO: 67588 - protein, 280 aa, Zea mays
  Clone ID: LIB3153-006-C4_FLI.pep
LAELTTAIIYIERPGSFVAEPMSTSGARSWSPPPRPSRYESQKRRDWQTFTRYLGAHRPPLELCRCSGAHVLEFLRYLDRFGKTRVHAPSCAAYGGGGGGRPVEPAVACQCPLRQAWGSLDALVGRLRAAFEERHGARGIWTSSQQPDGGVGVGVGVGGGDGANPFAARAVRLYLRDVRDAQSRARGISYSRKKKKRSKQLVDGAAAAGCARPPVTSVTLMPAAALPHAPPPPCPPPPLPPPYCLTGVPFEFCDYGSVLGGVTANGAPGFYLPSLFNTFG

SEQ ID NO: 67589 - protein, 338 aa, Zea mays
  Clone ID: LIB3153-011-G8_FLI.pep
LQAAIIHRISGLLQKSAQNLPPKHKKEIKPHKLGKLESTHRSTHFSTAIQLLRRRRLGVPTLHAYPVHATLLVFQRLAPRADGDCAIHRHLHFWGGEAEHEDLRADVAGDAELDAVVDRGVADEVLRVGLEHVEAVDNDAGLEQAGAVRGLLEPGHRRHPERHPVVHDVELGGAVPDAHLVGVLGGEEQRDVEGDVGGARGRGGQAGRGRRRGHEEVLHGHLVEVELRLAGLHHEHDDERDGQGEERQEGEQQEEAAAAAAEGGGPPAVPVVRAALRVPGPRAAVAVALAVGSGRHGAGRHLPEMDGRPGEGWLWIFGAYWGICEVRCGGGSAGGGRG

SEQ ID NO: 67590 - protein, 306 aa, Zea mays
  Clone ID: LIB3180-038-C12_FLI.pep
PPFPCRVPRSNHREGFFQSRSFRSSSSMAEQPQEGGASPKHESLMEKLADKLHVGGGKGDSSSSDSDRDEPPHPSVPPTDEVKQPSFSDSAATAAAEAKAKVFRLFGREQPIHKALGGGKPADVFLWRNRNISAGVLGGATAIWILFELLGYHLLTFVCHGLIFSLGVLFLWSNASSFIHKSPPKTPEVVIPEDLVVNIAVSTRYEINRAFANLRQIALGRDIKKFLMVIAGLWLLSVLGSCCNLLTLVYIVFVVLHTVPVLYEKYEDQIDTYGEKGWVEIKKQYAVFDEKVLSKVPRGPAKDKKH

SEQ ID NO: 67591 - protein, 350 aa, Zea mays
  Clone ID: LIB3180-045-B9_FLI.pep
VVRPTEQTRCSLSFLHKNKPSLVDLLHLALASVILQRGHVGVSLRSLLVLVDAQAQLEHAVDAAAKGVGIVEAKARSEQRRLEQQHDKVLNGLVVLVSLGTLAELLHDGVLGVDLHRLLGGHVPRHAGVPQRLGFHDPLHVGGPTVLAGHQAAGGVHHAVGDHHLLHLVAQHLLDDLAEALKLLLELLLALLLILTLVQLQALLGGRDELLALKLLQLSNRILVNGIHHEQHLIAPLLQLLKERGVLHSLLALTSDVEDVVLALLHPGHIILEAGQLIPALGRVVPQELSNLGPVRGVLVDAKLEVLGEGVDDEREQLVDLRLEGERLRLRGHGETTFPNARRARAVGGG

SEQ ID NO: 67592 - protein, 296 aa, Zea mays
  Clone ID: 700333671_FLI.pep
HQSVPFPTSPSSSLYSGYTCDHCSPVAAMTPASTSPLAAAVLPTNLSSFSRCPPRRLPRISCLAAPERGGNNASNASPAPQQPRWGAAVSAALAAAVIAASMPAYADLNKFEAEQRGEFGIGSAAQFGSADLKKAVHVNENFRRANFTSADMRESDFSGSTFNGAYLEKAVAYKANFTGADLSDTLMDRMVLNEANLTNAVLVRSVLTRSDLGGAIIEGADFSDAVIDLSQKQALCKYASGTNPMTGVSTRKSLGCGNSRRNAYGSPSSPLLSAPPQKILDRDGFCDPATGMCDAS

SEQ ID NO: 67593 - protein, 388 aa, Zea mays
  Clone ID: LIB3206-119-E3_FLI.pep
KPNCKRTAQNPINHLPSLWLARLADAQQQASPVFVLPKSQSSLRVPHPKTRSSEAGTGIAAMPRPPTMVIQDDYIDMDLTPAATPEPSPASPRFEFQSAGAGAAGDRHREAAFASPADELFYKGNLLPLHLPPRLQLVQRLLQDQEQPPPLRGAKRDAESDATAAAAAERGDADAAAAASKVCAAKKPSWAKKLKVVKRWASKEYIRSLFLARPPLPSDIVAAAGGASASGHGIGSVSARGSVLEQEEVCQCQHRKSFSGIIRRVRLVATKAPGTSPLCSSSSSSSSSSTPSCRNANGFFFRTPASAAGATPALKRSSSAGSSEEGAIQGAIAHCKRSQLLQPGMVASAAARRSVSDVMFYSVTNTPRASSVTAGEVAQERRQEMCRG

SEQ ID NO: 67594 - protein, 294 aa, Zea mays
  Clone ID: LIB3206-119-G9_FLI.pep
SWLVLVQRRTRARAIHIYMEYAHAWWSCIISLVPGDDMHASSLLFYSAEASHVCLHVEPGGNLHPQRRVALGEEVYPDGPELLADLWVSERVGESPHESVLSVGVPGAVPLPWLLEVVGLAYGCLLPPPRDRPGRQWRGRRRLPQRRVPGRVVVHLLVPVHEVHGAVVVVVVVRAARRVDGQHQVVGTQPVALRVGVGEHPALQHLVVRVVDPWHHQPRAERQLLVLVEEVVHVPVQHQPPHGAERQQVLRPRLGVVQRLVVVPHRSARVRRRHRRVVAAGRTELGRIHCDSAS

SEQ ID NO: 67595 - protein, 380 aa, Zea mays
  Clone ID: LIB3236-150-E9_FLI.pep
TTDPKIQSLKMNSFQSYNTDYFYAHGAQTQNFCAEDLLNFDSTVFLDDSESESISTLQSGSKKITKTSPAVQAKQASYKKSKRARNPWTPKEDAKLMELMKKYGQSWAMISSQLEGRTGKQVRDRYLNKLRPNIKLGDWSVQEDELVVKLLKEVGNRWSLIANHLPGRTEGQVKNRFYSFIKKRLQPDGTLCQISDSRTSSEEYTSFSNSPQPETGFDFGYEFDVNAANGSAINFAPQTFNCAITKGAYVTEEEIYSEGSTTQGPTSQVGNSPFRGEVDPTDVISYDLPEAFFYKQPSQHRHFNLAPIEHDSQVDAILTNVTNYFAENNKFYMPSEVDSFFTQAETQGQAPQDDRLNQLSMRKAYLELALAKTLNEMKSL

SEQ ID NO: 67596 - protein, 456 aa, Zea mays
  Clone ID: LIB3239-037-B9_FLI.pep
IFMDPWSESEGKRAHDPIFKCFSQNQGHHHFMERSTDAAVALSERCRCIWVSGPIIVGAGPSGLAAAACLKEKGISSLILERSRCLASLWQLKTYDRLSLHLPRQFCELPLMPFPADYPIYPSKQQFVAYLESYAASFGICPTYNRTVVCAEYDEQLLLWRVRTQTSDTTGEEVEYVSRWLIVATGENAEAVQPDIGGLQEFPGTIMHTSAYKSGSAFTGKRVLVVGCGNSGMEVCLDLCNHSAEPHIVVRDAVHILPREMLGHSTFGLSMWLLKWLPVHVVDRVLLCIARAMLGDTARLGLKRPASGPLQLKSLSGKTPVLDVGTFAKIKSGDIKVRPAVRQVSGRAVEFADGELEEFDAIVLATGYKSNVPFWLKDRVLFSEKDGLPRKAFPNGWKGEKGLYSVGFTRRGLMGTSVDARRVAHDVEQQWRKAKGTHRDGVPLPLVAVVYHGDGL

SEQ ID NO: 67597 - protein, 312 aa, Zea mays
  Clone ID: LIB3239-037-D8_FLI.pep
LCTPLEERERFFLLSGYLTSSPWSSQVDAFTAEPFKGNPAAVCLLEDAAKAADERWMQSVAAEFNISETAFLLREKSSAAGAVPLFQLRWFTPVAEVELCGHATLASAHFLFTSVLAEHEKLVEFSTKSGILTAKKVPAPQSTGVSGEGKLFIELDFPTIDLVDCHPSELPAIPDTLNGASIVSVHKSTTAGDLIVELSSGKEVADIIPNIHEIEKCSGRGIIVTGPAPAGSGYDFFTRFFCPKFGIDEDPVCGSAHCVLAPYWGGKLGKHKLIAFQASPRSGILYLELEATGRRVRIQGEAVSVMTGTLLA

SEQ ID NO: 67598 - protein, 278 aa, Zea mays
  Clone ID: LIB3245-068-D8_FLI.pep
QTHSKLQASIISTSVMTKKLISISTMAGKQGCKEQSNDRRIQASIQGDAKSVVVGFGGRLVTREQEQEDAIIVAALRHVVSGYSTPPPEVVVTVAGGEACGTCGIDGCLGCDFFGAPELAQEAVSCGTGQVATTASVGGGAAAAALRPRRRRNRNMYRGVRQRPWGKWAAEIRDPRRAARVWLGTFDTAEEAARAYDCAAVEFRGPRAKLNFPGHEALFQGHGDTAAAADTETLTPSPGEWQLGGGAGDELWEGLQDLMKQDEVDRWLAPVFGAASSF

SEQ ID NO: 67599 - protein, 300 aa, Zea mays
  Clone ID: LIB3245-068-H12_FLI.pep
EVKPNLKFRKQVSTNNTKAIPLHALQLHTSNHKLKPHCIINCTTQKQQHHILSSSAAFPDGEGGQDDEKQEDEHGEEGCHDGAAGALAEAVELHADGHPVSALVPRVRQVHDRRRRRRRGRQQRRYDQVADEQEVAQADGLGAEDDDGGEGEGQHQVPRRDRVGHHEEQERREVVESGVELEELGEDGERLVGGARGDGGGEGGPEGRHPQHQVKERHAPAAAVGAPEERDPRLPRRRRRSGGCCCSERRRRRRDRVHGRGLAVLAGHVVDGDHGRGGIAGAHGWLLRSWRCRDLREELA

SEQ ID NO: 67600 - protein, 287 aa, Zea mays
  Clone ID: LIB3245-069-F10_FLI.pep
SLDSDEPSMACHICPLFNLRLLLLLGAVLGNGGLGRGGGAEASDRADPDPYSILMWHDYSPPSPPLPPPDPPSPTATCEGDLHGKGDFHTRCEVSEEVELDGDVYITGNGSLVLLSGASLTCEKYGCVISANFSGEVRLSRGVRVTAGRVSLVATNITVADTVVVNTTALAGDPPDRTSGVPTGTHGDGGGHGGRGASCFVKEGQTQEDSWGGDAYAWSDLEHPWSYGSKGGSTSVEKDYGGDGGGIVWLFAEDLVMNGTVLANGGDSNEKGGGGSGGSIFIRAASM

SEQ ID NO: 67601 - protein, 301 aa, Zea mays
  Clone ID: LIB3245-092-G9_FLI.pep
SLEATTMHGRQRKAHLDLKLKSAGIGADAQLRACLDIVHHQVAVCLARHRPQPDGAELDADGHAGPHGERHEPGRPLLQQLRRDGAVEPRLPRERDARVHGGAVALVQRREGAAAQHGAVEGRRHVAAVVVDPDAAVRVVGRHVHVERVGHRGRRAVHVEAGHRQAVHVERRDLGPEHQVQDPRGGAQRNGEQNEGEDGVAHAPAAAAALAPRRRGRGRGRRRRGRGCHRQLVVAGFLAAPRRLLRRRGRRRRRARAHWVDPVVVCHARIVRVHALLSNPRRARSCTKNARTQAAAARLDR

SEQ ID NO: 67602 - protein, 171 aa, Zea mays
  Clone ID: LIB3245-168-F5_FLI.pep
HNAQGILIRFQKRERHIISFIFRHSGGYLLRLHGHRRRCLHALLLIGGGGRAMRVRLCTGCRPVVSPVDAVQQQLKDAHRDADEVWRRDEEVPAEQPVRHPERAGQEGEEREGERHELHALRRDDSLSGHHWRGVHGHGSHQPDAAHERLARAVRVRREARQGRRQAEQRQ

SEQ ID NO: 67603 - protein, 183 aa, Zea mays
  Clone ID: LIB3245-296-C3_FLI.pep
LIKSYSMKYASFLMVINIYARFMEYKLLVRWIGRELAHMSTCLVKCRGLASGDGVRWSVRRPRRRWRWWHGRRRRGRWWRWRGRLGCGRLRCGRGRGRGWRGRGRLGRGRFRRGWLGRRRLGRRWRGRGRRRREPAADHTDDAPLVAADDAERQVGALLSHTPERAAEHLRETAQQALDDAIQ

SEQ ID NO: 67604 - protein, 101 aa, Zea mays
  Clone ID: LIB3245-313-B11_FLI.pep
SPSSQKSVKMTKRTKKVGVTGKYGTRYGASLRKQVKKMEITQHAKYTCTFCGKVTVRRKSTGIWNCRSCKRTIAGGAYTVATPAAAAMRSTLRRLREIAEV

SEQ ID NO: 67605 - protein, 452 aa, Zea mays
  Clone ID: LIB3245-342-A9_FLI.pep
AGRVHLRACLEGAYHVMEEPTMYASDTRPAARQLWRPPIGVLEVGVLGAQGLTPMKTVDGRGMTDAYCVAKYGQKWVRTRTVVDSCSPRWNEQYTWEVYDPCTVLTLAVFDNCHLGSASAGNGALRDQRIGKVRIRLSTLEMDKARTSAHPLVVLHPSGLRKNGELCLAVRLTCLTLGSVVRMYGQPLLPKAHYVQPLTVVQLDSLRRQAMSIVAARLSRAEPPLRREVVEYMLDADSLVWSIRRSKANFFRVTALLSGAASTVRWLADVCRWKNPATTVLVHVLFVTLMCFPELILPTMFLYMSTAGLWNYRRRPRRPPSMDARLSCAEATHPDELDEELDTFPTSRPNAVVRLRYDRLRSVAGRIQTVVGDVATQGERIRSLLTWRDPRATALFTVFCLVAAAVLYVTPVRVVSLVVGLYVLRHPRFRGRMPSAAGNFFKRLPSQADTML

SEQ ID NO: 67606 - protein, 404 aa, Zea mays
  Clone ID: LIB3245-463-E8_FLI.pep
REMQQQGRFTDATTEDGIAGTDEEPVVPNNVTLMTLLPGCAMLAAPAKGKEIHGYAMRHALDSDIAVGSALVDMYAKCGCLALSRAVFDRLPKRNVITWNVLIMAYGMHGLGDEAIALFDRMVMSNEAKPNEVTFIAALAACSHSGMVDRGMELFHSMKRNHGVQPTPDLHACAVDILGRAGRLDEAYSIITSMEPGEQQVSAWSSFLGACRLHRNVPLGEIAAERLFQLEPDEASHYVLLCNIYSAAGLWEKSSEVRNRMRQRGVSKEPGCSWIELDGVIHRFMAGESAHPESTLVHAHMDALWERMRNQGYTPDTSSVLHDIEESEKAAILRYHSEKLAIAFGLLRTPPGATIRVAKNLRVCNDCHEAAKFISRMVGREIVLRDVRRFHHFVDGACSCGDYW

SEQ ID NO: 67607 - protein, 283 aa, Zea mays
  Clone ID: LIB3245-464-A3_FLI.pep
HSTRSQPQTLPPSRRATAMAAATEKTAEDIRRELQELQRQHREITERLRDPRGLRRGAPGPGPGPPRPLRGFVRPHVGAEVADQAPQKRRLLSAVVKVDGAENNEEGTKDANGEGQEAGSGATEGSDRRTFNTGGFRRDGSLWMQRRVDYNSLPEPAPRELPRNEDPSLVRRNKRMLGQLLVGTLEKFQQEDKKLSNSEAFLRRSETQRKAEQKVREESERLRQQEREQIAEKRKRDMTLRARVAAKAEEKRLELLYIQWTEHHKRLSNFLRLFLFLVQKCPY

SEQ ID NO: 67608 - protein, 295 aa, Zea mays
  Clone ID: LIB3245-496-D10_FLI.pep
SVGLQTLAAMASAAAGTPKRCYYEVLGLSRDCSPTDIKLAFRRLALSLHPDKQPPGSDLAAATAAFQELYCVACNKKFKSDKQWKNHEQSKKHRDKVSELRMAFREEESLKEAEEGEGDWNEVDVGFDFKPTQESDDESAFSDAAEELAEEFEEGLEVHDKENGDKDFDSAEQEVGSYDEASVLEAMLSSCKNRKGGYVAPPEEALSGTAEDDDHHRSSEVNNAKRKGRRRRAAKKEQDESNYAGNEHHGKCEVQPEGSVHGNDVDDIMEGPSSSNVNNGSVSKGDKQNGENTNP

SEQ ID NO: 67609 - protein, 433 aa, Zea mays
  Clone ID: LIB3279-011-A10_FLI.pep
HPSRRSGLRALGQREKLHSLHMLQLLRAMMALTERQPQLEKKPTRGRAPLSGKAVAALCVTSFVVGLLLSGNVSLMSASASPSSSSTDSEKSIRVSGCDNERKLGENHPKDLLNEVSRTHQAIQSLDKAVSTLEMEMAVERARGGGGGGGAASMASSRTPQKAFVVVGINTAFTSKKRRDSLRDTWVPRGDKLRKLEREKGIVVRFVIGHSGTPGGGALDRALDAEEAETRDFMRLDHAEGYHELSSKTRTYFTTAVATWDADFYVKVDDDIHLNLGMLASRLAKHRTRPRVYVGCMKSGPVLSQKGVKYHEPEYWKFGDEGNKYFRHATGQIYAISKDLAAYISINQPILHRFANEDVSLGAWLIGLEVEHVDDRSMCCATPPDCEWKKRAGNVCVASFDWSCSGVCKSVDRMRHIHKACGEGEGAVWNAAT

SEQ ID NO: 67610 - protein, 302 aa, Zea mays
  Clone ID: LIB3279-013-C11_FLI.pep
PNKLLLLYIGEYMSAPIILSHAGKLTDVDGRDDVRAAVERQPGDDDVDGRRGVVCVPEHVALPVVARRHEGQAGDLPGVPADAAAPAVDDGEAERGRVGEDGPEHREVVEVREAGAGKAGGSVAVEAVDQRPHVGVEGEHEVVHRARAPPREALRAHARDAAHGPHAGHHEPPAPGAVQPGQLRGQLPREQVRELLRVVPPPRVVVGHQVVVEVVVAAHPHEQDGARHQVRRRRRAHRAGDPCHGRLEVLDLLVEWDPPDLHWIWRDAFLSVSQSVSHVSEHAWLLTKLPPLSSRIPAAAEA

SEQ ID NO: 67611 - protein, 262 aa, Zea mays
  Clone ID: LIB3279-023-E7_FLI.pep
RALHRPSLLATAAALLLLILPPSAAAAVPAPALFIFGDSLVDAGNNDYLVTLSKANGPPYGIDFESSGGNGKPTGRFTNGMTIADIMGESLGQKSLAPPFLAPNSSAAITSSGINYGSGSSGIFDDTGSFYIGRIPLGQQVSYFANTRSQMLETMDEEAVADFFSKALFVIVAGSNDILEFLSPSVPFLGREKPDDPSHFQDALVSNLTFYLKELSELGARKFVVSDVGLSAVYPTSVLWSSCPRGSARRRRIESPKATTGS

SEQ ID NO: 67612 - protein, 186 aa, Zea mays
  Clone ID: LIB3279-037-F9_FLI.pep
PQDFMFLSRCLRWRLGPLAADPPCQLNVLWHDGHTLSMDGAQVGVLKQANKVCLSSLLEGKHRMALETQISFEVLCNFPDEPLEGQLPDQQLSALLILADLTEGNSSRAVAVRLLHSTSGGGRLTGSLGGKLLPGSLPSRGLASSLLGTSHLSRFFGLSARFESGGRRARNGRPEKYSRLAAGSYL

SEQ ID NO: 67613 - protein, 150 aa, Zea mays
  Clone ID: LIB3279-041-H1_FLI.pep
NRLCQLGGVGMDEATKKVEATVLEIPRGSDMESVTENKEEAKAAEEGDAGRESKDKERKEDEEEDEGKGGGKREYDDQGDLILCRLSSKRRVTLSEFKGRSLVSIREFYVKDGKEMPSAKGISMTMEQWEAFCNAVPAIEAAIKKLEDSD

SEQ ID NO: 67614 - protein, 291 aa, Zea mays
  Clone ID: LIB3279-046-F12_FLI.pep
SAGPEARWQGTGAGQEEDGMYCAFPRSCSRCGRRHDGNVWSDCVGFGWVQDKVTNPLFEKRPKQFGIGGALPPKKDLHRFVKWPKVVRIQRQRRILKQRLKVPPALNQFTRTLDKNLATNLFKMLLKYRPEDKAAKKERLLKRAQAENEGKTVESKKPIVVKYGLNHVTYLIEQNKAQLVVIAHDVDPIELVVWLPALCRKMEVPYCIVKGKARLGSIVHKKTASVLCLTTVKNEDKLEFSKILEAIKANFNDKFDEVRKKWGGGIMGSKSQAKTKAREKLLAKEAAQRMT

SEQ ID NO: 67615 - protein, 281 aa, Zea mays
  Clone ID: LIB3279-048-A2_FLI.pep
PLPSFLLILLMALSSAGSFVACSLRPSGASIHAPRSTPHLKPGAAAASFTRTPQRRANATKGGVSTVCEPLGPDRPIWFPGSSPPPWLDGSLPGDFGFDPLGLGSEPELLRWFAQAELMHGRWAMLAAAGILVPDLLARWGFIDAGFSWFDAGSREYFADPWTLFVSQMALMGWAEGRRWADYLRPGCVDIEPRFPNRKNPVPDVGYPGGLWFDWANWGRGSPEPVMVLRTKEIKNGRLAMLAFVGFWFQAVYTGQGPIDNLLAHLADPGHCNIFSAFTSH

SEQ ID NO: 67616 - protein, 370 aa, Zea mays
  Clone ID: LIB3279-174-H2_FLI.pep
LFVSAPEHRAIGMAHSTTLALVIVVVLALTFGATVSVSAPVNKSCVSGSAGASVSIGYGGARASAGAGVSLGADAYRSTCPRAEEIIRAAVERAVAADPRMAASLLRLHFHDCFVNPFFIGEKTAVPNANSIRGFEVIDAIKTELERECPDTVSCADLLAIAARDSVVVSGGPSWEIEVGRKDSRTASLQGANTNLPAPTSGVDTLVQKFRNVGLSTKDMVALSGAHTIGKARCTSFSARLAGAGGVSEGGAGAFKDLTFLQSLQQLCTGSAGSALAHLDLATPATFDNQYYINLLSGDGLLPSDQALASSAAVPGVEADVASLVATYAFDASVFFQDFAESMLRMGRLAPGVGTSGEVRRNCRVVNSSE

SEQ ID NO: 67617 - protein, 401 aa, Zea mays
  Clone ID: LIB3279-176-A1_FLI.pep
RRSTAVAKKVSRPNKGRQATMAVSGEKPPPPPPPATASGGTARKLILALLTCLSSALLYRQIQPLPPKIPGTPGGPPVTATRTRLSDGRYLAYLETGVPREKAKHRLVFVHGFDSCRHDALPISTELAQELGVYMLSFDRPGYAESDPHPARTEESIALDIAELADNLQLGRKFYLAGFSMGGEIMWSCLKYIPHRLSGVAILGPVGNYWWPGLPSNVSRDAWYQQLPRDQWAVWVAHHLPWLTYWWNTQKLFPASSVIAYNPALLSQEDEMLMAKFGYRAYMPQIRQQGEHECLHRDMMVGFGKWSWSPLQLENPFADADADDGQGAGKVHLWHGAEDLIVPVSLSRYISQKLPWVVYHELPKSGHLFPIAEGMADIIVKSLLLGDDHLSSSASQPPHSP

SEQ ID NO: 67618 - protein, 215 aa, Zea mays
  Clone ID: LIB3279-179-G10_FLI.pep
NFFPCLQPSTAATRTSIVAVRVSGSRDRSPDPRPAPAYSPVRALACALPLWRPPPPPPYPRCRGLHLPELRRRRESSRAMLGARVQLKGWQQAAVAFGSAFGALLDPRRADLIAALGETTGKPAFERVLQRMKNSAEGRFFRSVPAWYPRRFPMPGTCLRTHLARRMLSSWDQGTSHQTIARLSVSWTPMSSPTSRHVLARCTTFGTCCLVFRRT

SEQ ID NO: 67619 - protein, 270 aa, Zea mays
  Clone ID: LIB3279-183-E11_FLI.pep
AMSYYERRGGDRGSGRIQGSGGRGGHVLRGRSGLAPRGLLGVNSRPSARTIAKSFSRTKDMTWRPDLFSDSMAASGIETGTKLYISNLDYGVSNEDIKELFSEVGHLKRFAVHYDGYGRPNGTAEVVFTRRSDAIAALKRYNNVLLDGKAMKIEVIGNDLGLPMTPRINVVGASNGRATRTVVMTPEFSQRGRGSSSRPLSNRFNNRGGFQAGRGRGQFQSWGRGRGQFQSRGRGRAQFQGRGRGRKPEKTADELDKDLESYHAEAMKTD

SEQ ID NO: 67620 - protein, 140 aa, Zea mays
  Clone ID: LIB3279-185-H6_FLI.pep
PRLPSIQLDQGTNREANAARVARSVAPIGFTGGGVGMEAQNGSCGGAPVVLNVYDLTPMNNYLYWFGLGIFHSGIEVHGMEYGFGAHQFPASGVFEVEPKSCPGFIYRRSVWMGTTDLSEQSSARSLKILLESTTATRII

SEQ ID NO: 67621 - protein, 402 aa, Zea mays
  Clone ID: LIB3279-186-H9_FLI.pep
CPSPSHRCMGKAFSLLRPPQPPREDDTEMMELRKRPRPRRLDPDFLSSPPPMPPRKRARKQAAAPKPVEAAGALKWQPPRKGSRRATVGIGCPVAGLHPATCGRQPPLRMSTRVLFRPRHPFNWYEPDLWTEVAKHLCGFDLLRLSLTCRWFHRLLADDSIWRYAFFRDLNLTDANPHVHRPLSRSWRYLYFAAFDGSHAFSLCQNGEHRSSWRIGSFVLDSPHMVLIGKLPLPKWLPSCPEDVRLTIAILGACKLLNVRPGIWITDMHVMRCPLCKRNSCRGNKQILDARHSELFLEKAYWDETLEYESLGEHFQDEEVAAAFCAVVNAKQFASPSTASVLNRAWTGKHDDPMTRHCASATAAAIHTNLQSNGGLLSTFEAMRDTARDGQIVSIRISQVLF

SEQ ID NO: 67622 - protein, 137 aa, Zea mays
  Clone ID: LIB3279-190-C12_FLI.pep
CMSLLKELNEKDSSLKDHRLRVNNLGEQLDLLQKDVQAREVTQMQLKDIVIRIETNIMDEVAKAFEIAILRGEIGILSTHWTNKTKNLESQLKKHQRTDQELKKRVLKLEFCLWSCHPLDHANRMLNFYAPVELLIE

SEQ ID NO: 67623 - protein, 302 aa, Zea mays
  Clone ID: LIB3279-198-H2_FLI.pep
SHFCNKLIKKMLLPRKLLPWRRSAQDAQALAGRLLRSSSSSFDPEDDDPPFTRVPKLPPRAPSTPPPKPKALAGKIRPDEPAHSDLPFDFRYSYSETDPTWRPIGFREPTRFSPFGPGRLDRPWDGTAAARVGDDASGDERSREEVLGEPLSEEEVAALVERYRHSDCSRQINLGKGGVTHNMLDDIHNHWKRAEAVRIKCLGVPTLDMDNICFHLEDKTGGKVVSRSINIIILYRGRNYDPQKRPGVPLMLWKPLAPIYPKLVQNVAEGLTFEETKELRNRGLNSPPLTKLRFGSMHSYII

SEQ ID NO: 67624 - protein, 133 aa, Zea mays
  Clone ID: LIB3279-203-F10_FLI.pep
RGPVRRPSSWREKMDEASTSASGAATRRGFVPARSGVFYRFTQQNLPAWKPAMTPGCIIAMFLIIGIIFIPFGLLCLQTSNHIAEIIYRYDVDCVPDAYRGNRQAYIKDSSISKNCTLEAKVDRYVIVVRLPV

SEQ ID NO: 67625 - protein, 177 aa, Zea mays
  Clone ID: LIB3279-205-E11_FLI.pep
AVDEEAGNAANAVPSRTRSRSSWWNSAHSVLRPRTSHERRCGSSALVAAAPAAAAAAAARASPPWPHENDLHRRRSGGSAGPDADELPAANGLAKRDRMADVDLRPGAEAAAADASRPWRRSRRHAAQKPVNASPGCRSQLVDNERRAGGAGGSMCSVVIATPGVTPPAPHTHTPRP

SEQ ID NO: 67626 - protein, 737 aa, Zea mays
  Clone ID: LIB3279-206-H3_FLI.pep
PLPALPHQNTTPLRVRRPHSSPLPVCLPCRAVPCSPPDAAADAGRAEPQPEMSSRNRSAAASSAAPALRTPRRLKRRPVKASAPGPGSGRRSGPATPLLKWDVGGGGGRGEGRKAGADEAGDAARARETKAKATEVSVRRLAAGVWRLRPPEAVAGGGSGVRVGVEHIPRHLQVQLLKQNTSGHHQSSKNEVSSPISVLERKSGELHKGQLHATSAMLPVATMEKATKWEPGDIKGMESHDAYLIASQLNLLDEHRDTAYVADLQMELQQARDRISAMETERRSAKKRLDHLFKKLAEEKAAWRNREHEKVRAILEDMKADLDHEKKNRRRLEMINMKLVNELKEAKMSAKQLLQEYETERKARELTEEVCNELAREVDEDKAEIEALKRDSQRLREEVDEERKMLQMAEVWREERVQMKLVDAKLTLDAKYTQLSKLQQDVEAFIAACSTANGDVTVVEQAESIIQAIKSVRAQDAEFRYEPPAASEDIFSIFEELRPSEEPVIKEIEPCYKNSSAKCEPEIQEVSPMTDIFLEKKAKANSNKSPKDESDTEDGSSWETISHEDVQGSSGSPDGSEPSVSNKVCDGSIPWKSRNGFERMESEKLKDESADACLTNMNQPKKKESAISKLWKSSRPKNSEICKKDAVETVNARSSNVRLSVGTYSTVESGIQEIGLSPPCVEQWSSPDSMNVQFNRGFKGCIEYPRMSQKHSLKAKLMEARLESHKVQLRQVLKQKI

SEQ ID NO: 67627 - protein, 458 aa, Zea mays
  Clone ID: LIB3279-217-D11_FLI.pep
KKNQKTQPPPSRLQLASVRPSGRPAAAADSLAPSQAPGRAMDDDKQQLARQEDQAGRASWVPGAVIVGAGPSGLAVAACLAARGVPATVLEMSDSLASTWRHRTYDRLTLHLPKRFCELPLLPFPRGYPAYPSKGQFVAYLEAYAAAAGVAPRFGARVEEAAFDAGAGAWALRLAGAGGGGAGDLLLARWLVVATGENAVPRLPDLPGAARFAGRVLHTCDYRSGEEFAGRKVLVVGCGNSGMEVSLDLCRHGAAPSMVVRNTVHVLPREMLGLSTFGIAMALLKLLPVRVVDRILLAAARLALGDTGKLGLRRPKTGPIELKNLTGRTPVLDVGTLAHIKTGKIKVVGAVKEVTQRGVRFADGKEEQFDAIIQATGYRSNVPSWLKDGGDVFTSEGMPRIPFPNGWKGKNGLYAVGFSQRGLLGASADALNIARDIHRQWTDTATRPVVLRCNSAVV

SEQ ID NO: 67628 - protein, 287 aa, Zea mays
  Clone ID: LIB3279-219-H1_FLI.pep
GSDVTPSHGNNGTARRGDGAAGGGCVRVRRVGVDAGAVQPVRGDGVAGHPAERREGGAGARRAAAGAGAVGVGAAPRGVVGARVGAAGVLVRRGGARAVRHGRLRRRALLRRRRGRAAGHAGGDHPGHRAVPGLLRREPGGRVQHPHRDDAGARVGRPVRGGRVRERPEPRVPRGARRPRRGPRGGVPQRLRRLRRAAVLLHGAVREPPAVQAHGLLAPLQVGVPQGLLLRLRRPDVHPHLLRRRLLRRHLLPAPPLNFYFFKVFGRVLLVILCLRLRFDVLACVRF

SEQ ID NO: 67629 - protein, 204 aa, Zea mays
  Clone ID: LIB3279-226-C3_FLI.pep
LPAGLRFDIQEMATAARLLLVVVLLSAAIPIPSFATSFVVGDKRHRWAPNVNYTDWADRHQFHVGDWLEFRYERDRFDVVQVNETAYAACDASSPILSYSRGHNFVFRLNHTGRFYFICSRGYCWSGMKVSVLVQPPPPPPSLPPASHSHASSASARVRPAAGLWCAALSTLLGWAVLTPPLSFRVWSSGRPGAHTSLNSKAVC

SEQ ID NO: 67630 - protein, 114 aa, Zea mays
  Clone ID: LIB3279-229-F2_FLI.pep
MHLYYFCLYHSVSASPFIPRNPKRQKQISSDLPFRFYAMLQQVLELAGNAARDNKKTRIVPRHIQLAVRNDEELTKLLGGATIASGGVMPNIHQHLLPKKAGSSKASTVDDDDN

SEQ ID NO: 67631 - protein, 448 aa, Zea mays
  Clone ID: LIB3279-230-G9_FLI.pep
GGRRSREPGMTGVVVVSSAGCKGGGGGKRAAGGRGGGEEERRRRAAVLELLLAAVRRSVVACRVERGAAGAGWPAREEDAAVALEEMEIGWPTDVRHVAHVTFDRFHGFLGLPVEFEDEMPCRVPSASASVFGVSAESMQCTYDGKGNSVPTILLLLQERLYAHGGLKSEGIFRINPENDQEEHVRDQLNKGIVPDDIDVHCLASLIKAWFRELPEGVLDGLSPQQVLQCNSEGEFLELVTLLRPTQAALLNWAVELMSDVVEEEELNKMNARNVAMVFAPNMTQMSDPLTALMHAVQVMNFLKTLILRTLRERDDAATTGEYTPYSSPASSSKHDDAECCYGSEQDMDRSCEMSDMHSQISKSGRHADYLVRYNTCFDSEQEVDDHLSEVEEGFLRRLERDLGADRPEVSCRKISEIMALEDAEPKAETRAVEKGIQNENEEVAEQL

SEQ ID NO: 67632 - protein, 264 aa, Zea mays
  Clone ID: LIB3279-231-F10_FLI.pep
AIKPSASTGGSPNSVSNSRVLLLSDPELRRPQHQARPPSRVTEMALPNQGTVDYPSFKLVIVGDGGTGKTTFVKRHLTGEFEKKYEPTIGVEVHPLDFTTNCGKIRFYCWDTAGQEKFGGLRDGYYIHGQCAIIMFDVTSRLTYKNVPTWHRDLCRVCENIPIVLCGNKVDVKNRQVKAKQVTFHRKKNLQYYEISAKSNYNFEKPFLYLARKLAGDPNLHFVEAVALKPPEVTIDMAMQQQHEAELAAAAAQPLPDDDDDLIE

SEQ ID NO: 67633 - protein, 174 aa, Zea mays
  Clone ID: LIB3279-234-B10_FLI.pep
SSPPPPPPMAASTFSGDETAPFFGFLGAAAALVFSCMGAAYGTAKSGVGVASMGVMRPELVMKSIVPVVMAGVLGIYGLIIAVIISTGINPKAKPYFLFDGYAHLSSGLACGLAGLAAGMAIGIVGDAGVRANAQQPKLFVGMILILIFAEALALYGLIVGIILSSRAGQSRAD

SEQ ID NO: 67634 - protein, 247 aa, Zea mays
  Clone ID: LIB3332-012-G10_FLI.pep
ESGGFGGNVGHDPHVLYTLSAVQVLCLFDRLDVLDVDKVADYVAGLQNKDGSFSGDIWGEVDTRFSYIALCTLSLLHRLHKIDVQKAVDFVVSCKNLDGGFGAMPGGESHAGQIFCCVGALAITGSLHHIDRDLLGWWLCERQCKDGGLNGRPEKLADVCYSWWVLSSLVMIDRVHWIDKEKLTKFILNCQDKENGGISDRPDNAVDIYHTYFGIAGLSLMEYPGVKPLDPAYALPLDVVNRIFLKK

SEQ ID NO: 67635 - protein, 526 aa, Zea mays
  Clone ID: LIB3332-025-E9_FLI.pep
QRQRPRSEHARERERERERERERESLEDPVGERRQAAEEVEAGGGHVAAEPGVAEVVEPHPQQQHLERHRVQHQRRQQAHHREHRRRARVPPRQQRLHALPLRRHVPQQRLRARGHGAQPVVPHPDHVGGAPRWEPVELLVQLVRAHAVHVGQPRVHARRLPRPRAVPPQQHQEQVQAHGGQDHLRAQHHGHQQQVHQHGRRRVRPGADPVRPPHRRRHVGQAPHHAEPVGLAPPHAPRLRVRVQQVLHHLRPQRRLRPRQPPRHCAHRRVPQHVLLRRAQRLHVVHPRQQRAAVRLHQRQPRRAGEPDRQLQLAHLAHAHRVHRRQREGVGVHPVGVQRRQPDPELPDAGVPGQLPRIVGCGGLVPDVVEDGDGEHGAGVEHVPRVLLVPPRVELVQDGARARPLGPVLEHHVRVRRPARAVLGDLHRHQVGRAADAHLQHPHRRLRQLLRRRAHVAGHVRRLVQHVVPALQAHAHVHPPGVRPGLAAAQVQPPGRWLHPVVGSPVHRGQGNAGLAHRLPGEHVF

SEQ ID NO: 67636 - protein, 603 aa, Zea mays
  Clone ID: LIB3332-038-G1_FLI.pep
HRTHANRPTAFFSCLVLLATMAAAAEVDPSPNPPPTTASGLSKTKTREADRRRRRRSKAKKNKSVTEADAQDADGGASSSDAKENADPNPEPQVEVEIEYVPEKAELDDPLLDDFKAIFEKFTFKDAAAAAAEDDKKDEGAADATKKGSLDDDDDDEDDEQEANKKKDGGLSNKKKKLERRMKIADLKQICNRPDVVEVWDATAADPKLLVYLKAYRNTVPVPRHWSQKRKFLQGKRGIEKQPFQLPDFIAATGIEKIRQAYIEKEDSKKLKQKQRERMQPKMGKMDIDYQVLHDAFFKYQTKPKLSSHGDLYYEGKEFEVKLREMKPGMLSRELKDALGMPDGAPPPWLINMQRYGPPPSYPQLKIPGLNAPIPPGASFGYRPGEWGKPPVDEHGRPLYGDVFGVLQQDEPNYDDEPVDRSKHWGDLEEEEEEEEEEEEEEEPMEDEEMEDGIQSVDTISSTPTGVETPDVIDLRKLQRKETDKQAERPLYQVLEQKEERIAPGTLYGSSHTYVLGTQDKSSAPKRVDLLKNQKSDKVDVTIQPEELEAMDDVLAAKYEEAREEEKLRNQKEDFSDMVAENAHKRKRKQEKEGKSKKKEFKF

SEQ ID NO: 67637 - protein, 140 aa, Zea mays
  Clone ID: LIB3353-009-D11_FLI.pep
HPPSPQPLGAGGSPSARCRQRPEDAHADASNDKSVEVMRKFSEQYARRSNTFFCADKTVTAVVIKGLADHRDTLGAPLCPCRHYDDKAAEVAQGFWNCPCVPMRERKECHCMLFLTPDNDFAGKDQVISFEEIKEATSKF

SEQ ID NO: 67638 - protein, 567 aa, Zea mays
  Clone ID: LIB3354-003-B3_FLI.pep
VVSTAGLCCSCQEMSLGTCPAAAGDATAEELLQRARGLVPPALAAARAATGFGGRWKAIAARLEKVPPCLSDLSSHPCFSKNSLCRELLQSVAATLAEAAELGARCHEPPKAGKLQMQSDLDALAGKLDLNLRDCSLLVKTGVLSDATVPAAPAACAQADVRELLARLQIGHAEAKHRAVDGLLDALREDEKSVLSALGRGNVAALVQLLTATAPKVREKAATVLCLLAESGSCEGLLMSEGALPPLVRLAESGSLVGREKAVITLQRLSMSADIARAIVGHSGVRALIDMCQTGDSITQSAAAGALKNISAVPEVRQALAEEGVVRVMVSLLDSGVVLGSKEYAAECLQNLTSSNDSLRRAVVSEGGLRSLLAYLDGPLPQESPVAAVRNLVSAVSADSLVSLCVLPRLVHVLRDGSVGAQQAAAATICKMSSSMDMKRLVGEHGCIPLLVRLLEAKSNGAREAAAQAVASLMGCPPNARDMKKDEKSVANLVQLLDPSPQNTAKKYAISCLLALSTSKRCKKLMISHGAIGYLKKLSESEKDVAGAKKLLEKLDRGRLRSLFGRK

SEQ ID NO: 67639 - protein, 397 aa, Zea mays
  Clone ID: LIB3354-004-G3_FLI.pep
AASKLPLYAFKLTPAKGSQEDAASTKLLVDILLSEWEDRMTRGLFRYDVTACETKVIPGNLGFVAQLNEGRHLKKRPTEFRVDRVLQPFDPAKFNFTKVGQEEVLFQFENSGGDDSYFLNNAPIIAVDRAPNVIAINVSPIEYGHVLLIPRVLDRLPQRIDPESFLLALQMAAEGGSPYFRLGYNSLGAFATINHLHFQAYYLSVPFPVEKAATHKIPLSEDTKKNGVTVSKLINYPVRGLVFEGGNTLDDLATVVSNACIWLQDNNVPYNVLISDCGKRVFLFPQCYAEKQALGEVSQELLDTQVNPAVWEISGHMVLKRRMDYEEASETSAWKLLAEVSLSEERFEEVKAYIFSAAGLVQYDEEEEEASDGEGPTAYVPVKVTPLPVAEGCLVLP

SEQ ID NO: 67640 - protein, 167 aa, Zea mays
  Clone ID: LIB3354-005-A8_FLI.pep
GCSRSVHPGGFVRSKAASELEDAGQAVGRRGGRASPGDGPREAPQGHHRPSARHQQRRGRRQLQAGAVDAVDPDDAGDAVVVVVVDDAARRRQRVAQRLPPGEQPGHQGHGRQPLRPAAAQLPHRLRLALQRRDQEQPPLDRARWMDSEEAMFAGPCGYLKRTHALL

SEQ ID NO: 67641 - protein, 455 aa, Zea mays; identical to SEQ ID NO: 40951
  Clone ID: LIB3354-008-F8_FLI.pep

SEQ ID NO: 67642 - protein, 255 aa, Zea mays
  Clone ID: LIB3354-014-H3_FLI.pep
GCKIQSAAWLRGLSGDFFHSFHIMSLYWCSVRPGFSSFSLGSSASSNALKVDLRRRSGCLSAGRDACGSTTDIRAIASSTDLASMRESSLLVFSTRTTRSYSSSSATRAARFLAASASRSRRSRSSSRRRTSSASVTLGGGAATRDALRAAALDGADAEAATAAASASARRRFSALRAAASARFSASSSRRRAARDLGPSASAQYCSSLARSWRSRRSASAAERRSRAASALELTPIFFGITGPLVRRLAARRRV

SEQ ID NO: 67643 - protein, 504 aa, Zea mays
  Clone ID: LIB3354-040-D3_FLI.pep
ENSPSFSYFPSHGSYAPRAQNPSRLIQSCFPPMASADAAKPASPPAADPPVDDPMDADPAPHAGEEEQATPQKQQPEKKRGGRRKKGEAAEKTPPSSKKSAGPTVERPSRERKTVERYAELAPRATPAKKSPAILQGSGTKLKDIPNVSFKLSKRKVDENLQSLHTVLYGRKSNNHFLKRNISQFSGFVWTDNQEKQRNRIKEKLEKFNKEKLLDFCEILDVIVKVTMKKEEVSAKLLEFLESPCVTRDVVLTDKKKGKKRGRKSKVGREATAEGASAEKKRKRAHKQAAEDGKENDGEDDDPAGSEDASTGEEADGDSEANDHALSDDEHDEPAAKKKSSDVKQKKETGSDAKEKDAPGKKGSTKRASKPSQNSKNEPEVEIKKVGKREKSSKETDVSPDSNKSNKKISKSKKGDGKETQNNKAARSSNKSKGKVKGGSVAGTAPTTEQLHAVVSGILKEVDFNTATLADILRQLGEEGSEDEAEDDGKADNLKSEPDGGEEK

SEQ ID NO: 67644 - protein, 218 aa, Zea mays
  Clone ID: LIB3354-047-B2_FLI.pep
SYRGDRDSTAAYVAAATAFKGHMPPRRQWFKEDARAVRSSVVLLSRPLRLVDAVLCCILDVAGLGRQPRLGVVQLVGARRVLARQVLVHPGEHGQRSDAEAAGGDEPGRHERQRDGGRHQHRAEDHQHGGGHRERDHGAGQDQPGQHQHRPAEGRGRRGLERRHHGALLLLLLRLAVHAAPALEVAVAPATSRRAPVVISHGRLAERARYPTCARCPE

SEQ ID NO: 67645 - protein, 231 aa, Zea mays
  Clone ID: LIB3354-071-F10_FLI.pep
PTTNAIIYSSGGKHYSSWSSSSNNGAADEGVRVGRVAVDGARAGVSGGGRRRLRDRPHEQVWRRPPPAGAPRQKQSRAIARYVLRKLKPELLREGDLEGSAMVDAWMEVEAHHMEPALWPIIRHSIIGQYVGRDRDHQAVIDENLDRLRKVLPAYEARLSVCKYLAGDVISAADLCHFGFMRYFMATEYAGLVHAYPHVKAWWDALLARPSVQKVMAGMPPDFGYASGNIP

SEQ ID NO: 67646 - protein, 167 aa, Zea mays
  Clone ID: LIB3354-074-A11_FLI.pep
CLSLSLCLSLSLVPLSLSDDRWAAAADAALSQVLRLLLVSSPARSTQQDKATGCWNMDQQGMHDHEGVHVVGFEVPPSPDSSYDNPVPGNEDEGREPPLMPPHLQHTLLSFPPSQDESSPLPQPQTVVLNHLYIEKENTRSMVALGITHRFKAKFVTVVLYKPVLRR

SEQ ID NO: 67647 - protein, 462 aa, Zea mays
  Clone ID: LIB3354-074-A5_FLI.pep
AEGGPGGAVEEGVGESSSPPREDAVPAPAGSGGSGGSGGAREICAQVLDRLVADGYAEASDPEFRDRLAAHFGRLPHRQGTPYTHIHEIVFSTIDKPKLLSQLSALLSDIGLNIREAHVFSTHDGYSLDVFVVDGWPVQDADGLHKALEASILRNEGSWSGSSHSSAAERTLPFQVKGGEWEIDKRLLKMGGMVASGSCGDLYHGTYLGEDVAVKVIRAEHLNKNVWNEFTQEVYILREVQHKNVVRFIGACTKPPQFCIITEYMSGGSLYDFVHKQHNVLNLRTLLKFAVDVCRGMCYLHERGIIHRDLKTANLLMDKDHVVKVADFGVARFQDQGGVMTAETGTYRWMAPEVINHQPYDNKADVFSFAIVIWELITSKIPYESMTPLQAAVGVRQGLRPGLPKKTHPKVLDLMQRCWEADPSARPAFPDILAELEDLLAQVQGTPGKTAHAPSNNSNTKD

SEQ ID NO: 67648 - protein, 233 aa, Zea mays
  Clone ID: LIB3354-076-E2_FLI.pep
QCFMHKFHLKRLYAWFDYRDSVDLHALLNHAYYAKNQEHRADHLGFHKALCVLMGWNYSVAPVHKTAYQALSTVDAEANQGDLILWPPTVIIENTYKSKNDGEKDVMSDKEVESKLREMGFAGVNVQPLPGKDGQRSVQAKFSASLDGLNNASRLAELFERQGHGRAAWARVRSAVPTGGGGDNNPMLVKVDGKGERTWVLYGYLATAWDLNVLDPESKQNATVKSRKELDLD

SEQ ID NO: 67649 - protein, 142 aa, Zea mays
  Clone ID: LIB3354-078-F7_FLI.pep
DDQNITASKTVKVTSNSLCLCSNNIHCCSCLSLLKGLTNASNYLETLSECICNFISNKITGFTQQSSALRMSQNDPGHLQVYQHLSTDLAGEGAALAHPAVLRCDGEVQPQQPLDLLQKNERRTHHHLCSPPRVPANQEIST

SEQ ID NO: 67650 - protein, 435 aa, Zea mays
  Clone ID: LIB3354-081-G6_FLI.pep
RFPNSSALSRATAMATKYAAAAADLVTGRPRKRARLGWDVASAAEAQIGTFCGQEVGDVASLLLSANPSDHTCSSLLPKGVARNASPPWREDDKDGHYVFAVGENLASRYKIYRKMGEGTFGQVLECWDRESKEMVAIKIVRSVKKYSDAAMIEIDVLQKLAKNDAAGKHCVQIRNWFDYRSHICIVCEKLGPSLYDFLQKTGFHPFPIDLIRRIGQQLLESVAFMHRLQLIHTDLKPENILLVSSDYVKLPDPKDGSFSRKLPKSSAIKLIDFGSAAYHHQDRSYIVSTRHYRAPEVILGHGWSYPCDIWSVGCILVELCSGETLFQTHDNLEHLAMMDRVLGPLPRHMLERADQHAEKYVRKGGLNWPQAITTVESVRAVLKLPRLQNLVMQHVDHSAGDFIDLLKRLLAYEPSGRLTAQEALGHVFFTRYRQ

SEQ ID NO: 67651 - protein, 229 aa, Zea mays
  Clone ID: LIB3354-102-E7_FLI.pep
SYRGDRDSTAAYVAAATAFKGHMPPRRQWFKEDARAVRSSVVLLSRPLRLVDAVLCCILDVAGLGRQPRLGVVQLVGARRVLARQVLVHPGEHGQRSDAEAAGGDEPGRHERQRDGGRHQHRAEDHQHGGGHRERDHGAGQDQPGQHQHRPAEGRGRRGLERRHHGALLLLLLRLAVHAAPALEVAVAPATSRRAPVVISHGRLAERARYPTCARCPELLPLPLPLMLE

SEQ ID NO: 67652 - protein, 258 aa, Zea mays
  Clone ID: LIB3354-109-C8_FLI.pep
VGFGFSHFARISGLRLATSLRFALAHSELRQQSSRGTTIFTFLALVLCKRLSYLLNQLLELLAVFGFGWKLPRQQCQPQATKIGCLGSNKKGLSTEPNLMANISSLSSPSAKSAACQTHDLSLPACSCIFVVEATRWFAQILSVLAWRMTRRTLPVCLCLRSLTAPVPRSFHWLPSLSNRYSFAFMSSRTSSSSSPVVTATSSSRTMGATWAPVSSSSPAAAAAEASSSSSPASGRSTTGSLSAMRWVIAARFDSNFE

SEQ ID NO: 67653 - protein, 334 aa, Zea mays
  Clone ID: LIB3354-112-G7_FLI.pep
LSGLSLSRVAKTNSLCSYLHLLYWTLIGHCQCSKSFPLSLYLTLLDRFTPASRPALDSSRASAGGLLLRLGRRVRKPPARHGGRRRAAPSPGGVRAREEVDEPAPAAAARALVALAVAAVAGPPRNGGGGGGALLPEHAAQHPALGRRPRHGVGVGIGVGVAAAARREPGARQPVLVHHPLRLAPRRRLPAVEHQRALHAHQHGLALALALHAPVDRHGHRLLLARRLPVPGPRGAVRAPALHVLGLLAREEVALLLAEPWGQQVGRVVRQDADVRDVDGGRQRRGQRAPPQVVHDQLLVRRPEPEPRRQRRLRGLLLHLHRRKLANNGPNTSS

SEQ ID NO: 67654 - protein, 459 aa, Zea mays
  Clone ID: LIB3354-114-H7_FLI.pep
AEEEVVVGEGLAGMGISRPLVMAMAVALLIAVAGATAEEQEPLLAADAVAGAVEAALGEVETAALRAELGQLRAKISALESDIEERSQELKNKDDAIMNLEKAIEEKSKAITSMLDEIASLQAKGSVAAEEQANKANAKVDKIKKDIEAQSSQKAALEYRANDAEKKVEVLNEKLNTIQKESDEKKRKIKKTERALKVAEEELMRLQLEVTAKSKQLSEVHGAWLPPWLMAQYACYAEVVSGHWDQHGKPAVQNFLHKASEKSAQAKKWAEPHIETAKMKWIPVKQKLVALKKNAEPYVQKVSTRSVEFYESSRDAVTPHAVKVKVFVHSYYQKAKKFSKPYIDQIAEITKPHVEKIRTTLKPYTKRAVHAYGSFLKSATTYHRQAQASIMDYLHQHDITKSLATKELVWFLASALLALPVFIIYRLLVGTFCSKKNKRPRSSNGNHGHKRYKRRHADK

SEQ ID NO: 67655 - protein, 189 aa, Zea mays
  Clone ID: LIB3354-125-A4_FLI.pep
QRSMAGDDCDSSKPKPPPPAAEGAGEVVEGPVAADKALHALGFEFTRIGAREVAGRLPVTDTCCQPFGVLNGGVSALVAESTASVGAFMASGYRRVAGVQLSINHLRPARLGDVVRAQAVPVQLGRSIQVSQHVWFGLPDQSYIVISSMRPIQMLLACSSGRCGRSRYGERTLPQGSAEIWCQQPELPC

SEQ ID NO: 67656 - protein, 213 aa, Zea mays
  Clone ID: LIB3355-038-C1_FLI.pep
RRRLPTSSAWVACPAGAMALSATLRISLSVAFFGVLAFVLGVIAENKKPASGTPILGKDVVICTFPSDPTLAMGSLSIVALVVAAIVGHVAIFFPYSGKSVPRGALFQSTSLTVFFVVAELVSALALAMSLWATVTEGLHRSKNIHHDMDYQCPTAKTGLFGGAAFLALDAALFWLVCQMLALNARADYLDEDDGKGEYGQIYAAQVDDGSKV

SEQ ID NO: 67657 - protein, 159 aa, Zea mays
  Clone ID: LIB3355-044-G1_FLI.pep
LVFVKVLTLAYPNMVEAIIGRNDEAIMNFEKIDPARPETCVALAAMWERKDERKALTYAEKSLRVDDRHITGYIMKGNLHLSLNRPDLAVTDFRGAQELRADLRSYQGLVRAYLALSKCKDALFTAREAMKVMHQSAKALKLVGDVHAISSSGREKARK

SEQ ID NO: 67658 - protein, 330 aa, Zea mays
  Clone ID: LIB3355-054-G9_FLI.pep
RWRSPNEQLQHWQNNRRKLAFSTVGTPDYIAPEVLLKKGYGLECDWWSLGAIMYEMLVGYPPFYSDDPLVTCQKIVHWRSYLNFPDNPRLSLEAKDLICRLLCDVDHRIGSGGADQIKAHPWFRGVEWDKLYEMEAAFKPLVNDELDTQNFMKFPDLNPAPARASSGASRKMMLNSKDLSFVGYTYKNFEAVKGLHQFAGSSCHNILNTESFSDPHFLFSAIFREVPHLQGTLLAPHLIQQIWTPQWKLTGPTHTCALVQLATLWRHNLPCCFREVPCPTPASCMHLDNMATSEETWLWTCIYSGLVPFYYLASTFVVVQTRGICVVCFR

SEQ ID NO: 67659 - protein, 171 aa, Zea mays
  Clone ID: LIB3356-009-B11_FLI.pep
QQQKGLSPDLLRYKGPIHCARTIVREEGLFGLWSGALPTVMRNGTNQAAMFSAKNTFDIVLWKKHEGDGKVLLPWQSMVSGFLAGTAGPVCTGPFDVVKTRLMAQGRTGDAKYKGMVHAIRTIYAEEGLRALWKGLLPRLMRIPPGQAIMWAVADQVMGLYERTHLQPVHI

SEQ ID NO: 67660 - protein, 280 aa, Zea mays
  Clone ID: LIB3356-026-B10_FLI.pep
RSRLRSDCAILSGGAGPLLAVRVAVVGAAGGVEEVEQAAHEHAAGQHRYGAERPEEEREGDVEGAQAERPGVAAAVHRPRHVRRELLARLVAGPGRQAAQEEAGVRVQADGLHVADEGEHEAERHGQVLGREHLPGLAPVHQPRRLGGRRGRGGGRRRDADEDADDGDQRDGRGRQHRRRHDVVPQRLHREHAVLLRVLLAGRPVRHPWYVCTQQESNGMGYGDEGESEWEELARPIDEMGRCMVPTAIMAATQRLRAMALRPMMVRVGWRRIAQRSHRW

SEQ ID NO: 67661 - protein, 215 aa, Zea mays
  Clone ID: LIB3356-051-A12_FLI.pep
KMQLLTLRTPSCEQKEPNRSKDSTSRDTEERPNNVDDDNGRSSPLAPDAARELDVLGHDGDALGVDGAEVGVLEEPHEVGLGGLLQRGDSGGLEAEVGLEILRDLTDEALEGQLADEQLRALLVLANLPERDGAGAEAVRLLHATGCRRRLARRLGGQLLAGRLAARRLARRLLRAGHRRFGAWREDGRAEPAVDLGKSWFDARRSEIGMGLGVL

SEQ ID NO: 67662 - protein, 176 aa, Zea mays
  Clone ID: LIB3357-042-C10_FLI.pep
QHRIRLQTLCLLGGLGGLLGRLGLLAPAAGRLLRRLLGQQDRVDVGQHAAVGDGHASQQLPELLVVADRQQHVARDDARLLVVLGSVAGELQDLSGEVLQDGREVDGGTAADALRVAALLEVAPDAADGELEPGLHGPRHRLLPRPAGLATGRSLLRLPSSSSAGGVHGRSCASRV

SEQ ID NO: 67663 - protein, 52 aa, Zea mays
  Clone ID: LIB3357-042-F2_FLI.pep
FSASSQFSCRYSREPGPVIFPSPLVLLLPIDPSIAQAIVAAVHFWDGAALPG

SEQ ID NO: 67664 - protein, 268 aa, Zea mays
  Clone ID: LIB3357-056-H3_FLI.pep
LHSAGIWGGKGQGKTFQTELIFRAMGVEPVIMSAGELESEKAGEPGRLIRDRYRTASQVIQNQGKMSCLMINDLDAGVGRFGNTQMTVNNQIAVGTLMNLADNPTRVSIGQKWRESDVTHRVPIIVTGNDFSTLYAPLIRDGRMEKFYWQPNREDIISIVHGMYIKDGLSVEEVSRIVDAFPNQALDFYGALRSRTYDQAILEWVEEIGGHEQLNEKLLKRKKGEELPTFIPPKPTLEALIESGYSLVKEQELIMSSKLSREYMKNLE

SEQ ID NO: 67665 - protein, 287 aa, Zea mays
  Clone ID: LIB3587-218-A9_FLI.pep
LATAGYGVFGIDYEGHGKSMGARCYIHKFESLVADCDMFFKSICGMEGYRNKSRFLYGESMGGAVALLLHRKDPTFWDGAVLVAPMCKISEKVKPHPVVVTLLTQVEEIIPKWKIVPTKDVIDSAFKDPVKREKIRKNTLIYQDKPRLKTALELLRTSMDVEDSLSEVRMPFLVLHGEADAVTDPEVSRALYERAASADKTMKLYPGMWHGLTAGEPDDNVELVFSDIVSWLDKRSRHWEPDERVRRAPPETENKRRVTSSSSQRPGSFLCGLGCRCRQHQQQCSRM

SEQ ID NO: 67666 - protein, 348 aa, Zea mays
  Clone ID: LIB3587-224-F4_FLI.pep
ISEKMARSARARRHVAHRIKSTHPIPSYRWKAKAMKKSNRKQVLPALQKMDWEDANCSVCMEYPHNAVLILCSSHDKGCRPYMCGTSYRHSNCLDQFKKAYTKGALLEEVPANSVGTDLDSAPLDAEKIESIDLACPLCRGKVKGWTVVEPARSYLNGKKRTCMQDGCSFVGTYKELRKHVKLEHPLAKPREVDPVLEQKWRLLEIERERQDALSTITATMGRAVVLGDYVLDLEDGVDLEDVDSDVDVDDDRGTENTRRMLLFIMRQVAQHHQHQRLHNVTGASENVEDNYVVNNGANGTTPYSYPLEGEDENDMVLAGGRSTDVLRPERRRRRRRRNRGRLFLGAN

SEQ ID NO: 67667 - protein, 163 aa, Zea mays
  Clone ID: LIB3587-268-E8_FLI.pep
VSGIPVEDCLVWDSRFLAPVPETALDDEARAAAARRIAERKARKRSEWRTYLVAAVMSSLGVTSMAVAAVYYRFSWQIEGGTVPMSEMFGTFALSVGAAVGMEFWACGRTRRYVTPPCGTCTSRTTGRARAHSSSTTCSPSSTSCRPSPSSVTSRADTPHGHV

SEQ ID NO: 67668 - protein, 327 aa, Zea mays
  Clone ID: LIB3591-001-D8_FLI.pep
YLPTWCCSIRRLPQNPKMASSASTLEIEARDVVKIVLQFCKENSLQQTFQTLQNECQVAQLKLPRKKLEDLYEQIVLEMAELRELDTARAILRQTQVMGVMKQEQPERYLRLEHLLVRTYFDPNEAYQESTKEKRRALIAQAVASEVSVVPPSRLMALIGQALKWQQHQGLLPPGTQFDLFRGTAAMKQDEEETYPTSLSHQIKFGKKTHPECARFSPDGQYLVSCSVDGIIEVWDYLSGKLKKDLQYQADESFMMHEEPVLCVDFSRDSEMLASGSQDGKIKVWRIRTGQCLRRLERAHSKGVTSVTFSRDGTQILRYMASSLERC

SEQ ID NO: 67669 - protein, 197 aa, Zea mays
  Clone ID: LIB3591-003-F8_FLI.pep
YDRETIHMHASHDGAGVDVLVAEHGHVLDLRSAGVCHGLRRAADEARGSLLVVGAADVGVGGERVGHVGPHLGVLAGGLDALQHLGGLHVPGHRALALLRVHRHARHAAHRLHRALHATLATFAVHLHLDVHRLQRSLLPELERLLRLRDAAHMRHVVQDAHGATASGVCCCCRRLHPSFFFFFFFTQACSFCSCAK

SEQ ID NO: 67670 - protein, 224 aa, Zea mays
  Clone ID: LIB3591-004-H9_FLI.pep
ALSRLLPHPTSDPRVPQIRSARPIRNLELSRRRPQQRGGHSTTAPQGSYSRRSGSSEGKMSSVFSGDETAPFFGFLGAAAALVFSCMGAAYGTAKSGVGVASMGVMRPELVMKSIVPVVMAGVLGIYGLIIAVIISTGINPKAKPYYLFDGYAHLSSGLACGLAGLAAGMAIGIVGDAGVRANAQQPKLFVGMILILIFAEALALYGLIVGIILSSRAGQSRAD

SEQ ID NO: 67671 - protein, 182 aa, Zea mays
  Clone ID: LIB3591-008-D9_FLI.pep
SSSSSRCLRFRSHTNFLLLCSTNPVSKFNCIWNRRDESARDERVDQLQGRVDLAGGRQPLISLPPVPRDRTEQRAGLELDALLVDEELPHPAVDRVHEEIGDPHRALQGVLLCTLGLLSLAEGLVVVLLHDTEQRLFQVLLPGRHWLGSVHPVNQRSLPDGWSPAQAEQRRVEGRRRSGGPR

SEQ ID NO: 67672 - protein, 474 aa, Zea mays
  Clone ID: LIB3591-008-H2_FLI.pep
TRMGSWQQGELQGAAMDGAAAAATGSGGGHRVVGSRNEEHGKYLSESSCCPRCGHKLDPKLDWLGLPAGVKFDPTDQELIEHLQAKVWPASAAAPSHPLIDEFIPTIEGEDGICYTHPERLPGLTKDGLSRHFFHRPSKAYTTGTRKRRKIQPPVADASSSSALPAQQQHQQQQRSETRWHKTGKTRPVVVAGRQRGCKKILVLYTNFGKNRKPDKTNWVMHQYHLGDKEEEREGELVVSKIFYQTQPRQCGVAAEPAATAASSDTVEEAADPPAPEGLVVPPPPDVAGAFQGAAGIDEFSFAQFRSSFEEVDVGASVQVSMRDEEEMHAAHLNLHQDHNLHRNQFGNQEHRRRMAATAAAFHINTPVEPITTMITSSPVVHGSAILQHPEAYGHGSSTYCHHQHQMEEDEQLHQQPQNFDGRRSTSGLEEVIMGCSSRRSKRAEASGPGGNKESRGWQYPSFWPSGSQQDHHG

SEQ ID NO: 67673 - protein, 409 aa, Zea mays
  Clone ID: LIB3591-010-B4_FLI.pep
SVSSIAKPRAPASTRSHEPNQRLLPRVSPPAPMATRYWIVSLPVQSPGAIASSLWSRLQDSISRHSFDTPLYRFNVPDLRVGTLDSLLALSDDLVKSNVFVEGVSHKIRRQIEDLERAGGVESGTLTVDGVPVDTYLTRFVWDEGKYPTMSPLKEIVGSIQSQVAKIEDDMKVRAAEYNNVRSQLSAINRKQSGSLAVRDLSNLVKPEDMITSEHLVTLLAIVPKYSQKDWLSSYETLDTFVVPRSSKKLYEDNEYALYTVTLFAKVVDNFKVRAREKGFQIRDFEYSPEAQESRMQEMEKLLRDQEAMRTTLLQWCYASYSEVFSSWMHFCAVRVFVESILRYGLPPSFLSAVLAPSTKSEKKVRSILDELSGDAHSLYWKSEDDVGVAGLGGETEAHPYVSFTINFV

SEQ ID NO: 67674 - protein, 359 aa, Zea mays
  Clone ID: LIB3591-068-E4_FLI.pep
LLLPATPHPRGHNCQQANGSRPPAPPAAAPYPPAGPLRPARATAASAHRRAVHLHVRRPPLRLREALRSRPRQRRHRVQGAAPPVRAAGRTQAIRGRGHLGGARGRDTDARRGRAPRRAPTRGDPVGRRGGSRGAGAGAHARGLPVGPAAPAGPADGGAPHRRRGAAGAPRARRGPRAPRRAPRPEAVEPARRRRRRGDDRRLRRGQGAAPAAGPLRVLRRHGGVHVPRAVRPGGVLGRLRPLRRRRVEPRGGHLGAVPGPLPSPARGPAPGLGRADVRHMLWRGAGAAGRGVGRVPGFRGAVLREEGRAARVGGRAAGAPVRRRAGSGRRTGGARRARERGGAAGPIDSNSRLGQAEM

SEQ ID NO: 67675 - protein, 370 aa, Zea mays
  Clone ID: LIB3591-069-H11_FLI.pep
FPEARIRIPPTTSIPFPSLPSCPAGSPARRLCPDPGDMPRYDDRYGGTRLYVGRLAPRTRSRDLEYLFGKYGRIREVELKRDYAFIEFSEHRDADEARYQLDGRDVDGSRIVVEFAKGVPRGPGGSREYMGRGPPPGTGRCFNCGMDGHWARDCKAGDWKNKCYRCGERGHIERNCQNSPRSVRRERSYSRSPSPRRGRGRSPSYSRSRSRSRSRSYSRSRSLSGSPRGGRRDRDDRRSRSLSYSRSPMRSPPAKEKERSPTPGGSRSPRSRSPQDQVMSPPPKDNGDRNGSDRGDSPRGRENSRSRSRSRSPSGGNRSPAANGRSPSPRGDRTPSPMADRSPSPKGNGNNDGGDDDTGRGGSPTGSKSP

SEQ ID NO: 67676 - protein, 373 aa, Zea mays
  Clone ID: LIB3591-074-D2_FLI.pep
AESERQVRRRRVEMEFKNCGSSSQPRPAVVVGEEAALARQGSVYSLTFDEFQSALGGAATGGGGGGSIPKDFGSMNMDELLRSIWTAEETQAMASASGAGAGAGMPPTSLQRQGSSLTLPRTLSTKTVDEVWRNLVRDEPLQGADGGGHQQHHRQSTLGEMTLEEFLVRAGVVRENPAPAPPAPPPMIPPRPVPVAPKSSAFFGNLPGADADTAAAAAALGFAPVGMGDLAQIPPRAAGMGGGAMAVQAAVNQLDSGGKGYSDLSSPTEPLPFSFEGMIRGRRHGGGVEKVVERRQRRMIKNRESAARSRARKQAYTMELEAEVQKLKEQNQELERKQAEIMEMQKNELPEMLKDPFGRKKRLCLRRTLTGPW

SEQ ID NO: 67677 - protein, 112 aa, Zea mays
  Clone ID: LIB3591-077-H4_FLI.pep
NGSMPESVRPGNFGELDHSAFEHNFPFLEPLCPIWNRSKQQLTFCHSDYWLAIGYSCIQYSYCQSVSAFLSWQIMLYGSLSCKVIGFICIILSIYFSISAGGSCHVNPYLEK

SEQ ID NO: 67678 - protein, 287 aa, Zea mays
  Clone ID: LIB3591-097-E7_FLI.pep
GARVGAGAGSPFPSASRALRLPRPRASVEKREQVAAMEEQGGQAALGWAARDDSGVLSPYSFSRRVPKDDDEHYVVRVPDGLALDRTAPLLCAGVTVYSPMMRHGLNEPGKHLGVVGLGGLGHVAVKFGKAFGMKVTVISTSASKRQEAIENLGADEFLISRDEDQMKAATGTMDGIIDTVSAWHPITPLLALLKPLGQMVVVGAPSKPLELPAYAIVPGGKGVAGNNVGSVRDCQAMLEFAGKHGIGAEVEVIKMDYVNTAMERLEKNDVRYRFVIDVAGSLGSAA

SEQ ID NO: 67679 - protein, 163 aa, Zea mays
  Clone ID: LIB3591-102-C4_FLI.pep
LRAAIFGILWVLLGKRVWFFPNINAEETTFRELVRFWPEKDEGERPKWTSRLFYALVALLVILLLRHHAPDEAARARYQKKVSNIIDDVLEWSPKLAISGMIEKHTGANITEESNYTSRAASSHVPPSTKAKASEAGSDTDIEANLDEAQDSEYADDTRSNEA

SEQ ID NO: 67680 - protein, 276 aa, Zea mays
  Clone ID: LIB3591-102-G5_FLI.pep
LLALGGRRERERERDLVERLARWSSNEDVGGVQRAGGGGAGGAGGGGQPDAVAQDEGVAAGGALPGRLRAGRVRAARRPRPPRLLPHQPGAPPPQVVRGQGRGVLPVRGGAGQPGSSEPAARAVKQGRQRGAPRHRGLQDAARPRALPGQLHARPAHRLLRLRPLRQVHQLPASRIRPRGQGAALLGDHRRRLRRLLRRHRHAQRLMRQVARAVPARLLLLQRPRRAQVLREPQAQGHRCPRRRRRDLRCHFQGGGRLYCPDGAALIGHQLAEAMR

SEQ ID NO: 67681 - protein, 348 aa, Zea mays
  Clone ID: LIB3591-112-A10_FLI.pep
SVFRSVGHCCWKSRPLGLPRAFSKSVRLMAMEGPVLCRPAMQAKSPAAALVNNSLTRFGQLGTISKYRNVSRFISPISQPSTKNIGPCCSFSSSSDGNGYMAGNFSDSDEDYVNSTVLEAVEVRSGSEGYVIKMRDGKNLRCVHNNSQGRNIPESAPQPAIVLRIEDGSETLLPIIVLEMPSVLLMAAIRNVHIARPTIYQVVKEMIDKMGYEVKLVRVNKRIQEAYCAELCLTKIDDSTDSITFDLRPSDAINIAVRCKVPVQVHRSLAYSDGIRPVEPARMAVAAGLSDGLLFTELDRPDGQASVEAQEFGLVKNMLIAAVEERYKDAASWKDKLMRLRSKRKNWA

SEQ ID NO: 67682 - protein, 353 aa, Zea mays
  Clone ID: LIB3591-112-B6_FLI.pep
RRPNCLLSPPTWLAGSLDRITGQALPLTKAMSHYTMHAAINYAALPPTSPLQLPLPYLPPPPPPPLPLPLPPLLSPPPPAAASSDAGFQNRISPSVLLIILILAVIFFVSGLLHLLVRFLLRPAPRDPGDAYGGDANATAFQGQLQQLFHLHDAGVDQSFIDALPVFLYGAVVGAGGKDPFDCAVCLCEFADDDRLRLLHGHRVAMSECDCHSKREGFRGFDAPPKQQQQLSKAAVDKRESFSVSKIWMRSGPRRKDVPSGATTSRRASSFRLSSALQRTASDVGATTAKRRADVVSPVTESEYNVSAWDKSASGSVVDWDVESAGGGHGLSSRADEAPSFARRTLLWIRGHL

SEQ ID NO: 67683 - protein, 290 aa, Zea mays
  Clone ID: LIB3592-001-D7_FLI.pep
AIRSLDPSFPSKKRSAHGHGHAGMNGEVECSVCHAKVPVPPPVSKAYDSHRSTVSSRQRALNVLLVSGDCVLAGLQPILVYISKVDGKFKFSPISVNFLTEITKIMFTIVMLFIQARRLKVGDKPLFTVSIFMQAARNNVLLSVPAFLYAINNYLKFIMQLYFNPASVKMLSNLKVLVIAVLLKMIMRRRFSVIQWEALALLLIGISVNQLKSLPEGSSVLGLPVAAGAYLYTLFFFPHWLQFTTKRLLKASLIPVFTFRTCFCMVMVRYLTLLGLLSLLSSKGPVVLTF

SEQ ID NO: 67684 - protein, 172 aa, Zea mays
  Clone ID: LIB3592-003-C12_FLI.pep
LCAGELLLLVRLDDDVRGGVGVAGEHPAVGDLAVVEVALVGLVHGAGDDLAGAGGAGPRAAGVGQVDAVLLGLVQDVHVVGHLQLHLPLRRDQLHVVGGLRAQPAPAAGATAHDAHLGRRQRHGGRRRRGAEGGRRKEEGRRAGAAQDGGHCCGGSGRGGVAAGAVRELDGE

SEQ ID NO: 67685 - protein, 164 aa, Zea mays
  Clone ID: LIB3592-005-F2_FLI.pep
SKNTFRPVDGRGGAMAGLRGPSERVEDGGVERVAQVGGPVVERPLAGGGGLHGEAEEGDHGEPRVLDLRQLQPLLLLRVGRQAERVEVGAAGVQPLLRVELGVALELDVADHEHLDPDERRDGERQRLAQVGGPEPEPGHDAPVLWRRVRQAGAQECARRGGHR

SEQ ID NO: 67686 - protein, 335 aa, Zea mays
  Clone ID: LIB3592-011-C12_FLI.pep
RPPTAPSMRQLHLSPQLSPSPVLSSHFSPPPAEALSWRRRLHRGRAFQPPLSSLRDPNKATLRKASSNVPFRLGGGGSGSPKDRRPADDDKEEEEAEGEGGAGALTGTLVAGALLVGFVGGFGAAGYVYKDQINTFLTQFSGFIDGYGPAGYALFVLVYAGLEVLAIPAIPLTMSAGLLFGSVTGTIIVSISGTLAAAVAFLIARYFARERILKLVEGNKKFLAIDKAIGENGFKVVTLLRLSPLLPFSLGNYLYGLTSVKFLPYVLGSWLGMLPGSWAYVSAGAFGRAIIQEESEIGWGGNGQLWTLSVGLLFTAMAAAYVTRLAKDAVKEIDD

SEQ ID NO: 67687 - protein, 125 aa, Zea mays
  Clone ID: LIB3592-011-F5_FLI.pep
GLVDEQFQQLQMLQEDGGTPGFVAEVVTLFCDDADRIISELAALLDQPIVDFDKVDAYVHQLKGSSASVGAQKVKFTCMQFRQLCQDKNRDGCIMALAVVRNEFYDLRNKFQTMLQLEQQIQAQQ

SEQ ID NO: 67688 - protein, 341 aa, Zea mays
  Clone ID: LIB3592-013-B8_FLI.pep
FFLVGTRLRTGKKSMAKFSFNDADEDPPTFSSEGEKRKRDDGPGEAAASGGPSKARILTVEGEEQDGGAVVGAGRAEGNGSKGVETVVGGEADGISVRIDPDVLDCSICFDPLQPPLYQCQNGHVACFSCWSRLTNKCHICSSDANFVRNIALEKVVESVKSSCSYAKWGCNKLVSYACRNAHEESCLFAPSMCPIPGCGYRGFTGWWSGHFLTNHNSDGLRFSYGQCFDVSLEMSVPFLVLLAEDDHLFIFINKNVIPFGHALSVCCLRTGNLNWNFLYEMRATSKGNTKNSLQLKASVTNTREWRGLNPTEVFLLVPYAFSKSSKLTLNVSIERVADVK

SEQ ID NO: 67689 - protein, 172 aa, Zea mays; identical to SEQ ID NO: 45169
  Clone ID: LIB3592-014-A11_FLI.pep

SEQ ID NO: 67690 - protein, 247 aa, Zea mays
  Clone ID: LIB3592-054-F4_FLI.pep
RCRFFSSVTMAAQGSLVMWRAVFAVLGLLMVATLVYTLATDGSPFRLELFTPWMVATLADFYVNVIAISAWVIYKEANWVSSAVWVVLLFCFGSAVTCAYIVKKLLEVTSAGSSQDPLDLLFIRQGNLSQRKCSYVVIGRVIFSILGIFMAAVVTYTVITDGLPFRKELLTPWMAATLIDFYINVFAISVWVAHKESSWISTTIWIVLLICFGSITTCGYIVIQLFKVSYQDPIYHVLLNSHSKYHN

SEQ ID NO: 67691 - protein, 155 aa, Zea mays
  Clone ID: LIB3592-058-D8_FLI.pep
EKLSPAAGAGHGGHHAKPTSFSLISQSFLALSASLASSESWFSKDAEFLFQLQYTPDLVRLGSLTTCLREGLRRGEAEAGRRAGDDRRAVVSSLRPSAARRTPKNDAESFTDPSLRAERAEGRKDVAAWSAMSSSERKRLPRGRVDGTSCEQPED

SEQ ID NO: 67692 - protein, 241 aa, Zea mays
  Clone ID: LIB3592-060-F12_FLI.pep
KKMAVVGLSSAFAPLRGSWIAVRIRQGGQRAGISLCPSPRSRRSCAAVVRAEVSFVDADEAKRLVGEEGYTVLDIRDRAQRERAHIKSSTHVPLFIENQDNDIGTIVKRQLHNNFAGLFFGLPFTKLNPDFALTVKDKFSPESKLLVVCQEGLRSAAAADALEKEGFQNIACITSGLQTVKPGTFESVGKSELQNAGKAGLVTIQGKISVVLGTVLISAYLFITFFPDQAEKLFDLAGISL

SEQ ID NO: 67693 - protein, 127 aa, Zea mays
  Clone ID: LIB3592-061-D6_FLI.pep
NEWEAALSSRVRSLHSLLLCENETVKPELNGDQSISFFGWPLPQNWYVFVPFPEVVHLPDLVNSVVYNPLARKGTGDDEGNVDGVAAHHHAVQRVEEAHGERLQLLESAQCSSAPLCPVLQPPLPSV

SEQ ID NO: 67694 - protein, 433 aa, Zea mays
  Clone ID: LIB3592-068-C8_FLI.pep
ETGTTRAGRGAKMALPGPAATRAAVRLCRIAASASSYLPSAAADGRRELELPFALVAERGMVVGGHRGMGMNAVGAPPGARFGAARERENTLLSFGRAAAHAAVAFVEFDVQVTKDGCPIIFHDDFILTQGTGAVYERRVTDLLLEDFLSYGPQKESCKVSKPLLRRAGDGRVLNWTTEDDDSLCTLQEAFQRVSPRLGFNIELKFDDSIMYHRKDLQCALKAVLQVVFEHARNRPVFFSSFHPDAAQMMRELQSLYPVLFLTEGGTSKHHDPRRNSFDDAVRVCLEYDLHGIVSEARGVLKNPSAVARAQESNLALLTYGQLNNVWEAVYIQYLMGVHGVIVDRVEEISDAVAGFGLGKPGLGRGGAGVDGAKTHQAEAFSQQQLGFLLRLIPELIEQRHRKDGTPYVTSQFLTLEADGKNSSLGSTLVPTD

SEQ ID NO: 67695 - protein, 209 aa, Zea mays
  Clone ID: LIB3592-069-C6_FLI.pep
KGPFDNLLQPAAARVRLPRQRLQPAQLRAHSSRLGRTATASPTRRSLKAEAKGEWLPGLPSPAYLDGSLPGDNGFDPLGLAEDPENLRWYVQAELVNGRWAMLGVAGMLIPEVLTKAGLINAPQWYDAGKSEYFASSSTLFVIEFILFHYVEIRRWQDIKKELANGRLAMLAFLAFLIQHNVTGKGPFDNLLQHLSDPWHNTIIQTLSG

SEQ ID NO: 67696 - protein, 242 aa, Zea mays
  Clone ID: LIB3592-069-E8_FLI.pep
RNPADPALPRFLPAESSSLHPFRSPASRTSTATEPRASSMKDPFEADVEEQDSPPESPAPPEDEPGAAGPAEDPEDYDGGPPPRQPSAPASHAAGAKAKARVHREQQEDDDEDEDQIEVDLEKLPSSTGDPDKLAKMNAILSQFTQQQMNRYESFRRSGFQKSNMKRLLASITGSQKISIPTSIVVSGIAKIFVGELIETARVVMSERKDSGPIRPCHIREAYRRLKLEGKIPRRSVPRLFR

SEQ ID NO: 67697 - protein, 331 aa, Zea mays
  Clone ID: LIB3592-076-B7_FLI.pep
KYVGIVMPSKALKRFTPTRWEQSLVGSSILATSGYNSGLWRRAELESWDDNLKIGQIVFQDDGSSASLPSDSLSVSEYAHMSDEDEGSLSDEESEFSDDADQEDGSVHQGLGLLEFTNFSGIQTDTMIFAKWEHHTRGVASKMMAKMGYREGMGLGVSGQGMLDPIPVKVLPPKQSLDHALASSEADGGSGKKRSRGGKRKREKKFAELARAAKAEEAERSVFNFINSHLVSQEGSTTKVRKGSSVETNGLAKKEDRRSLVAYGEEVKELRIRVEKLEEMKNRNCKDKAFFEAASRKLEETRKALADAEATHASATSAVTRKEKEKKWLKF

SEQ ID NO: 67698 - protein, 265 aa, Zea mays
  Clone ID: LIB3592-079-G5_FLI.pep
LHANQHTAQHDSGAPRTRTAVHASPAHQSTPCPTSTTRRRPPWRGARLARAVQRESDERQVDRRSHVRRRPRAEQTTAAPEIVRIRFRPIHGGSPAEEAALVGAVVAGPRLRVRVRVRIRVVGVGVVDATQGVHGGARGGAFLRRRRRGAKGTAGGGGGGAVRGARGVPEAPAVRGAAPGGGGGVRVRAEGRHHHSLRRGPLPPRAGHHPPPRLRRRAPPWSPQQQQQPLPHRRLLPRLIGRSSIYTTWMMDGNRDRSMPRWAPL

SEQ ID NO: 67699 - protein, 318 aa, Zea mays
  Clone ID: LIB3592-093-F11_FLI.pep
LKMDPALLDDVIRRLLEVKNLKPGKNAQLSESEIKQLCAAAKEIFLQQPNLLELEAPIKICGDVHGQYSDLLRLFDYGGYPPQANYLFLGDYVDRGKQSLETICLLLAYKVKYPENFFLLRGNHECASVNRIYGFYDECKRRFSVKLWKTFTDCFNCLPVSALIDEKILCMHGGLSPELNKLEQILNLNRPTDVPDTGLLCDLLWSDPSNEATGWAINDRGVSFTFGPDKVSEFLEKHDLDLICRAHQVVEDGYEFFASRQLVTIFSAPNYCGEFDNAGAMMSVDDTLMCSFQILKPARKMMGGSTNNKSGFKSFRGW

SEQ ID NO: 67700 - protein, 194 aa, Zea mays
  Clone ID: LIB3592-094-F1_FLI.pep
YTCTALLSQLVAGDEVRGVCPGVVGDGVGDVVEEVLDGALAGDDGLHEEAEHGEHGKAAVLELLHLELGGGVRVVGEAQRVEGAAGVHLVEPFPERAAADAVALDEAHEHHLARPDGQDALCVHQVGVPQVVQPALREDLRVGREARGVPPVVAGELAGQVRRRLLGERAKILGAIRAVPYALGNALDGAAHGD

SEQ ID NO: 67701 - protein, 298 aa, Zea mays
  Clone ID: LIB3592-105-D2_FLI.pep
CLALAQKSLQAGLRHAPTFPPTSTPVPRVHLHLERCCGHGDQKAGSELPLPRQGKGHFLLTTAASSSSRTSLAMAVQQEPKNDAAAGSSSSSSSRRQDRRLHRPRLRRLVLHGLLRAAGGLLLLRQPLHGVRGVGVGVGGVRRRGGGRRRRRARGPLRPAPLRPRRVGHQLHPRGEVCHQTGAGVRRRRGRRVRVRRPVRGLPGVHGGDGGRARDRPPLGLAGGDAGLVPASQRRRHALRHRGGLHRRRRRRRRSRRPGSLFAAGLISHVVCDGGVGGGRQGQTRWSRSARRVMFGLS

SEQ ID NO: 67702 - protein, 149 aa, Zea mays
  Clone ID: LIB3593-003-H5_FLI.pep
IFLLIINSHTRSSVSQCQNVVSLHPVHFVQILSGFWQKRFFMAQVFMGLSNIFRAEGHQRDAANTELSLLRGTKPTKTHHGSDVRINVLRFMLGCLFSFLLFLLFFALTLPFLLLLLLFHYSLIQIFFSKGTWILPFLKCLKPFLDLFK

SEQ ID NO: 67703 - protein, 199 aa, Zea mays
  Clone ID: LIB3593-005-G12_FLI.pep
AASWPDPVRPLRSARARRDPAPSSSPPPPPPPPMAASTFSGDETAPFFGFLGAAAALVFSCMGAAYGTAKSGVGVASMGVMRPELVMKSIVPVVMAGVLGIYGLIIAVIISTGINPKAKPYFLFDGYAHLSSGLACGLAGLAAGMAIGIVGDAGVRANAQQPKLFVGMILILIFAEALALYGLIVGIILSSRAGQSRAD

SEQ ID NO: 67704 - protein, 466 aa, Zea mays
  Clone ID: LIB3593-006-B9_FLI.pep
FWDRLQPPSRLTRDLLWGLVLGVTVSISSTTLALLTQSWRRKQSIAKIPPRPIEVRSEEVVDGVIGLIGNTPLIRINSLSDALGVEILGKAEFLNPGGSVKDRVALRIIEDAEEQGLLHPNTGSVLFEGTVGSTGISLATVGRAKGYDCCIIMPDDVAVEKVQVLEKLGAKVERVRPASIVDEKQFVNLARARALAFGKVDITDSTHGHPHGEDLVVTAQPDDIGTGEDDDVVVPSSPTMIIRDKVASLIDATVSHKPRGFFADQFENQSNYWAHYDGTGPEILRQTGGNIDAFVSGAGTGGTIAGTGQYLKTHVPGIQVVLSDPEGSGLFNKVRYGVMFDSKESEGKKRRHQVDTVVEGIGINRITHNFALGLDMIDDAYRVSDEEAVAMSRWLVKHDGLWLGSSSACNLVASVRLAKRLSSGSRIVTILCDAGSRHQSKFWSDEYLSRNGIAHDSDLVSRLLDA

SEQ ID NO: 67705 - protein, 136 aa, Zea mays
  Clone ID: LIB3594-003-E4_FLI.pep
PTSSRTQVSRDKTVDMARTQSAVAVAVVAAVLLLAAAATTSEAAITCGQVSSAIAPCLSYARGTGSGPSASCCSGVRNLKSAASTAADRRAACNCLKNAARGVSGLNAGNAASIPSKCGVSIPYTISTSTDCSRVN

SEQ ID NO: 67706 - protein, 166 aa, Zea mays; identical to SEQ ID NO: 60216
  Clone ID: LIB3594-005-G7_FLI.pep

SEQ ID NO: 67707 - protein, 192 aa, Zea mays
  Clone ID: LIB3594-012-F9_FLI.pep
LSGYHSSALSPARPPRRTAAASQTYAAASLATAARPTSTAATGASRARAARAAAAAVAAVVRTWLASSPAPSSTASRARPGAGARARTSTPAADLVELQLRARGEGHRLRRARGPRQGGAGRRGGVQGGALVLDEQRARGGAAGVRRHHQGHQRRPRVRREQPRPDERARRLLQAVLPPARRRPRAQPHLLG

SEQ ID NO: 67708 - protein, 208 aa, Zea mays; identical to SEQ ID NO: 61723
  Clone ID: LIB3594-014-C11_FLI.pep

SEQ ID NO: 67709 - protein, 183 aa, Zea mays
  Clone ID: LIB3594-019-A7_FLI.pep
QQQIVNHSGITCNSRSEWGNNLGKFGLAARVVLRLGADLDVGGLINNLLHGVLDELVEGIELLAHEALLLEVGGYDGPGVVLSDILLLLSVPVRILIHLFPAPAAVPHLVVLLRAVPRVAAAVLVMPAVAHLHPLLVLVILHGQCDGVAGCYAGGGVGSMSRRAASPDSGEGVGRRGGRRGEM

SEQ ID NO: 67710 - protein, 151 aa, Zea mays; identical to SEQ ID NO: 40431
  Clone ID: LIB3594-021-G5_FLI.pep

SEQ ID NO: 67711 - protein, 415 aa, Zea mays
  Clone ID: LIB3594-021-H7_FLI.pep
TSPPPPRAVHAPPARRAAMAMRPRAALALSLAAGVPLVLLLLLLAPGARADDGSGGCGAAGGGEAAPGDRARARALKIAAFFSILVCGALGCCLPVLGRRVPALRPDRDVFFLIKAFAAGVILATGFIHILPDAFEKLTSDCLSGGPWQDFPFAGLGAMVGAIGTLVVDTVATGYFTRVHFKDSAAAAVGAAAVGDEEKQQQQAASAPHVDDGADGDGHGHGGHVHMHTHATHGHSHGASALVAAVGGAEGDKEHALRHRVIAQVLELGIVVHSVIIGISLGASQDPSTIKPLVVALSFHQMFEGMGLGGCIVQAKFKLRSIVTMVLFFCLTTPVGIVVGVGISSVYDEDSPTALVVEGVLNSVAAGILVYMALVDLLAEDFMNPRVQSRGKLQLGINASMLVGAGLMSMLAKWA

SEQ ID NO: 67712 - protein, 124 aa, Zea mays
  Clone ID: LIB3594-035-F1_FLI.pep
VNQSCIHFFGPPRSCGGARAPGPSLPRASRRVRRRRRRWRRPRRGAACAYAASPPCTRRTRSRPWTPPPSPWPPCTRRTRRTRRRRAAPPAPRPSYGGTGGGGGASPPPWIIKRARRGMTTGLN

SEQ ID NO: 67713 - protein, 253 aa, Zea mays
  Clone ID: LIB3594-051-E12_FLI.pep
PPPPPRRPKMISPDAARNVVGIIGNVISFGLFLSPVLTFWRIYKAKDVEEFKPDPYLATLLNCMLWVFYGIPVVHPNSILVVTINGIGLVIEAVYLTIFFLYSDSQKRKKAFAILAVEILFMLAVVLGVILGAHTHEKRSMIVGILCVIFGSMMYASPLTIMSRVIKTKSVEYMPFLLSLVSFLNGCCWTAYALIRFDLYVTIPNALGAFFGLIQLILYFCYYKSTPKNEKNVELPTVSSNVGGGNVTVSVER

SEQ ID NO: 67714 - protein, 251 aa, Zea mays
  Clone ID: LIB3595-046-F8_FLI.pep
SPPPPPPPGCWQVPVENDELGLPLQTARAMTSPPSPETAWLPADLKRVSSSSASTSLSFSLITSFSRWHLWRMAASCACLSLANSSSSSLLLWRARRFWNQTATCLGSSPSSAARCTFRPVSSFRSSRKLSSSISTCSSVSRRFLWSPPPSSSPPPPPHLAARRLLRRAPGRAGADQLLQRLSLSLSSVTTVSGYLERTRDREREREAAGERTKDREREGGWGEETCCARRSCRRSGSRSEDHRARHQLGC

SEQ ID NO: 67715 - protein, 119 aa, Zea mays
  Clone ID: LIB3595-050-D10_FLI.pep
QKVLLRCRVMSAKIRVVMKSFMSQSNQVSGLMPFTKKIGLPESRALYTVLRSPHIDKKSREQFSMHVKKQFVEQTAKPHELHRKFFWLKRLRIPGAQYEIQISFKTRLDMASLRSQAPC

SEQ ID NO: 67716 - protein, 187 aa, Zea mays
  Clone ID: LIB3596-004-H2_FLI.pep
ESAAPVIARPSLPKKPSPSFRLRNGSLNVLRLRRVFDLFDRNGDGEITLDEMAAALDALGLGADRPGLQAALGAYIPAGAAGLRFDDFQCLHRALGDALFGPIPEAVPEEDVEGDMEEAFRVFDEDGDGFISAAELQAVLRKLGLSEARNLATVQEMICSVDRNCDGRVDFREFKNMMMQGVTVWGA

SEQ ID NO: 67717 - protein, 125 aa, Zea mays
  Clone ID: LIB3596-005-F10_FLI.pep
NSRSSSRSSLTSHIQLVSSSSYTKAQTKNHAVSSSCVYLTTTAKSISRCNQEQKNQSAPFPCTHHQAQSRAELGVPRRAPRARVPLAHRRRRRRVPLGPPEVHAGELMLRRPTAGLGPRPRRRRR

SEQ ID NO: 67718 - protein, 153 aa, Zea mays
  Clone ID: LIB3596-028-A11_FLI.pep
LTITSRRVVVVVISLASASTARSPIACWPALLAMDRSKSYAGGRMQIEPYYGGGGGGGGGARADFRSYSYSAGGTGPSSYSYNQYEYGGPGAGEEEVKRSKSKRRWLADPDMDRKRRVAAYKAYGVEGRVKGSLRKSFRWVKDRYLDLVYGWS

SEQ ID NO: 67719 - protein, 113 aa, Zea mays
  Clone ID: LIB3596-029-G10_FLI.pep
RMGFEKQILRSGTGPKPIKGQKVTVHCTGYGKDRDLSKKFWSTKDPGQQPFSFSIGQGSVIKGWDEGVMTMQVGEVARIQCTPDYAYGAGGFPAWGIQPNSVLVFEIEVLSAQ

SEQ ID NO: 67720 - protein, 147 aa, Zea mays
  Clone ID: LIB3596-056-D5_FLI.pep
REREMDGRMFGLETPLMVALQHLLDVPDGDAGAGGDKASGAAAGGGPTRTYVRDARAMAATPADVKELPGAYAFVVDMPGLGTGDIKVQVEDLYLCGMWRGIIVVCSGGASGVRVCVPSVSVSVYQFLSDVSASVSYEPCRMLSVCS

SEQ ID NO: 67721 - protein, 142 aa, Zea mays
  Clone ID: LIB3597-001-G7_FLI.pep
QASTHSPTSSRTQVSRDETVDMARTQSAVAVAVVAAVLLLAAAATTSEAAITCGQVSSAIAPCLSYARGTGSGPSASCCSGVRNLKSAASTAADRRAACNCLKNAARGVSGLNAGNAASIPSKCGVSIPYTISTSTDCSRVN

SEQ ID NO: 67722 - protein, 173 aa, Zea mays
  Clone ID: LIB3597-004-C11_FLI.pep
SVLVLLGLLYYHHGAVRVMGTVVAHTSKNSPFNGSVAMAADDEHLGPVPLDSLAEDVPSVPLQRLKHSVARLCAEAFGFFDDAQGGALEIRLHVRQHIRGAWAGEADGGGGGGLGGDDDEAVLLRLARREEVLQCPLQRVEAVLALVDPYHHRHLPRRRFRPRRRRRRFLRHG

SEQ ID NO: 67723 - protein, 182 aa, Zea mays
  Clone ID: LIB3597-005-G4_FLI.pep
VSKLPNEREAIYGALDKWSAFEPEFPIIAAAKALGMLKRRRQWLRIIQVTKWLMSKGQVLTWTTYDTLLLALLMDKRVDEAESVWNTVIQTHTRSVPKRLFSRMILIYDIHQRPDKVLEIFADMEELGVRPDEDTARRIGKAFVASGQEEKEKHVLEKYLKKWKYIHFNGERVRVRRDGPLA

SEQ ID NO: 67724 - protein, 179 aa, Zea mays
  Clone ID: LIB3597-014-A9_FLI.pep
ASSHFIFKLVFASWNRITSQIGYVSEKHSYALPIQVNSRITVHTSCTITRLLQSIVDTFKSRILYQHNLFPRFRTRAYRHFSFLHPKYRADKVDKRGVGFAIPRRRVDLHAHRLVPNLCDGGDLGAGLGVYRYGHGRRRHQAEAAREPYSSGTRRRGGQRRRRPFGLASLPRSHLVSIE

SEQ ID NO: 67725 - protein, 164 aa, Zea mays
  Clone ID: LIB3597-021-D9_FLI.pep
AVIFVTVFPLISRAKTAHPWTQRNTVSRGDREARACRRLGPRPIVVVFASADQKENQKNIRPRALGAAVDLVGGLLDDALEPRPPHADAGAAAPPPVTAARRGLFGEQLPQVVVLLRRATGALLLGVVAEAALALALALARPLAALLLAPPVGGQGRGRDEEVD

SEQ ID NO: 67726 - protein, 224 aa, Zea mays
  Clone ID: LIB3597-043-G3_FLI.pep
SDGGDGAVELDDDELTSCTGGHHGRGGASGEDVVTHARRHAVEPGLQARHERVPGRAAHGLALELPAQLAPAGGGGGRDDAERGEEEAEAHVVVVHLVAEEAALGVVLQQRLVRPVGRRLAAGGGALAVAHAARRARGAGREAARGHARVPPVERQEVRQQRPRLVRRRLGHRRRHLPLPLPHPASDRRCRRRRHRWGGWVVVWCGVQVQASTDGRVGPSGGAV

SEQ ID NO: 67727 - protein, 290 aa, Zea mays
  Clone ID: LIB3597-046-D9_FLI.pep
RRRSTSSCGRRWTRTTATPWGRVNAPRCWRSASTRRRRPSGPSSAASTARRCTSTSSGAARSAQTPKPATPSAPAASARSASSRACPLAPAPSASTYSTTPLGSSASPSPEASTAFGTTAPSPPSPSSQTPRSAPSCSSPTSLTSPTATPRTTPASSPTPSSGSTSRSSSPSPRPTPPRPPQPPIPSFCRGRRSSGGCHRQGKKATASFVRFCYFNSLGKGFSELNLIMDGFGLDKEGPGQPKLGVIARARPVIISLSSPRFLLFIFTSSRIWLIPALCDWNHSLGIAAS

SEQ ID NO: 67728 - protein, 143 aa, Zea mays
  Clone ID: LIB3597-051-F3_FLI.pep
RSRPFLHHYNNNNNNWKGWAATQGVFNYHYHYGITITDPAREEGAGAQAHDHTLPPQHWLVKHDGHELSLEPVRDPQSNHGPRVLFLDVKVVQNHGLGLGQRARLVLAWWEAQQRVLQMRWHQWGLPAFVFIPRNRVVVAGIR

SEQ ID NO: 67729 - protein, 415 aa, Zea mays
  Clone ID: LIB3597-056-C7_FLI.pep
MGAVTSTVAARFAFFPPSPPSYGFEQPAPLPAPATPEPPAPATSKPPPPAPATPKPPPAGEEKGGGAVVELTGVPRRVNVEARRLRTKRGTEVVAMHVRQAGAKLTLLYSHGNAADLGQMYELFVELSAHLNVNLMGYDYSGYGQSTGKPSEQNTYSDIEAVYRCLIETYGASEDNIILYGQSVGSGPTLDLASRLTRLRAVVLHSPILSGLRVMYPVKHTYWFDIYKNIDKIPLVRCPVLVIHGTADEVVDCSHGRSLWELAEVKYEPLWIKGGNHCNLELYPEYIKHLKKFVGAIEKSPPPPPIDECMESSGPSDCTPAEPECTADSRKSTDCRDKARPSIDQRQSTDRRDKPRGSTDRRDKTRKSVDHPEKPRASVDQPDRPRKSIDRFGGMMKSVRLCNIDCFKVTATSGS

SEQ ID NO: 67730 - protein, 446 aa, Zea mays
  Clone ID: LIB3597-069-A4_FLI.pep
APQAPTRAHRSATPADAIMSTVAAAPTVVKSAPELVAPVGPTPGGTLPLSSIDKTAAVRVSVDFIQVFPPAVGAGGDQDTAVAAMRDGFAKALVPYYPVAGRIADASPGEPVVECTGQGVWFVEAAASCALADVNYLERPLLIPKEELLPRPPPEEKLEDLVLMAQVTKFACGGFAVGICFSHLVFDGQGAAQFLKAAGEMARGLPAPSVAPVWDRDAIPDPPKLPRGPPPSFTAFSFVTQVVEISPESIARIKDDFKDATGQTCSTFDAVTAVVFKCRALAMALPDDAEVRLGFAASTRHLLHGVLPSVDGYYGNCVYPVGITRTSKAIREASLPEVVGVMREAKEALTTRFTDWMRGGAKDDHYNVPLDYGTVTVSDWSRVGFNEVDYGFGEPGYVFTLNDDVNIVASVIYLKPPAPKRGIRLMLRCVEEPHAAAFAEELAKFA

SEQ ID NO: 67731 - protein, 418 aa, Zea mays
  Clone ID: LIB3597-071-E7_FLI.pep
IGVRSRSTGLPRRARSFSRCRRWWHAGDLHLRRLARGRRQQQLHRLPVEGQLPPERHRLLGPPAHRPVHERPDHRRHSRARDGTGRVRAAVHGPGDHGRRRDERRQLRVRRRRDPQRNRQYLRWAPESGRPDRQLREQPPRPDGAARGGGSGEPAAGRALLGHHRLQRLHQQLPHAHLLRAGARHDAAGRLHQRHDRQVPPTAHQAVPPGCPQDRGGERGADRLHPVPARDEPVGRHGLRRVPEPAGAGIQPAAQGPGGRAERRPPRLALRLRRRLPHLLRHHRQLRIPRVRGGGLGVLLRRRAVRRAAAVRADVAVLRGQVKVCVLGPLPPQRGGQRAHRPPDPRRRTHGHLAGQRTPAHRHLSSTVGSPAGATAQRYILICIHFFRKEISLPFFNKKKRSVWGDSNSGVTSFFVFR

SEQ ID NO: 67732 - protein, 124 aa, Zea mays; identical to SEQ ID NO: 41198
  Clone ID: LIB3597-073-C4_FLI.pep

SEQ ID NO: 67733 - protein, 145 aa, Zea mays
  Clone ID: LIB36-004-A9_FLI.pep
SIDRAGWIDIDLMGRQTTHSASAPGQGHLTGGEDLLAVGGVDVALHAGVPLVLAEAGRRVRLEPGAARRGGRRVPDDGGRARGQLRRRARRRGAGRGQRQQARRRERRQEQRDTRLALRHAAAWTLRCCGCGGRFGLWCGAGCCL

SEQ ID NO: 67734 - protein, 228 aa, Zea mays
  Clone ID: LIB3600-016-C8_FLI.pep
GRPAGRDGGALRGEVLLRGERQVQGPVQAAVRHRVHAHGHGVRRVPCRRVVRSQLRHPGAVHPPQGRQNASERRSREGDQVPGSSHLQKSIRGIHAGGVRPGPGGLAVGRDEGAPGARAHGEPRRRDDGGRAGHKRLLRPEPLGPASGHEDRRGAQGPVWPDRHAQRQERGRACCGGQSGGAKLRQHGQEQLLLLRQPLREAPGLTTGQAIRTPAVCRRNELRTRVVD

SEQ ID NO: 67735 - protein, 145 aa, Zea mays; identical to SEQ ID NO: 66205
  Clone ID: LIB3600-019-A7_FLI.pep

SEQ ID NO: 67736 - protein, 101 aa, Zea mays
  Clone ID: LIB3600-024-F8_FLI.pep
SYHLSPMAKCSSFQGLFWLLSMILLASFVAHARTTSGHTKEDSNARNMTMTKTRASGNILVSRNDDGPCYLDSGLNEYVCRKTNKCYKSLVLCVASCQPSS

SEQ ID NO: 67737 - protein, 221 aa, Zea mays
  Clone ID: LIB3601-012-H6_FLI.pep
LYHKNKSGSPLIIVPDERSEKCIHLLAVLIIQTYELATSSFLMHYALRSYLEGIVPPPRIQGHSATPLMVARLHSASVTRVAANPLCTSRGQPGRSSRRPSSCASGPGGIAPSMRMLSAVHRQYAGMSASSRQHLLFSSGHGRRGPMPQVRLVTYQRQLGSGLCGMAHPGTQEVPALALAAASTESRTAAARMRRRWLLLDDDAINSPVDGLSMDFLVQFA

SEQ ID NO: 67738 - protein, 134 aa, Zea mays; identical to SEQ ID NO: 37640
  Clone ID: LIB3606-012-D10_FLI.pep

SEQ ID NO: 67739 - protein, 311 aa, Zea mays
  Clone ID: LIB3606-013-B11_FLI.pep
LPLTVPLLNLGPSLLAAFPDRAPSTPRGATMPTPSSIIIPLIPAASTRSIIVPVMPAASTCSIIIPVMPATSSPSTAAAAAATVLVTITVVIVLTIAPPLRWRASASRMVPPGSRTPIQLPPEIPANLLHMHEITVATTVAAVLLKLPTGCFTEVGHRRILNNYRAPRVKAPLKSIVCCSCLFFLSELNIDIPNHVVSKVITNIQILNLTKLAQLLIDVLIEVLKMLLHLLRINRLALSINSRSYHIRALIHVSKHKSWRYSWPVVQTRTAIPMTTSPNLEVKRAVDPVLLGTKDRSQVLRHDSTCRLTTF

SEQ ID NO: 67740 - protein, 295 aa, Zea mays
  Clone ID: LIB3606-016-E6_FLI.pep
FLVSTPRPQTPASSLSRPPAPAPMSPPLEPHDYIGLSAAAAAAPPTPTSSSSSSSSPAPRLTLRLGLPGSESPDRDRDRDRCEDVAAALSLGPLPATPKAPAAVSAKRAFPDPAQRPGAAKASDDKQASPAAPPAAKAQVVGWPPVRNYRKNTLAASASRSKAPAAEDAASAARPMYVKVSMDGAPYLRKVDIKMYSSYEDLSVALQKMFSCFIAGQSGLHKSSSKDRLTNGSKVDALKDQEYVLTYEDKDADWMLVGDLPWDYFTSICRKLKIMRGSDAVGIAPRTIEQTGQNK

SEQ ID NO: 67741 - protein, 214 aa, Zea mays
  Clone ID: LIB3606-017-A3_FLI.pep
QRATCSRAHTHTSTFDPSTAYASPHTGIKVLLNIRSLQTVSLCLLGGLGGLLGRLCLLAPHTGRLLRRLLGQQNRVDIGEHTAVSDSHAAQQLPKLLVVPDRQKHVARNNASLLVVPGSITGELQNLSGEVFEDSGEVDGGAGADTLRVAALLQVAPDAADGELEPGLHGPRHRLLPWPADLAPGRSLLPLTPCSGAGGVHGRISASIGLSGTR

SEQ ID NO: 67742 - protein, 296 aa, Zea mays
  Clone ID: LIB3606-017-B9_FLI.pep
LSLPSFAMATVFLRSLAMAMADTALPPTHKLLPTVSLPLLPSSTRAAPLLLCASRRLPPAPLVASSDAVETSIEWVDDEEEEAGEAFDEEGEDVEEEVLASGDEGEGEYAAVEPPEEAKVYVGNLPYDIESEGLAQLFDQAGVVEVAEVIYNKETGQSRGFGFVTMSTIEEADKAIEMFNRYDISGRLLNVNRASPRGTRMERPPRQFAPAFRAYVGNLPWQADDSRLVQLFSEYGEVVNAAVVYDRETGRSRGFGFVTMVSKEELDDAISALDGQELDGRPLRVNVAAERPQRGF

SEQ ID NO: 67743 - protein, 131 aa, Zea mays
  Clone ID: LIB3606-022-H6_FLI.pep
ASPDLWSGKGGGQQGRAMVTKVICFLVLASVLLAVAFPVSALRQQVKKGGGGEGGGGGSVSGSGGGNLNPWECSPKCGSRCSKTQYRKACLTLCNKCCAKCLCVPPGFYGNKGACPCYNNWKTKEGGPKCP

SEQ ID NO: 67744 - protein, 141 aa, Zea mays
  Clone ID: LIB3607-004-F6_FLI.pep
FERAAVTVVARALRPDRSESRGVSAVKATASAMADEEHSERREEASELAPFDPTKKKKKKKVVIQEPSDEVDKLAEKTETLAVAEPAELNFTGMKKKKKKPVDLDSTLDELGDGEDTQDDQAAEDKSGVQKAGFIVISYEE

SEQ ID NO: 67745 - protein, 151 aa, Zea mays; identical to SEQ ID NO: 40431
  Clone ID: LIB3607-046-A7_FLI.pep

SEQ ID NO: 67746 - protein, 190 aa, Zea mays
  Clone ID: LIB3607-053-F1_FLI.pep
LTMAGTKLVSLGLIVLMSMGLANAVRVARFSTADGSGQGGGGGGGYVNGAGSGVGSGTGVGDSSPEGVHASAGGGGAGGGTSQYGGSAYGVGLGSGSASSTYSGSDGGSSSAGGAGGGGGGGKAGGSWDSSAQGSGSGVGSGSAYSNRYPYGPRYAGATANGNGGGTGNSQNGGAGGGKGSGSGFGDAIP

SEQ ID NO: 67747 - protein, 120 aa, Zea mays
  Clone ID: LIB3607-057-A8_FLI.pep
PAPLVSFFASSIAGFGGHGRRQRPEVQDGAREERREEQGRQRQPAGGQQEGHEHPVQDLHADLHLHHLRGQVQRTCGGEASQERPLPVLPPPQELVSSRSICSAQLKDKYYIYIYTLCVN

SEQ ID NO: 67748 - protein, 303 aa, Zea mays
  Clone ID: LIB3607-058-D3_FLI.pep
HQPLQLQDSVLVSGCASVGVVGCLRCVAVQRTLTDGEESKMEAYAAGAKFDCLLFDMDDTLYPLSLGINLACRKNIQEYMLKKLRIEESQVPRMCLDLYREYGTTMAGLKVLGYDFDYDDFHACVHGTLPYEKVKPDPVLRQLLLSLPQRKIIFTNSDKAHAARVLEKLGLQDCFQGIVCFETLNPPPPTETEKNSGSAGTILCKPSLASMEAVIEIAKLDAERTVFFDDSARNIAAGKAAGFRTVIVGSSALVPGADVALESIHNIKEALPELWEVAAAAAAGDRVDAVLRSTTAVETTVIA

SEQ ID NO: 67749 - protein, 286 aa, Zea mays
  Clone ID: LIB3608-001-E3_FLI.pep
YYTTSCNNSRRRHVLSHSCWLPVQGRRRVPHRLGVHDGVVGASDLVDLRRARAHGHHPALHLLGAGAVGLGHHEHLPDGPVAGGREQRRVLHQRVVHELVAGPHQQLRQGQVLRGALLVVLLLHIPWTHHDRCPLLPHAGDGHPLAVHEQPFGSIPSHELVEGDTQVLADARQRGGHEHGGGDLAREPLHGEREADAAVAVADEDKPVAVGGRGDRVQQRARVVLQGAHLVQARRVRARRRQVQRRHAVAGGFQRGGHLVPAPRAVAEAVHQHEVPAAADYFHYCC

SEQ ID NO: 67750 - protein, 197 aa, Zea mays
  Clone ID: LIB3608-005-C3_FLI.pep
LYLTMAGTKLISLGLLVLIGIGLANAVRVARYSSADGTGTGEGQGGGYVNGGGSGSGSGTGSGDSSPYGAHASAGGGGAGGGASQNGGSGYGSGSGSGSGSSTYSQGGYYSGYGESSNAGGTGGGGGGGQAGGYWNSNAQGSGSGTGSGSSYANRYWDGSSEGGANANGNGGGMGNSQNGGGGGGSGDGSGYGNAYP

SEQ ID NO: 67751 - protein, 240 aa, Zea mays
  Clone ID: LIB3608-009-C3_FLI.pep
GVATRVCFVVLVLICTSFRGGRAATFTFVNRCAATVWPGIQSNAGSSRLDPTGFALPAGASRAVPAPSGWSGRVWARTGCVQDAASGKVACATGDCGSGSLECDGRNAATPATLAEFTLDPAGGNDFYDVSLVDGYNLPVVVEPAGGSGGGGGAATTTTCAAAGCAADLSERCPAELRAEDGSGCRSACDAFGRPEYCCSGAYASPGTCRPTAYSQLFKSACPRSYSYAYDDPTSTFTCA

SEQ ID NO: 67752 - protein, 214 aa, Zea mays
  Clone ID: LIB3608-013-C12_FLI.pep
SSPSSSRHPTARRRRQRSSIRRLWQHLRRRLGVIGVQPSVRVPALHGAADALRQVLRRVLHGVPRRGPLRRPRRLLHAPRRLRPGHGQRLPQHVVQPEPAGLRGRSQAYGDGGHVRGEPVQRHGRRRRDHRHRGGRRVRQGHPAQALAVAWTSKLDGGWSDRRLAYTSLVGWWILCWILDGGSWLVAGEVHVFDVHIYILVPEFTRPGKVYRPQ

SEQ ID NO: 67753 - protein, 418 aa, Zea mays
  Clone ID: LIB3608-019-D10_FLI.pep
SPRRASESSEPPARPPPSPPPVPKANSFQVAMADQANQPTVLHKLGGQFHLRSIISEGVRARNICPSVSSYERRFATRNYMTQSLWGPSMSVSGGINVPVMQTPLCANAPAEKGGKNFMIDFMMGGVSAAVSKTAAAPIERVKLLIQNQDEMIKSGRLSEPYKGIVDCFKRTIKDEGFSSLWRGNTANVIRYFPTQALNFAFKDYFKRLFNFKKDRDGYWKWFAGNLASGGAAGASSLFFVYSLDYARTRLANDAKAAKGGGERQFNGLVDVYRKTLKSDGIAGLYRGFNISCVGIIVYRGLYFGLYDSIKPVVLTGNLQDNFFASFALGWLITNGAGLASYPIDTVRRRMMMTSGEAVKYKSSLDAFQQILKKEGPKSLFKGAGANILRAIAGAGVLSGYDQLQILFFGKKYGSGGA

SEQ ID NO: 67754 - protein, 340 aa, Zea mays
  Clone ID: LIB3608-021-D6_FLI.pep
HSNCSKKHLHLVIIIPYCPLDRSTMAAAAATRLSGGGVALLLLVLLAAGTSTSSAQLSTGFYSHSCPGVHDAVRSVLQAAIAREQRMGASILRLFFHDTPSFQGEKMAKPNNGSVRGFEVIDAIKSAVDKACPGVVSCADILAIAARDSVVTLGGPNWDVKLGRRDSRTASFSGANNNIPPPTSGLANLTSLFAAQGLSQKDMVALSGAHTIGQARCTNFRAHVYNDTNIDGAFARARRSVCPAAASSGSGGDNNLAPLDLQTPTVFENDYYRNLVCRKGLLHSDQELFNGAATDAQVQAYVSSQSAFFADFVAAMVKMGDISPLTGSSGEIRKNCRRIN

SEQ ID NO: 67755 - protein, 176 aa, Zea mays
  Clone ID: LIB3608-021-G9_FLI.pep
ALAPHRPLDPTACRANFFVYILAGPEEGQGPAAVVEAGQVRWWQAKEEEVEQGKAKGEGKQRGAVRPGYLRQAALGGAQVQANHPFHPLRASEDQRLPCSEGHQGLDGAWPHSDGLGPLKPADLHQGNQYIRMGKRSKMHCLPSLQEELVFRTVAIFVKSCQCYVTGDEFQVTATF

SEQ ID NO: 67756 - protein, 156 aa, Zea mays
  Clone ID: LIB3608-022-D1_FLI.pep
IRHETDRIDGGGIAVVKPRGRSDEPQDQETQARSERPWIMAGAVDRILFTGRRYYIYTPRRRPPPLDSRAPSPGRASSVAAAAGAAAAGAALAGVAVAAAALGGRLEAAGAGLGGRRGEDRGLDAAGGGGLHVRVHTAAVASAAAEAAGAAPALAA

SEQ ID NO: 67757 - protein, 221 aa, Zea mays
  Clone ID: LIB3608-024-G11_FLI.pep
VEQTSASLRKAKLFHKHRKTLSVRVGCLTVWYKQMNIIKVLIRCSCHHHNLTRHHHCSPLHHRNRRRIHHYDRLRFPFRRHRYLRSSNHRDHSYRLRLLQLHCRHQIRCHSHCSHQNRPRRQLRSHSQRHRCWSYLSRHGLHRMRRPPRNRTRTRRHLAKRHHRPRIHCHMRGQRLGTGHCRHRPRHRRSRSRIRSHSWFRSRRLHHLHRLVHLRWRGLPP

SEQ ID NO: 67758 - protein, 168 aa, Zea mays
  Clone ID: LIB3608-028-B2_FLI.pep
IEDPTNSWGRNGTEIIRQASAPALGDGAAAARVGVGLGAGLAVVVGRAALRARHVVPAQRVVADVAGAALQHPALAAAGGHARHVGLALRVHVQVLHALAHRASAARRPPAAAPRHDGGAQLGQVAARRRRRGKDGQEEREAGGGAEQARHGELSARARGGWSATLPG

SEQ ID NO: 67759 - protein, 532 aa, Zea mays
  Clone ID: LIB3608-029-C11_FLI.pep
ERLSSSSPTHRAKEGRERSPLLFSPSVVRLTALLERDLAAVPRDLVTDLSDKMVKICCIGAGYVGGPTMAVIALKCPDIEVVVVDISKPRIEAWNSDTLPIYEPGLDDVVKQCRGRNLFFSTDVEKHVAEADIIFVSVNTPTKTRGLGAGKAADLTYWESAARMIADVSKSDKIVVEKSTVPVKTAEAIEKILTHNSKGINYQILSNPEFLAEGTAIEDLFKPDRVLIGGRETPEGRKAVQALKDVYAHWVPEDRILTTNLWSAELSKLAANAFLAQRISSVNAISALCEATGANVSEVAYAVGKDTRIGPKFLNASVGFGGSCFQKDILNLVYICECNGLPEVANYWKQVIKINDYQKSRFVNRVVASMFNTVAGKKIAVLGFAFKKDTGDTRETPAIDVCKGLLGDKAQISIYDPQVTEDQIQRDLAMNKFDWDHPMHLQPTSPTAIKQVSCVWDAYEATKGAHGVCILTEWDEFKTLDYQKIFDNMQKPAFVFDGRNIVDPEKLREIGFIVYSIGKPLDAWLKDMPAVA

SEQ ID NO: 67760 - protein, 245 aa, Zea mays
  Clone ID: LIB3608-030-B5_FLI.pep
EFSGSGGPPRSLRHLGGRDGEQRQQPRRLDGAPRRGVQEEAPLRDGRGLGLVLLARGRRRRPVEGVGQQRRDGATERQGREVEHAGRQHLRRRLPRRRRRPRQRRDHLEVVLADPALVELEGRLLGPDAAAAVVVVVAVGLGGLLGRRRRVGAGEPLDDLLEVGGVGLHEGGGEGRGVDDARHGRLRLLLARRRGRRGGRGRGGGGGRGVGALRHGEELLHRRSNFHSRGEGGALVSRRGRADES

SEQ ID NO: 67761 - protein, 309 aa, Zea mays
  Clone ID: LIB3608-042-B7_FLI.pep
EDDEQTEPESIRKLMEGGSSVVKLLVGGVGLPELPPRRRHVEELYVLPAGAGDGEAERLISEPRESLPVSAPVPGHLDPRRAGALDPRGGDRAAAAHVLDADEQKVAGAGDVEAHAAAARAPDLLVQHRDDAAPDDADVLPRRLRHVEVRAPRAAPAAAGERVVGRAQVGGRHGHAGAAGLAVLPARARRVAGDEVALPARRAVVEQGLAQRRVVHAVPGAVQVAVPARAAHGPGSVRPAVERRRACRPARHDGGRRCSQNAPQNQHHPGRHDCATTCLLATSTGTYVRIRKRELASTRIVLPLGLLRV

SEQ ID NO: 67762 - protein, 204 aa, Zea mays
  Clone ID: LIB3608-044-C12_FLI.pep
SNHGSHLAFIHNGSSHPPPRPPPCSSSTARRDGLHRRRLRRVGHRPQLPHLVAEIQLHRRRHPRVQLREGAAQRVPGDAGRVPDVRAAGEPVDARVGDGPRPRQPHRAGGLLLPLQRRRPLPRGHEVLYRRGRATPSAPAAAAPAGPDAPATAAAELGLRAEDFTAARVGGGGADSIPRGDRPARSHLIVVVVGRYGGYQYFFL

SEQ ID NO: 67763 - protein, 226 aa, Zea mays
  Clone ID: LIB3608-044-E10_FLI.pep
HVSSCPFLTAAAATRSSNRAGAQPASSGPSPTATAPATALNTMADPAEHRPAEEDEEAAAAGEDEDTGAQVAPIVKLEEVAVTTGEEDEDVLVDMKAKLYRFDKEANQWKERGTGTVKLLKHKETAKVRLVMRQAKTLKICANHLVVATTKMFAIRFGSVENCKKFKDIVEEIAEEQGKTEVKENEEVSIAAADLVQKLTVTEASKEGDAEEEEAPASDHKKDAKG

SEQ ID NO: 67764 - protein, 217 aa, Zea mays; identical to SEQ ID NO: 65920
  Clone ID: LIB3608-045-D2_FLI.pep

SEQ ID NO: 67765 - protein, 179 aa, Zea mays; identical to SEQ ID NO: 38879
  Clone ID: LIB3608-048-E3_FLI.pep

SEQ ID NO: 67766 - protein, 258 aa, Zea mays
  Clone ID: LIB3608-053-H2_FLI.pep
ENQGNADVGSLLGREVGLDVVHLAAADAEGLGEDVGGHGRHGAEERHGDGLRALELAVEGGDDGGGAVPPVLLEVDEAAREDEDVALGDGLGEERVGGGDEADLERALEDEDDLGGARVRVRRVLAARRVVDARHGDAQRVHARELLHVGRRHHGARRVVGVARVPQPVEEEVVRRKVRLAREPVQLHRGGVVSRADVLQHVGVTGEGRGGEREDDGAGRGDVEVDLRHERSVSGWSAASLISARWRVMSSSVLSCVS

SEQ ID NO: 67767 - protein, 262 aa, Zea mays
  Clone ID: LIB3608-054-F8_FLI.pep
LHLYPRLCSSSPSPLPIRSSSKLSHPDMASSPPSSASLRQRPAAAAATPDQQHEPPRLEDGLLPNQGGSPATSALSQALSSTANLANLLPTGTLLAFNLLAPTFTNHGACDATTSLLTRGLLALLALASALACFTDSLKSPHDGRVYYGVATRTGLWLIHYPPGAPPLPEGATGRYRLAFIDFVHAALSAAVFGVVAARDRDVVVCLYGPTPDRATQDLLDVLPLGVGVLCSLLFVAFPTTRHGIGYPVVANAVAAATATSS

SEQ ID NO: 67768 - protein, 138 aa, Zea mays
  Clone ID: LIB3608-056-F1_FLI.pep
RSPPASLGFPSPSTISASPDLDLSPRGRARRPPGCRSNPPSSRCQRRSATDAPQGRTRAGISRADQYYSSYPAGTELLTDTAKLYKAALGNCFEVDEWGPIEFSIMAKHFDRQGKPPYAYHAQYLAHLLSHGQLDGSG

SEQ ID NO: 67769 - protein, 313 aa, Zea mays
  Clone ID: LIB3632-008-C11_FLI.pep
LQASFALASVFAILNPVLPTTPMEAPLLLPISTASSCIEIAEGAVPSGPRARSSSSMPSAQSFVLRVVTVVAVACASLFAQHEAGKGFAVSVANDLPRGSAAARRFDLLLVSNGRAERALLRASRAVERALFPDPSFPRRQVRRVTVRMAARNLTGAAVHSAAPGEYVVSLGPGLASSAPAAEAALRRAIARVWLWDGRGAAPARVTESMVDYLASAAAEVEVEVEAPPSAAGCGMSARLLRLLEARREGFVARLNRAMRDRWSDAAVDAALGAPARLACHDQKKGATALTGRGTTTSPRWTPDAARGSSVAT

SEQ ID NO: 67770 - protein, 336 aa, Zea mays
  Clone ID: LIB3632-012-C2_FLI.pep
FRGDSLGKIFVGGVAWETTEESFSKHFEKYGAITDSVIMKDKHTKMPRGFGFVTFSDPSVIDKVLEDDHVIDGRTVEVKRTVPREEMITKDGPKTRKIFIGGLPPSLTEDELKDHFSSYGNVVEHQIMLDHSTGRSRGFGFVTFESEDSVERVISEGRMRDLGGKQVEIKKAEPKKHGSDHSSNGRSNHGGGAYRNSYRSGGGAGSGSSGGGGGYGYGGAYRSAAAGYGYDGGAGAGYGYGRGYGYGGNAGFGSSFGGGYGGSMYGGAAYGAYGAYGGGAYGGGAYGGGAYGGGAAYGGAPGGYGTGGYGSYGGAGSTGGGSTGARGSSRYHPYGK

SEQ ID NO: 67771 - protein, 500 aa, Zea mays
  Clone ID: LIB3632-013-F6_FLI.pep
PPPPIPCPPPRSSEAARGGLPSRRADERASRWGRFGCSFCPFGEGECGDGEAAGGEAAARGEGREAEGEGEDSCSGGAGGRGASGRETKPSTDDACQDQSVPPASGSATTSNTGSISPSSIVGEELKLAFQLRRFTFSELKCATRNFRPESLLGEGGFGCVFKGWIEENGTAPVKPGTGLTVAVKTLNHDGLQGHKEWVAEVDFLGNLQHPHLVKLVGYCIEDDQRLLVYEFMPRGSLENHLFRKSLPLPWAIRMKIALGAAKGLAFLHEEAERPVIYRDFKTSNILLDADYNAKLSDFGLAKDGPEGDKTHVSTRVMGTYGYAAPEYVMTGHLTSKSDVYSFGVVLLEMMTGRRSMDKNRPNGEHNLVEWARPYLGERRRFYKLVDPRLDGNFSIKGAQKTAQLAHACLSRDPKARPLMSQVVEVLKPLQNLKDMASSSYYFQSMQHERRTALANPYGSQSMKAQSTFARNGQQPMRSLSYGPHASPYRQSPRLDSKRQ

SEQ ID NO: 67772 - protein, 418 aa, Zea mays
  Clone ID: LIB3632-015-H4_FLI.pep
TQTHREGHPSPKIDRSIATNFILATRQQLLTTGGYAFKAPDHGDDQCSHRTAHLPGDDLPALVVALAPLPEHDVGAVAHAAVVLVAVEGVEVEVDVVDHADAAEAVADVAALRPQHRLVLVAGVVGHQLDRVALALGVLDGLAGDPVDEREGRVPFLVLDAVAVAHVLDPVLVLVARVGGREAHGAVADRGAEPLVGLAVDADGGLAAAAEAGRVGGAAASRGVGFVAPGQDLPALVVSLGPLPQHHGGAVVHAAVALVAVEGVEVEADVVHHADAAEALAHVAALRPQHRLVLVLRVERHQLHRVGLAEGVLDGEPSGLVDEGERRVALLVLDLGAEAHVLVPVLVLVARVGGGQHHVAVADGEAVPLVGLAEDLEGGLVHAAVRRRVLAVVAVVPEAEHLALFSALGFWGRVSGES

SEQ ID NO: 67773 - protein, 450 aa, Zea mays; identical to SEQ ID NO: 46482
  Clone ID: LIB3632-016-D12_FLI.pep

SEQ ID NO: 67774 - protein, 362 aa, Zea mays; identical to SEQ ID NO: 57635
  Clone ID: LIB3632-017-C11_FLI.pep

SEQ ID NO: 67775 - protein, 399 aa, Zea mays
  Clone ID: LIB3632-017-D11_FLI.pep
MAAAGTIPGAAAAIGASVSQRQRRVGAPSFVAAYVSEGTRLVCRRQLRPAPVLASSFISLSHPARRRFLCDAAAGASSGPAGEAKPQGFAERYPALVTGFFFFLWYFLNVIFNILNKKIFDYFPYPYFVSVSHLFIGVLYCLIGWSFGIPKRAPINSTLLKQLVPVAVCHAIGHVTSTVSFAAVAVSFAHTIKALEPFFNAAASQFILGQPVPLTLWLSLVPVVIGVSVASLTELSFNWTGFINAMISNISFTYRSIYSKKAMTDMDSTNLYAYISIIALFVCIPPAIIIEGPQLVQHGFKDAIAKVGLTKLISNFFVVGLFYHLYNQVATNTLERVAPLTHAIGNVLKRVFVIGFSIIAFGNKITTQTGIGTSIAVSGVALYSFIKAKIEEKKQIKSA

SEQ ID NO: 67776 - protein, 441 aa, Zea mays; identical to SEQ ID NO: 58947
  Clone ID: LIB3632-017-D12_FLI.pep

SEQ ID NO: 67777 - protein, 285 aa, Zea mays
  Clone ID: LIB3632-018-C9_FLI.pep
RQAGRRGGQEDRRPSRAGARDGNGTGPQNLRSFLPARPCPSTRRSCRPRPTSALSSSRGIGYATGCAMVLWVFGYGSLIWNPGFDFDDKILGFIKGYKRTFNLACIDHRGTPEHPARTCTLETDDEAICWGIAYCVKGGPEKELKAMQYLERRECEYDQKISIDFYKEGDPLKPAVTGVLVFVSTPDPIGNKYYLGPAPLQDMAMQIATANGPTGYNRDYLFSMEKALASISHEDDSIIELANEVRKVLNRTKETKITGANASLKSHAPLVHLSALPEGTVVDSR

SEQ ID NO: 67778 - protein, 242 aa, Zea mays; identical to SEQ ID NO: 67696
  Clone ID: LIB3632-025-H11_FLI.pep

SEQ ID NO: 67779 - protein, 131 aa, Zea mays
  Clone ID: LIB3632-034-B12_FLI.pep
SHDSDKPTTARDELTRVPETFLTARLVGTARKRRICRRGEHREEPISLAAEAVEGAALALERVDEPRDALDAAPPRQPPDRRLGDALDVVAQHLPVTLRAALAEPLATLTAPGHGFFRSGLWWAGEFPRKA

SEQ ID NO: 67780 - protein, 255 aa, Zea mays
  Clone ID: LIB3632-034-D6_FLI.pep
FAQIRRLIPTPAASCSGHSSPLPSPLCRRPLPPPQQPRAPRRCDPHPPPPPAPRPAEAGPTTTNTTTAATASPSLRRRAGTPHRRPRSISSSCFSCSSRLPSCSPPRSRTSRARSPRCSPRRPPPRRSPTPPPHCLTWPRRPCSSPPRSSPVAGSRGAGAATRAGAGSTAGGAEASMWREIEALPWKGGQGGNNPDYECLRAELRRMAPPNGRAVLLFRNRCGCPVAKLEGWGAPKSKRRNKKGTQGSFHDRGLR

SEQ ID NO: 67781 - protein, 511 aa, Zea mays
  Clone ID: LIB3632-036-H10_FLI.pep
CPLASKAPTHQSIERARCGMEHKDGGTASAGGLPAGSSLCSGSPLLDAPILRRLYAGQILARWGARMWEFSVALYMIRIWPDSLLFAAIYGVVETSSLVVLGPVVGTLVGRATYLQVLGIWLLSQSISLIVAGTSVTTLLMYANLRATSFPAFMALVAVTNVSGALAALSALAGTILIEREWVVVISSGHPPSVRTGINSVVRRIDLGCSLLAPVLSALVISLASTQASAAVLALSTAASAGLQYCLFVSVYNGVPALAAPRQPRASDAERPPPVPMTVAPAEAEPTQALDWRARLADKLSVASGWESWVVYARQDVALPGVALAFLYFTVLSFGTLMTATLDWKGIPAYVISLARGFSAIVGIGATLLYPLVHSRVSTLRTGLWSIWMQWCCLLLCVASVWAATGVASAWMLMAGVAASRLGLWTFDLAVMQLMQDGVPDHERCVVSGVQNALQSVFDLLTYVVAIVISDPKDFSKMIVLSFSLVTCAAVMYTVHAYRAQKAACTSSTST

SEQ ID NO: 67782 - protein, 452 aa, Zea mays; identical to SEQ ID NO: 52903
  Clone ID: LIB3632-038-G6_FLI.pep

SEQ ID NO: 67783 - protein, 242 aa, Zea mays
  Clone ID: LIB3632-045-F12_FLI.pep
MAGLALAPSIHQWSEVNNSTPAKHTQVRSQQVMARTREKLTLLVAAVAVGLLLAGGAGAGVASAARGREGRRRVHLRLYMHDVIGGPNRTAIRLIWGVGPPHASMPGRTFGDTVAIDDLVTDGPGVGADSRPVGRAQGTYMLSSQHEEVIVVSITVVLTAGPYNGSTLVVAGRDRIYDQTRELAVVGGTGGLRGASGYVLWTTAKVWSEVHMVLELDVHASVPLPDEDHDDNDVLVLGSRDA

SEQ ID NO: 67784 - protein, 282 aa, Zea mays
  Clone ID: LIB3632-047-B8_FLI.pep
THTRRDQIDTLRSRSNKSKKKKNLARHNYTGLAKILKKFDKRTGGVNAVSSRGSAADPSSSSAAEADFLTLLDAEIDKFNAFFLEREEEFVIRQRELQERIGRAGGPEATLARVRREVVDLHGEMVLLLNYSSVNYTGLAKILKKQIEESLPEWRSQFLNYKELKRRVNAVSSPSSRGCCGSPSSPPTSSPSWSGTARPRWRPSSRPPPAGTSTGARRWPSPGRASSATPSPLCSPCRRCAAGAPPSAISRCRPCSRCRSRTGSSSPLTARRRRRPSSPPSD

SEQ ID NO: 67785 - protein, 232 aa, Zea mays
  Clone ID: LIB3591-121-D7_FLI.pep
RVVAGTHLIGLSSRVDRRRQVQIERQGRVGRRRVVVVVPAGVFAEHGRRGSAVAVAVLVVVLLHGRGGAPRRGGDAGRAAAPRLDGAAVARRGRHRRGGCGGGGGGGGAGPVPRRGSRGAGEVGAGGGPTEGSGGGVVGARGGLGGVEGAEPDRGLLGRVPDLGGVAPRRPPPHAAVPDLGRRRGLLRLRPAHRGQRGVGGRRRAHAGARRARVWPLVYFSSPAQGSPTLVS

SEQ ID NO: 67786 - protein, 233 aa, Zea mays
  Clone ID: LIB3594-002-E7_FLI.pep
IRLKGIFLQPKQRTSLTCPHGAAHQREPLKKYDYMMGIRISNSPRGRYALCVLCRPPPSSRADARAQLGAVQEAGDDAPRATLRLDARRARGGRRLRLRLRVQVQPGTRRRGGSADDGYRLVGPRLRWLLLRGGRGLRRRRARGRRREVLPGEAGPPRRRARGGPGAGAAQPAGGVADAPQDGVELLDLGVRGLVDGDRGGGGGGGGDVGVGALALAPGGGRARVHGLTGTAC

SEQ ID NO: 67787 - protein, 172 aa, Zea mays; identical to SEQ ID NO: 45169
  Clone ID: LIB3592-005-C3_FLI.pep

SEQ ID NO: 67788 - protein, 322 aa, Zea mays
  Clone ID: LIB3600-029-C2_FLI.pep
TATERRAAGGEKWRKKTRMATYFTLNTGARIPSVGLGTYKAGPGVVADAITAAVKAGYRHIDCAPLYKNEKEIGVALNKLFDDGVVKREDLFITSKIWCSDLAPEDVPLAIDSTLNDLQLDYLDLYLIHWPFQIKRGSELSPENFVHLDMPKTWQAMERLYGSGKARAVGVSNFSTRKLADLLAVARVPPAVDQVECHPGWQQARLRAFCHSSGVHFSAYAPLGRMKAVASDPVVASVAESLGKTPAQVALRWGIQQGQSVLPKSANESRLKENIDLFGWSIPDELCAKFSEIEQVKQIRNDAFVHPQSIYKTIDELWDGEI

SEQ ID NO: 67789 - protein, 452 aa, Zea mays; identical to SEQ ID NO: 52903
  Clone ID: LIB3632-057-A3_FLI.pep

SEQ ID NO: 67790 - protein, 418 aa, Zea mays
  Clone ID: LIB3633-002-B11_FLI.pep
TQTHREGHPSPKIDRSIATNFILATRQQLLTTGGYAFKAPDHGDDHCSHRTAHLPGDDLPALVVALAPLPEHDVGAVAHAAVVLVAVEGVEVEVDVVDHADAAEAVADVAALRPQHRLVLVAGVVGHQLDRVALALGVLDGLAGDPVDEREGRVPFLVLDAVAVAHVLDPVLVLVARVGGREAHGAVADRGAEPLVGLAVDADGGLAAAAEAGRVGGAAASRGVGFVAPGQDLPALVVSLGPLPQHHGGAVVHAAVALVAVEGVEVEADVVHHADAAEALAHVAALRPQHRLVLVLRVERHQLHRVGLAEGVLDGEPSGLVDEGERRVALLVLDLGAEAHVLVPVLVLVARVGGGQHHVAVADGEAVPLVGLAEDLEGGLVHAAVRRRVLAVVAVVPEAEHLALFSALGFWGRVSGES

SEQ ID NO: 67791 - protein, 184 aa, Zea mays; identical to SEQ ID NO: 38788
  Clone ID: LIB3635-001-F5_FLI.pep

SEQ ID NO: 67792 - protein, 155 aa, Zea mays
  Clone ID: LIB3635-001-G10_FLI.pep
AANHLPATQRARAAHTQLARSSSRAAAMAASMISSSALAVAPQGLPPLGRRASSFAVVCSKKKIKTDKPYGIGGGLTVDVDANGRKGKGKGVYQFVDKYGANVDGYSPIYNEDDWSPTGDVYVGGTTGLLIWAVTLAGILGGGALLVYNTSALSG

SEQ ID NO: 67793 - protein, 210 aa, Zea mays
  Clone ID: LIB3637-221-H8_FLI.pep
ARGGMHCSNTGDECFLHIGRNNEIREYCSVHRSSKSCDCTVIGDNNLIMGSSHIAHDCKIGNNNIFANNTLFAGHVIVEDWTHTAGAVVVHQFCHIGSYSFLGGGSVVAQDVPRYMMVAGDRAELRGLNIEGLRRNGFSDQEVRRLRKAYQRVFMPTITSKSSFEDRLAELEQEVELSESPAVSCMVESIRMSFVQGHRGICKFRSWNSS

SEQ ID NO: 67794 - protein, 234 aa, Zea mays
  Clone ID: LIB3637-239-B6_FLI.pep
EAQTKCTIRRARRFRLPRLLSSHFSAPRPKHEHQMLRAAIVAGLPARLATKRPQAVTVAARVALTSTEVRSPLLRCGRVPVPGRRVCLCSAAADDSGSEAESSAAEGEEAARGEEGEGENVSAIVPAVLRPEDCHTVIALPLLQRPLFPGFYMPVYVKDAKLLRTLDENSKKSTPYAGAFLVKNEEDNSIHELKGKELLNCLHDVGTLAQITRIQGDLVVLLGHHRIQISEIVS

SEQ ID NO: 67795 - protein, 263 aa, Zea mays
  Clone ID: LIB3637-254-A6_FLI.pep
STGKHPRPINSAPKMTKANKHWELDTGAHGGAHLIQELLKELEHLVNVIRQDVLGRFRRRETLPPRGEERRPRHVQDPDADHLLEHLEPAQVAAEDHVHEADGVAAEVVPPAGAVLERTLQRLQRRDDPRRRVRLLPVLPREQDRVPWRPDLVVDEGGPEAGGGACVGFGWEDRRERAAGESLVEVLNDGLRLGDRLAGVDEHGHFLVHRVGIEEELALAEEVLLHVLVAEALEVEHDLDPVDVRAVPHAQQLQLITSIGGHC

SEQ ID NO: 67796 - protein, 243 aa, Zea mays; identical to SEQ ID NO: 58204
  Clone ID: LIB3637-255-A4_FLI.pep

SEQ ID NO: 67797 - protein, 585 aa, Zea mays
  Clone ID: LIB3689-204-C4_FLI.pep
QRPFSMAIVVVVFHNPIGRPAARTHPPPAAPATARRGFKILKMAPPARPPRVGEDLEEGTGESSPPPRSPRASNPDCHEVQRKICERLRQTGRHDRTLADPTFNARFARHLERLPRRYLLDLDLDDKLEDVLLHWGILDECADPNKRPVFRARFIKYKTVPREDDGIGHDQDHEEPCQKLLEDLSLERRKIADRNDSLSISSRGDLKTVLLHEIIFSSIDKPKLLSRLTALLSEVGLNIQEAHVYSTKDGFCLDVFVVDGWKTEETDELIAAIKETLTQKNASPSNSTNSSTPEKIVDLQQQVGDYEIDLSMLTRGDKIASGSSADLYRGTYKGHDVAIKCLRSLYLNNPSEVEFLQEVLILSGVNHENILQFYGACTKHPNYCIVTEYMPGGNIYDFLHKQNNFLDLHKILRFAIDISKGMDYLHQNNIIHRDLKSANLLLGHDQVVKIADFGVARHGSQQGQMTAETGTYRWMAPEIINHKPYDHKADVFSFAIVLWELATSMVPYDNMTPLQAALGVRQGLRLDIPGSVHPRLTKLIRQCWNEDPDARLTFAEITKELQDSLHHIEAPKGASRRSRAKMQKK

SEQ ID NO: 67798 - protein, 719 aa, Zea mays
  Clone ID: LIB3689-207-F4_FLI.pep
RGSRFDPPPSVISCFSGNVLSRKSLAPAASTCLLGLRFPRAKAWTGQPAGALFFHSLSWSLVLSVRSNFCGARRYCGNRCSFLDSGGGGGARVPFVAPWGCEGGAARGLGFDRTQRPSRGGGGGRRRMESVKGWVAADYAAEPMASVQHSLRVAYVVFSFCAAFFLGGIKAVVVGPVAAAVMIVGNVGVILVLFPAHVWWAIYSLIKTDRINAGLKLAVLLALPVLFGLWLGLGILGSALVGLGYGFFTPWISTFEAFRQESEAKKFVHGIVDGTWGTIKGSCTVVRDFADICFHSYPVYLKELREGSQNREPHSIRLLDVPSCIVVALLGLVVDIPLYTVIALVKSPYMLFKGWQRLLHDLISREGPFLETVCVPIAGLAILFWPLVVVGSVLLAIVSSIFVGLYGAVIVFQERSFQRGVSYVVAMVAEFDEYTNDWLYLREGTVLPKPSYRKRKPSNSTEFSVRTNASGGKGADHPPGPSEAPAMLVPNLAPARSVREAIQEVKMVQIWENMMKSCEQRGRDLLNQNVITAAGLAEWLRGAKEGGHHETVSLGLPSYSLLCTVLQSIRAGSGGLVLGSFEVNQHNRPQDRLLDWFFHPVLVLKEQIQALRMTEEEVRFLEKLTVFAGNVAGAGAGGWENGAGMMVVPQDPVRLAQIQAISRRLVGIVRSLSKFPTYRRRYRHVVKLLIAYSVERESSGRSSASGRSASYFEITQLDV

SEQ ID NO: 67799 - protein, 342 aa, Zea mays
  Clone ID: LIB3689-214-G10_FLI.pep
LSSPRLLTKSVMGLRESLLGCFGAGGGDQQEQGHEPAAARPAASRRPGGKPTLRRLSTANLRSLSLQDLSRKLETTKLHAFTLDELRAATRNFSAANFLGEGGFGPVYKGFVDGRLRPGLQPQHVAVKYLDSDGVQGHREWLAEVVYLGMLSHPHLVELVGFCNQDDHRMLVYEYMPRQSLENHLFKNLLASLPWSTRLKIAVGAAKGLAFLHEAETPVIYRDFKASNILLDSDYTAKLSDFGLAKEGPQGDATHVTTRVMGTHGYAAPEYILTGHLTARSDVYSFGVVLLELLTGRRSVDKSRRGREQSLVDWARPYLRRADRLHRFMDPGLEAQYSPRAA

SEQ ID NO: 67800 - protein, 389 aa, Zea mays
  Clone ID: LIB3689-217-C11_FLI.pep
NFFGFFVCLFWFTSCSVFNVTDQDGSKLHNREVIDHIQKCLESDGYLVPPANGYALPEDQFTSIELTGADRPGLLSEVCAVLATLSCNIVKAEVWTHDGRTAAVIQVTDEATGRAVHDAGRLSRVQELLRDVMRGDGTCNHGGTGISAERRLHTLMLDSVGGGGAEEAGGGGDESGGCGVARPKVVVMDCAERRYTVVILRCRDRPKLLFDTLCALADLQYVVFHGTVDAEGASKDKEAYQEYYIRHVDGHPVRSDAERARLVRCLEAAVERRASNGLELEVWTEDRVGLLSEITRVFRENSLSIIRAAITTRDGKAEDTFYVSDAYGNPVDGRTMDAVGEQLGHAVLRVKRGGHDAPVKHEAEGGAVSVLGSLLKSSFQGLRLIRSYS

SEQ ID NO: 67801 - protein, 392 aa, Zea mays
  Clone ID: LIB3689-221-G1_FLI.pep
GIGRGEEKILLTSLMDLPMLVVALEKVERSSGTLIGSSIATIQKSAAPEMLLALMDEAYTGSAVEEPSGNSGSDDSGPLDLTDPMFLDLLKDENDGIAAKHWISPTISSTLQAAFNSPQSDRLKQSLEMAPRFLTLYFATALRDVNDSLLCALIPVVMSRYAAMFPDKVFSFKVRERLSDFILAAFQRSPNIIAVLKKPITDRLGEAHDNLAKTELALHLCWAIGEHGAGGVGHKDVARELFENLELLLYENLATSRLGLSQEPGSDSMGASSRKSSQARLLCFVVTAIAKLATCHSELLPRARVSLGKVARSRTSDRRVWQRACDYLGLMNEPAICLSVLGPSTAQGNGPGIVNWSEGGTKMVAHVPFYLLAQQKGPPSHNFSFADLLPTE

SEQ ID NO: 67802 - protein, 434 aa, Zea mays
  Clone ID: LIB3689-221-H3_FLI.pep
KRKFQTWSEQEIATKFRYSTSHRTAHHDQIPKGPEFDHTFTTHHAKSRRAQLQTTSRADRHSALSRFISLRLDRHNLDLVQHGAAERDAVGDLGVVVGAVEGEAGADAAGHEPERRRLEPAFPRGIERHLLRDVARERLHQHRAVAAVPGVADGERQVVGAVGHGADDLRDGALPPGHQLHRVLPRGDREVGRVNKPHRLERLDDPAGQRRRRVLLLGGQQNADRRVPEHLGTDLEAVVLDQVVFGRVRRGQLLDGDSVQQRAARGVLLHAGVGERDLRDGGGGAEAPGPGVGGRAAVERAHGDVGGRRERRRHRHAQGLVLRARPRRRERERVQRPRPHRHVLRRRRAAAEAQRVHAVRHREEHAPGLGTARDVLHVALHRPPRQRVAPHDEGLVQPPRRRLEVAVDEHAFGVLSMTRRRNLNCRIFRLVTGR

SEQ ID NO: 67803 - protein, 747 aa, Zea mays
  Clone ID: LIB3689-225-C11_FLI.pep
GIMGKSSKKSSVKAAPAAVSVPEGKSAKKGKRNAEDEIEKAVSAKKQKTVPEKAVPVKKQPPPKKVESSSSEEDSSDSEVEVKVQPKKVIQPKKSTQPAKQESSDDSSSESSSDDEPSKKPVAGSKKPPASSSSSDDSSDSDDSSSDEEPAKKPTVLSKKPTVLSKKPTVLSKKPVTAVSNGSKQVKPDSSSSDSSSDEDEKPAASLKKPVVASVQKKTQESDSSDSDSDEDESEDDIPAKAQVVAKKKEESSSSSDSDSDSESEDEKPAANLKKPPVPSVQKKTQESDSSDSDSDEDESDDIPAKAQVVAKKKEESGSSSDSDSEFESDDEDSNAKTVQPAKAAAIKKKEDSSESSETDSQSDSEDSEPEKPTVPAKRPLATNKKNEQSSEKSDDSSDESSDESDEEPPQKKTKNSAPSGAAKAATNVSKKKSSSDEDDESSEESSDDEDTEQVETKETSVVTTQKPAHNEPKTPAKSQSQATGSKTIFVGNLAYSIEREQVKEFFEEAGEVVDVRLATFDDGSFKGFGHVEFATVEAAQKALEFVGHDLMGRPLRIDMATERGAYTPSSGKDNGSFKKFAPRSGNTVFIKGFDTSGGEDQIRTALEEHFGSCGDITRISIPKDYDTGVSKGMAYMDFKDPDSLNKAYELNGTDLGGYSLYVDEAKPRPDNSGGFSGDRGGGRGRSGGFSGGRGGRSDRGRGGSRGRGFGGRGGRGDRGRGGRGTPFRQTAGTASTGKKTTFGDDD

SEQ ID NO: 67804 - protein, 152 aa, Zea mays
  Clone ID: LIB3689-226-G9_FLI.pep
DVTGGRLYGRAVGGGGTSAPWEMEDDDTEGVGESTCPPAADRGGSSSAGGGGGDSHGYTDIEKEVFDRLMEKRIPEVVADPVAFREELHRHFERLPLSYAIDVNVDKAEDVLLHRSILNECTDPENRPIFHVGFLNVSSTARSRLHCALASH

SEQ ID NO: 67805 - protein, 234 aa, Zea mays
  Clone ID: LIB3689-227-F12_FLI.pep
SPIMEFPHHHHHHGHRRDDDEDDRRGPPPPVYGGGGLGGAYGGGGSEYGHEGRPHHGGGGSQYGHETRPHHGGGGGAPPVRQQTYRIYCKAGEDQYSLASRDGKVCLVRTDRDDDAQHWIKDMKYSTRVKDEEGYPAIVLVNKATGEALKHSLGQSHPVLLTRHNPDSLDESVLWTESRDVGDGFRCIRMVNNIYLNFDALHGDKDHGGVRDGTALVLWEWCEGDNQRWKIVPW

SEQ ID NO: 67806 - protein, 194 aa, Zea mays
  Clone ID: LIB3689-229-F1_FLI.pep
LDRIAVVTGGNKGIGLEVCRQLAGAGATVVVLTARDETRGAAAAQELRESGLSDVIFHQLDITDAASVSRLAEFLKARFGKLDILVNNAAVGAVEYVQDPADSSTSEEELSGMDMVQRLQCMLKRVRETYDAATEGIKTNYYGIKHVIEALLPLLQASSDGRIVNVSSDFGLLRVTTNQYIYINSIFQQQRQTF

SEQ ID NO: 67807 - protein, 288 aa, Zea mays; identical to SEQ ID NO: 47549
  Clone ID: LIB3689-233-H8_FLI.pep

SEQ ID NO: 67808 - protein, 552 aa, Zea mays
  Clone ID: LIB3689-234-H6_FLI.pep
ASGHNSQAAAAVTTPCSTVLPPSQVPLAAMGSCLSSETPAASAGAAAWWRKGRRGTREGAAGGLPSGGKKPPGRGGEMTEDELARVSGRMCGNGASAVACLHTQQGRKGTNQDAMVVWESFNSSDSIFCGVFDGHGPYGHFVAKKVRDSLPVKLRTQWQTSANGPCSSPHQNGSISGSINSEETASIVDDEWGDGDNTEKLPEMFLPLKRSYLKAFKLMDKELKLHPTVDCFCSGSTAVTLVKQGLDLVIGNLGDSRAIMGTRDASNNLTALQLTVDLKPNLPREAERIQQCKGRVFALQDEPEVARVWLPNNDSPGLAMARAFGDFCLKDYGLISVPEISYRLLTEKDEFIILATDGVWDVLSNKEAVDIVASAPSRATAARALVDSAVRSWRLKFPTSKSDDCAVVCLFLDRAGSAQESESEAIVETAEPTGEEVCRRDAGEVDEDMAVADAGVHVVSSAEHSAEATPLQHSTTSRELDDEIVPADEHEPPVVLKEPARCGSARSLAECISTSEEEEWSALEGVTRVNSLLNLPRIMSGDRRSASWRKRR

SEQ ID NO: 67809 - protein, 461 aa, Zea mays
  Clone ID: LIB3689-239-F1_FLI.pep
EKVPIYICIFLHMYTSSSSSRVVQKWGRRRGARGPHVCHLITTWANPARAPAKETAGSLGAGSRRRRAVGEPAGEGVQRAGVGAVVALREAHEVGPGEVRVLPRRGAGRRAHHPVLARAQEEGQRLPLLPPVHHRAVQAALVPPVGQRHEGVADVDDHGAWDGPDGAPLAVHQDLQPADVVLQEDGQRRGVAVRARAQRALRHRARRVVVAPHDGAAVLEELPVVAALHAQAQLQQLHDRQRQLLHLLAVPLVHPPHWLEILAEGAGEVVHDDGRRGAVVEAEGQGLLPGELGREPVGVRARVPGHGAGDAPGPLLLSQRQPEEVAGAVQRGAPQRRVHAVPAHLEEPVRRARRRHLRRGAAEPRAVAIAQHAHVHHRHLQLRGRGRPRLFVRPQEWLRDLGLPAQVEHSRGLVSRRVGPVLASGEVNAGSWGAEGERWGRAGVHGCGCALLLGRAGSCRS

SEQ ID NO: 67810 - protein, 463 aa, Zea mays; identical to SEQ ID NO: 37853
  Clone ID: LIB3689-243-F10_FLI.pep

SEQ ID NO: 67811 - protein, 548 aa, Zea mays
  Clone ID: LIB3689-243-F12_FLI.pep
MGRRMEAPSSPASLVVVLLLGSLLLQARADDPYRFYTWNVTFGDIYPLGVKQEGILINGQFPGPQIDAVTNDNIIVNVFNNLPVPFLLSWQGIQQRRSSWQDGVYGTNCPIPPGGNFTYNMQFKDQIGSYYYFPSLLFHKAAGGYGAIRVLSRPRIPVPFDPPAGDFTILAGDWFKLNHTDLKGILDSGNDLPFPDGLLINGQGWNGNRFTVDQGKTYRFRVSNVGIATSVNIRIQGHSMLLVEVEGSHTMQSTYTSIDVHLGQSYSFLVTADQPPADYSIVVSTRFTTPVLTTAAILHYSSSNGAASVPPPPAPTVEIDFSLNQARSIRWNLTASGPRPNPQGSYHYGLVNTTRTIRLANSRATINGKLRYAVNGISFVPADTPLKVADFYSIPGVFTLGSMPDNPTGGGAYLQTSVMAANMRDYVEVVFENAENLVQSWHIDGYAFWVVGMDGGQWTPASRQGYNLRDAIARYTLQVYPQSWTAIYMPLDNVGMWNVRSESWARQYLGQQFYLRVYSPANSWRDENPIPKNALLCGRASGRRTRPL

SEQ ID NO: 67812 - protein, 307 aa, Zea mays
  Clone ID: LIB3689-245-A11_FLI.pep
RGAGRGRRGVGAGPDGGANDAHAGNPRGARARDGVQQHHGRAGQGRAVQHLHPAAQVHGRGVADRQPGRQRRERGHGVRAHGQRVPVAALGHAQLAVGPGQERAGAVPRGVHRHPHVAVRHRQQPAPHAGRQRLAGGVPTQRHLLRGPAGQRHHGRRHRHRRQLPLLGRQPRRLPGQQGAAPHEALRRRGGARARAARAGQEEGQDAGGRRRLARRGGGVPGRHDHVARAREADAGWPRHGSCARRRLVGAVVTARSVSSGLSGGRDIYTFFFVRGSCLSFRFYFIAHFWMNCSSLSFKLLGVCHVM

SEQ ID NO: 67813 - protein, 334 aa, Zea mays
  Clone ID: LIB3689-245-A12_FLI.pep
LSLASGWQSSLEASRLVSPLLPQLCRCVPPLAVALQRSPASLELLARPSPQSSDMEFEDRCHKVQEPKFDCLLFDLDDTLYPLSAGIAGHVKKNIEDYMVEKLGIDETKIENLGNLLYKNYGTTMAGLRAIGYSFDYDEYHAFVHGRLPYDNIKPDPILKHILKNLRIRKLIFTNGDMVHAVRALKRLGLEDCFEGIICFETLNPPCPPQGDQEPEIFDIADHFARSGTADELPKTPVLCKPNVDAMEEALRIANVNPHKAIFFDDSVRNIQAGKQIGLHTVLVGKSQRVKGADHALESIHNIREALPELWEEAEKAEDVLYPERVAMETSVTA

SEQ ID NO: 67814 - protein, 566 aa, Zea mays
  Clone ID: LIB3689-245-D11_FLI.pep
SLNPFALNPKQEATRLPHPNPQSCRGAAMSSTPPAVASPASEQTKSKKKKHKSKDLPATDPPSLAEAEEKTDGYLIKPQSLVPSLDTSTWPLLLKNYDRLNVRTGHYTPLPSGHSPLKRPLAEHLRYGVINLDKPSNPSSHEVVAWIKRILRAEKTGHSGTLDPKVTGNLIVCVDRATRLVKSQQGAGKEYVCVARFHAAVPDTARVARALEALTGAVFQRPPLISAVKRQLRVRTIYESKLLEHDPERHLAVFWISCEAGTYVRTLCVHLGLLLGVGAHMQELRRVRSGILGEQDNMVTMHDVMDAMWSLDNYKDESYLRRVVMPLEVLLTSYKRLVVKDSAVNAICYGAKLMIPGLLRFENDIETGEEVVLMTTKGEAIAIGIAEMTTAVMATCDHGAVAKIKRVVMDRDTYPRKWGLGPVALKKKKMVAEGLLDKHGKPNEKTPAEWLRNVVLPTGGDVSIASIAAAPEPEKVKVEQDAVAGEKVKEKKKKRQKDENNGDDASVPAKKIKVEEDAEVVEVEGDKSEKKKKKKKEKVESESADAAEAKEVEKADDAAGETGSEK

SEQ ID NO: 67815 - protein, 275 aa, Zea mays
  Clone ID: LIB3689-248-E3_FLI.pep
GGDLASDKAGRLLLGLPGHALPGRGGSSSSLLRGCHLLRSRRCLSLLGRSSRLLGCLGGGGLGGGLGDLGRAPAGLGRRGGRSDRLGLGLGLGFGRRRLGLRSGLGLRLRRGLGLGRGLGCLGLGGLGLGVGGRQLEGVLHPRQLAGGSELLQLHSELLAEVGGELAAMLPLDVLADGHRARPLPLLEGSDRLYNHLSVGRVRRRLLRRGKLLLLRRLLLLGRLLRLGRLGHLGRRDLRWHLGHRDLSHNSLLRRHCGSLLLSPTLSGTTLHYAV

SEQ ID NO: 67816 - protein, 543 aa, Zea mays
  Clone ID: LIB3689-254-D9_FLI.pep
VAKASDFANATIMATTTSATTAAAAAATTAKPRGSSSALCQRVAGGGRRRSGVVRCDAAGVEAQAQAVAKAASVAALEQFKISADRYMKERSTIAVIGLSVHTAPVEMREKLAVAEELWPRAIQELTSLNHIEEAAVLSTCNRMEIYVVALSWNRGIREVVDWMSKKSGIPASELREHLFILRSSDATRHLFEVSAGLDSLVLGEGQILAQVKQVVRSGQNSGGLGKNIDRMFKDAITAGKRVRSETNISSGAVSVSSAAVELALMKLPKSEALSARMLLIGAGKMGKLVIKHLVAKGCKKVVVVNRSVERVDAIREEMKDIEIVYRPLSDMYQAAAEADVVFTSTASETSLFAKEHAEALPPVSDTMGGVRLFVDISVPRNVSACVSEVGAARVYNVDDLKEVVEANKEDRLRKAMEAQTIITEELRRFEAWRDSLETVPTIKKLRSYADRIRASELEKCLQKVGEDALTKKMRRAIEELSTGIVNKLLHGPLQHLRCDGSDSRTLDETLENMHALNRMFSLDMEKAIIEQKIKAKVEKTQN

SEQ ID NO: 67817 - protein, 262 aa, Zea mays
  Clone ID: LIB3689-256-E1_FLI.pep
GLVAMEPASSSALPSPPPAEARRTPPEELKLRRRTLETVLEQCQRALEMMHEDGLGTAAEGASFKEVEVEEEEEEEEGSGDSGGVERAPPPPPSEADYEADELCNLLKSRVQSPEFLEKLDTLQKSVYQHGAVDETVSWDIISAADIWDDKSMNVSDDSEDGYVLVKQEDIVDGIACFMAAYLLSLKQTKDLTPNQLQQALSKTFSAKKRKSKLQKAWDGTKVVYNIASWSATAIGIYQNPAIVQAATAAFWTSCRVISKFL

SEQ ID NO: 67818 - protein, 332 aa, Zea mays
  Clone ID: LIB3689-260-C9_FLI.pep
AGEAPPSPLPRLLLSCLSPMAAITAPPAPHPASTSCRRRAPLIRFAASSSPSSRFRPSSSSSFPGAAGSSSGGGGEILHVSPLPPPAAPPGAPVYVTLPADVVGPGGRVARRRAMGASLAALAAAGVAGIAVELWWGVIERHRPGEYDWAGYLELAAMARRHGLRVRAILAFHQCGAGPHDPPWIPLPQWVLEEMDKVPDLSYTNRYQKRNREYISLGCDILPVLKGRSPMQAYSDFMRSFRNTFEDYLGAIVTEVQVGMGPGGELRYPSCPTEKLNQPGSSSELGEFQCYDKFMQASLSARAQIFGLQEWGNDGSTGTDGSQKNLEEASFF

SEQ ID NO: 67819 - protein, 410 aa, Zea mays
  Clone ID: LIB3689-261-H2_FLI.pep
ASSSRPPLPECSALAGGRGSFTFMEAAAIPTSAPETRSVRAIPSCFASFLQSSVQSLREHKCACSPSTDLAGTGTYQVFLTGSRSFYLLLDRIAVVTGGNKGIGLEVCRQLAGAGATVVVLTARDETRGAAAAQELRESGLSDVIFHQLDITDAASVSRLAEFLKARFGKLDILVNNAAVGAVEYVQDPADSSTSEEELSGMDMVQRLQCMLKRVRETYDAATEGIKTNYYGIKHVIEALLPLLQASSDGRIVNVSSDFGLLRLINNEEAKAGAKRRGEAHRGEAGRGAGRVPERLRRRRGGGARVAGGLLGLQGGQGGHERVHEDPSEEPPGAARQLRAPRLREHRHDRPHRASHARARRGQRREGGAAAGGRPDRRVLRVGRGGVLYVTKAPSSLSSSLFANSLLVDF

SEQ ID NO: 67820 - protein, 363 aa, Zea mays
  Clone ID: LIB3689-262-H6_FLI.pep
VCRPQRASCSMRVNVLRRSNEESGGEIDWDNLGFGLTPTDYMYVTRCSPEDRGDFPRGELCRYGNIELSPSSGVLNYAQGLFEGMKAYRRPDRAGYTLFRPEENARRMQRGAERMCMPAPSVEQFVHAVRQTVLANRRWVPPQGKGALYLRPLLVGSGPILGLAPAPEYTFLIYAAPVGNYFKEGLAPINLVVHDEFHRAMPGGTGGVKTIANYAPVLRAQMDAKSKGFTDVLYLDSVHKRYLEEVSSCNVFVVKGGVVATPDTRGTILPGITRKSVIELARDRGYKVEERLVSIDDLMGADEVFCTGTAVVVAPVSTVTYQGERYEFRTGPDTVSQELYTTLTSIQMGMAAEDSKGWTVAVE

SEQ ID NO: 67821 - protein, 153 aa, Zea mays
  Clone ID: LIB3732-001-H3_FLI.pep
TMVKAVAVLGSSDGVKGTIFFTQEGDGPTAVTGSVSGLKPGLHGFHVHAFGDTTNGCMSTGPHYNPASKEHGAPEDENRHAGDLGNVTAGADGVANINVTDSQIPLTGPNSIIGRAVVVHADPDDLGKGGHELSKSTGNAGGRVACGIIGLQG

SEQ ID NO: 67822 - protein, 355 aa, Zea mays
  Clone ID: LIB3732-008-A2_FLI.pep
NLLAAAAAARLLPRRAVLLGRAEGVAGPGPTPADDEVAERRGAASRDAVLVAQELPAQHLLHLELEVVHEHVGGALSRGGAGARQHGGGEDGRHPAGRVGVPAGRPVDEDHVPGHVVEVVGQVVDGEAALGEEQVLHGPALLGPRRPRRRQQVPEVAHLRRVGHVVRLHPGVPRLQVLDVELVLLQEHGPPAVVQRQPQRGFRAQPEHQQVAGRPRAEHGRHGPDVRVRHAVRRVRDGREVDQRLEHRDRQPLGHGLGPCLALAAAAARRAGGRGGGGGGRGRDGAGAGAGRGREVGGGVEEGEEGGECEAEGEDHQEDAAGARRRRELVAAAHGLHAACLARSVLSPSVGGFTA

SEQ ID NO: 67823 - protein, 324 aa, Zea mays
  Clone ID: LIB3732-010-G2_FLI.pep
SVALWVIHSFFPPRAKTPATAISSSTPPVVPFVHIQKLPRRKKEQLFAAGTLTNHSLQASEGEMSLQCVAPPVRALAVLPAPAPPRRRTNHVSLYLPSRRPGLAVAPVRAADSSSPPTVPASAAGKAVVPDDEFSLAKVSFGVIGLGLGLSLLSYGFGSYFNLLPGSEWSALLLTYGFPLTIIGMALKYAELKPVPCITYADAFALREKCATPILKQVRSDVTRFRYGDEQHLDEALQRIFQYGLGGGIPRRNAPILQKIREEVTDDGKYSLVLVFQAKALELSDFEKRQAKFTSFFGPGIKAEIDAGKGGGDLYEVRLISDTV

SEQ ID NO: 67824 - protein, 164 aa, Zea mays
  Clone ID: LIB3732-012-H5_FLI.pep
SSSSSADQTHSIATKLKVFSRSLHTHIYGASARRAVVHGERRHGGEAQGGRREAGGAVPRVPAQPRGVSRRARRGRVPRVHGVQRGRHGGGAHVRRLRVPPQLPQARGGDGDGDGRRLPRPRLHHLRVNSTMSREVRRSTRITHGTRDGHWNGRCCSSCSWMIF

SEQ ID NO: 67825 - protein, 384 aa, Zea mays
  Clone ID: LIB3732-013-C7_FLI.pep
ASPCTPGLAFPSPISLRLAAAARALSCDVSQQSVQSLASLPLVALGSAMAVGCFNHVLSPLVPSPPGRRVRAALRCRWHRHPLTAVSLRRLPCGAAAGRGTRRLAAAAESQAVQEQPARAEEAGGAGAAEASSKLVLVVGGTGGVGQLVVASLLSRNIKSRLLLRDPEKALSLFGKQDENLLQVYKADTRNPNDLDPQMFEGVTHVICCTGTTSFPSKRWDGDNTPERVDWDGIRNLVSALPQTVKRLVLVSSIGVTKYNEIPWSIMNLFGVLKYKKMGEDFVCNSGIPFTIIRAGRLTDGPYTSYDLNTLLKATAGERRAVVIGKGDKLVGEVSRLVVAEACIQALDIESTEGQIYEINSVKGEGPGTDPEKWEELFRSARSD

SEQ ID NO: 67826 - protein, 121 aa, Zea mays
  Clone ID: LIB3732-013-G3_FLI.pep
FFYKNFFALQCLWFYIQYNTFFLGIIRQVAYVLGQLQNKAASDALSTVLKDVCEHPMVRHEAAEALGSIADQESIALLEEFAKDPEPIVSQSCEVALSMLEYERSGKSFEFLFLQTPHVQS

SEQ ID NO: 67827 - protein, 307 aa, Zea mays; identical to SEQ ID NO: 67812
  Clone ID: LIB3732-016-F6_FLI.pep

SEQ ID NO: 67828 - protein, 172 aa, Zea mays; identical to SEQ ID NO: 45169
  Clone ID: LIB4667-027-B2_FLI.pep

SEQ ID NO: 67829 - protein, 101 aa, Zea mays
  Clone ID: LIB4719-011-F9_FLI.pep
VTLQVPCRGLHRRRAPARQMELGDKAVGFLLTLTSLTLFTYYTFWVIILPFVDSDHFVHKYFLPQEYALLIPVLAGVVLLSFLSMFVGLVMLKSKKKKKTA

SEQ ID NO: 67830 - protein, 108 aa, Zea mays
  Clone ID: LIB4727-014-H7_FLI.pep
PDPAISPPPASSSLYPSHRAYRTPWRRTTRSGRRRRPATPTSRTGCGDGCAGTRRRRRRTACCAASRRSATTSYTAGIRLRKGSWTMFEARSTSIVCTNHPLEKAWMV

SEQ ID NO: 67831 - protein, 62 aa, Zea mays
  Clone ID: LIB4727-024-G10_FLI.pep
PICGIFSNQTGITSFDFSFSAAVFFFGWVGEAERGTRGNQTVQRNTHRSTIHFHNHRLHLRT

SEQ ID NO: 67832 - protein, 136 aa, Zea mays
  Clone ID: LIB4728-009-D8_FLI.pep
RPGRAPAIHAPRAHTDTVTQAHSAITVSPRSRTRSLAHTRPAVRILFRCRHPLRRPPRPAAATRPVSISMTTSRRLADRKISRFEKNITKRGAVPETAKKANDYPVGPILLGFFVFVVVGSSLFQIIKTASNAGLF

SEQ ID NO: 67833 - protein, 145 aa, Zea mays; identical to SEQ ID NO: 53346
  Clone ID: LIB4729-002-A4_FLI.pep

SEQ ID NO: 67834 - protein, 99 aa, Zea mays
  Clone ID: LIB4730-003-H9_FLI.pep
RDPLRCRRLDAADARVRGGHAAVARLLLDCGAPWNALSPSGLSAGDLASDPDTYDLLLDHALRSELVLGTVARRQAAPANGPPAESYLESRVSFSEERV

SEQ ID NO: 67835 - protein, 141 aa, Zea mays
  Clone ID: LIB4730-006-A5_FLI.pep
LEALLFHVRGAVRRRPRRNRLRRDAAHRLPQRAARGPPSLHGPSRDHDDGASEQGEAGGVSRRAATERGHERQVRGRAEGGDPDQEALRAHPALACRQRASEPGDCRSQRGGGEAQGKVSHQRDVPQSIFTCWTYACFGIM

SEQ ID NO: 67836 - protein, 93 aa, Zea mays
  Clone ID: LIB4730-073-E11_FLI.pep
LASAEHMPPVWTRGGLRSERNAGRRRVLCCCSCSSAVRSIRRSACNCLSFLLAMLVTLYLSCKGRHGRPSVAGLAATGTSACPLINRICWLVA

SEQ ID NO: 67837 - protein, 198 aa, Zea mays
  Clone ID: LIB4732-016-D7_FLI.pep
REARSARRRRWPPRSARSVSPRRRSVRTGRASASPSSSPCRTGRPRSPSSPPPRRSSSRRSRNPRGTGRRSRTSSTAATSASTTSSRSPRPCGTGPWPRSWPGPSRRSWGPASASGAPSMGRTPRTCSRRSMMVRSRSHQLKGYTTRNHRTLSKWCFVPNAVPAPQSPIIVCFSSLKSCERPNQYLLPDKITSSDFLS

SEQ ID NO: 67838 - protein, 155 aa, Zea mays
  Clone ID: LIB4732-019-D12_FLI.pep
RQILRGPLNKYRTAHVTSYCLINKSVITRSTTNITRERSKETNEATGSSIRSRLVVVASQLRREGGACSSHPTGTALVLGDGVDRVDDPRKIGEEGEQEAEPELDLASELEEDAEWGQDDGDEDVHTVRRALLHLAGSLEPSAGGWMRLLFVHAG

SEQ ID NO: 67839 - protein, 262 aa, Zea mays
  Clone ID: 700342858_FLI.pep
SINNQTQVHALSCPPKLRRAAGRLLDRGHVVLAADVDGMAPGRRGGVVADVERLLADDAVDLREHLGEGVLHVHRLQGRRLHEEGVLALGEGLGVLGRDGPEVAQVRLVPYQHHDDVGVRVVPQLPHPPLHVLEGDVPRDVVHDQRPYRSAVVRARDSAVSFLAGGVPDLGLDDLVLDVDAAGGELDADGGLGLEAELVAREAREQVRLADAGVADEHHLEEVVVVVVRPVRHRQQTAGRRRRREWDGRWRRRGARMGQREH

SEQ ID NO: 67840 - protein, 245 aa, Zea mays
  Clone ID: 700342745_FLI.pep
GGFGTVYKGTIRSGREVAVKVLSAESRQGIREFLTEIDVISNVKHPNLVELIGCCVEGSNRILVYEYLKNSSLDRALLASNSEPADFTWSVRSAICLGVARGLAYLHEEIAAPIVHRDIKASNILLDRNYVPKIGDFGLAKLFPDNVTHISTRVAGTTGYLAPEYAWHGQLTKKADIYSFGVLVLEIVSGTSSSRSILMDDKILLEKAWELYEAKRLKELVDPALVDCPEEEAIRYIMVALFCLQ

SEQ ID NO: 67841 - protein, 134 aa, Zea mays
  Clone ID: 700332178_FLI.pep
HSKSLQLLFQAMRKLTDTKIVRVECIDVVHNAINLPVVRTNDVVEAPTTFHCLQLPQVAAANSHHSIYHLQTHIKDIGLLDTNRIVQLKMLKVVLRQVHVREFIYRITTPLVNVVSDQMHKIMTPIFHRSETTN

SEQ ID NO: 67842 - protein, 353 aa, Glycine max
  Clone ID: 700748540_FLI.pep
PNSDHECWERPEDMDTARTTYAVDAPNAASDVAGETAAALAAASMAFRSSDPGYSETLRRNAITAFQFADNYRGAYSDNDNVKYNACPYYCDFDGYQDELLWGAAWLRRATQDDNFLNYIQTNGKTLGADDNINEFGWDNKHAGLNVLVSKEVIEGNMYSLESYKSSAESFICTLIPESPSSHIEYTPGGLVYRPGGSNLQHATSIAFLELVYANYLTHASQAINCGNVYVSAQTLRQHAKRQVDYILGDNPMGLSYMVGYSNYYPQRIHHRGSSLPSIKDHPQFIACKEGSIYYNSTNPNPNVLVGAIVGGPDENDDYVDDRVDFRKSEPTTYINAPFVGVLAYFAANPNFS

SEQ ID NO: 67843 - protein, 276 aa, Glycine max
  Clone ID: 700741081_FLI.pep
NMKLDTIFAFIVVYILLVTSSEFPSVAADDVSSIISASQFEQLLKHRNDQICEGKNGFYSYNAFVTAARTFDGFGTTGDVNTRKREVAAFLAQTSHETTGGGGWPNAPDGPYAWGYCFVTERDKSNNYCEISKAPCASGKSYYGRGPLQLTHNYNYDLAGKAIHSDLINNPDLVAQDPVVSFQTAIWFWMTSQANKPSCHDVITNRWTPSSVDMAANRAPGYGVITNIINGRIECGNGPSPASNDRIGFYKKYCEIFGLSDATNLDCSSQKSFDQD

SEQ ID NO: 67844 - protein, 74 aa, Glycine max
  Clone ID: 700673634_FLI.pep
VPAVITVALLSLGFLASSGFGVAAITVLAWIYRYVTGKQPPGADQLDSARHKIMDKAREIKDYGQQQISGVQAS

SEQ ID NO: 67845 - protein, 109 aa, Zea mays
  Clone ID: UC-ZMFLMO17233C12_FLI.pep
QHKLKLYSPHRAYTKLPKHATTHRCTSLARLPRLLFDGYAFWEIEPPAAKRPRLPRRLRLHDLQHPLQLLQHGPPCVADHVVRSLLLKHDENAFTEQTRVVRLLPDQIV

SEQ ID NO: 67846 - protein, 90 aa, Zea mays
  Clone ID: UC-ZMFLMO17015E06_FLI.pep
ASLSVLAVSLLSFFSSPVIYAHTSSPPLAIMLGRRLALCHCVDVCTGLRCPVLAASFSFSLAVRPCSSFDLAVGCLLLSLCKLSGCLMLL

SEQ ID NO: 67847 - protein, 94 aa, Zea mays
  Clone ID: UC-ZMFLMO17103H06_FLI.pep
GSDCNLVAKAVWIILRAIPLHPRDSKILRYEEKSCPACACDYLSALLGAGREPRPVVSFVWYSALRRCHRGDYLHLLFSSVGVLCCVYLFSLGN

SEQ ID NO: 67848 - protein, 109 aa, Zea mays subsp. mexicana
  Clone ID: UC-ZMROTEOSINTE009B10_FLI.pep
GSSYYYIPNLMIQLNFPSVLRQNSSSFLLEDVYRNPGPLQFEGPGVDSNPISLCVEDQDYMGRIKKLQEYLEKAKLILVRSISIMHLNPLCIVNSYIEVRQKSHLFILV

SEQ ID NO: 67849 - protein, 114 aa, Zea mays
  Clone ID: UC-ZMFLB73139B09_FLI.pep
NGTHSRKYNIITYKIVSTIYFSSQKKKELKKRKLCSDAESPFNNQNALQNRTLSSSIKLSVLPVFLIVIDATFSSWTYCRMPRSDICTVLCLERKEKTSVLIPGCTLYVPCTSV

SEQ ID NO: 67850 - protein, 201 aa, Zea mays
  Clone ID: UC-ZMFLB73148F10_FLI.pep
KAVFFRQNQSVGSFCERHFGREVVDYFVDPFVAGTSAGDPESLSIRHAFPALWNLERKYGSVIVGAILSKLAAKGDPVKTRHDSSGKRRNRRVSFSFHGGMQSLINALHNEVGDDNVKLGTEVLSLACTFDGVPALGRWSISVDSKDSGDKDLASNQTFDAVIMTAPLSNVRRMKFTKGGAPVVLDFLPKVRWIIYHYLSW

SEQ ID NO: 67851 - protein, 76 aa, Zea mays subsp. mexicana
  Clone ID: UC-ZMROTEOSINTE042G11_FLI.pep
QASVANTMYFFFRTSKRSSFSASSIFVIISFGGHHEVNLVSLLQYCHFLTRINITIYLYFLDCISNNSKVMKFGNP

SEQ ID NO: 67852 - protein, 680 aa, Zea mays
  Clone ID: UC-ZMFLMO17086D09_FLI.pep
INLLRENKTLQARILQSKSDNKLFLDIEKGVNRRPLYESHPLSSFSWTRTDSMDMGDWSKKCKEALSKFELLKEGKSKEDIVYEKAVQILHGTKDEVHDIVQSALKSSDLKGLHAQCLTDIWIGRERFAFVDLSAGPFAWGPSVGGDGVRTELSLPNVAKTVGAVAEVTEEEAEEKLQDTIRERFSSFGEDYHAVDILLAEIDVYELFAFKHCVGRRIQLALCKELDERMHDLKKELEGYNTGDFDETNKKKALDALKRMESWNLFRDTSVEHHSYTVAHDSFLAQLGSMLWGSMRHVIAPSASHRVYHYYEKLSFQLYFVTREKVRSIKQLPVNVKSIRESLNSVLLHHQKSMFSQNMLSLSEDPSLMMAFSMARRAAAVPLLLVNGTYKSTVSTYLDSAILQHQLQKLNEHNSLKGRHSNHRSTLEVPIFWFIHNEPILLDKHYQAKALSNMVVVVQSDDDSWESHLQCNGRPILWDLRKPVKAAIAATAEYVSGLLPPHLVYSHAHETAIEDWTWSVGCNPSAVTSEGSQLSEFQQDVIARNYIITSVEESIQVVNSAIQQLVIERTTEKGFKIFKAHESKMVEKYNAVVSLWRRVSAMSKGLRYGDAVKLMSMLEDASNGFSSAVNSTISSLHPVQCTRERKLDVQLDLTTLPAFLAVFLLLWFLLRPRRPKPKIN

SEQ ID NO: 67853 - protein, 67 aa, Zea mays
  Clone ID: UC-ZMFLB73232D06_FLI.pep
NNSTSRSSTVAFNKQNSFAMLILVETGKRTRKLHLLIPPSAGSNNVYCLLFRLIRWKPFKGAAIKHR

SEQ ID NO: 67854 - protein, 251 aa, Zea mays subsp. mexicana
  Clone ID: UC-ZMROTEOSINTE072E02_FLI.pep
EIEQLREVSRNSDITNRELESKGSELLEVAVSMERMIQRLGYLGGKDVLEDNKPASTQALVSKLEKLIIASSTESGNSKSIIQELGAKLQSREKAVDELSTKVKMLEDLCHAQLSQPEPSKDRSFEASSSTIGSDMSEIEDVGPVGKTTSVSSVSTAAHARTMRKGSSDHLVLNIGSESERLIAAQDSDDKGRIKSLHTSGFIPAQGKHIADRVDAFWVSGSQILMNRPRARLGLMLYWLAVHLWLMGSIL

SEQ ID NO: 67855 - protein, 262 aa, Glycine max
  Clone ID: LIB3051-053-A7_FLI.pep
CFGCRVTEGYGMTESTCIISFIDEGDKLGGHVGSPNLACEIKLVDVPEMNYTSDDQPNPRGEICVRGPIVFRGYHKDEAQTRDVIDEDGWLHTGDIGTWLPGGRLKIIDRKKNIFKLAQGEYIAPEKIENVYAKCKFVAQCFVYGDSLNSSLVAVVSVDHDNLKAWAASEGIMYNDLAQLCNDSKVRAAVLAEMDAAGRDAQLRGFEFVKAVTLVLEPFTLENGLLTPTFKVKRPQAKEYFAKAISDMYNELSRTDVSQKTL

SEQ ID NO: 67856 - protein, 251 aa, Glycine max
  Clone ID: 700676049_FLI.pep
GLRPVVEGMNMGFLLLAFNQISNNCGMLHYTSGGQFKIPIVIRGPGGVGRQLGAEHSQRLESYFQSIPGIQMVACSTPYNAKGLMKAAIRSENPVILFEHVLLYNLKERIPDEEYVLSLEEAEMVRPGEHVTILTYSRMRYHVMQAAKTLVNKGYDPEVIDIRSLKPFDLHTIGNSVKKTHRVLIVEECMRTGGIGASLTAAITENFHDYLDAPIVCLSSQDVPTPYAGTLEEWTVVQPAQIVTAVEKLCQ

SEQ ID NO: 67857 - protein, 168 aa, Zea mays subsp. mexicana
  Clone ID: UC-ZMROTEOSINTE082G09_FLI.pep
SHDSDKPTTARDELTRVPETFLTARLVGTARKRRICRRGEHREEPISLAAEAVEGAALALERVDDVHGGDGLAAGVLSVGDGVADDVLEEDLEHAAGLLVDEPRDALDAAPPRQPPDRRLGDALDVVAQHLPVTLRAALAEPLATLTAPGHGFFRSGLWWAGEFPRKA

SEQ ID NO: 67858 - protein, 314 aa, Zea mays subsp. mexicana
  Clone ID: UC-ZMROTEOSINTE062G11_FLI.pep
TKKFSEKLGEGGFGSVFKGCLGDSTTTVVAVKRLDGARQGEKQFRAEVNSIGIVQHINLVRLIGFCCEGDRRLLVYEHMPNGSLDSHLFRSHGGAGAGAALDWNVRYKIAVGVARGLAYLHHGCRDCIIHCDIKPQNILLDASYLPKIADFGMAKFLGRDFSRVVTTMRGTVGYLAPEWISGTPITSKIDVYSYGMVLLEIVSGKRNSITQQSSSHTEGQQGDYLPVQVAGKLLRGDVLSVVDADLRGDVNVEEVERVCRIACWCIQDREFDRPTMVEVVQFLEGICEPEIPPMPRLLHAIAGGGSNQMAGVGV

SEQ ID NO: 67859 - protein, 79 aa, Zea mays subsp. mexicana
  Clone ID: UC-ZMROTEOSINTE084C12_FLI.pep
YIVTCHLAPNLYVGLLLHASSVRRNGTDYYLFRLDKLSPRLYLISSSVFLYLPLRSLFLPPFLVSLSSATPNPSPKSVA

SEQ ID NO: 67860 - protein, 153 aa, Zea mays subsp. mexicana
  Clone ID: UC-ZMROTEOSINTE084E10_FLI.pep
QLAWIGTVNGSSSEADGVDVLHVGVEEPPVLLHAALLLVLVEHGEEVGLDGAGVARRPAADVVDEVLVVHPRVGRRGLDAAAGRPPALGHHERHAGAAVIAHGDVEGVDGGVEEVLVPVGAVLHDGAGGGEERVAHVHGAGVVCPGQVRVDVG

SEQ ID NO: 67861 - protein, 106 aa, Zea mays subsp. mexicana
  Clone ID: UC-ZMROTEOSINTE084F01_FLI.pep
CNSMNMQLSQLPLDCKRLTYDALEGANVTPTSFYNIGDLEIQDNLARVWVDIGIHEPLLLDILLNALTTISSDHVGIKQVQFGGSEFLNWSEDLKTEEVGYSVCKI

SEQ ID NO: 67862 - protein, 124 aa, Zea mays subsp. mexicana
  Clone ID: UC-ZMROTEOSINTE085B08_FLI.pep
SSSTSGCSSTSTLSPRASWGGTARPPWWCSSGGPSPSSSPPCCTSTSPTSTGPAASTAARSEGTAATHTTMARSSTATTSGREAPSSQHRHACTYTACPDGDDGEPLDKVKSTRSRSSIHPSSP

SEQ ID NO: 67863 - protein, 134 aa, Zea mays subsp. mexicana
  Clone ID: UC-ZMROTEOSINTE085D08_FLI.pep
TTKRPAGSSKVRVVPSRYSIPPGSSLAAVTQGNRCKQSLPGSATETRVNLTEPPNDELSPEELAKVAELLPRIRTMPPSDASPRDSGCAKRVADLVGKRSFFTAAGDDGNLVTPYQARVVELESPEAAAEEAEA

SEQ ID NO: 67864 - protein, 282 aa, Zea mays subsp. mexicana
  Clone ID: UC-ZMROTEOSINTE090H10_FLI.pep
QQLHQRVLPVMRLHQVVGHVPLAVSVPQLRPVPPQPVQRPPVAVPLKPESPKLRARLYEGKDSTPTKKKCCNCRNSKCLKLYCECFASGTYCDGCNCTNCFNNPDNEVARREAVEAILDRNPDAFRPKIGSSPLMHRNNEVPSDLPLVGKHNKGCHCKKSGCLKKYCECFQANILCSENCKCMDCKNFEGSEERRNLFQGDHKNAINMQQATNAAVNGAIGATGFPSPSTSRKRKHNDPSLDHFNKEHIAHKNCHIPQVRKRRKRGSARRKMKSEGRRKMTG

SEQ ID NO: 67865 - protein, 178 aa, Zea mays subsp. mexicana
  Clone ID: UC-ZMROTEOSINTE091D03_FLI.pep
AGKHNNNLFDGHPSTLKRVKSDGTILHESNASISGSGRCHNEQLSASQPDVQNGFQFPTSESDSLHENEISSACGSGIAHLRYTPTASDVLHVPRAKVEYCHDSGDSNFLDLEWLSTSGNSSDERSIATSTPDANLSNENVISGITPDIMENHLAEMQYQKLPRNFVQWVNHGDTFWY

SEQ ID NO: 67866 - protein, 225 aa, Zea mays subsp. mexicana
  Clone ID: UC-ZMROTEOSINTE094A05_FLI.pep
TDPLSPPYDYLPGHPRPDAKHNEVILAVPRASSGRHVAAKERKAGRVPAIVFEQENGQEGGNKRLISVRANQIRKLVDHLGRSFFLSRLFSLQVWSEHAGQGELIESVRVLPRKVHLHAGTDEPLNITFMRAPSSALLKIDVPLMFIGEDASPGLRKGAYFNTIKRTAKYLCPADIVPPYIEVDLSELDVGQKLLMRDLKVHPALKLLHSPDQPICNFTGSRSPE

SEQ ID NO: 67867 - protein, 75 aa, Zea mays subsp. mexicana
  Clone ID: UC-ZMROTEOSINTE098B11_FLI.pep
SLIKFVKNRSLPLMQHHHSCLCYVGDYVVVLHCICGSKEVIKSFGLVGREDYSDRCGCTDREANKVSEIGWNSLQ

SEQ ID NO: 67868 - protein, 89 aa, Zea mays subsp. mexicana
  Clone ID: UC-ZMROTEOSINTE099B01_FLI.pep
MEKMILVIKNLKKDNEFLKGKCENSDIALVKLIEERELTKKQIEKLKNQKETLESLCRSLQAERKQGRSASIPDAPSSQEDMPATSQES

SEQ ID NO: 67869 - protein, 80 aa, Zea mays subsp. mexicana
  Clone ID: UC-ZMROTEOSINTE099G11_FLI.pep
PSGRGVNRMQICSVFVDCCGMVCFFAATLRVTQQCKSKMKKKRERERDNYAPAALILFLRFTSELSFYFLLDPLLKPLKF

SEQ ID NO: 67870 - protein, 95 aa, Zea mays subsp. mexicana
  Clone ID: UC-ZMROTEOSINTE101A06_FLI.pep
GCCDQITDNAFMDGEGYGFQSELRVLKISSCVRLTVAGVGRVIESFKALEYLDVRSCPQVTRDSCEQAGVQFPAGCKVNFDGSLLESDPSAEMFF

SEQ ID NO: 67871 - protein, 232 aa, Zea mays subsp. mexicana
  Clone ID: UC-ZMROTEOSINTE101B06_FLI.pep
FRRSAFDSGLETRGEKGEPWTEVLSWEPRAFVYHNFLSKEECDHLISLAKPHMKKSTVVDSATGGSKDSRVRTSSGMFLRRGQDKIIRTIEKRIADYTFIPVEQGEGLQVLHYEVGQKYEPHFDYFHDDYNTKNGGQRIATLLMYLSDVEDGGETVFPSSTTNSSSSPFYNELSECAKGGLSVKPKMGDALLFWSMKPDGSLDPTSLHGGCPVIKGNKWSSTKWMRVHEYKV

SEQ ID NO: 67872 - protein, 220 aa, Zea mays subsp. mexicana
  Clone ID: UC-ZMROTEOSINTE101F06_FLI.pep
RSVKWLYRVKAIKDPSRAPVQSAEYLYFPQQVGKHNLKMTDGIQIQEMPVSSGIMFPWTKQVVIHNGKIRCKGWAYSGGGRWPERVELSADGGFNWYTIPLENLSKKRKWTWRTWHYDLPCDVEGWVEIVVRCWDNAMNTQPPEIRTAWNWGLHVTHSCHRISVYSVNRTRPKTDARLKEFEDRGIPFGPITVPLEFPSQTWEDYEKFWRGHDPRDAEDD

SEQ ID NO: 67873 - protein, 81 aa, Zea mays subsp. mexicana
  Clone ID: UC-ZMROTEOSINTE096A02_FLI.pep
PHARARQAAEDHRLAVPARGRRRGLWAGGPGRRGFHQEVLRPAAHAAGPRHRHAGLLRRVCATGLWHRLEFNPRIHTRMHM

SEQ ID NO: 67874 - protein, 169 aa, Zea mays
  Clone ID: UC-ZMFLMO17037H10_FLI.pep
QEKGLIIPRNASRVEQLEKNSGTVKHCNNVLDVMDTQNVAPPRQKEVAVLSTTTPGSVLDKPLVVKVKLSKGGPRISLYESCKKLQWPMPTFEFVKVEPSVCSSSCGSSQKVAPQGFAFASTITLHIPNGDVISLTGDGRADKKSSQDSAALLMLYELQRQRRFQVQEV

SEQ ID NO: 67875 - protein, 333 aa, Glycine max
  Clone ID: 700741352_FLI.pep
LKGYSEDPISPARLFEVVADDLLTLNKNLQSIVGAENPVLMSAAEQIFSAGGKRMRPALVFLVSRATAELLGLKELTAKHRRLAEIIEMIHTASLIHDDVLDESDLRRGKKTVHQMFGTRVAVLAGDFMFAQSSWYLANLENIQVIKLISQVIKDFASGEIKQASSLFDCDVQLDEYLIKSYYKTASLIAASTKGAAIFSGADSSVTEKMYEYGRNLGLSFQVVDDILDFTQSAEQLGKPAGSDLAKGNLTAPVIFALEKEPKLRDIIESEFSEVGSLEEAINLVKSCGGIERAQELAKEKADLAIQSLQCLPQSVFRLALEDMVAYNLQRIA

SEQ ID NO: 67876 - protein, 328 aa, Glycine max
  Clone ID: 700742323_FLI.pep
EHSKACGHSQFGRIYEQGHYPEWDEDHPIHFVGHSAGAQVIRVLQQMLADKAFKGYENTSENWVLSVTSLSGAFNGTTRTYADGMLPEDGRTLKPICLLQLCRIGVIIYDWFDISWLKNYYNFGFDHYNMSWRKMGIWGLVDCLLGNAGPFASGDWILPDLTIQGSIRLNYHIRTFPNTYYFSYATKRTTKIMGVKVPSSILGIHPLLFIRVLQMCQWRFPPDVPPPYKGYRDEDWQDNDGALNTISMTHPRLPIEHPNCLVEKESDCQPLQPGIWYYKYVEGDHILFIINRERAGVQFDVIYDSIFQRCRKHVFRKKLPTMPNEINH

SEQ ID NO: 67877 - protein, 381 aa, Glycine max
  Clone ID: 700742351_FLI.pep
EVMEMKKPCCEESETIVGSWECWFDDACIVDMDYFVKTLSSIKQKGVRADLIGSIITHYASIWLPDLSSSAENGVTTHFQSPESVTNSWMKKRFFVETLVSVLPPEKDSVPCNFLLRLLRTANMVRVDATYRGELENRISWQLDQASLKELMIPSFSHTCGTLLDVELVLRLVKRFMSLDRDGAALVKVAKLVDCYLAEAAVDANLTLSEFIALAGALPSHSRATDDGLYRAIDTYLKAHPDVSKQERKGLCRLLDSRKLTTEASLHAAQNERLPVRAVIQVLFSEQTKLNRHIDWSGSFSSLRSPNGGLDPPGRCLSKRETNAQQMEIRKLKEDVYRLQSQFNAMQGQMERMAAKKKGLFKWRKFGMPTFSRNVGEVEKI

SEQ ID NO: 67878 - protein, 79 aa, Glycine max
  Clone ID: 700742811_FLI.pep
TELLRSLKDQLIPNLNLNTRSNSHDTDLGRAFSRIQIYAPKHSWLIGSIFSIYTSNELHVLFRQLKIENLKVLFQPLQF

SEQ ID NO: 67879 - protein, 182 aa, Glycine max
  Clone ID: 700743009_FLI.pep
LSQAEHGPDSQVVLVISGEGVDLNVIEEELNKQCQSLPRGEFAAKALSHSFIVYAHDMLESIKFSNLYAPEHLIVNTNDAEKWEGFIENAGSVFLGPWTPESVGDYASGTNHVLPTYGYARMYGGVSLDSFLKFITVQSLTEEGLRKLGPYVVTMAEVEGLDAHKLAVTLRLEDIEVRQVST

SEQ ID NO: 67880 - protein, 302 aa, Glycine max
  Clone ID: 700746172_FLI.pep
CFCFGYLVAVDKNGFVYTWGFGGYGRLGHREQKDEWVPRRVEVFQNRNVLPPDAIISAGSVNSSCTAGGGQLYMWGKLKNTGDDWMYPKPLMDLSGWNLLCMDSGNMHHFVGADSSCISWGHAQNGELGYGPTGQKSSAVPKKVDLLEGMHVISVACGMGHSMVIVDRANVADRLDQLDIYDGKAVGEGNEAVNTTPVPKQAAKKGAKGADNSKKRKQSKDSSDSDEDAEESEEDSEDQINGEAEAKRPRGSGKGRGKTPKKSGAKGKGSVSGRGRGGTAANKNSSKSPQVKSGKRGRPRKS

SEQ ID NO: 67881 - protein, 499 aa, Glycine max
  Clone ID: 700747413_FLI.pep
RMVKSCCVMCLCLILLHIFLRFVPIQSAPESAIVTQIPGFSGTLPSKHYAGYVTVDKSHGRNLYYYFVESEGKPSEDPVVLWLNGGPGCSSFDGFIYEHGPFNFEAAKTRGGLPTLHLNPYSWSKVSSVIYLDSPAGVGFSYSENKTDYITGDIKTATDSHAFLLKWFELYPEFLSNPFFIAGESYAGVYVPTLASEVVKGIDAGVEPKLNFKGYMVGNGVTDEQIDGNALVPFVHGMGLIPDELFEEVNRECNGNFYDPTSANCSSKLSKVDELVDEINIYNILEPCYHGTEAEKITESYIRMPSTFRKLGETERPFPVRKRMFGRAWPLRAPVRDGIVPTWPQLMNSKSAPPCTDDEVANSWLNNEAVRTAIHTAQKSVVSSWDLCTDRIYFDHDAGSMIKYHKNLTSKGYRALIFSGDHDMCVPYTGSQVWTRSVGYKIVDEWRPWSSNGQVAGYTQGYDKNLTFLTVKGSGHTVPEYKPREALDFYKRFLAGLPI

SEQ ID NO: 67882 - protein, 269 aa, Glycine max; identical to SEQ ID NO: 39987
  Clone ID: 700750160_FLI.pep

SEQ ID NO: 67883 - protein, 311 aa, Zea mays
  Clone ID: UC-ZMFLMO17155H10_FLI.pep
FGIDPNNAFAFWDWVGGRYSVCSAVGVLPLSLQYGFPIVQKFLEGASSIDNHFYSSSFEKNIPVLLGLLSVWNVSFLGYPARAILPYSQALEKLAPHIQQLSMESNGKGVSIDGAQLSFETGEIDFGEPGTNGQHSFYQLIHQGRVIPCDFIGVVKSQQPVYLKGETVSNHDELMSNFFAQPDALAYGKTPEQLHSEKVPENLIPHKTFKGNRPSLSLLLPTLSAYEVGQLLSIYEHRIAVQGFIWGINSFDQWGVELGKSLASQVRKQLHGTRMEGKPVEGFNHSTSSLLARYLAVKPSTPYDTTVLPKV

SEQ ID NO: 67884 - protein, 115 aa, Zea mays
  Clone ID: UC-ZMFLMO17026E03_FLI.pep
DAEALFESLEKSIDQSSTIPKCIASKSNLRISADGVGSISGRLLLGTAEVISPGELVDTTGAGDAFIGAVLYGLCTSMPPERMLPFAARVAGCGCRGLGARTSLPHRADPRLAGY

SEQ ID NO: 67885 - protein, 327 aa, Glycine max
  Clone ID: 700753743_FLI.pep
QNPLSDQIRSDPLQIRITAESMSTPALSGGTGLFSGFTRLCKGLAVVLVCGHIAVQFIPSAVNYLALIPARTIPFAWNLITAGYVEQSIYGVVVSTLSLLFIGKLLEPIWGSREFFKFIFVVNLLTSVCLFITAIALYYITRLETYLYMPLSGFHGVVSGFLVGIKQIIPDQELPFIKIKTKWLPSITVLLSIAISFWTLEATAYLPTIISGTYISWIYLRYWQRKPETKHRGDLSEDFAFSTFFPEFLRPVIDPIASIFHRMLCGRYDASNDGQGNSLESEPLPGSDSIEASRRRERGARALEERLAAERLAVARRELQREAEENV

SEQ ID NO: 67886 - protein, 407 aa, Glycine max
  Clone ID: 700755168_FLI.pep
GFDMICSGRDKIETPEQFKQAEETAKKLDLDGLVVIGGDDSNTNACLLAENFRSKNLKTSVIGCPKTIDGDLKCKEVPTSFGFDTACKIYSEMIGNVMIDARSTGKYYHFVRLMGRAASHITLECALQTHPNITIIGEEVAAKKLTLKNVTDYIVDVVCKRAEINYNYGVILIPEGLIDFIPEVQHLIAELNEILAHDTVDEGGLWKKKLTDQSLKLFDFLPQAIQEQLMLERDPHGNVQVAKIETEKMLIQMVETELEKRKQEGKYNGEFKGQSHFFGYEGRCGLPTNFDATYCYALGYGAGALLHSGKTGLISSVANLCAPVEEWTVGGTALTSLMDVERRHGKFKPVIKKAMVELEGAPFKKFASLRDEWALKNCYISPGPIQFSGPGSEVINHTLLLELEALA

SEQ ID NO: 67887 - protein, 239 aa, Glycine max
  Clone ID: 700755427_FLI.pep
DTSSGSPSPTNGKFNIFWDNQNLTPTQVSSIKAKNPNVKVALSLGGDTVSSAFAYFDPTSVDSWVSNAVSSLTNIIKEYNLDGIDIDYEHFKADSETFAQSIGKLIQTLKSRGVITFASIAPFDNDEVQSHYLALWKSYGHIIDYVNFQFYAYDRSTTVSQFIDYFNKQSSNYNGGKVLVSFNSDGSRGLIPDNGFFTACSMLKTQQKLHGIFVWCADDSKANGFSYEKQSQDLLVTAN

SEQ ID NO: 67888 - protein, 373 aa, Glycine max
  Clone ID: 700756777_FLI.pep
LSLRNSLSTVSATHRILCIYPPITFSLSSFGMSEKALRDLNTILGTERKNEDSSKACLSKPSVDNAVENIEEWQKKNNSPSLVSPAVNGNLAVTANSGAEVVNPEVEYIESENLNDVDDIDTCLKTLLAGLDSKDWVLVCDTLNNVRRLSIFHKEAMLDMLGDVITSIAKSLKSPRSAVCKTAIMTSADIFSAYNDLIIDSLDPLLVQLLLKSSQDKRFVCEAAEKALISMTIWISPISLLPKLQPYLKNKNPRIRAKASMCFSRSVPQLGAEGIKTYGIDKLIQVAASQLSDQLPESREAARTLLLELQNVYEKSHDLIKPATPTVNNEHTVNEENPEVSSWESFCQSKLSPLSAQAVLRVTTSIAREGLVS

SEQ ID NO: 67889 - protein, 88 aa, Glycine max
  Clone ID: 700757329_FLI.pep
PVKPVTDKGLSALELEKLPKITGKELVLGTECAVCLDEIESEQPARVVPGCNHGFHVQCADTWLSKHPICPVCRTKLDPQIFTSQSPC

SEQ ID NO: 67890 - protein, 255 aa, Glycine max
  Clone ID: 700759318_FLI.pep
SSFVRQLNTYGFRKVDPDRWEFANEWFLRGQKHLLRNIVRKKHGGAGRTNSNSHYSHPLKLEELDDEAMVMEIARLKEEQKALEEELHEMNKRLETTEKRPQQMMAFLCKVVEDPQILSRILREREKKHLGEKKRRLIPPPPPTAATSSSSSSGIKTEFEEDEGNYNIKSSSPETGLEIDNNSNNICSPPPLGCWGEQGCYGYNCASVPAPLTVVAPAFPTMGGGYLRRGGFWGEMTAEGNAVPPYPFSLLEGGF

SEQ ID NO: 67891 - protein, 256 aa, Glycine max
  Clone ID: 700761441_FLI.pep
EIGLALKKLFEEGVVKREDLWITSKLWCTDHAPEDVPEALDRTLRDLQLDYIDLYLIHWPIRMKKGSVGFKAENIVPSDIPNTWKAMEALNKSGKARAIGVSNFSTKKLGELLEYARVTPAVNQSECHPAWRQDKLKAFCKSKGVHFSGYSPLGSPAWLEGDFLNHPVINMIAKKLGKTPAQVALRWGLQMGHSVLPKSSNPARIKENFDIFDWSIPEDMLDKFFEIQQERLLKASFFHEPNGGYLPEDELWDGGI

SEQ ID NO: 67892 - protein, 255 aa, Glycine max
  Clone ID: 700762309_FLI.pep
MDAKRFIQLVEEKKKKIMERKEAPLKWEQKLEAAAEAKERKLKVAKHTKRSGSDSDSDYDSDDESRKTSKRSHRKHRKHSHYDSGDHEKRKEKSSKRKTKKWSSESSDYSSDDSESSFEEERRRKKKQSKKLRDRGSRSDSSNYDSTADELSKRKRQHKRQRPSKFSGSDYSTDEGDSLVQKRNHGMHSKRHRQSESSESDLSSDDAPHKKGHRKHHKHHKRSHNVELRLSDSDYRSHGQRSRSKSLEENSEDES

SEQ ID NO: 67893 - protein, 194 aa, Zea mays
  Clone ID: UC-ZMFLB73216D04_FLI.pep
IQSRQKICCVVPILFRHTVRFAVLRSARGKRSLVTMCWRRPTRAHSAEPRLPETSHSSSSARMLCSGALTEGSMARLGTADRDLALLPSGSSCDPSFTTGKSVLTLVLTEDIFSFHILPSCSIDGSGSGHFTGSSRLIGSTGRSTGLNSTPTSMPWGLSAGTAAAGSDSPVLMLGASVSTASESRRQQNPPMNK

SEQ ID NO: 67894 - protein, 146 aa, Zea mays
  Clone ID: UC-ZMFLB73325B01_FLI.pep
LASHPAVGPDGAGCAGEHLYGTHLDHGGDEVGLEGGGAVGVGEHLRGGGRVGEQRLVGGEQAAPGDQVGVVVGVEGGGRDGVHGEGRVGGAGPLRRALLRQRRQVRGVHGRVLPRAAGPVRVEAGREGAAARRAHRVRPRQRHHLG

SEQ ID NO: 67895 - protein, 479 aa, Zea mays
  Clone ID: UC-ZMFLMO17263D12_FLI.pep
LQVFRDCALQDIGLGEYPGVKDAWMEVVASQKQSLLSVDISCSEVADSGIDLLRDCSSMQSLACNYCDQISESGLGVLSGLSNLSSLSFKRSNAVTAEGMRAFANLVNLLNLDLEGCLKIHGGLIHLKDLTKLESLNMRYCNYIADSDIKYLTDLTNLKDLQLSCCKITDLGVSYIRGLQKLTHLNLEGCPVTAACLEAISGLSSLVLLNLNRCGIYDDGCENFEGLKRLKVLNLGFNYITDACLVHLKELISLESLNLDSCKIGDDGLSHLKGLVLLQSLELSDTEVGNNGLQHLSGLRNLQSINLSFTLVTDIGVKKISVLNSLKSVNLDNRQITDVGLAALISLTRLTHLDLFGACITDNGTNCFRYFKNLVSLEVCGGFVTDAGVKNIKDLKALTLLNLSQNANLTDKTLELISGLTALINLNVSNSRVSNAGLKHLNDLHNLRSLSLDSTRVTANEMRKLRATVLHNLISMRPE

SEQ ID NO: 67896 - protein, 58 aa, Zea mays
  Clone ID: UC-ZMFLMO17268A11_FLI.pep
CVLLTCEIVLSASERERERERERKERCRSSGSREEMRTVASFLKRKQGLSHGCCALCL

SEQ ID NO: 67897 - protein, 1036 aa, Zea mays
  Clone ID: UC-ZMFLMO17209F11_FLI.pep
STASLRLVPHFSHFRFSFHRAQESRGGGGSRRRTLRCCGGTAPAAAAGAAEGRMAAATAADMVWVRVLEDGVFRFDASEAARAAAGPSLSFADPRRREAPHDGADMPAVVPVCEVAAGGSQKVVIKLPPGTSFYGTGEASGPLERTGKRVFTWNTDAWGFGPGTTSLYQSHPWVLAVLPDGKALGVLADTTRRCEIDLRQESTIKFSALSAYPVITFGPFNTPADVMTSLSHAIGTVSMPPKWSLGYHQCRWSYDSSEKVLKVVRTFREKDIPCDVVWMDIDYMDGFRCFTFDSIRFPDPISMVDDLHSIGCKAIWMLDPGIKKEEGYFVYDSGSKSDVWIQKADGSPFVGEVWPGDCVFPDYTSEKTRAWWASLVKDFISIGVDGIWNDMNEPAVFKTTTKTMPESNIHRGDADIGGVQNHSYYHNVYGMLMARSTYKGMEMGNAAKRPFVLTRAGFIGSQRYAATWTGDNLSNWEHLHMSLPMVLQLGLSGQPLSGPDIGGFAGNATPKLFGRWMGVGALFPFSRGHTETGSIDHEPWSFGKECEEVCRLALLRRYRLLPHIYTLFYHSHTKGIPVATPVFFADTQDPELRKVETSFLLGPLLVCASTLPNKGAHEYAHKLPKGIWLSFDFADSHPDLPVLYLQGGAILPVGLPIKHVGEASLEDDLSLIIALNENGKAEGVLFEDAGDGYAFTQGDYLLTYYIAELHSSVVTVKILKSEGSWKRPKRNLKINILLGGGAMISTDGVDGEVIHLTMPSESVVSSLVATSEFEHKKRMEMIQPIPDIEEPSGQEGAELSKIPVDLKSGDWFLKIVPWIGGRIISMAHIPSDSQWLHSRIEINGYEEYSGAEYRSAGCTEEYKVIRRHLEQSGEEESICMEGDIGGGLVLQRQISILKDNPKIVQIDSSIQARSVGAGSGGFSRLVCLRVHPTFTLLHPTEVVVAFTAINGSKQEISPEAGEITFEGDLKPNGEWMLVDKCVGLSLVNRFNPREVSKCFVHWGTGDVNMELWSEERPVSNETPLRICHQYEVQQTT

SEQ ID NO: 67898 - protein, 174 aa, Zea mays
  Clone ID: UC-ZMFLB73210D02_FLI.pep
DPCPYLLSIWTPGETAQSIDAPKTFCDSGETGRLCGSSTCFSCNNIREMQAQKVRGTLLIPCRTAMRGSFPLNGTYFQVNEVFADHCSSQNPIDVPRSWIWDLPRRTVYFGTSVPTIFRGLTTEEIQRCFWRGFVCVRGFDRTVRAPRPLYARLHFPVSKVVRGKKPGAARAEE

SEQ ID NO: 67899 - protein, 83 aa, Zea mays
  Clone ID: UC-ZMFLB73270H10_FLI.pep
NGEYNVYKRRNMDKDPDSPIAYEEAKEMASQSCTISDDHSLLLLSIISSEALLLNSTADMAGTCPLSSQGIALEVGLCGSREI

SEQ ID NO: 67900 - protein, 219 aa, Zea mays
  Clone ID: UC-ZMFLB73271D01_FLI.pep
LRVKKLQQEAARCLSLHKTMELQPELSLGPVWPGFAAGDLAAKSSSSESDGTSRKKRKHYTASWEEPQQPPASLELQLNDPLPLDWEQCLDLQSGRMYYLNRKTLKKSWVRPQVQSVNLDLNISTAAAIDNCAANGAAAAASDDEDEPRKPAGTLFSGGSMVAVPCANCHLLVMLCKSSPSCPNCKFVQPLAPAVPPAAVAHWRIDAAVKPLETLSLLH

SEQ ID NO: 67901 - protein, 413 aa, Zea mays
  Clone ID: UC-ZMFLMO17011H08_FLI.pep
PAGAAVGHLALSKSSDHDNMSQGSSVCNADRAGTGSMHSGEDGSSGPRRKPNSPAAFVSASPLVGLPEFSHLGWGHWFTQRDLELATNRFSKENVLGEGGYGVVYRGRLVNGTEVAIKKIFNNMGQAEKEFRVEVEAIGHVRHKNLVRLLGYCVEGVNRMLVYEFVNNGNLEQWLHGAMHQRGVFSWENRMKVVTGTAKALAYLHEAIEPKVVHRDIKSSNILIDDEFNGKVSDFGLAKLLGSDKSHITTRVMGTFGYVAPEYANTGMLNEKSDVYSFGVLLLETVTGRNPVDYSRSSNEVNLVEWLKTMVANRRAEEVADPSLEARPSIRALKRALLVALRCVDPDSEKRPKMGQVVRMLESEEVPYREDRRNRRSRTGSMDIESIAEGSNSAEFGKKVERTGSSISDRSQP

SEQ ID NO: 67902 - protein, 127 aa, Zea mays
  Clone ID: UC-ZMFLMO17258E11_FLI.pep
GENFPEHSPLAHRLQLNDPSQATRVFSSSPRPSSFARISRSATGIQGTSLLTSGTPLPRLRPSLLSCGPGIRRKLVPHHGSSLRENIVSSISDLWTRQKRLFTDHPACKLKQKCRDRSWRFHGRRQV

SEQ ID NO: 67903 - protein, 366 aa, Zea mays
  Clone ID: UC-ZMFLMO17261H02_FLI.pep
LSEKYQKKFGPLRYFVAGILKFLCLPSYFYELEYLPSPKEMAVNGKGTDQDKAHLSNVYTDVMHSRSKKEGIPRASSLSSIDSIMTPSRMSLGDVDTSGSTVASTEPSDYVRGLDPKAKRLSLGRSNIVSEPEEVLHPQPHHGSFWPRTRSKARADRNSVGITSTNDTRSSWAAPSMHDKEDISSTISDPGPIWDCEPKWDTGPKWDSELTWEPDHPIELPGPQEDMGIGAPMELVPNLDEKWVVRKGHFLGVLVCNHSCMTVQSLSSQVVAPKAIHDDNSLDLLLVGGKGRWKLLRFFILLQFGRHLSLPYVEYVKVKSVKLKPGANTHNGCGIDGELCRVKGQVLCSLLPEQCRLIGRRCRQSI

SEQ ID NO: 67904 - protein, 346 aa, Zea mays
  Clone ID: UC-ZMFLMO17263F02_FLI.pep
ARRQRIFRDTEQYDPSSYEEYLRWYSGATRRYLVPATSDDGEAGPSAPTDDFSDLQYQAKSPIIRKAVDKLESMVKKAKRAMTTTADTTTQALVAEFLLGFEDVLQDLGEIQNNSGSTVPPFHLDSPHFDAAASQQTPQLLLEAEENLDTNNQEAQLEEDEELNTVERASLALEPVEELNDFSNDVLPGNLSLGVEEDCYSATPANGICDAATPMTDLVVPRSDEGLHQDQHLEDHTEIEPATLMVEPKCEEGDGSSFVLPPSPPELMLEEQDDSGLIALGTGSCTEQQSLGVGEAEDQENPSTGTAQHGIMIVERTGEENSSCNGVYSSCPPSSVIVESSSDYLC

SEQ ID NO: 67905 - protein, 337 aa, Zea mays
  Clone ID: UC-ZMFLB73264H08_FLI.pep
LARLAEMEVKYRCNQILEIGLPMGGLAKLFAQDWEGDVTMVMPATLAQYLKIIQNPTYAELQMAANQGRRCTWEKLSAIRANCAIELALDESIAVLNHKRRLKRSMERTAAASQGHSNYVRPKTPRRIPSWSRISRENSLESLSEEISAVAASSMQQGAALVVGAPPTTLSQHVRRSSHDGSESESETIDLNSWTRSGGPLMRTASADRFISFIHNIEIDTELSRPCAVEGDAAGILSESTFPNGPRPNNSSSVSMPGRCTENSGTESCNTVNTRASTPTSMAVREGDLLPPESTTDNVLLNIVKRDALQDGVTELAESSCAEGYAANCDTVSGLDC

SEQ ID NO: 67906 - protein, 411 aa, Zea mays
  Clone ID: UC-ZMFLMO17268D10_FLI.pep
SLLAPGFSTPHHHPHLLRSPAPSLLPSPPLPTQTSARGDPDPVSRTPIPSSPSEPSCERCSRGRPMASGGGGGLGAAGAGGRMPTWRERENNKRRERRRRAIAAKIFAGLRAHGGYKLPKHCDNNEVLKALCNEAGWVVEPDGTTYRQGSKPMERMDPIGCSVSPSPCSSYQPSPRASYNASPTSSSFPSGASSPFLPPNEMPNGIDGNPILPWLKTFSNGTPSKKHPLLPPLLIHGGSISAPVTPPLSSPSARTPRMKTDWDEAAVQPPWHGASSPTIVNSTPPSPGRPIAPDPAWLAGIQISSTSPNSPTFSLVSTNPFGVFKESIPVGGGGDSSMRMCTPGQSGACSPAIPGMPRHSDVHMMDAVSDEFAFGSSTNGAQQAAGLVRAWEGERIHEDSGSDDLELTLKL

SEQ ID NO: 67907 - protein, 165 aa, Zea mays
  Clone ID: UC-ZMFLMO17153B11_FLI.pep
QVASEILPDKVPEGNDVSSTGITKDTTGHSGDVKAPTSEPHLGETRINSASESIPNDAGPPTQNKKNGPTIKKTLVNGLVDQPNANSGLESSGNDNPSYTNSSSAVPVPPASTQPVESAAAAVDVDSVEKGPGTTPEQPAKRRAPNVRRGQRRVLRSATREGRAT

SEQ ID NO: 67908 - protein, 323 aa, Zea mays
  Clone ID: UC-ZMFLMO17069D08_FLI.pep
SVQLISNSGRTPSERKDMFVSPASNPICKLLFLVLASEEEASLHLVLGASIRILLVVSVALAAAADGRLPAAGQAVEPGVAELELDRVAEALRPREAEVRAEPGRRAHAAGGKHVARRALHAARLHHQPPHLPRRLRGGGGPAAVRGHLLDQDDPVRPPRPAWPPPAPHVRPALRRRGLPPHRHALALAAAEQVHQERRLPDVPHDLRDRVPHPPLHLLLPDLLRHLIVLPSAQHGPRQPLVLLPPLELQAAAGRRVRARRAQAHRRRPPPRRHGHERCGHPRSRPRQRHRRRRRRRWPVAPHGRRRRHRTLDHRSCRRDLLR

SEQ ID NO: 67909 - protein, 328 aa, Zea mays
  Clone ID: UC-ZMROMO17096C12_FLI.pep
SISDGTVTIVAKTQEIMDKAIEKVEFLVGREIEVGRTYKGIVSSIKEYGAFVEFNGGQQGLLHISELSHQPVTKVSDVVTLGQSLSLRCIGQDMRGNIKLSLKATLPQPRIKKDLKNKDPLPSEVTGWAAVENMSSVDVDAQLSSTEHENGTTEEAAAFSTPSVIIRSAADCDAQDDANGSKKRAKVAKSSPRPNKPASECHDVRKATAKKATGATTKKTKKVKIEESVSNGLETSGSDVPEQSADNTSDQNQSPTKFQSGAMKLGDVVTAKVYQIRAYGLVLELSDGVRGMHKFEANGLKEFEVGQELVVKCSSFNAKGIPLFSLLD

SEQ ID NO: 67910 - protein, 110 aa, Zea mays subsp. mexicana
  Clone ID: UC-ZMROTEOSINTE035C01_FLI.pep
MIPPPYYHPAFVPMPCYGYVPFYCEPQGAAQAPHEVVKPVAVHSAPPLNAKDLYNMSELSLKGDSNANGGVPASPLPPKPIGRPERQSAFHGKGPTPTGGSSGGLIPAVK

SEQ ID NO: 67911 - protein, 570 aa, Zea mays subsp. mexicana
  Clone ID: UC-ZMROTEOSINTE039B12_FLI.pep
LPNTAGKSNILLDDSQNQTHDVARSHAISADPEATLNPTRNTSGWLFPLFPIFLVTGYLLSLISASKSCRQFMIQLIEPFTHNKKSVDIRGRSEGTPKKRKTRKKDGLVNSSETLTASDKECSDTGGSTEAPMKNSALTDALGGRQIGKVYVSNKEIGRGSNGTIVFEGSYDGRQVAVKRLLRSHNDIAEKETRNLIISDHDPNIVRLYGCDHDSDFVYISLERCHCSLADLIQKQSYLSSGESISNNEVSMSINSKISNVKGIDMELWTQDGLPSAQLLKLMRDVVAGLVHLHNLGIIHRDLKPQNVLISAEGPIRAKLSDMGISKHLQDDMTSVSHHGTGIGSSGWQAPEQLRHGRQTRAMDLFSLGCLIFYCITKGKHPFGEYYERDTNIVNNRFDLFVVDYIPEAVHLISQLLQPNPETRPTAVYVMHHPLFWSPELRLSFLRDTSDRIEKTSETDLINALESIGPVAFGGKWGEKLDAALVTDMGRYRKYNFESTRDLLRYIRNKSGHYRELSDDLKGILGSLPEGFDHYFASRFPKLLIEVYKVLWVHCKDEEAFSKHFNGSSL

SEQ ID NO: 67912 - protein, 564 aa, Zea mays subsp. mexicana
  Clone ID: UC-ZMROTEOSINTE040D06_FLI.pep
GERSNARHKQVMLQAYEQQCDEAHKIFAEYQRRLHQFVNQARDVRRSSIGVAGATGALVDMQLQSDRDDLYPSTIKSNRLPEDLLETAGERSIRKACETLAADMIETIRSSFPAFEGCGINSSCQLDAEKLGIDLVGEIPTYVKLVALDSLKNPFLLLQSIITYTSRMKTLIHRETDKIDIRADAELLRYKYENEQVIDAASTDASSPLPYQVYGNGKTGSQLSTRGTYDQLLERQKEHVQQFLATEDALNKAAEAKALSQKLLQRLYGTADMAGNKKLPTGITTQNVTNSRHLELDVWAKEREVAGLKASLSTLTSEVQRLYKLCAEWKEAEDSLKKKWKKIEEFDARRSELEFIYSALQRANMDASAFWEQQPLSARGYASTTIIPACHAVVDMSTNSRDLIERELAAFSQSLDNSLCRLPATPQALLEAVGSNGVTGSEALAAAEKHAALLTARAGARDPSAVPSICRISAALQYNFVSPGTEGTDSGLASVLNSLEFCLKPCGSEASILEDLSKSINLVHTRRNLVENDRVLLNRAHRAQQEYERLMSGTSSQPPQLWIG

SEQ ID NO: 67913 - protein, 338 aa, Zea mays
  Clone ID: UC-ZMFLMO17205A07_FLI.pep
FSLSGSWNENYNNYMESCDYEASAILSRVMVATTFIVFGNIFLVSFGNHQSPVYTPEQLIAKYSNLVFVLYCMSLVFVVAFNHYLYRSGETIISNSSKNAGTYWRTMLPFSYAVVSGAIGSCSVLFAKSLSNMMRLTMNSRYEFHSWFTYSIVLLFLCTAGFWMGRLNEGLSLFDAILIVPMFQIAWTFFSICTGFVYFQEYQVFDTLRIIMVVLGMTFVFVGISLLAPDDTKADTKDGSSTAEESIIDMDRNGKMQMEETDTDDSNSFVTSVKAKAKRVLLKAKSACSMSLGLGEDTISASSVLAMPMVSSRTTGFRGIEDDRSKYVPLRTTDWSNL

SEQ ID NO: 67914 - protein, 97 aa, Zea mays
  Clone ID: UC-ZMFLMO17068C11_FLI.pep
GPSATSWCRGTPPSLGRGRRQIAAADSAEDGATTDDGSLGEGVIRDTIRSARFVCTYYLPMPMQKQHVAHLFFLELSNSLIILVFPPVVQNKTCRLF

SEQ ID NO: 67915 - protein, 72 aa, Zea mays subsp. mexicana
  Clone ID: UC-ZMROTEOSINTE047E08_FLI.pep
CSHVTHIEWSYTHRTGSISRQEQTQQKSSGVHYSYRLPGHGRGMGSLQPTSVSFMILLGCDEGEELVLGLVL

SEQ ID NO: 67916 - protein, 46 aa, Zea mays
  Clone ID: LIB3075-022-F1_FLI.pep
AKRRTYFCGGRVGNGCMFFTSSNLYCTVSPRCRVVHQKTYRVCFRC

SEQ ID NO: 67917 - protein, 136 aa, Zea mays
  Clone ID: LIB3076-034-C3_FLI.pep
QKLSISQAQSEAAVISEIRMRRFLPPLDNVHAWAWHVLHFRPSHTALSPVKSRTAAAHDLASLPACGASSQAGRPLGGAGDDGEQVVAEGVAEVLGEVLDGAFAGDVGLDEEGEHGEHGEPAVLDLLHLEDGGLVG

SEQ ID NO: 67918 - protein, 297 aa, Zea mays
  Clone ID: LIB3075-049-F3_FLI.pep
DAEAERPAASRTSPRRPPPTTLRAAASPGTPARRCCPSTTAARPSTGSPPPTTTASRRSASSTAGPGPTPTPARSRAPRRSTPRAASSRGTAPAVTSRTTSPAATRWTLPPSRTSASPASSPSSPSSAARSARPPSCGSSARPSSPFRAPTGCGARSFPTARTAPTRRHPPTSPPRASTAPLISRLPRSSSAGTTRCRTGSAGTATRCAVRGRRCGCWSTPTPSTPSTSSRSSRSPRTSCYGSRRSSPAASDGGRTAWARAAVAQMRGGCICDCAKWLGSVLWTGRCCLVCDVVRRV

SEQ ID NO: 67919 - protein, 144 aa, Zea mays
  Clone ID: UC-ZMROB73028H02_FLI.pep
PPPSDDDEDEDEHEEAVAAAKRRRDGYNGSKSYREADDQLLLQLEEKDVISSAATILSDLCGPQEWISINKLHEVMFDKYGGMWHHSRVRKYLTSEDFAEAETDGRLWHGLALLLRKYPEHFVINIRKGGGLITEFVSLVSLQS

SEQ ID NO: 67920 - protein, 137 aa, Zea mays subsp. mexicana
  Clone ID: UC-ZMROTEOSINTE072H05_FLI.pep
EREREREREREQVVVVRPCCVKEQGRGRAVSPCCAKKKMAAVIASTQNCRVRVPPLIVFTAVLLVTAAATVEPASATGWSSVTDSRSGGYSAFSLQGARKLLLQDLCIPQGYPCALAYFGLGCCSGETCYDAQQICL

SEQ ID NO: 67921 - protein, 115 aa, Glycine max
  Clone ID: 700743719_FLI.pep
ARIMTDGFNSCRNVVCNFTEGAMYSFPQIRLPPRALEAAKQAGKVPDVYYCLKLLEATGISTVPGSGFGQKEGVFHLRTTILPAEEDMPDIMDSFKKFNDEFMEQYEDDRGYSRL

SEQ ID NO: 67922 - protein, 256 aa, Glycine max
  Clone ID: 700745970_FLI.pep
SSACIPQVLCTCADRMYAGILLNTRLACPLSSILSSPFSESAAQFCAASVVIALEDLHKNGVLYRGVSPDVLMLEQTGHIQLVDFRFGKQLSGERTFTICGMADSLAPEIVLGKGHGFPADWWALGVLIYYMLRGEMPFGSWRENELDTVAKIAKRKLHLPETFSPEAVDLISKLLEVEESTRLGSQGPDSVKSHPWFNCIEWEGIRHHTFPVPQEIISRITQYLEVHSEDCSTGYLGSPLQEVKELNVPEWLEDW

SEQ ID NO: 67923 - protein, 187 aa, Zea mays
  Clone ID: UC-ZMFLMO17005D02_FLI.pep
IKLQNLAYICSLSAAQLFDGWCRDFSRGENQTENAAVSYGEYLHCVGDFQMAAQVYEKILEAFCMDDMSGNLLAAGNMVPEEASLGATCSYGQLLSHSGKFAEAEDYLTRALQKAEEQFGANHPKVGIILTCVARMYKLKAKSEGSTSIMVQEGLYRKALEVLKAPAINSEGKNNDLLSMIRFLLIC

SEQ ID NO: 67924 - protein, 497 aa, Zea mays
  Clone ID: UC-ZMFLMO17007F12_FLI.pep
PPSSAVATALPSLPLRVARRPIFGLDTWPAPPSRTRRVAGRIRPPAAANVDLRPPARQGRFKGRTRGGRVLVGFIPGRRLHMSTTPRSRSQGSRTTRPWILSGMDFAGSRRKPNLTGKIAVAAALTVMCIIVLKQSPSFSGTSVFSRHETGVTHVLVTGGAGYIGSHATLRLLSDKYRVTIVDNLSRGNMGAVRVLQRLFPEPGRLQFIYADLGDAKAVNKIFSENAFDAVMHFAAVAYVGESTMEPLRYYHNITSNTLTVLEAMAAHNVNTLIYSSTCATYGEPDTMPIVETTPQNPINPYGKAKKMAEDIILDFTKSKKQSNMAVMILRYFNVIGSDPEGRLGEAPRPELREHGRISGACFDAALGIIPGLKVRGTDYSTADGTCVRDYIDVTDLVDAHVKALGKAQPGKVGIYNVGTGQGRSVTEFVEACKKATGASIKVEYLARRPGDYAEVYSDPSKIHMELNWTAQYTDLGQSLAQAWKWQKAHPNGYGPA

SEQ ID NO: 67925 - protein, 204 aa, Glycine max
  Clone ID: 700742959_FLI.pep
AGLCSVCGEESFGTGSDHIREKDGIWAVLAWLSILAYKNKDKLEDKLVTVEDIVRQHWATYGRHYYTRYDYENVDAGAAKELMAYLVKLQSSLSEVNQIVKGIRSDVSNVVHGDEFEYNDPVDGSISSHQGIRYLFEDGSRLIFRLSGTGSEGATIRLYIEQYEKDPSKIGRLSNEALAPLVEVALKLSKMEEFTGRSAPTVIT

SEQ ID NO: 67926 - protein, 442 aa, Zea mays
  Clone ID: UC-ZMFLMO17212A11_FLI.pep
LQISPMGSMSQKIKIFTEDEIASITSNYSTLIGKGGFGEVYRGVLDADDDLVAVKRYIRQDLRDEFMDEVNIHSVMNHNNVVKLIGYCIGESTLMLVTEYISNGNLDDILHRSDASIPLDVRLGIAIGCAEALSYMHSMDSQSDNHIYHGDIKPANILLDNNLTTKVSDFGLSRFLFSGTTQFTTTLKGSMGYMDPVYFHEGCLSPRSDVYSFGIVLLELLTRKRAKYGDVNLIPTFNKACAKGKGLRELFDAAIAEKDNVKILKESWKLASQCLSLNIHTRPQMNEVAKRLRMLKKELKTSPQSILATHSMWAKQYRQAGSSSPSFKKKLSFFKGNASSYSKVISELGGNVRVFTKEEINEVTHNYSNLLSGGTSATEVYKGTLEDNTMVAVHRLLYEGSEEAFINGGMVVSKIAHKNIVRVLGCCLEPHVKLCIDSYSVS

SEQ ID NO: 67927 - protein, 87 aa, Zea mays
  Clone ID: UC-ZMFLMO17105H02_FLI.pep
CSLTSFIVIAFCTFLKIMKTMKCSWFLSSVLDLYVSSIENWFRAGVYGLPLKSNLSLSLSLSLSIYIYISSIENWFRAGVYAFWLNR

SEQ ID NO: 67928 - protein, 354 aa, Zea mays
  Clone ID: UC-ZMFLMO17214E11_FLI.pep
LAHATTPSSPDVPYARFLSSSMGIKTASKDHNMPFLSTTYSGGSGLQTSYPLYPESPCSSLISPASVTPRTGLSSPIPEQEVPPAHWKTSRSACDTPYFRASPIPEQETTAQWKTSRSACDTPYARTSPTNIFGLDSSTPRNYMLDNNFFRPAASAQFYLDQAQQTFSHNGGRVSVSREKQGADEIEAYRASFGFSADEIVQSQSYVGIPDAVDESFSISPFGNNAPATEICPFSDLPNEVQKVDKSCAYAKDDTSPKKSANQLSTDSPNKVLRLDVFKGTKGGHQSEDECIRKDGHLFRKTADEISLKPIEVRKKSLPGHSCSDAEIEYRRTRSLRDANGVLSRRSALARQLH

SEQ ID NO: 67929 - protein, 243 aa, Zea mays subsp. mexicana
  Clone ID: UC-ZMROTEOSINTE017H11_FLI.pep
RRQVLRSCSGPSPATSTQQMDTGVQAMFIISLVLWCTTSFALDDAAATRIPNVGTLPLSMKENPQLCQLCEEFASEALFYLNENETQTEIIDTLHQACSKFGSFKLECTRLVDYYVPLFFTKIASLSPEEFCASASFCGEVTFIRLPRHEDTCTLCHVVVDEVVTNLEDPDMELKIIEILLKGCNNAEDYVQKCKRLIIQNAPIIMENIKKFLEKRDFCNSIHVCGGKSVRAGSQVLRSLSSA

SEQ ID NO: 67930 - protein, 89 aa, Zea mays subsp. mexicana
  Clone ID: UC-ZMROTEOSINTE034H05_FLI.pep
CHTRTYVYVNFCCIRIIYIGKRMASSSLHQSLSSKCSRQRIASHHPLACLRAILFLSALHCMSLFLFLLVCLVRLSVLQPGLKKRNSIS

SEQ ID NO: 67931 - protein, 351 aa, Zea mays subsp. mexicana
  Clone ID: UC-ZMROTEOSINTE007F06_FLI.pep
DFVMPFFLFIVGVALALAYKRVPDKLDASRKALLRALKLFCLGLVLQGGFFHGVRSLSFGVDLQEIRLMGVLQRIAIAYLLTALCEIWIRGDEDVDYGYDLLKRYRYQLFVGAVVAITYMSLLYGTYVPDWEYQTSAPGSTEKHFFVKCGVRGDTSPRCNAVGMIDRKILGIQHLYGRPVYARSKQCSIDSPQNGPLPPDAPSWCQAPFDPEGLLSSVMAIVTCLIGLQYGHVIVHFQKHRERMMNWLIPSFSMLVLAFAMDFFGLHMNKPLYTLSYTLGTAGAAGLLFSGIYTLVDIYGYRRPTVAMEWMGMHALMIYVLIACNVLPIFIHGFYWKEPKNNLLKFIGIGA

SEQ ID NO: 67932 - protein, 463 aa, Zea mays subsp. mexicana
  Clone ID: UC-ZMROTEOSINTE020H10_FLI.pep
STSNLSLSSGVNNGPTPVYPTGTEKSSGETWFEVGWSRTYTATTDDIGHVLRFECIVVDVETRGTVRAPTSVMTSRVIPAPTPTPRRLIPVNAADAMVHFDLDSRTSSFGTFTVLSYNILADTYATSDTYSYCPTWALTWAYRRQNLLREIIGYHADIICLQEVQSNHFEDFFSPELDKHGYQPLYKKRTTEVYSGSPQAIDGCATFFRRDRFSHVKKYEVEFNKAAQSLTDAIIPAAQKKLALNRLVKDNIALIAVLEAKFSNHGTENPSKRQLLCVANTHINIHHDLKDVKLWQIHTLLKGLEKIAVSADIPMLVCGDFNSTPGSTSHGLLARGKVDHLHPDLAIDPLGILRPLSKLTHQLPLVSAYSSFVSMAGVGYDLDHQRRRMDPGTNEPLFTNCTRDFTGTLDYIFYTADSLTVESLLELLDEDSLRKDTALPSPEWSSDHIALLAEFRCKLRVRR

SEQ ID NO: 67933 - protein, 193 aa, Zea mays subsp. mexicana
  Clone ID: UC-ZMROTEOSINTE031A06_FLI.pep
KKRMTPQHDAPQAIQFKVSDKGSGNVGSELPSHPGVVTGSILTATKKLGTAVPFDNAKVLIVSADSHEGFHGLIINKRLSWGVFKDLDSSMEPIKHAPLFYGGPVVVQGYHLVSLSRVSSEGYMQVIPGVYYGNIVATSRVVTRIKLGEQSVNGLWFFLGYSGWGYNQLFDELTEGAWLVSVKPIEHLDWPKS

SEQ ID NO: 67934 - protein, 103 aa, Zea mays
  Clone ID: UC-ZMFLB73145H05_FLI.pep
SELSIGQGQLKDAGWEKKEPQSFAVYIYYQTGCRIAATAVGRARDPVGPARFELFSPDTVTLAGVCRRLGVVPACLVLMRRLGSVPWNALSEPEVLLLLLLSI

SEQ ID NO: 67935 - protein, 130 aa, Zea mays
  Clone ID: UC-ZMFLMO17127B03_FLI.pep
RDLTRLRRWQAPSSSTSSLRLENQMSELRRRQAPSSSTPSPHRRGGAPPQPGPALRPPLPPAAPPRVRRGSGDLHHHGMRRLPQPPWIHAVSGAVDPTTPRLSLCVSWGHCAENQEDPNGCVKSERSFRL

SEQ ID NO: 67936 - protein, 675 aa, Zea mays
  Clone ID: UC-ZMFLMO17184G03_FLI.pep
HTGALYLIQRETQATLLAALFRVLILLISATPYARMPKELLPTVIKVLCSRLLNKHSNKTEHYAVLVTVLSCLETAFSKVPPTLDVFAVLTEDCCAGPSHEQEESNVIAFLLHCIEEEMHYSVRHGAFQVLRSAVHNYPSCANMIWEKLRDNVLNLLQIQSFEDQKYDANFGPPGAKEESSIKGRCLVAGIKVMDECLRVSSGFTGADDIKECRLLDIQQISDCTINKTIKSAPHFEMEAAGSSQNCTLDITLGINRWIEVIETHLPKGLSHGSAMVRTASLTCFAGMTSDVFFSLPENKRDYVTSSSVHAALNDMVPSVRSAACRAIGIVACFPQILSSSSLPGKFIDAIEFNTHNSSTPVRVTAAWALANLCSCIRFRALEVHTDPYAGVGVLSKSSISLLVEVALRLAKDSEKVKSNAVRALGYLSRFIRFNYHAGTINDPSDSVFYGDPVWLERMVQALMSCVTTGNVKVQWNVCHALSNLFMNDTLRLQDMPWASSVYSILLLLIRDSNNYKIKMHAAVALSVPVSRLDYSSSFPDVVRGLVHALESLNSNNSSLPSNFKQRDNLEKQLTFTALHLLSFVSPNDDPSLKDFLTKKSSFLEDWLRSLSASLNSSERQPLPTEATNDEDGFSPNVTQKGMLSSALQSLLGVYAGRTQQVITQRFEQLARSVA

SEQ ID NO: 67937 - protein, 274 aa, Glycine max
  Clone ID: 700671501_FLI.pep
VRLLGFCLEGQEKILIYEYIPNKSLDRFLFDPVKQRELDWSRRYKIIVGIARGIQYLHEDSQLRIIHRDLKASNVLLDENMNPKISDFGMAKIFQADQTQVNTGRIVGTYGYMSPEYAMRGQFSVKSDVFSFGVLVLEIVSGKKNTEFYQSNHADDLLSHAWKNWTEKTPLELLDPTLRGSYSRNEVNRCIHIGLLCVQENPSDRPSMATIALMLNSYSVTMSMPRQPASLLRGRGPNRLNRGMDSDSSTSNQSTTCSIAWSVNEVSITDLYPR

SEQ ID NO: 67938 - protein, 306 aa, Zea mays
  Clone ID: UC-ZMFLMO17011A04_FLI.pep
RGWITDAVDARRRVPGAPVPLSSVRHILDVISFVLGSFILALAIEQYRYSIHRRLALNVRAPRSRVRTNLLLLGVCGTTVFISMWIHNNTPCTVMMVQYSGFVFGPTETNRPKGPDDVFFPYHRDAADGRHSVLCYTFHAMASSPLAPTRTCSALVPKLPRRPSLPSPCRSPRRSARWPRLASVRATPGSSWTAAATEEQKERKRCLRCGGSYRDEENHPTACAFHGHVTGEKGLFSLSPPHQGIDGEWSDKSGIIVYRWNDEGSRPNTGRANWKRRWSCCQEREEDAPPCQRGWHVSYDDGYTLF

SEQ ID NO: 67939 - protein, 318 aa, Glycine max
  Clone ID: 700743339_FLI.pep
KKMGGGGAMRSAAKIAGIGVSKAALRPSALPTEQTVRNASRPTAVSGVSSQSAKSAEVAPLHTAAAWDDWDFAEDGELVVPRMVFGSVPTLDEAKEATAELKDAIDQVYLCPETSQYSSPGGQVSALSPTLYGPVNRSCVIDAISDPTAPKHAIQAFHLLSTSREAQAVVASLACDPNVWNAVMENSAVSSFFQSQQSVAGFGAAENSEEVDKLSSCASETVESPEKLEGSAESHPGNMFDDFMGLLQNVKLTVIELVSRLSGFLQNIFPTPDAMREKMSFDADGNTKASFMDSKISMGGTFIGLAVLVIMVIVTKRA

SEQ ID NO: 67940 - protein, 117 aa, Zea mays
  Clone ID: UC-ZMFLMO17118D07_FLI.pep
PSWSVTAVDAACSHLLRYNTMRNVLFMAMTEFQKLTEEPDWTFIRAQEDKMAFLFGVDDHWGPLSHLEEISKHAPRVTLSVETEGHTHGYCCTEAGSVWVADYIANLIKNQMLLWNN

SEQ ID NO: 67941 - protein, 84 aa, Zea mays
  Clone ID: UC-ZMFLMO17101C02_FLI.pep
RESRDRMGKPCSVQQSARSSCGHCRFCQEGGAQRLGRPMELDTAVIISFVTSLCFSSSLFSPIVTSFFCIIIGPFFNSDMLFFL

SEQ ID NO: 67942 - protein, 196 aa, Zea mays
  Clone ID: UC-ZMFLMO17180G06_FLI.pep
KGPRSRGLQQEMGVNKSAVLLGVVLVSVLLFLDVVYARELTEANGSGVKNNVKPAGEPGLKDEKWFGGGYKHGGGYGNNQPGYGGGGNSQPGYGGGGNSQPGYGGGYKRHHPGGGYGSGQGGPGCGCGGGYGGGNGSPGYGDDNGGGIGTGGGNGNAGGYGGGGGGYGGGYGSGSGTAPGGGYHGGGGAQRYAGQN

SEQ ID NO: 67943 - protein, 164 aa, Zea mays
  Clone ID: UC-ZMFLMO17186F05_FLI.pep
SIRCILFIPLSNPLNSIPNKLRRKDTLHRLKTLGTKKKRGDTFVGSLECNSGTGGLELSGERLGLLFRQPRAHHYGRLLHELLCLLQTQVRHRAHLLDDLNLRRGLVLLDLQVERRLHRRGGLHGCSRGVPGPGRRGSSSCAGGERQAELEAQERRVVVQLGGG

SEQ ID NO: 67944 - protein, 340 aa, Zea mays
  Clone ID: UC-ZMFLMO17310F03_FLI.pep
AALLTQTRAEEEALRRRAAALQGELRRLREAAAAHADSDKVEEDLDRAACLIAEGDVASLLPSKTQGAFLKMFLGPVNLRATRKEVQLKVKEEYNSYRDRTALLFLCFPVILLFLRQWLWNGCFPVLPVQLYQAWLLFLYTSLALRENILRVNGSDIRPWWILHHYCAMLMSLVSLTWEIKGQPNCARKQRGVELFLCWAIMQGFVMMLQNRYQRQRLYTRIALGKAKRMDVVWGETAGVEGQLLLLCPLLFLLQGFEGYVGFLLLRTAHTGVVPEWQVVVCGILLIAMAIGNFANTVDTLVTKSRFKAKMKKSKGRRDLDTCPSPTGSSSPIDSATTKA

SEQ ID NO: 67945 - protein, 257 aa, Zea mays
  Clone ID: UC-ZMFLMO17054D02_FLI.pep
YHDKAIAADQNFPSIGPPHHLLRLSKTTAMAAVAAAPAAAATTRAGDTTPSSLGVPALAETESRPSSSSFPPLPSAVAEPFRVSISSSRAAFSWYAVCSWSPSLAPLRISSSWLAFSAARRPWRRSTSARSVAASLSLVAATCSAAATSSRAWDTRTSRRRDSEDRNRFSCPTASSFSSRSRFAARRASISSAKLWSLGVLSSPLMEISKSAAAAAVGEANVSSPFSIGNPPPLSRGGAVEVEVDAVRGWKWEQKKN

SEQ ID NO: 67946 - protein, 103 aa, Zea mays
  Clone ID: UC-ZMFLMO17059A09_FLI.pep
LFRAMCYIDFGLPVVEDVDLPNGSAGAAEKSDTKKIKKARQKRKAHDEESKQEKRNNLSFFAFKEPVLFVGHLLDSSILIVEKRWMDVVEGFGAPVHRHIYGT

SEQ ID NO: 67947 - protein, 119 aa, Zea mays
  Clone ID: UC-ZMFLB73264D05_FLI.pep
YIDGAKGQGALLHAYKTRAWAKQYADERCLCLRCCIAREAKLILRTRECAGPSRVPPHPSRLITFPCACACAYAAAAPAMSGFCPLSPSFHTTPSVSFGWMSVCSHVTSLQLAARTSCR

SEQ ID NO: 67948 - protein, 362 aa, Zea mays
  Clone ID: UC-ZMFLMO17060H02_FLI.pep
QFRSATSSGSNSSGENFLKGVKWSPDGSSFLTSSDDNSLRLFYLPEEAYIAAEPVAEAAVESEDSYGAFIQANEGEPVYDFCWYPCMSLSDPATCVFASTSRDHPIHLWDATSGELRCTYRAYDAMDEITAALSISFNSSGSKLFAGYNKAIRVFDVHRPGRDFDQYSLLKGGEGPTGIISSISFSPQNGMLAVGSYSQTTAVYAENNMEPLYVLHGQLGGVTQVLFSKDGNYLYTGGRKDPYILCWDIRNTVDIVYKLYRSADTTNQRIYFDIEPCGRHLATGGQDGMVHVYDLQGGQWVTGYQAAADTVNGFSFHPYLPFAVTSSGHRRFGMQDEFEDELNLAGDENSCSVWMFSSSQEA

SEQ ID NO: 67949 - protein, 320 aa, Glycine max
  Clone ID: LIB3028-022-H7_FLI.pep
PKDVGVLVVNCSIFNPTPSLSAMIINHYKMRGNILSYNLGGMGCSAGIIGVDLAKDILQANPNNYAVVVSTEMVGYNWYQGKDRSMLIPNSFFRMGCSAVLLSNRRRDYSRAKYRLEHIVRTHKGADDRSFRCVYQEEDEQKLKGLKISKDLIEIGGDALKTNITTLGPLVLPFSEQLLFFSTLVWRHLFGSKNDGNSPSMKKPYIPDYKLAFEHFCVHAASKTILDELQRNLELSDKNIEASRMTLHRFGNTSSSSIWYELAYMEAKESVRRGDRVWQLAFGSGFKCNSVVWRAMRRVTKPSRNPWLDCINRYPAPLNN

SEQ ID NO: 67950 - protein, 188 aa, Zea mays
  Clone ID: LIB3069-021-E6_FLI.pep
RACPPLPRRVPTSLPTIIRKEGIAMVRASLLAVREALAVGAAAATRHGASAAPLGPVAILLLAVAATAAVAAIAAFGCAQGAKKPRRQSSNNNAYYYGQGYPPPPAGAYGYPAQAAYGYPAQGAGGRPGRSGLGSGAAGLAVGAVGGLAAGAIIGSALDSSGGGGCGGGGGCGGGGCGGGGCGGGCGG

SEQ ID NO: 67951 - protein, 95 aa, Zea mays
  Clone ID: 700572288_FLI.pep
FLSNIKSELCCFLISCTHPIEPNVNTDRALFMGHSNPYAISDRLEFYSKVNIHTIFTTNYHHIRTTEIQLIPHIFRKSAMSCAGTLLLNSAPIPF

SEQ ID NO: 67952 - protein, 109 aa, Zea mays subsp. mexicana
  Clone ID: UC-ZMROTEOSINTE070C03_FLI.pep
KKYTFVNLSRYNSNSAYCIQSYLTGKKRTTVHVFYTLETSTKLPFLSRIFQAATTEILGRSACASTSRIKKFPPQLELQKFCQTWWLLKVQLLLALIVMIWALVLLALQ

SEQ ID NO: 67953 - protein, 104 aa, Zea mays
  Clone ID: UC-ZMFLB73126D09_FLI.pep
CSPSPFPPSVWIFVLWATGFPEIAAEAWSGSGSSSLLCLILCGEGAWIFSLMSFRVMSPWMLYGLISTKGRDTDGLAFFAPIINFASCTFQRSRSRACRIVVDY

SEQ ID NO: 67954 - protein, 65 aa, Zea mays
  Clone ID: UC-ZMFLMO17211H11_FLI.pep
LNLQFQALRLHIDDSDSSNEVTQPLPELASSPHGSQSMHVHYGLMACAIALTGVAVMVYMRHSKA

SEQ ID NO: 67955 - protein, 169 aa, Zea mays
  Clone ID: UC-ZMFLMO170112D07_FLI.pep
RLIRLPSSHTTTIPPSLKSPHHYILRCKRLASPRLCSAHGGRGGDRPTAHERELALAEAREGAQAATRRPAPPRDGVHQHVQPRRRGGVRRRPAAAGRAGPAHLLLQRLRRGADAGAEPGDEPAVPGGGPQLRVLRGQPPHDGRRPALLQGQDPSPQGQRRRQCLLRCR

SEQ ID NO: 67956 - protein, 102 aa, Zea mays
  Clone ID: UC-ZMFLMO17058E10_FLI.pep
FSTRGLHLFIIMYMKEAQGRLHSITFAPTRDKAKPSLATSEVHNSDRDGITHDTTSRVAKQSSTTASICIYVSSVVQHHTIHGSTGPILAMISSDEPPHHSA

SEQ ID NO: 67957 - protein, 91 aa, Zea mays
  Clone ID: UC-ZMFLMO17150A06_FLI.pep
TSLHQATKFAQFRCRTAFQSVIVFHCCCLLLPNMFEEFSYHVPRLPDLVFQLVIIKCSVGDHIFHAYHVQPVIMCFSCQSSVTCLNSLVAE

SEQ ID NO: 67958 - protein, 119 aa, Zea mays
  Clone ID: UC-ZMFLMO17174D03_FLI.pep
SLMLTAPGFGQILWRRRWFSDEPKQRHLISHPQGNSGLQGSQMFPSCFPYCHHQMVYQSRSFWIWSLSSNRPETVCCINPCIYQATPFYLLVIQAFRTHLRLSAQCLCLEVYGHKLRVL

SEQ ID NO: 67959 - protein, 132 aa, Glycine max
  Clone ID: 700889880_FLI.pep
SNPNDMTGETGTLGYMAPEVLNGNPYNRKCDVYSFGICLWEIYCCDMPYPDLSFSEITSAVVRQNLRPEVPRCCPSSLANVMKKCWDASPDKRPEMDEVVSMLEAIDTSKGGGMIPHDQQQGCFCFRKHRGP

SEQ ID NO: 67960 - protein, 258 aa, Zea mays; identical to SEQ ID NO: 41180
  Clone ID: UC-ZMFLMO17089B01_FLI.pep

SEQ ID NO: 67961 - protein, 127 aa, Zea mays
  Clone ID: UC-ZMFLMO17089B07_FLI.pep
TKMGWTIIHVVETIPFISCRLLGLSLRFLGPCVNPDHNAISACSAASSSYLAITFCEVGQASCLFPGTCTGCTERAATGSRSLDSNSSPSSSSGFASSSSCKFFRCNGCLVCKTMHNKVANLKCPPW

SEQ ID NO: 67962 - protein, 163 aa, Zea mays
  Clone ID: UC-ZMFLMO17229C08_FLI.pep
DDAHYLEVKFRLWLKKLKDVGVPMLLAATNPPRTDLFIYVPRIELKPLAQYQIRDLMEKEAISLGSGLKPNQIAKLQSRAGGNPMLAKRAIEEGFLGIQNEAGDHGRYFDITPLLLLVGIVFICYRFIGLGTGNQSLYILAGIGGAIFLGVARLSYYLPKESR

SEQ ID NO: 67963 - protein, 121 aa, Zea mays subsp. mexicana
  Clone ID: UC-ZMROTEOSINTE048E08_FLI.pep
RQETRLLVLLAAEPSKLVGDHNVELRSTLHYLLALLGGHVVSNFSAVGPVVHHEQLQLRNVVDHKLLELVGEVVPGRLVRTITNVGHQGASLELPPDTGVNTLWPAPAWLKALVAVEVGPL

SEQ ID NO: 67964 - protein, 139 aa, Zea mays
  Clone ID: UC-ZMFLB73124F06_FLI.pep
LPDSLVAEAKKAASKATDDSAGQEALKNVFRAAEACEEFSGTLVTLRMALDDLCGLTGENVGPLPGYIEDAVKAAYNRYMTYLESFGPEENYLRKKVETELGTKMIHLKMRCSGIGSEWGKISLIGTSGISGSYVELRA

SEQ ID NO: 67965 - protein, 211 aa, Zea mays
  Clone ID: UC-ZMFLB73260D10_FLI.pep
MTPNSKAAAPPATFRLVNFISEDQLDEVKRTRGERVEDGTAQRDKPLFQILQENKEKKDAEFNERFKHRPPKALDEDETEFLDKLALSRKEYEQQVANEEAEQLRGFHEAVAARSTVVHELETPTVSRPEESRPKPPTKRSQPALLKNIIISVKPHAKKPKVETEAKPAPEERRPSDRHGSDQKQPDDTKATLGSLVAYDDDDDESGEDVD

SEQ ID NO: 67966 - protein, 142 aa, Zea mays
  Clone ID: UC-ZMFLMO17086G05_FLI.pep
PPSSSSSSSLLRSRPHGASVLAQRKQPPSPRLCLASSPSLCVGLSCLLLGPKLPCGRAWFSVSSTKSGRSSPCSVPTQASAPVHRPTIAVPPALQLSARVAPSLQLAELSLGLLWPSFSTRQRPSSPPTLLARIRNSLVQVG

SEQ ID NO: 67967 - protein, 270 aa, Zea mays
  Clone ID: UC-ZMFLMO17086H06_FLI.pep
RTMNLASVVPCGQAFTVLMTPAAGSHRRVHTHAAASKSGLACRVARSGGARWLPVSCAAGGGAVGDAFVTEDTTNVKFPREVTVPGYTHPLVAVGTGYREKFFVKVYAAAFYVDYSLRLDTEQWKAKTGIESFDSSSVFDSIFKAPVVKSLSIILVRAVDGKTFVNALNDVIARQIKNPNAEEESSLSTLQNTFLGRNLKQGTSIYLTWLEPKRMLISISEDEDPRQVDAEIKSATVNYALYDGFFGKSTVCPSLRSSTAQLLDALLLAK

SEQ ID NO: 67968 - protein, 201 aa, Zea mays
  Clone ID: UC-ZMFLB73146A11_FLI.pep
QRPDKLKKTKYGMRHGQVSLSAAMTQVKVAASLGATLVWLSGGTALVQSLIQEMLPSWFLSAQNLDQGGASGGVVYKLGGHALAYFAVYSGMLAWGIDQTPVSRRRERVMRSHLGFLASALAGKIFLGCDLSLWRAYVSGFLGLVVECTPCWVQEVDLRVLKRLSSGLRHWGEDELAVALLRRAGPEAMGTAAEMILGREL

SEQ ID NO: 67969 - protein, 87 aa, Zea mays
  Clone ID: UC-ZMFLB73183H07_FLI.pep
SAALLFPGVCTDLFRKSCRTDIQCKIFSVIEKRRLVEYDLYFNLPMLLRVNGCLQRQQMPMQTGFFLTTNLNKPRETTIGDVGKKTH

SEQ ID NO: 67970 - protein, 72 aa, Zea mays
  Clone ID: UC-ZMFLMO17265D12_FLI.pep
FGVYNAPLTGSGGVIMNQDAQCTGSGSIQLICCPSTAAALGTEGVEPVWSHPLAACMEEMVQLQRTHSEPDF

SEQ ID NO: 67971 - protein, 517 aa, Zea mays subsp. mexicana
  Clone ID: UC-ZMROTEOSINTE043C12_FLI.pep
DIYSIEDLAQLIYDLHQINPKAKVSVKLVSEAGIGTVASGVSKANADIIQISGHDGGTGASPISSIKHAGGPWELGLTETNQTLIQNGLRERVVLRVDGGFRSGQDVLIAAAMGADEYGFGSVAMIATGCVMARICHTNNCPVGVASQREELRARFPGVPGDLVNYFLFVAEEVRAALAQLGYEKLDDIIGRTDLLKPKHISLVKTQHIDLGYLLSNAGLPEWSSSQIRSQDVHTNGPVLDETILADPEIADAIENEKEVSKAFQIYNVDRAVCGRVAGVIAKKYGDTGFAGQLNITFNGSAGQSFGCFLTPGMNIRLVGEANDYVGKGMAGGELVVVPVDKTGFVPEDATIVGNTCLYGATGGQVFVRGKAGERFAVRNSLCQAVVEGTGDHCCEYMTGGCVVVLGKAGRNVAAGMTGGLAYILDEDDTLVPKVNKEIVKMQRVNAPAGQMQLKGLIEAYVEKTGSEKGIAILREWEAYLPLFWQLVPPSEEDSPEACAEFERVLAKQATTQLSAK

SEQ ID NO: 67972 - protein, 248 aa, Zea mays subsp. mexicana
  Clone ID: UC-ZMROTEOSINTE044D04_FLI.pep
PPSSSSSSDCPHPLHSQVPTTPNPGSPLQRRLRFGYARLEQKKMQRAVQAVRSHGNVLKYAVLQHISAPKPAMLPAAFSRFMSVSSARLEDRGFETATVADVLKSKGKSADGSWLWCTTEDSVYDAVKSMTQHNVGALVVVKPGQNKSIAGIVTERDYLRKIIVQGRSSKSTKVGDIMTEENKLITVNPDTKVLQAMQLMTENRVRHIPVIDGTGMLGMVSIGDVVRAVVAEHREELNRLNDYIQGGY

SEQ ID NO: 67973 - protein, 258 aa, Zea mays subsp. mexicana
  Clone ID: UC-ZMROTEOSINTE047H09_FLI.pep
NNSTSNMASKSTLRSLVLIMGLLLLSCSGMSSAARLLEEVAPKEEYPHPEVPELPKPELPPHPTVPELPKPVVPELPKPEVPVHPAVPELPKPEIPPHSTVPELPKPEVPELPKPEVPEHPAVPELPKPELPPHPTVPELPKPEVPELPKPEVPEHPAVPELPKPELPPHPTVPELPKPEVPELPKPEVPEHPAVPELPHPDVPEHPASVPELPKPEVPEHPTVPELPKQELPPLPEPELPLPPKAESHYPEPGMAKP

SEQ ID NO: 67974 - protein, 141 aa, Zea mays subsp. mexicana
  Clone ID: UC-ZMROTEOSINTE069F02_FLI.pep
NTSRLASLTVDLGEDEKELLHSEAEQNRRKRIESLVNLQQELNGLIEPKKDLAIQPGMYVSVPPSTPDTAEEENADPSQGTATSTSETEQRGQASNASSNKPKNPGHRRRNRANASRRQPHGQGQPARQQWQRKEAGTSHQ

SEQ ID NO: 67975 - protein, 241 aa, Zea mays subsp. mexicana
  Clone ID: UC-ZMROTEOSINTE070B02_FLI.pep
EICKASSRWQEIYKVQISNYLLCNRCKHKFFQKIKGCSSMETSKEQASKDYADFEKKVKRTIYIDHLSPQVKESAIKAALAQCANVVHVEFIVNYTIPYKDIASAALVELDDDVQAKAAVELMNDFPFIIGGMPRPVKAIHAKAEMFRDRPPCPGLRKGFCWVKQGDKDYEAMQKLKNLAKRQESENMALIQKILKDEKELATRQQEVLDGNCKKYDMLETLVQKGDITNLAQQYGVNLND

SEQ ID NO: 67976 - protein, 258 aa, Zea mays subsp. mexicana
  Clone ID: UC-ZMROTEOSINTE070E06_FLI.pep
VMSAGKDTRARHDDFVTAIGYRILEVENYLKESNLADGRGPLSWVHLDEDERDDLAAFLSASPFQQKDKVVTIPSAGDIEVGSNAARMKNDISTDSSKDSAGSTDLISGRAKEDLHRGHRRAASASADIGSWSMSIPNECEGTTEQLSDGSDKLPLRKIVKTCALTSTLQSKTRTKWKNGAVRWAGSNQQDVEEAIPLNTSQLSQGLEECFERNKSCLSTCDEHTYNKKLHGWLGALRRQLQSCMHSEDNLVTIFICS

SEQ ID NO: 67977 - protein, 370 aa, Zea mays subsp. mexicana
  Clone ID: UC-ZMROTEOSINTE072E05_FLI.pep
EVYKDTQSRASGEACNDGQSHGDENMKLGEAYTELQLAPSSGEEAMTCMCSELPSQEVEAPSSDPLENNEETKNEAAAQGSVNEDSAPRAENAKIDEADTEQELLPSGEATVDESSELLSQDEKVARKDAKMEESAAAAAAQRQLTTEVAHASENAKLGEDGTELQLPPPSMVDISREQLSQEVEVASSGPSGTDETAEMKRLNTEHSPGDETSKLVGTDLGLQLSPSGDAMVDISNKPPSCQDVKEAPSSDILGNDENSDTEKTPAALHGRLNTELAPSGRNTEFSEADTGKQETPVSAEAMVESSSEPRSHEAKEAPTPDLSGDDEKAKSARAAVVAELFGDATEGGSDQPLPSPREQGKEAEADGGF

SEQ ID NO: 67978 - protein, 215 aa, Zea mays subsp. mexicana
  Clone ID: UC-ZMROTEOSINTE080H09_FLI.pep
LTSLSIKKCAAVTAEGAKAFANLVNLVNLDLERCPKINGGLIHLKGLKKLEKLNLRYCNGITDSDMKYLSDLTNLRELQLSSCKISAFGVSYLRGLHKLGHLNLEGCAVTAVCLEVISELASLVLLNLSRCGICDEGCENLKGLTKLKALSLGFNQITDACLIHLKDLVNLECLNLDSCKIGDEGLFHLKGLIQLKNLELSDTEVGSNGLRHLSG

SEQ ID NO: 67979 - protein, 204 aa, Zea mays subsp. mexicana
  Clone ID: UC-ZMROTEOSINTE109C02_FLI.pep
FLSPTDEIGENQLFSGQKTVQLVLLLLALVSVPWMLIPKPLLLKKQHQQRHQGHQYAMLQGVDESVGAELGEHHEEAHVHEEFEFSEVFVHQLIHTIEFVLGAVSNTASYLRLWALSLAHSELSTVFYDKVLLMAWGFNNVIILIIGIIVFIFATVGVLLVMETLSAFLHALRLHWVEFQNKFYEGDGYKFAPFSFALIREEED

SEQ ID NO: 67980 - protein, 128 aa, Zea mays subsp. mexicana
  Clone ID: UC-ZMROTEOSINTE106F02_FLI.pep
SPEGIEKSCEFHLFITHKVAGISTSQLIRLSLSGMSCAQRFPSITFTAMKVHTSLSSLSFPAIATTCRGSSGLHQVADHRVHILAEYAVGLHDLVVAEAHCEKQLHAASQYSVWKHKVVLAASVRSSN

SEQ ID NO: 67981 - protein, 214 aa, Zea mays subsp. mexicana
  Clone ID: UC-ZMROTEOSINTE104G12_FLI.pep
LKYSTLAITPAKVAATVAEEKLAIHKTNPTHMSLQWHQINNNPRTSCFLSRCLRWRLGPLAADSPCQLDVLWHDGHTLSMDGAQVGVLKQANKVCLSSLLEGKHSMALETQISLEVLCNFPDEPLEGQLPDQQLSALLVLADLTECNSSRAVAVRLLHSTSGRGRLTGSLGGKLLPGSLPSRGLASSLLGTSHLSRFFGLSARFESGGRRARNG

SEQ ID NO: 67982 - protein, 203 aa, Glycine max
  Clone ID: 700844223_FLI.pep
DNLLLQTMMGRLQLRAPINNPLVTQSLEDFLFNDLGDDDDDGGDNEDSEKAFEGKSELAREEAKLEREVIKIVLSGNGESVLKPNSGQAVSVRDHHICVGFQDEEDSGYRVWEWHGHIMSFDEEFGYNPEYIYGNYFQWFKARPSPVAAVADAVVEKEEEEEEDEEKQENQGLRELIDNKDSADARILHRNINAACPSLTGTR

SEQ ID NO: 67983 - protein, 162 aa, Zea mays subsp. mexicana
  Clone ID: UC-ZMROTEOSINTE085H06_FLI.pep
AKHATFLPHSAGRYSKKRFRKAQCAIVERLTNSLMMHGRNNGKKVMAVRIMKHTLEIIHLLTDANPIQVVVDAIINSGPREDATRIGSAGVVRRQAVDISPLRRVNQAIYLLTTGARESAFRNIKTIAECLADELINAAKGSSNSYAIKKKDEIERVAKANR

SEQ ID NO: 67984 - protein, 86 aa, Zea mays
  Clone ID: UC-ZMFLB73139C08_FLI.pep
KKRLDVHKRTVRNVMQLDVVKATCGMVQAGRHQVLLLGLLFVLVRQALYLDALFFFPTSLNGIHAMNILGNLTPWTTSVADKQLER

SEQ ID NO: 67985 - protein, 243 aa, Zea mays
  Clone ID: UC-ZMFLB73162D07_FLI.pep
FNDPSLLMEALTHGSYQIAGTTPCYQRLEFLGDAVLDHIFTDYFYHQYPECTPELLTDLRSASVNNSCYAHAAVKAGLHKHVLHSSSALHKRMADYLDKFEQSFSGPSHGWEAGISLPKVLGDVVESIAGAIYIDAKHDKGVVWRSMKRILEPLVTPDTLQNDPVKELQEFCDSKGYTLEYTVTRDNGVSSVVAEVRTEGTTYKATRTGFSKLDAKKLAASSVLRDLKAADTKQYSANGISCT

SEQ ID NO: 67986 - protein, 245 aa, Zea mays
  Clone ID: UC-ZMFLB73166B07_FLI.pep
HRRSDRISRPSGDTMEDWDSEDFQPVAPVVKVEPLKNQWADEDVDADDVKDSWEEEEEEEKPKPAAVQKNATKPSAKAPAKKGKQQASTSAEEPDEPLSPTSEKIRQQRLVEEADFKSTTDLFAKKSGEQKSLDTFIPKSESDFAEYAELIANKLLPYDKSFHYMALLKNVMRLSMTPLKGSDAKDISSSVTAIANEKIKAEKEAAAGKKKQGARKKQLHIEKGDDDFIPGRGGGYDDPDEYDFM

SEQ ID NO: 67987 - protein, 183 aa, Zea mays
  Clone ID: UC-ZMFLB73177H10_FLI.pep
IFDITKQICDAVQARAEKDKNHGVILIPEGLVESIPELYALLQEIHGLHGKGVSVENISSQLSPWASALFEFLPPFIRKQLLLHPESDDSAQLSQIETEKLLAQLVETEMNRRLKEGTYKGKKFNAICHFFGYQARGALPSKFDCDYAYASPSPAHLIKHIDCCWFNTWVVGFRFWGMCATTS

SEQ ID NO: 67988 - protein, 480 aa, Zea mays
  Clone ID: UC-ZMFLB73183C04_FLI.pep
TSKMAPQPSAFLPAPVTQTNSYSLRPTVSSSATSGAKTSDVLSSSMQKVSPIVPGGTVSSSVPTPAKDSSTGLSQNASKPETLISKVTSTIVSASSTSVISVTESKPSVPPTTGASLPSTHVSAPQTAPTTSESVFTSTGKNVGPNTDTISTDEDDMEEEAPSASAELNLGALGGFGLGSQPSSSPQKSNPFGASFGTSGNKSSGTPFTLTTSPGQLFRPASLSIPSAQPAQPSQSTSSSSFSNSFSSGLTGFGQPAQIGSGQQSAFGKPAQIGAGQHAGFGQTAQIQSGFGQPAQIQSGFGQSAQIGTGQQSGFGKPAQIGAVQSGFGQPAQFAAQQTLGSVLGSFGQPPQLGGIGSGGFGGFSSASTSAGFSSLSSGNAGFAGAASGGGFSAPTASAGGGFAAAATGGGFAALASKSGGFVGAASSGGGFGGASQGGGFGSGGGGFGSFGGNQGAGFSAFGASGAGRPAADFLTQMRK

SEQ ID NO: 67989 - protein, 172 aa, Zea mays
  Clone ID: UC-ZMFLB73183H11_FLI.pep
IGNISSVLTRCSVFTHSDTVSHIWTIIETVFFFDRHIVQCSSSRHIGDEVPDDGPNGDGDPYRVPLGVVQPRQAPKRVAALHSLLRHERHLERGVPDAASLEGDHRRRHVHRHAGRRLDHGPVRRLHRPDVGDGARDRDGVVHEVGHGDGREVEAVDAVVQAFVLLRLDVVH

SEQ ID NO: 67990 - protein, 365 aa, Zea mays
  Clone ID: UC-ZMFLB73184C08_FLI.pep
CYQDRISGCCASVAAGGMRVVVTGATGYLGGRLCAALAGAGHAVRALVRHSSDVSGLPRDIEMTYGDVTDAESLAVAFDGCDVVFHVAAAVEPWLPDPSVFFKVNVGGLENVLKAVKRTPTVKKIIYTSSFFAIGPTDGYVADETQMHRGKEFCTEYEKSKFLADRIALQAAADKVPITIVYPGVLYGPGKLTTGNLVSRILIERFNGRLPGYIGDGYDRESFCHVDDVVNGHIAAMEKGRVGQRYLLTGENMSFVLIFNMVANITNTRAPMFHVPLWLIEAYGWISVFVSRITGKLPLISYPTVRVLRHQWAYSCDKAKMELGYTPRNLTEGNSNFKGVPKTIKLFCWAFAMHIQEILELQCIS

SEQ ID NO: 67991 - protein, 269 aa, Zea mays
  Clone ID: UC-ZMFLB73185B05_FLI.pep
TPSYMCPELLADIPYGTKSDIWSLGCCIYEMAALRPAFKAFDMQALISKITKSIVSPLPTRYSGSFRGLIKSMLRKSPEHRPSAAELLKHPHLQPYVLQVQLKSSPSRTTSPIYQALTDKVKKMTFVSDTADSARRRAARRSSLGSERTVTFCKPSPERNSVSSTRSIKEYTTTTQSARELSVGSSLQVDDEVTSKAVVTKTAGVLRTPSKSRAPASKTLVAARSRLDPPKTSYARTNRAELDSRTPLSKSSARTARRASLPLAAYRAP

SEQ ID NO: 67992 - protein, 217 aa, Zea mays
  Clone ID: UC-ZMFLB73252D06_FLI.pep
HDFLHLKDEHSKPLSWNNRVKIALGSARALEYLHETCSPSVVHKNFKSSNILLDGELTPHLSDSGFAGLLANQEFQESDENSGYRAPEVILAGQYSLKSDVYSFGVVMLELLTGRKPFDRTRPRPEQSLVRWATPQLHDIDALDQMVDPALQGLYPSKSLSRFADAIALCVQPEPEFRPPMSEVVQSLVRLVQRANMTRMHESQSRRHGESGGDYEF

SEQ ID NO: 67993 - protein, 312 aa, Zea mays
  Clone ID: UC-ZMFLB73292F08_FLI.pep
CRFLNRASGKPKKYTNQQQLVGDTGFHTSANFLPPKSFKTPQRFPDASLSNAATSITELQSPDYKLLVSSVLAFVVGTCSSYVDLELCLLNQLEDQAISIHQLLLDGKPSPSSTEPPLHCEVQRVGLVIILIHQGDHLVTLGQILPAEMNRKAQPEAPGDMGLGHGLDEDGEAGVQLLLQILRLRDGVAPRIVGRVHPVGQISSHRSVRPPNLHPKIGNLLAVHGLIREVGEPAGPPYWLHHGVGDVERHPRLPLLDLQYVRSSVDCLRLLMFDPIKPALGAIVSSLKETNLSKRAQSLRMVPPADLMETVR

SEQ ID NO: 67994 - protein, 227 aa, Zea mays
  Clone ID: UC-ZMFLB73137C02_FLI.pep
GIRAEQSRAKAPKRTSKSQEAPRAGEAYVVRTGAAETMRPGAGFNAAAAAAKAAAVAPAVAGSAAAHSAWHSPVPYLFGGLAAMLGLIALALLILACSYWKLSGYLEGGAAGRGGEDGSGAGAGAGGGTKPAAGLPPPVWEEKILVIMAGDAKPTYLATPMSSRASSFGGDRSSSKGVDDEEEESNKEVQADEAAVASVMDAGGQNGGEHSERRREGGDQERRIPEV

SEQ ID NO: 67995 - protein, 170 aa, Zea mays
  Clone ID: UC-ZMFLB73264C04_FLI.pep
ERERDTYVRAPACTLLQMHTQTRTASNAGGLPAWLGLASTLLAVGRRGEAALGRKLHGALGVDVVDAHPRRVLVAAQALEVRPRQRVAARLRRRGRRVRRLGRRGLARHELLVAHVAHRRRAHHQDGHRHGGGHEQCGSCPLRRARGRRRLAAGGRHVVVPPDYLADCTR

SEQ ID NO: 67996 - protein, 98 aa, Zea mays
  Clone ID: UC-ZMFLB73280F03_FLI.pep
ATEIESYFGCSASNLVLVGDRYFTDVVYGNKNGFLTVLTEPLNITDESYIVKRVRKLEAYIISYWYKKGHKPIEHPLLPDARRIVKFDPYDDSVSTRI

SEQ ID NO: 67997 - protein, 360 aa, Zea mays
  Clone ID: UC-ZMFLMO17198B04_FLI.pep
MHNNNWAVLVCTSRFWFNYRHMANTLSLYRTVKRLGIPDERIILMLADDMACNPRNSYPAQVFNNENHQLNLYGDNVEVDYRGYEVTVENFLRVLTGRHESAVPRSKRLLSDEGSHILLYMTGHGGDEFLKFQDSEELQSHDLADAVKQMKEKHRFKELLIMVDTCQAATLFSQLQSPGVLAIGSSMKGENSYSHHLDSDVGVSVVDRFTYYTLAFFEKLNMYSNASLNSLFTSYNPSMLLSTAYYRMDLYERPLNEVPVTNFFGSVMKTLHTDSAYTGFLAAHDNETPMSTGDNLDDHFMLKGRAIARRSTIEKEAQLTPHGWTEVLAEQLEGKNTDTVVMYGLGAMGILLALSTWLSM

SEQ ID NO: 67998 - protein, 137 aa, Zea mays
  Clone ID: UC-ZMFLMO17301B01_FLI.pep
KKELTTTQFEQPNKQDGSRLMSRLLPLIVFTQGSCSALIISPEQRQLLHRGHASTTTTTTTTCRRYSYKHGRAFDAHTNLLVAEQASRGRCRRCRTRRCTRARCRRRSPTRRRTPGCRGCPGASSPASRPPRRRRPR

SEQ ID NO: 67999 - protein, 110 aa, Zea mays
  Clone ID: UC-ZMROB73061F06_FLI.pep
PCQITRFEKATTTQTITDSRGLTARPCRRNWVRTRHVRQSAPAGVEPEPLLPPPSLAPPPPSLPPPVRSFMIRFMMSPLLGSVFPWGFFLSSCLSMPTTHASAGAALRAP

SEQ ID NO: 68000 - protein, 127 aa, Zea mays
  Clone ID: UC-ZMROMO17016A12_FLI.pep
PRVRVYEDEEEWFREIFGGSKKEDAIQNQYEFLIQRMGGPPLFSQRRGHPALIGRHRPFLVTHRAAERWLHHMQQALDATESIDVGSKTKMMNFFRHTAYFLVAGNEMTRQQGHGVACKHATSKPAE

SEQ ID NO: 68001 - protein, 93 aa, Zea mays
  Clone ID: UC-ZMROMO17027C09_FLI.pep
DSIHPDPANNTDLSHIPRGLHIRDMPFSWFQLQFGVSSSTELVLFETLVITVVTDSFSDASNARRSPRLTGLLNGSSGRPDKQYTFSATVGAA

SEQ ID NO: 68002 - protein, 171 aa, Zea mays
  Clone ID: UC-ZMROMO17027F06_FLI.pep
LDLAYRYVGDVLGDAQVYADHAGKAQIDADDVRLAIQAKVNFSFSQPPPREVLLELARSRNRMPLPKSIAPPGSIPLPPEQDTLLAQNYQLLPPLKPPPQYEETEDETGEPNPSNPANSNPSYSQDQSNKEQQQQHTPQHGQRVSFQLNAVAAAAAAAKRPRMTIDQLNMG

SEQ ID NO: 68003 - protein, 239 aa, Zea mays
  Clone ID: UC-ZMROMO17045G06_FLI.pep
TKNTEHLQPPPNMMYTSLATPTLLIEPGTSHRLLQVLVLKLKPLPELLAQYLARRGLGDPVDEDHLADLLVVDHLLGHKLLHVVLGEPVVAPFGPGYEGHRDLPDLRLHLFPDDGGVGDAWVGDEQRLQLGGGHLEALVLDDLLEPVDDEDLVVVVHKADVARVQPPAGVDAVPRRLRVVQVTFHDLLAPDADLPGQVAGEGPAGVRVHDLQLGVAHHRPARARLHPERLLGERQAHGQ

SEQ ID NO: 68004 - protein, 56 aa, Zea mays subsp. mexicana
  Clone ID: UC-ZMROTEOSINTE091A03_FLI.pep
TAVAAQMFSSSYTSILLGRNRCVPFFMLKFLTICNQKNFPNMNTGVYCVVVGLVCL

SEQ ID NO: 68005 - protein, 208 aa, Zea mays subsp. mexicana
  Clone ID: UC-ZMROTEOSINTE094G03_FLI.pep
LPVRSKNARGQQGSYPIKLFYTSNMPIILHSALITNLYFISQLLYRKYSGNFLVNLLGKWKESEYSGHSIPVGGLAYYVTAPSSLADVLANPFHALFYVVFMLSACALFSKTWIEVSGSSAKDVAKQLKEQQMVMPGHRESNLQKELNRYIPTAAAFGGVCIGALTVLADFMGAIGSGTGILLAVTIIYQYFETFEKERATELGFFGF

SEQ ID NO: 68006 - protein, 176 aa, Zea mays subsp. mexicana
  Clone ID: UC-ZMROTEOSINTE104F01_FLI.pep
GPHVPDQPPQGSPSPYRVPSQMTPPHQAATLFYNPQFGYWYPPDYPYQQALYNSQVLQHYYPQMYGPASPSGPAYQYMGYMPGGPSPRTGFSPMQQPMRQPFFQQATTQMDGSFPSVPSLPPNFRLQLPPRAVSRESDDASGSQSAQPIASTPATVTNNEEDSRPVVSDSGPNTPN

SEQ ID NO: 68007 - protein, 291 aa, Zea mays subsp. mexicana
  Clone ID: UC-ZMROTEOSINTE091D01_FLI.pep
EAACQQRLSFAEVELEELRTKVDASERDVVELKEAIRIKEAEGDAYISDIETVGQAYEDMQTQNQHLLQQLTDRDDFNIKLVSDSVKMKQACSSLLSDKLMLEKQLQQVNTSLESSKLKIARGEEQMKTCVAQAIKTSAENRHLTISLERIALEVSNTDKELKWLRSSVGSSEKEYEQTQQKISELRALLEHERSERRRLEEQYEEVKNEVMELTSETEETTVRKLEDEIKECKAILKCGVCFDRPKEVVITKCFHLFCSLCIQRNLEIRHRKCPGCGTPFGQNDVREVKL

SEQ ID NO: 68008 - protein, 97 aa, Zea mays subsp. mexicana
  Clone ID: UC-ZMROTEOSINTE094A07_FLI.pep
FVSTRIKQGPSNSFTYQIAIKSVHNPQVAEPSSSAANQSCFASLGVSKELVDSWHDLGGLVVHKASEAMHGVTPPLLMVLKHAGCPPCLVYPDFRVA

SEQ ID NO: 68009 - protein, 253 aa, Zea mays subsp. mexicana
  Clone ID: UC-ZMROTEOSINTE100D05_FLI.pep
ANQALQEILDSLSPFVDGLKFSGGCHSLMGKELVREITDLAHRHDIYVSTGDWAEHLLRQGPSSFKQYVEECKALGFDTIELNAGSLNLPEEALLRLVRLIKSSGLRAKPMFSVKFDSSDIPASGDRAFGAYIAPVKGKTSERVEDVDLLIRRAERCLEAGADMIMIDADDVCQRAESLRTDIIAKIVGRLGLDKTMFEASNSNTSEWFVRRYGPRVNLFVEHSDVMNLERLRGFNMRRSNSASRFASPFFLI

SEQ ID NO: 68010 - protein, 94 aa, Zea mays subsp. mexicana
  Clone ID: UC-ZMROTEOSINTE105F04_FLI.pep
GKAMKWYTQLWAHQNISICMGFTYLAVQDGNMGLHLYKSTRTTKDTTGIQALKSIINKPLCCFHSVPYNSATRASFCRLRGVCIIEAPRIILDP

SEQ ID NO: 68011 - protein, 163 aa, Zea mays
  Clone ID: UC-ZMFLMO17209C11_FLI.pep
HQRYMHACLDFVFFQPYPMPTLKLHRPSYNFYRQSYITSNTSITPPITTNQPFPYLPRPNIIRSSSTRISFSFLPPFFPNAPLISRFFLSCRASILSSMLPFTMSLITFTSFFCPIRCTLSMACSSTPGFHQGSNRYTVEAAVRFTPAPAAFRLASSTVGESE

SEQ ID NO: 68012 - protein, 142 aa, Zea mays
  Clone ID: UC-ZMFLMO17012A02_FLI.pep
HAGTGGWFRPVVCWCGWLWVGYLCERDFVDVGSRCASSLMRSMPFQLKTGHHHHGAAMEGKPPPPPTTQQPAPTPRVSRLRRLLGRVSSSEKFAADGKDRDKDEKLPPPPPPLPPATDDADAAGSLGLDRMVLSFMEEASAV

SEQ ID NO: 68013 - protein, 138 aa, Zea mays
  Clone ID: UC-ZMFLMO17242A04_FLI.pep
RDWHRTALCVWPLYVWRSPFRFCRLRLFLYAASELSLAAVLLSLFSLSVFFLISPAALLLGRQGEPDNRSLVSQCPLFAIIIFFFQPYKNSFLFIDLSLCTENTGPADLAANEHIPLGGRAAVCWELTVVRARQVGCV

SEQ ID NO: 68014 - protein, 120 aa, Zea mays
  Clone ID: UC-ZMFLB73301H10_FLI.pep
SSTSFASSIDTPACSGSSTCSLVTSGAGADSTTTGCRRDRATETEAGDAAPRRRFSAAAAMSSRCFRRASASGDSAAGGGGLLRLGSGCAGGEPWRLMRSAIWSSSSSSRSPIGAAPAKT

SEQ ID NO: 68015 - protein, 165 aa, Zea mays
  Clone ID: 700466728_FLI.pep
WSFILFPQTRAAGIDGQRGESTTQAGSGHDGRSRLELLGEGGEIAALVRGHLQLGVAGQPAPPVGAGERAGPVRAAAPDLVHVEHAGAERVAHGHEHHAVVRELRHGRERRLLLPAALGAQREEEPRGLARQRLPLPEAARGVEQRLHLRRHHAEPRREAEQDAV

SEQ ID NO: 68016 - protein, 150 aa, Glycine max
  Clone ID: 700566320_FLI.pep
SLRTQATNFKSNHGELNLLCLLPPVCNLGRPRGTILILHPRPGRLLPPSQVRLSRIRRRVQPPRRRRRRVSDGVGEQPAHSSRKELHKLRCAEEEHCPLLPTWCFLLQLPPRRSGQPLQPRMQCYHPMQALNLFFFSFFFISFFYLYFCN

SEQ ID NO: 68017 - protein, 78 aa, Zea mays
  Clone ID: 700577872_FLI.pep
YTGFQEQIVLVAANTSFQQRLAEKTGQIYSETGRIGPAAPLLPLLVLVHPEDAAQTFPLQEQVEGLVDVLQSKLMRDQ

SEQ ID NO: 68018 - protein, 73 aa, Glycine max
  Clone ID: 700676090_FLI.pep
SLLLGVTRRRWRLMSKPGQRVRWEQLRLFAAPLISQNSQKAPSALHQESPQQSGHTGAEVTRLLAVDFGIFWI

SEQ ID NO: 68019 - protein, 77 aa, Glycine max
  Clone ID: 700684616_FLI.pep
WPSEGGAGASIDNAGTYYANLIRHASSGNGTPKRPGESIETYLFAMFDENQKQGADTERHFGLFNPDKSPKYQLSFN

SEQ ID NO: 68020 - protein, 332 aa, Glycine max
  Clone ID: 700685326_FLI.pep
RPNDTVLLLINNFGGMSNFELEALTASTRRLLKKDWSIAPERLYVSAFETSLNAPGWSLSLLNVSGIERTTGTSVADLLKLLDSDTNASAWPRNGYREVQETSEELDRTDSKISPQATSQGSTVDPARLERALRSACSAAIAAEPQITKWDIEMGDGDCGEAVVGMCEGILRKLDNGLCQSGKIFHILDEIDEAVEEIGGTLGAIIAISVAAYATNLRQAAAAQGDGFDLDEKAAGQAAGKALRNLMGYTSARQGGRTVMDTLMPFCETFEKDSFEQAVKAAEEGAKSTGGMKAKFGRATYVGDKADVGDAPPDPGAMAAYYFLEGFLKGYA

SEQ ID NO: 68021 - protein, 150 aa, Glycine max
  Clone ID: 700685819_FLI.pep
GTLGYIAPEVFSRNFGNVSYKSDIYSYGMLLLEMVGGRKNTNMSAEEIFQVLYPEWIHNLLEGRDFQVTIEDEGDVQIAKKLAIVGLRCIQWNPRDRPSMKTVVQMLKGDGDDLIAPPTPFDITGSSRTNALVPTRRQNFELEVIHEIEE

SEQ ID NO: 68022 - protein, 185 aa, Glycine max
  Clone ID: 700686111_FLI.pep
ESMLGGSAMPDPALLTQLMQNPAISQMMQSMLSNPQTLNQILGANTEQRGMPDLNSLREVMQNPEFLRLFSSPETLQQLLSFQQTLMSQLGQQQSTWESGQTGGGTGPMNNLGLEMLSSMFGGLGAGSLAVPNRSNEPPEQLYASQLSQLQEMGFFDSQENIRALIATSGNVHAAVERLLGNSGQ

SEQ ID NO: 68023 - protein, 214 aa, Glycine max
  Clone ID: 700686618_FLI.pep
RAIKSSLKIFVIPCPTPYPENMVAEREVNGNGVGEGRTTLIFTYGTLKRGFSNHPLLQDLIRSGDASFVGTYRTAAKYPLVCGPYKVPFLLNIPGSGHGVHGELYSVSTRGLERMDELEGTSRAHYERLPIKVVPAAEEEDDDGFDGEEEAAAGLTCAEAYYAHGNYAMELWKKNGKRGLRCYSQKETIGYVKRKDRPQHLTFLDHIRFFLSSN

SEQ ID NO: 68024 - protein, 120 aa, Glycine max
  Clone ID: 700686670_FLI.pep
TSRYFTINSLFSTIACCTVMPLSCPRICSFLSAESWWSYVSGSSLLTSGKTLSPSMLTGLTPAIACRENSSSRSQENLSLEIILGVSYLRSPWLHSCIFVSTCNNGIFFKISSCKGRPSL

SEQ ID NO: 68025 - protein, 48 aa, Glycine max
  Clone ID: 700725249_FLI.pep
RCYILIVCVYKLNLYLLFTLYMSLYVCVIYYTVKYLAIFEYVKDDHIR

SEQ ID NO: 68026 - protein, 163 aa, Glycine max
  Clone ID: 700725253_FLI.pep
MSEIEHMKKLYNGIIYFVQNHVKPVAPSNNNTFPSFLLCSNNINSNSNNNTSSQPQASPMSNVSTLQRQVKQFLGCYSNNTKQARAVNSSPTNSSITIVEEEASSNSCKTKLFGVSLQSKKRVHPDEYGSNYILQSSETNNKARLVLENDELLGLNLMPPSTC

SEQ ID NO: 68027 - protein, 212 aa, Glycine max
  Clone ID: 700725149_FLI.pep
VEIACASTPNHLVAVRQAYCSLFDCSLEEDIIASVAPALRKLLVSLVSSFRYDKVAVNLEVAKEEASKLHEAINSKQLDNDHIIWILSTRNLFQLRETFACYNNLYGNTLEQDIKKCGNGDLESLLHTVIWCIDCPEKHFAKVVRDSIVGFGTDEDSLNRAIVTRAEIDLLNVRFEYANVYKSSLDDDVIGDTSGYYKDFLMTLLGKGPDGE

SEQ ID NO: 68028 - protein, 267 aa, Glycine max
  Clone ID: 700725312_FLI.pep
EYMEKGTLKGHLYGSGLPSLSWKERLEICIGSARGLHYLHTGYAKAVIHRDVKSANILLDENLMAKVADFGLSKTGPEIDQTHVSTAVKGSFGYLDPEYFRRQQLTEKSDVYSFGVVLFEVLCARPVIDPTLPREMVNLAEWALKWQKKGQLEQIIDQTLAGKIRPDSLRKFGETAEKCLADYGVDRPSMGDVLWNLEYALQLQEAVVQGDPEENSTNMIGELSPQVNNFNQDASASVTQFAGSGLDDLSGVSMSRVFSQLVKSEGR

SEQ ID NO: 68029 - protein, 165 aa, Glycine max
  Clone ID: 700727090_FLI.pep
ADPPVIYRDLKSANILLDNEFNPKLSDFGLAKLGPVGDNTHVSTRVMGTYGYCAPEYAMSGKLTLKSDIYSFGVLLLELITGRRAIDTNRRPGEQNLVSWSRQFFSDRKKFVQMIDPLLQENFPLRCLNQAMAITAMCIQEQPKFRPLIGDIVVALEYLASHSNP

SEQ ID NO: 68030 - protein, 140 aa, Glycine max
  Clone ID: 700728420_FLI.pep
RLADLDLSANRLSGSVPFELGTMPVLSTLNLDSNSLEGLIPSSLLSNGGMGILNLSRNGFEGSIPDVFGSHSYFMALDLSFNNLKGRVPSSLASAKFIGHLDLSHNHLCGSIPLGAPFDHLEASSFTSNDCLCGNPLKTC

SEQ ID NO: 68031 - protein, 122 aa, Glycine max
  Clone ID: 700728505_FLI.pep
SDLRNSAEESSRAEVPVTANAQQNAGVALNERMLQTTNRNTQTQYNTTMDLRNVADDSAVESSSGTRRERDGGLVPVWSPPASSYSEQFVGDENGITSSSSYLQRHPQSHQMLNWKQLPQTG

SEQ ID NO: 68032 - protein, 166 aa, Glycine max
  Clone ID: 700728810_FLI.pep
EGNSFTYVSSNFFAGYFLPNLSQPGATAAPRDRVIILGDGNPKAVFNKEEDIGTYTINSVDDPRTLNKILYIRPPANTLSFNELVTLWEGKIGKTLERIYVPEEQLLKQIEESAPPVNVILSINHSSYVKGDHTNFEIESSFGVEASALYPDVKYITVDEYLNQFV

SEQ ID NO: 68033 - protein, 71 aa, Glycine max
  Clone ID: 700734292_FLI.pep
TSSDTTKQVHYIIKVTSRSLFAHRLALKMEDSKAALTHTTSPVLACKLTLLDNVVLFWKVFTLEVPIKHVF

SEQ ID NO: 68034 - protein, 110 aa, Glycine max
  Clone ID: 700734944_FLI.pep
LFNSWDDWTSNVLPNNSVFFGLPASPDAAPSGGYIPPQVLISEVLPYVKQASNYGGVMLWDRYHDVLNYHSDQIKDYVPKYAMRFVTAVSDAIYESVSAATHRILQKKPY

SEQ ID NO: 68035 - protein, 191 aa, Glycine max
  Clone ID: 700737306_FLI.pep
TLEGIDFDIELGSNLYWGDLAKELDALRHQNDHYFYLSAAPQCFMPDYHLDNAIKTGLFDHVNVQFYNNPPCQYSPGNTQLLFNSWDDWTSNVLPNNSVFFGLPASPDAAPSGGYIPPQVLISEVLPYVKQASNYGGVMLWDRYHDVLNYHSDQIKDYVPKYAMRFVTAVSDAIYESVSAATHRILQKKPY

SEQ ID NO: 68036 - protein, 189 aa, Glycine max
  Clone ID: 700902347_FLI.pep
KDRKPKTEIGNQVSPLPELIAEPTDARSMSFVGTHEYLAPEIIKGEGHGSAVDWWTFGIFLYELLFGKTPFKGSGNRATLFNVVGQPLRFPEAPVVSFAARDLIRGLLVKEPQHRLAYKRGATEIKQHPFFEGVNWALIRCATPPEIPKAVEFEKIPSPASSSGGEKAANHISIANQKGSDNYLEFDFF

SEQ ID NO: 68037 - protein, 346 aa, Glycine max
  Clone ID: 700904718_FLI.pep
MDLPVIDLSPSLSGEWDPLLCAEVSRSLRETGALLVKDPRCTVEDNDRFIDMMERYFSKPRDFKHRHERPHLHYQVGVTPEKVEVPRSLVDEEMQEKLKAMPKENQPNTPVGPDLKWRYFWRIGPRPSNTRFQELNAEPVIPEGFPEWKETMDSWGYKMIAAIEVVAEMAAIGFGLPKDAFTSLMKLGPHLLAPTGSDLQKYGQEGTIFAGYHYDLNFLTIHGRSRFPGLNIWLRNGQKVEVKVPIGCLLIQTGKQIEWLTGGDCIAGMHEVVATKRTLDAISLAQEQNRSLWRVSSTLFAHIASDAVLKPLGHFAESPLASKYPPMCAGEYVEQELSVINLKGKK

SEQ ID NO: 68038 - protein, 115 aa, Glycine max
  Clone ID: 700905514_FLI.pep
CVYPSSPSNAGTGTTATPTTTTPTTGTPPTTLTPTTPTTTTPGTTTGTSPTTGTGTGTGTGTTIGNPNVFGMSPTSSTGTGGGFNDPNKGVVHLQDISMLLVSLVITFLLVMLRV

SEQ ID NO: 68039 - protein, 89 aa, Glycine max
  Clone ID: 700906289_FLI.pep
EPLPPPAAVKAGALALFSLLGIPLAITYSIPFALASIFSSTSGAGQGLSLGVLNLAIVIPQMVVSVISGPWDALFGGGNLPAFVVGAVA

SEQ ID NO: 68040 - protein, 66 aa, Glycine max
  Clone ID: 700907915_FLI.pep
FPSLYCIILLYPFSGLIAITKVITTPQPISPHQLQILKGFPESTSSAFLTKPSADPSEPCDPHHGP

SEQ ID NO: 68041 - protein, 75 aa, Zea mays; identical to SEQ ID NO: 49766
  Clone ID: 700421615_FLI.pep

SEQ ID NO: 68042 - protein, 124 aa, Zea mays
  Clone ID: 700426721_FLI.pep
CTRTSGLIYSDVGGPTRVAVAPRETRLLSSSIEQLHTVIHATRSSRSEFQIKREQNGAQVQSGQSWQKPKERSRRRRAADSLLNTRTGRRRPTTPTPTPRARSTPLPRAPARRRPPSTAWRSGP

SEQ ID NO: 68043 - protein, 147 aa, Zea mays
  Clone ID: 700464505_FLI.pep
ALLLPLRALAGAAAAAALFLARMASSVSTYFCTRFSCARRAAFTSPSAATESSFTSSFISASVSVTTSASTTLPPLLTIVSSADTLVASLSTSRAARAMALAARSALPVRRSSRRRLALAAGSSSMTILERSLTPAMSRNALESLSL

SEQ ID NO: 68044 - protein, 99 aa, Glycine max
  Clone ID: 700555828_FLI.pep
KFLNKSAPIFPKSPSRVFSFPLKIKLGFGFRNCHRIMATLKELLPPAKSSSTAYYDHTNDPWFKQRFSSEEEELESQLMRLERKLVPLHWRCSFMCSIC

SEQ ID NO: 68045 - protein, 59 aa, Glycine max
  Clone ID: 700557339_FLI.pep
RKRNAMPNKYGLYNFEKINNKHTILFILNYSCTTLCYDKSTSETSNNNKLSLVFPRVPY

SEQ ID NO: 68046 - protein, 57 aa, Glycine max
  Clone ID: 700559947_FLI.pep
LGETSGSNHLPPVCVHVMTVGADRPVNSSIFESFNATSTRGARASFESLPIFDGSFS

SEQ ID NO: 68047 - protein, 108 aa, Zea mays
  Clone ID: 700451974_FLI.pep
GHWRFPYGMELQGYAYILTHPGTPAVFYDHIFSHLQPEIAKFISIRHRQKIHCRSKIKILKAERSLYAAEIDEKVTMKIGSEHFEPSGPQNWIVAAEGQDYKIWEASS

SEQ ID NO: 68048 - protein, 115 aa, Glycine max
  Clone ID: 700751057_FLI.pep
AAPLRGNIFALELMEAKFFRFLKIVGVGYKARAEAAGRLLYLKLGYSHDVELAVPPAVRVFCFKNNVICCTGIDKQRVHQFAATVRTCKPPEVYKGKGLMYVDEVIKKKQGKKSK

SEQ ID NO: 68049 - protein, 475 aa, Zea mays
  Clone ID: 700335931_FLI.pep
PAMAKTPSFAVAAVAGGRGPVHNRTQLLLLLLVAVAASASTAGFLLRGALRDPCDGRGDPAALNTAVASGSPLGFMRSKLVLLVSHELSLSGGPLLLMELAFLLRHVGSQVVWITNQRSQETNDVTYSLEHRMLNHGVQVLPARGQEAVDIALKADLVILNTAVAGKWLDPVLKDHVPKVLPKILWWIHEMRGHYFKVEYVKHLPFVAGAMIDSHTTAEYWNSRTSDRLKIQMPQTYVVHLGNSKELMEVAEDNVARRVLREHIRESLGVRSEDLLFAIINSVSRGKGQDLFLQAFYQALQLIQHEKLKVPRIHAVVVGSDVNAQTKFETQLRDFVVKNTIHDRVHFVNKTLAVAPYLAAIDVLVQNSQGRGECFGRITIEAMAFKLPVLGTAAGGTTEIVLDGSTGLLHPAGKEGVAPLAKNIVRLASHAEQRVSMGEKGYGRVKEMFMEHHMAERIAAVLKDVLRKSQEHSRS

SEQ ID NO: 68050 - protein, 158 aa, Zea mays
  Clone ID: UC-ZMFLB73003D08_FLI.pep
QELSMLQDKVDGDGTTADTAARTLLSIFQHSSERIAHCFGSSNQTAAQNVNDEPQPSLDSFEQTVLNLEEIQDDGQSINVAPPYIEGPACRIKLKRGRGMRNFQREIIPGLLLGRQEICEDLEVIGYAPKKARSRKPRKGPGASSAQPRPCKRGAVKR

SEQ ID NO: 68051 - protein, 143 aa, Zea mays
  Clone ID: UC-ZMFLB73008C01_FLI.pep
SNFAVGFSLLPSQKDYEELAENVMNIVDRLVHKTNQKIEQSTDVLKAIISPAMHEGDVKWPPRDPDTLKLMEKEITRREQEGQLDEGFLSEVSAQLRQLSLYVFRLNKTEISQGFRLCCKRCCSYMLLNLSKNVVMHTKGGKL

SEQ ID NO: 68052 - protein, 604 aa, Zea mays
  Clone ID: UC-ZMFLB73015C08_FLI.pep
IYKPNKELAVLKDIAFTVYNKARRIPRAVSTSDMFQSPTYLGRSQSTMMHVTSPAPTLWKECLVPRMSGPTLSRETDFDASMRSATWDNSWQPARSGGLLDPSKLPDLCAQDDRKYAFEPLFILADPGSADLNALMEPSKSGADASGSRVYGSISGSNSDSGVSPLLDVSESDSAASLHCCYGWTEDWRWLVCIWTDARGELLDSLIFPFGGISSRQDTKVLQSLFIQILQQGCQIMSSSPEASNMRPRDVIITRIGGFLELEIQEWQKAIYSYGGNEVKKWPVQLRRSIPEGIPPSSNGPTLQQQQQQDMALIQDRNMPSSPNPLYSPHPKSSFMKGALGQSGNKKQILVEQSGMDTSRGSLHLVRSISLVAVSQDHSLHLTCQADLLSRPASAGEGSQGSSGPWSYLEGFTPVKSIGSMSASHSYLLVPSPSMRYLSPATLQLPTCLTSESPPLAHLLHSKGTAIPLAMGYVVSKAVPPVRRDSAQLTKDEQPSVLSVSIIDHYGGSSGTVQEKMSRGGGGGSKQARNLSQETTGRECEMEMHSVLEAVAAELHSLSWLTVSPVYTERRTALPFHCDMVLRMRRLLHYADKYLSEPKGETTH

SEQ ID NO: 68053 - protein, 187 aa, Zea mays
  Clone ID: UC-ZMFLB73015G08_FLI.pep
FWDLVGQMVDPLRPGDFNQAMMELGATLCSKTKPGCSQCPVSSHCQALALSREKSSVQVTDFPRVVPKAKPRSDFAAVCVVQIAQGLEEEAADPKGNDHLFLLIKRPEEGLLAGLWEFPLVLVDQGKTDLLNRRKAMDKYLSKLLSIDMVRKPDVILREDVGEHVHIFSHIRLTMHVELMVINLKGC

SEQ ID NO: 68054 - protein, 104 aa, Glycine max
  Clone ID: 700747805_FLI.pep
MMEPPQTRLMINVFIVSFLALLVNLVVGVLGADNYSRDDFPLDFVFGSGTSAYQVEGAANKDGRTPSIWDTFAYAGYAHGENGDVACDGYHKYKVNTLHLICGK

SEQ ID NO: 68055 - protein, 243 aa, Glycine max
  Clone ID: 700763070_FLI.pep
KVSDFGLARTALDERNKHISTHVMGTFGYLAPEYAMTGHLLVKSDVYSYGVVLLELLTGRKPVDLSQPPGQENLVTWVRPLLTSKEGLQMIIDPYVKPNISVDTVVKVAAIASMCVQPEVSQRPFMGEVVQALKLVCSEFEETDFIKSKGSQEGLLTDVKGIFSEASGERVEFSECQKTFSGYQSNEEKVRLSASELLSTSGQEFESFRQYSRSGPLIIGKKRQFWQKLRSLSRGSSSEHGSH

SEQ ID NO: 68056 - protein, 114 aa, Zea mays
  Clone ID: UC-ZMFLB73019C03_FLI.pep
RCMQSATARLIESNLPDRCSLELLFGEEVVVHLGLPEHLLPARLLHGVGEVQQRGLRPRAADELEPHGEPSPVIPDGHGDRWQPQEVARDRVPHQRSSVDVVQLPRAQRVVLQR

SEQ ID NO: 68057 - protein, 103 aa, Zea mays
  Clone ID: UC-ZMFLB73019E09_FLI.pep
SFELQEKDILDYARQTLERKPSVLWLLPPVLTAAAIPPQSSLFQIYLAQIDKQIHEAAPADRKCSCRGDEIDRHVNCEITERIQCLYAFLIQQLSYNGSTRLH

SEQ ID NO: 68058 - protein, 161 aa, Zea mays
  Clone ID: UC-ZMFLB73020H04_FLI.pep
HLMGEDLESLNPKELQQLEQQLESSLKHIRSRKSHLMAESISELQKKERSLQEENKALQKELSERQKAVASRQQQQQQVQWDQQTQVQVQTSSSSSSFMMRQDQQGLPPPQNICFPPLSIGERGEEVAAAAQQQLPPPPGQAQPQLRIAGLPPWMLSHLNA

SEQ ID NO: 68059 - protein, 223 aa, Zea mays
  Clone ID: UC-ZMFLMO17064D06_FLI.pep
LQWPTRFKIIQGVARGIMYLHHDSRLTVIHRDLKASNILLDKEMNPKISDFGMARIFSGDQLQANTNRVVGTYGYMSPEYAMKGAFSVKSDTYSFGVLILEIVSGLKISSPYLIMDFSNLITFAWNMWKDGKPEDFLDSSVTESCSLDEVSGCIHIGLLCTQDDPSCRPLMSTIVSMLENKATPLPTPKQPKDFALRDYNPGNEGVHRELSVNDTSLTMVQGR

SEQ ID NO: 68060 - protein, 202 aa, Zea mays
  Clone ID: UC-ZMFLB73008D08_FLI.pep
AVPSRGTRRLRCGSCSEVLSYSYRDPGARKRLQSPFGGDEYSTDEYEQASGGHNAAAAGGFFGEADPVSYSEEYGLSFGIGHSTSTEDGQQPLYVSRNSSFNTVDERTGTRDGKLHRLMGYSSASEVLQHSPDLFESFGRRAADAGRAHVGGKGKGVCVAENDACERDGGAVERSKVRSGGWPVHGILKKGIHGLESLKLRS

SEQ ID NO: 68061 - protein, 162 aa, Zea mays
  Clone ID: UC-ZMFLB73011B02_FLI.pep
GPTPYLGILKPGGGFFLPIKGRPMPMFAAHALARLLVQSGHLYCLICSARAGVILTHFPWYHFSQLSQQIQNWSLLSLVPQVPHKVLLCSSASSSSSSSPLSSSSWGTLAFERDSALDCTFELGLLLLLLLLGVFSFACFLAAPVTTSNIVGMLFIRLKSRL

SEQ ID NO: 68062 - protein, 222 aa, Zea mays
  Clone ID: UC-ZMFLMO17014F10_FLI.pep
QHTAHPNMAAPTTAVDITAPPPTPPSAEPAAAPAPDQKVSPPPPAPQPDTAAPPPVPAPAPRKRKLEEAGFHTSECYKIRAVVADLRVRFVQVCQATDFRNTDPAREILKEINVVMDLSKKMRLKLGATSEPVKPLEKPSAGFVKDELVKPSEKPSAGPVNDEPVKPSEKPSVGPVKNEPTEPAPAGENNQAPTVGQTTVSPNDAGVGAPVVKHDNSEAQKS

SEQ ID NO: 68063 - protein, 91 aa, Glycine max
  Clone ID: 700739977_FLI.pep
GYYKAIEAIGKASTFYTWVLVSGVFYHLYNQSSYQALDEISPLTFSVGNTMKRVVVIVSSVLVFRNPVRPLNGLGSAIAILGTFLYSQATS

SEQ ID NO: 68064 - protein, 440 aa, Zea mays
  Clone ID: UC-ZMFLB73020H07_FLI.pep
KLHASDCLPCGKENVGTGLQPKSDPERADNRMSVARLGLDLNTVDSPDVAEPNPFFPYKKLGQSKVSDPSECGSTTGAIEESESHRKWREMKQNGFLSSFHGNAVVPRPRGRPPKRKRDDEFKKSSSTQHVQANKSVKVAAPSGLLSGLNPGIINHVRNSKQVYSIIKAMVHSERLENENHSSQTGERGREVNERIQDQKYGGGFMKCHLLINDNNAVFHQTLPNTSQFLAQDGDSLKLQLPSAVTMSSDRTFSTSADDPASNHDYMTVLSVKAASVASQWLELLHQDIRGRLAALKRSRKRVRNALHTELPYLTATEFSSNQENESSIANTSEIGCTDKAVSEAHVARWRSLFVQMDKTLQEEGKQLENKLKQVQEMQLNCDKGLKHMTCEAPLLGPMAELWKLKNPNISESEWAVQAAAASIYSTCNMVMRTENVPCF

SEQ ID NO: 68065 - protein, 117 aa, Zea mays
  Clone ID: UC-ZMFLB73026E02_FLI.pep
VCAMKLINCPFYHVGCETAFPQGNLENHCSKLLQTHMLYVLQASTRQNAAVNDMNQRLQLLEKAQSLNEISGALDVRSLTLIIKEQEAKIKDLESGIKAQEAKVKKLENELRSKNAR

SEQ ID NO: 68066 - protein, 237 aa, Zea mays
  Clone ID: UC-ZMFLB73090H01_FLI.pep
LKNRSRLGEGGAAAAGRSVSMIHLLFLVLFAEGAVALLLMVKVGPLRELAMRVVDQVKTGKGPATVKTLACTLSVILMSNVASILKIQNRGLKLGTVSPMDQVLWRTHLLEASLIGYTLFLAFVIDRLHHYLQKLMTLRKTSSTSREEVEKLQMENRSLREKEEKSSGETKRLQREVVRLNESMKKLKSEAKEHERKASVAEAHVNALQKQSEELLLEYDRLLEDNQILQTQLLSRG

SEQ ID NO: 68067 - protein, 374 aa, Zea mays
  Clone ID: UC-ZMFLB73019G07_FLI.pep
ETLKLGLKQAKVVGLFSGGLNAASTMSVVIVVIYGANLTINGYMTTGSLTSFILYSLTVGSSVSALSGLYTTVMKASGASRRVFQLLDRVSSMTNSGDKCPINEKDGEVELDDVWFAYPSRPSHMILKGITLKLAPGSKVALVGPSGGGKTTIANLIERFYDPLKGRILLNGVPLVEISHQYLHSKVSIVSQEPTLFNCTIEENIAYGLEGTTNFADVESAAKMANAHNFICGFPDQYKTVVGERGIRLSGGQKQRIAIARALLMNPRVLLLDEATSALDAESEYLVQDAMDSLMKGRTVLVIAHRLSTVKSADTVAVISDGLIVESGTHDELLDRDGIYTALVKRQLQGPKFEATSSISEASEIEAEPSSNGQ

SEQ ID NO: 68068 - protein, 270 aa, Zea mays
  Clone ID: UC-ZMFLB73011D06_FLI.pep
FQIGPRDMGLKVFHWLNRRMHSNTEYCSIHGSKAMEDKDSVPHSVVEKDTEALLLHDVLLNGILAIGTLGHHVDSLCPVACIEEDDLFIMDDEKAIVEERDDEEPRNDQVKEDVALETEPCEPVWPIVEPAKMHSLSMKEDNFTCFVAEEILIREVEDGGGANIQERPLLMLEKVEKVRTTLADLFAAEVFSSSSPREYSCQDIIDVAVASTSKHASCMEKMHQKKPRKPTPKPLKATRKLSRVMRKMLGKKIHPEQLNGRSNAEGPLTA

SEQ ID NO: 68069 - protein, 320 aa, Zea mays
  Clone ID: UC-ZMFLB73031E04_FLI.pep
NPRVWLDKCLDYFHIFKVSEAMWVQVASLHLEGIAARWFHVHRLKQRTGWNHFTRDVLNKFGADEYPKAMRRLMGLRQTGSLDEFVRAFEEARYMVSLHNPKLGEVLFVTQFIWGLEYDLQGAVQSQMPTTLDRAVLIAKLQDELNDQYKGRSTRSVFQSRSSSTAVKAKAISGTTGKGCMKVRGLLKNKVTLLLSIHSGSPTCFINKNLVARARLSAVSCPPARFTLANGESLTSDLLVPQLAWCANGHTFHTDMRVLDLGPYDAILGYDWLKSHSPMECDWANKVLVFHDAGVEVTLKGDDDNIKKEVQEVSAICHKC

SEQ ID NO: 68070 - protein, 326 aa, Zea mays; identical to SEQ ID NO: 56572
  Clone ID: UC-ZMFLMO17064B06_FLI.pep

SEQ ID NO: 68071 - protein, 426 aa, Zea mays
  Clone ID: UC-ZMFLMO17015C12_FLI.pep
VYGICGPLCCPCERRACVAAVLRVMPLTRVAADAFGVLTIGLLALLAALGLFCIFQSVYFRCQIRRGPSFLPLGYFNGPWVTRVALVLITIWWGVGEVARLSFLKQKLFSSLTWQRNICDAYILSNLGFAEPGIFFAFAFLLHGSLQKKELGTLNQRWNWKSMAYTLVFCVPVFSVQAVLVFVVGPRLVRDSNHDLGRRKIAKYFVRTHTPVGDTSVCTYPLLGTIFLGLVDAFLMSYVSYVGSRALSLVINKSLRRRVYLLMLSVLCFLPTRVLLLGFSVLPRPGDAAFEGIVFLSFLTMLSCTAVGILLLVYYPVADSLALRDVGQRDMAAEMVPYDDYYCYEGASLVANRSFRELERNSDTSTKPGSISFRTMIREDQLQQDGAADEIGFSSRSGAHIGSPSPAGSSPSAAMPMLPVKEIPRY

SEQ ID NO: 68072 - protein, 249 aa, Zea mays
  Clone ID: UC-ZMFLMO17020C03_FLI.pep
PLPIRSSSKLSHPDMASSPPSSASLRQRPAAAAATPDQQHEPPRLEDGLLPNQGGSPATSALSQALSSTANLANLLPTGTLLAFNLLAPTFTNHGACDATTSLLTRGLLALLALASALACFTDSLKSPHDGRVYYGVATRTGLWLIDYPPGAPPLPEGATGRYRLAFIDFVHAALSAAVFGVVAARDRDVVVCLYGPTPDRATQDLLDVLPLGVGVLCSLLFVAFPTTRHGIGYPVVANAVAAATATSS

SEQ ID NO: 68073 - protein, 360 aa, Zea mays
  Clone ID: UC-ZMFLMO17093C06_FLI.pep
HEMSRSGDEPVASHDAARSAGLFVLVVLLAVRVPAVAVAATVRPVPGWGGAAPAAVVPAGRRAAVAAVWLRAVAPLGGGRPDGRRAPHALLLRHWRHRRHRHRHPHGRRRGHRHGWARAGRLQPRRDGGVCRPDDLRLAVAVPVPVRVRVAAGRLVHVKVVEVVVHVHVHVVELDVLILTRLASAAVASASVPAGLPMAVPVASAAAAAVPAMASASVPALAVPVAAGLPWLGRLAGGDGAVLLLFPSASASAPAQAEAEAPDDVYVGDDLAGVGGEPVGDLLGVEGPGHRHRVVLLVVGDGPDAHLVLDLAEDLPDLLVALVALKIHPHDHRRHLKNANYSGSSVPYTQSDVHKKEARD

SEQ ID NO: 68074 - protein, 402 aa, Zea mays subsp. mexicana
  Clone ID: UC-ZMROTEOSINTE061F09_FLI.pep
RQRNENEKNNVEDGSSMANNTVPLPERRSMESLDTAEKWSEKVAELDNVKDSPSAISDENFPEIMPIRKGENRFVVSKKKDRSLTSQQYKRRSILEQADSSDFVPFVPFPPGYFGKKDTPIESTTDTGIMSGGSQPKGNLNNENWNRNYYQYQSQSQEFRPSGNAYTGSGNTGNSEGNMNRSRGESTYHEANSEKRSYYNSGYSNNGYWSSDNNNSNNAWSDNSNYDNNNAWSGNNSYNGCTRNDNTSCNSNRDYNYNDTWNASSNNNNNQSGQFADNSNVTRSSSYVNANHAVDSSGYGGNSNRGYTGKSLEGSAVKDPDPLDMSEEAKVERWFRRAAQIKDISELANIPDEDFPEIMPMRKGVNRFVVSKRKTPLERRLTSPQYRRNLPIVSSETDKDAN

SEQ ID NO: 68075 - protein, 89 aa, Zea mays subsp. mexicana
  Clone ID: UC-ZMROTEOSINTE115G04_FLI.pep
WFIRLVMRRWFLTMVFLYVTYILVISKTFILISWYLSLPKSIFSDGIPCMSFPAATSASGKCSTGIVNDVGYSSFWLASRRRCCSLDPP

SEQ ID NO: 68076 - protein, 117 aa, Zea mays
  Clone ID: UC-ZMFLB73043A03_FLI.pep
KVDVVTVLHIIIIIHHHQSFWRTHSSLQLKCRHIQQDSLNDFFLSFFSFLFALATRVQLVRTDTWLMRDDRHILGSGEIALHCIALLQRRACVCICTICTARPLSNPTPGIINVRSS

SEQ ID NO: 68077 - protein, 419 aa, Zea mays; identical to SEQ ID NO: 65481
  Clone ID: UC-ZMFLB73208H07_FLI.pep

SEQ ID NO: 68078 - protein, 70 aa, Zea mays
  Clone ID: UC-ZMFLB73106D10_FLI.pep
NYRAVLYVTTMYKIGSTHDEFQFAAKNATSRSMSATDSPQSGLKRKKTWSWPLDSNHSTVPPHPLAARAS

SEQ ID NO: 68079 - protein, 621 aa, Zea mays
  Clone ID: UC-ZMFLB73118D09_FLI.pep
PSTLEAAKLSEVSLAMPTASSAHRSLLLCLCLALLSNPVAASPSPRGLRFSAKDIAAVEAALPRHGSRASSSSKTTFFEVDRPLRPPRGSSGPCSTLLLSHSFAFTLTKPPVTAAYSPPPCLSGSDAPPVSLAVLEWRAECRGAVRPHLRRVARRRRAPARQHRGAAPRRGGLVGLQGRHPLRGPPRGRQRHARCLPRQPHRRHLRRRLPRQPHAPPLLPPRRAAVRRRRRRRCRRPGLQEPAAQRRAVVRRPERHRRAVRARVGAAQRVPRRPRGLRLVPRRRRVLVHEHARAERAVPRGHRPARRRRGGRRVAVPGDLHRRHQPAHLAPHHQHRLLQHAHLRHRAHALPRQPPGRRGARARVRGDQRAAVVVRGRQSPPVAGPQELQDQRRARRVPRAEAGGQHRVALRGRRRRGVRGDGEPQYHGHGVGELVARQRHHHVRAAAQLLQHQRGERAGQRAGDQPDDRRADGRQRRARARAGAPELPALHLPGRRRQRHVVAAADAARGDRVRRDAVPGRRRSRRRGRRVHDHEHAAELAGGGGGGDAPGRRRGGRVVADAPDVRVRRQRRRLLPEERQQRRLRRAFRPSRRVLRRYAGPLTLVADSERLVGASAARAAG

SEQ ID NO: 68080 - protein, 216 aa, Zea mays
  Clone ID: UC-ZMFLB73198F05_FLI.pep
RCSLHSSSCNLMDPDDKKFGNGPRELTGAVDLISHYKLLPHHDFFCKKPLPLAISDTHYLHNVVGDTEIRKGEGMELDQLVHNAYLRDKPAYIQPFDMETLGQAFQLRETALVDLPSTEKGIPTISGKPKSESKDKEKKHKRHKDKDKEHKKHKHRHKDRSKDKDKDKDKDKKKDKSGHHEKKRKHEGTEDSVDVHKHKKSKHKSSKTDEMGNGVS

SEQ ID NO: 68081 - protein, 224 aa, Zea mays
  Clone ID: UC-ZMFLB73237C12_FLI.pep
LKKQHLIDHTTNRSEEKRSVVSGLHPGPRLVGRPEVGVVHAGLVHDHVQQLRRGLAVRLRLRRLGRGHGRGRAGVAAAPAAGPAGRLEAVHDVVVGHPEPDHLGLRQRQLRLQRLHLLLQRRDGAHAAVHRVPDARVGLVHQAAHRVPSVLRRDLLEQLADIAGPEDLVHVGELVRLPGREVGREDAARRAPAPQQLAGRARRRRRRRGRSSAPASASGHRHHH

SEQ ID NO: 68082 - protein, 356 aa, Zea mays
  Clone ID: UC-ZMFLMO17220D06_FLI.pep
RRFYYHTQKTRELDNLLGDIYHKILDMERAIIRDLVCRVLQFIPQLTKAVNFAAELDCILSLATVAHQNNYVRPILTEDSILEIHNGRHALQEMTVDTFIPNDTKIRDAGRINIITGPNYSGKSIYIKQVALIVFLAHIGSFVPADSAIVGLTDRIFCAMGSKSMTTEQSTFMIDLHQVGTMLRHATSRSLCLLDEFGKGTLTEDGIGLLGGTISHFANYGSPPKVLLSTHLTEIFTENYLPQCEHIKCYAMSVLNPDGQTSNEDITFLYRLVPGQALLSFGLHCAQLAGVPNEVVQRAGIVLEDMHSKKPTRRVTSEKLTATDKQYQDAVTKLMAFDTQKGDLNSFFQELFPVDL

SEQ ID NO: 68083 - protein, 260 aa, Zea mays
  Clone ID: UC-ZMFLMO17220G08_FLI.pep
DDVKPREIHNLFSHRPAFDHCLLEYTGRGNQAVAFVTFFTHEAALSAMSSLNGTIFDPESGDRLHIELAKSTSRRPRGGVEGYRVIDKRANKTEGNADHENVGDEDDDEVWGEDEDGGNDNNGDGGSDEPSGTENENPSDKNELPTDKSDQPGHKQQNGQSLSNEGRDKSSSDIPPCSTIFIANLGHTCTEDELKEVLSKEPGFHVLKMRRRGGMPVAFADFTDIESSTAAMNRLQGTVLASSDNDGLHIEYARSKMRKS

SEQ ID NO: 68084 - protein, 166 aa, Zea mays
  Clone ID: UC-ZMFLMO17245A06_FLI.pep
ITHQGLVDSLRSFSMEADIGIKKLRVANRVTASEVQYVELLSLMKIDKEMPLHKQEPRIFHADRLLPDLHGGYVPDSFVPDLHDEYALDIEKCPLCPNYKLVYDCTSKECKTSGSSICRGCVVCISRCLRCGRCIDSEFEFEETFFLGSICRDCVKYSPHHRKIDV

SEQ ID NO: 68085 - protein, 279 aa, Zea mays; identical to SEQ ID NO: 62042
  Clone ID: UC-ZMROB73078F06_FLI.pep

SEQ ID NO: 68086 - protein, 680 aa, Zea mays subsp. mexicana
  Clone ID: UC-ZMROTEOSINTE068G03_FLI.pep
DLSMANEAKKAALGHADDAMKIAEVNAEKVEILSNEVVRLKGLLDSSAASEESKSREAELLVKNLESEVSSLKGKLEEAKVLEDRLAEAEKMIEELKSEIANAQKVEADICQQLEEWKDKSGSLEMKLEVVTLSEKFKSDSLASTTEELYKIQSILQDRESEIEVLKGKTTALEIEVERLLADVTDSNEHLDASQQEVFGLQTTIDVLRNKLEAAELAASEALDNERTATTKIEGLTEEKIKLITELDDARDREEREKRAIEDLTAALDKVTGEAQEAHDRCQKKEDDYEHALAQIGDLKMALKSMEETYEVMLDESEQDITGLRETVEKLEAEVNKYREECESKELDLITTTKQSEQEIAALKEEAEHVCASLRGAEQELEAVNEEKERLEGKLARTESAVAEANDAVQEAKAENERLQEKLAHVESEVAEANMAAEESKNEIERLQEKLTYTESAVAEANKTVQEAKAESSQLKERLLDKENALQSITQENDEFRMREADAMKKIEELSALLAEAMTKKHPEEEEKLVVVDEAHNSGREVTRSVAENEDTEETDDRKPKLEADAVDTNSNGETKHEEKDDSKVEQEELKAELILQESDRASSEKEAQSENRRQETEPSNDELDPKKDSSTESANGTAVPEDTAATTTKAATSPTKPQQKKNKPLLKKFGSLLKKKNSK

SEQ ID NO: 68087 - protein, 146 aa, Zea mays
  Clone ID: UC-ZMFLMO17155A10_FLI.pep
DRRLLTSSDESVSEGSRGYGLANTMVSEFGDDNFVIENWELKEIISCDGRMKLSSQMFFASIDQRSERAAGETACTSLVAIIADWFQANQNIMPIQSQFDSLIREGSLEWRNLCENETYRKRFPDKHFDLETVLHTKIHPLTVSPS

SEQ ID NO: 68088 - protein, 330 aa, Zea mays
  Clone ID: UC-ZMFLMO17156G06_FLI.pep
CDQRRTPDPSFCRTFSRPRPMGDCVVADGHVHHPSDEVEGAVPLTVAVELDERAGESREEGGGQRKKVGGIRREPSFSRWCRDTSVAAASNTAVAAAISDSDSDDSEEFDLPLLPSSSGGGSSPMDIEAGATVRSDDLPISPRLLAKVIGLIACWYTLSTCLTLYNKEMLGKHMWKFPAPFLMNTVHFTMQAVASRAIVWFQQRGLEGGPNKMSWKDYCLRVVPTALATALDINLSNISLVFITVTFATMCKSASPIFILLFAFMFRLEKPSFSLLGIMLVVSFGVLLTVAKETEFNLWGFIFIMLAAVMSGFRWSMTQILLQKEEYVIM

SEQ ID NO: 68089 - protein, 403 aa, Zea mays
  Clone ID: UC-ZMFLMO17158E12_FLI.pep
FDRLFSHSDSIFGNEIVANDSDFLSASSNLMDTAVLSIPIPVEAHKRPVWSRRKPEERGKSKISSSTSGFSHSKVESSSTNLQTPMEPVQTPQYALFQDSKKIGEVQHANQFMFPGYGYPAYPFPTIPLVSNIQAEGYQTKPAGTSNRTSEDYLKQSSSTEMSQDIPSRPLTMTPQEKIEKLRRRQQMQALIAIQQQQQQFGQQGPGSDTMVSQAYTPGNKNPDSLGSSIVIDENTNKVISPEMIPTDHDRVHKSSAISDDPFIEEKIYYQLQDALGKLDTKTRLCIRDSLLRLVHSATERKIDGDRSTNKTNKDEDEASEDASTRKTRSPNKEAETTTNPIDRIVAHLLFHRHCSKVAKATKEIISSIPLTLEPEPKVPFGTPRVPSKDQRDEQEIVLQPSQ

SEQ ID NO: 68090 - protein, 254 aa, Zea mays
  Clone ID: UC-ZMFLMO17159A07_FLI.pep
TAAQGRTGSIPACKQPLVAAVDHFLFLVGGWGTSSSSSSSSDSSSSSSLPSSPSSSSSSSSSSSSPPSSSSSSLPPSPLAAGSSSSPSSSSSFSLSSDPSSPPSSSSSFSASSSSPSSSLSSSDSPSSLFSGLVSSSLLPRILVIKFWSPPDVKISLCRIMARSPSNLGTSKATWAIISDAKSAALWPPWLLLPNSASIPKAAMISGGCSSPANETTKIRKGSDEDLEPGVGRQRRRSPSSLTRRKRDGESGRR

SEQ ID NO: 68091 - protein, 388 aa, Zea mays
  Clone ID: UC-ZMFLMO17157C11_FLI.pep
SSQHQYTTRRLRAMPAIPTAPAPCPVRFLLARRHSLHISYPSPCSNHQRLPPRLLRLPARPRAAPMSAEARAPASPVAPPAHPTYDLRAVIALALAEDAGDRGDVSCLATIPSDVEAEATFIAKADGVIAGISLADMIFNQVDPSLKVEWFESDGNFVHKGLQFGRVYGCARSIIVAERVVLNFMQRMSGIATLTKAMSDAARPACILETRKTAPGLRLIDKWAVLIGGGKNHRLGLFDMVMIKDNHISVAGGIANAMRSVDQFLQKEKLTIPVEVETRTIEEVKDLLKYAAENKTSLTRIMLDNMVVPLGNGDLDVSMLKDAVRLINGRFETEASGNVTVDTVKKIGETGVTYISSGALTHSVTALDISLKIDTELALQVGRRTNRA

SEQ ID NO: 68092 - protein, 477 aa, Zea mays
  Clone ID: UC-ZMFLMO17159C11_FLI.pep
DLGERDSLGPEMLAGYGGGGRSVHLSSHKDLLLGRCGRSFLFGNTWFLLSTYPARLLHTTDRRAPSAFVAAINRVPCVRSHCTGQGLLQRGSIVMAACGYVLRRTELGAAKRQQPDKDPSGGTRASRIAAMGSLGSAARPEVSFRYRGLEHCKKIGASLKCREPWGNSAFWTNATGPGWKLSFTVEPWTKDFSTACAAPYSAGATEDQLPLNEKMNSSTVGMSPVSEKLKLLSGSCYLPHPAKEATGGEDAHFISIDEHVIGVADGVGGWADLGVDAGLYAKELMRNSMSAIKDEPEGTIDPTRVLEKAYISTKARGSSTACIITLKDQGIHAVNLGDSGFVVVRDGRTVLRSPSQQHDFNFTYQLESGGGSDLPSSAQVFHFPVAPGDVIVAGTDGLFDNLYNNEISGVIVEALRVGLEPQIAAQKIAALARQRATDKNRQSPFASAAQEAGYRYYGGKLDDITVVVSYVKSAGAP

SEQ ID NO: 68093 - protein, 388 aa, Zea mays
  Clone ID: UC-ZMFLMO17160B03_FLI.pep
SCGWRRGRSSARSRPRSTGPSPTPCSRRCPVASLSSSSSSDPNSAMPSVCIFYLVLRALDTVEDDTSIPTEVKVPILQEFYRHIYNRDWHYSCGTNHYKMLMDKFHHVSTAFLELGEGYQKAIEEVTRRMGAGMAKFICKEVETVDDYDEYCHYVAGLVGYGLSRLFYAAGTEDLALDSLSNSMGLFLQKTNIIRDYLEDINEIPKSRMFWPREIWSKYADKLEDFKYEENSKKAVQCLNNMVTDALIHAEECLQYMSALKDHAIFRFCAIPQIMAIGTCALCYNNVHVFRGVVKMRRGLTARIIDETNSMTDVYTAFYEFSSLIESKIDDSDPNAALTQRRVDSIKQTCKSSGLVNQRGYHLEKSPYRPMLIMIVLLLVAILFGVMF

SEQ ID NO: 68094 - protein, 434 aa, Zea mays
  Clone ID: UC-ZMFLMO17161A12_FLI.pep
EDTDVHKEPPHFTNISQSEMYNCTSSGRMSSDEDHGSGTVNGDLFILKRIMVERGNAAYLSGLREKYFGELFSNASRTLEGLSRIESSTISVDMLYDPDIHLEKNLSATEEPLKHVARFIESFESESREIWLVYHNEGHSLSKLIYTAEETKLVTGNNNERVRHIQVLHPSKWWHWLRTTKAGLKQMQNLLWQLLMGLKACHDRNITHRDIKPENMIICFEDMETGKCLREVPSEAKQNKMNMRLIDFGSAIDDYTLKNLYGPGPTRSEQTFEYTPPEALLNSNWFQGSRSARLKYDIWSVGVVMLELMMGSPHVFQISDRTRILMDQHLGGWSEQTKELAYKLRSYMELCILVPGISSQHHGSGSPEQGQFGLASWKCSEESFAHQVKIRDPLKIGFPNLWALRLARQLLVWHPEDRLSVDEALNHPYFQEPM

SEQ ID NO: 68095 - protein, 166 aa, Zea mays
  Clone ID: UC-ZMFLMO17166C04_FLI.pep
MIYTINIFTIGIWNMCILFLNNWNFFTIILLNLNLYFGFIANSTSTSVWSTSTRTLTEITLQISSRPAECGAAEHAAACYYLLVSYSPTQGLRRARSATGIRPDQTTRTARPRGTAAAAGGAALQPAGGPAGPVTGAEGARCGGRRALWPAVEAMEGGWRRRAQVR

SEQ ID NO: 68096 - protein, 438 aa, Zea mays
  Clone ID: UC-ZMFLMO17164F02_FLI.pep
LMDTAFGQTLVEPNMIVINVEKFASTPSENNWFSIEERPPIAYVKLEILEGTDMKPSDINGLADPYVKGHLGPFKFQTQIQRKTLSPKWFEEFKIPITSWEATNELIMEVRDKDPMFDDSLGQCTISLHDLRGGQRHDKWISLNNVKKGRIHLAVTIDDISEDQNTSSLDQSLKQADTELPVSTSVCSEVDASEPPEEKKVLMDEVEHINIDGQEQPGGLYVHRPGTGVPRTWESRKGRARNPDTQIHQEVDKQKEVPTPKGSGQGGLFNVGSFFRWNSRKGSSRNLDASPPATPGSQSVTELDPKLPQTPRPNLKELGEKRTSIKIVVDEEASPADKVGGAENSGEDVAKVIEKNAGEPGRSLTSTLSRKICRRRADDRLSDIPEKIEARGSKPVSEGPILVRGEPMITVDHPTTEHSDGGGTEQDAVGAKVATQTS

SEQ ID NO: 68097 - protein, 257 aa, Zea mays
  Clone ID: UC-ZMFLMO17168A03_FLI.pep
RFQAMAYSAAMKVPVAAIELYLDVRSQIEDQIRGFSEPVSDKLLPDLAPQEQHVLTLVLDLNETLVYSDWKRERGWRTFKRPGVDAFLEHLGRFYEIVVYSDQLSMYVDPVVDRLDPKGNIRHRLSRVATKYENGKHYRDLSKLNRNPAQVLYISAHAKESSLQPENSVEIKPWKLENDDTQLLDLIPFLEYVAMARPSDIRAVLASYQSGDIAAEFIERSKEHQRSVDIFLCSITFLYLIDGNLNVDVPNSTSVKL

SEQ ID NO: 68098 - protein, 364 aa, Zea mays
  Clone ID: UC-ZMFLB73201H04_FLI.pep
PDSPRHPLLPPRRNDNHPAGEGNPSEGEPSPCCSSFAVASKSLLRSLSLDRSAGLTGHFAGLVDLSPLILSRDWSVADSVRPDNSDLFSFSGSLHACAMPASSLPASPDATGDIGAALELDLEDLAAGGGTDCIGALACGRSSFSYRRLPEPRLRLTVQKLDDSFFDIEIARSATVWELKVTIENLFSALYDDTQKTISWNHVWSHFCLCFKDERLTDDKATLRGFGIRDGDVLHFAQHLSVDYSPCRDPPKNQKEASHTHRRSRTSLDGYRPVSMLDDLSEDDDEKFTHSRCSTSVLEDPCLYEYIEERVEEETPKKGSLFQRWFCSSKLRSNRRTHAEDTVPLSGEKKNAHPKLGKWLTFKF

SEQ ID NO: 68099 - protein, 253 aa, Zea mays
  Clone ID: UC-ZMFLB73418B03_FLI.pep
KTRVKNFREMRQNGAVMIQFGHQMPDYDSPATQSTSETSHQEASGMSEGSLNEHNNDHSGNLDGYSKSDENKMMSALSLGNPETAYAHNPKPDRTQSFAISYPYADPYYGGAVAAAYGPHAIMHPQLVGMVPSSRVPLPIEPAAEEPIYVNAKQYHAILRRRQLRAKLEAENKLVKSRKPYLHESRHLHAMKRARGTGGRFLNTKQQPESPGSGGSSDAQRVPATASGGLFTKHEHSLPPGGRHHYHARGGGD

SEQ ID NO: 68100 - protein, 533 aa, Zea mays
  Clone ID: UC-ZMFLMO17018D06_FLI.pep
GGGGSTGSARLDAVKKAVKFIIGQIHDNDRLAVVGPSPNRRLVIGFPSTHEARQNAEKSVDDLEPRGEFASGAGLEEAVKILGELPATASGSSRARFVILVTDTAVTEGSGGRFGKLRRELLPPVHTFGLGAGHDPRALLSIARESQGTYSFVDDQNTDGITGAIAICLSGLKDVVAVGTRVRVEAPVGSGVTIERIESGGYRTNPNTGDDKTYGEVAVGALYAEEVKSFIVHLQVPALPSTSAMTTSSSVDNGGCDKQQLLTVTFAGHYTTRDEGGATSPASPSPTVTTAVLYVQRPQPEALDVAGGGALHRVPVPAVMNLIARFGVLEMVTTFVEDEIWRLSSSSSSTVEVATKLRTQWEQFVQARQFWSGLDLGVLDVEVNRMASILEAAGTRIGSSATAYMLSWLSSYQMQRPTAMGSPSIVAAAFVTVKMQFTLQQATIVNTRPPPCIGGCPACECGCEDRCVQPLPPPVLLPSGRGDDTYRVNPAYPQGVLFNAINQAMEQMYLALVRASNLTRCDDAARVELFLPA

SEQ ID NO: 68101 - protein, 402 aa, Zea mays
  Clone ID: UC-ZMFLMO17084G07_FLI.pep
RCSCALGFVPPGIVPGKLLLAAAAMASSTSEMAEGKEKLKRSGSLGSNDTYVRADKIDLTSLDIQLENQLTKTWGKANLKSQGPKEEWEIDLAKLEIRYAIAQGTYGTVYRGTYDGQDVAVKLLDWGEDGFATEAETAALRTSFKTEVAVWHKLSHPNVTKFVGASMGTTDLKIPSNNSNGAARTNLPARACCVVVEYLAGGTLKQYLIKNSRRKLAYKVVVQLALDLARGLSYLHSRKIVHRDVKSENMLLTPQRNLKIADFGVARVEAQNPKDMTGATGTLGYMAPEVLDGKPYNRKCDVYSFGICLWEIYCCDMPYPDLSFADVSSAVVHQNLRPDIPRCCPSAFANVMRKCWDANPDKRPDMDEVVQLLEALDTSKGGGMIPDGQSSGCLCFTKARGP

SEQ ID NO: 68102 - protein, 184 aa, Zea mays subsp. mexicana
  Clone ID: UC-ZMROTEOSINTE021H09_FLI.pep
ERGGGRINRAVWGPLNRTIITAGEDATIRIWDSETGQLLNESDKESGHQKTISSLSKSLDWSHFITGSLDKSAKLWDTRTLTLIKTYVTERPVNAVDISPTHDTVVLGGGQDAMNVTMTDRRAGKFEAKFYHKILQEEIGGVKGHFGPINALAFNPDGRSFSSGGEDGYVRLHHFDSDYFSIKM

SEQ ID NO: 68103 - protein, 343 aa, Zea mays
  Clone ID: UC-ZMFLMO17161H12_FLI.pep
VYSTMTPPRQQHMQCHVSVPQSPSVSHGSHPSLTIQSPLLNEGSQNQQRHPSVRVSLSVGATVSSPRAGRGTGNAHIAQSTHSHAIFKRAGAVAPVFATRNASQFCPSAPDDLLLQQALSHASQPVQVAPTTNAFTGASQNNHFQRSFSAPIAPQVQQGQPAARYQVAINGMHAVGPQLARSTSLTTQRTQCLPEPAIIDVSTTSWQDILATVASNLGVADYNTSTPESQHVTVDSLAMHPTANHGLDLQHEPIAESENLTYSLLHDSSNGAAGGSVQADGPMQTPENLDHLIGQSNPVPNEAHLDDFAGAPANQLPIEEEEAHQPEMSRLEPTNILFEFDWV

SEQ ID NO: 68104 - protein, 92 aa, Zea mays
  Clone ID: UC-ZMFLB73418A10_FLI.pep
AEAARIFLYVLYGFHCSIDFSSFSGLHVVVIMFTGYLVGFAMFKALFNNNAVLNAAGGILGLVGGMLVETILFIIRSSSKELASVPRSKKAQ

SEQ ID NO: 68105 - protein, 240 aa, Zea mays
  Clone ID: UC-ZMFLB73134A03_FLI.pep
NTLQAEVENLSLQEQALDERISDMREKLRGLTEDENNKRWLYVTEDDIKGLPSFQNETLIAIKAPHGTTLEVPDPDEAGDYLQRRYRIVLRSTMGPIDVYLVSQFDEKFEELGGVATPVKHSSVPRHQPAEDFNTYAGQSSTPMDVAHDVQHGQKIPQDPSALHDFGGMTRISPSDVHTDSDYWLLTEGDVSMTDMWKTGQEVQWDQMDFLSEDVVTPRAHNQQPVTVDGPHMEVPSMDP

SEQ ID NO: 68106 - protein, 425 aa, Glycine max
  Clone ID: 700889930_FLI.pep
VLMALRSFSYDVFLSFRGEDTRYGFTGYLYNVLRERGIHTFIDDDEPQEGDEITTALEAAIEKSKIFIIVLSENYASSSFCLNSLTHILNFTKENNDVLVLPVFYRVNPSDVRHHRGSFGEALANHEKKSNSNNMEKLETWKMALHQVSNISGHHFQHDGNKYEYKFIKEIVESVSNKFNHDHLHVSDVLVGLESPVLEVKSLLDVGRDDVVHMVGIHGLAGVGKTTLAIAVYNSIAGHFEASCFLENVKRTSNTINGLEKLQSFLLSKTAGEIKLTNWREGIPIIKRKLKQKKVLLILDDVDEDKQLQALIGSPDWFGLGSRIIITTRDEHLLALHNVKITYKVRELNEKHALQLLTQKAFELEKGIDPSYHDILNRAVTYASGLPFVLEVIGSNLFGKSIEEWKSALDGYERIPHKKIYAYLK

SEQ ID NO: 68107 - protein, 746 aa, Zea mays
  Clone ID: UC-ZMFLB73106G07_FLI.pep
FSKSASPHHGFAAYYTFVEKIFQADAVLHFGTHGSLEFMPGKQVGMSDACFPDSLIGNIPNIYYYAANNPSEATVAKRRSYANTISYLTPPAENAGLYKGLKQLSELISSYQSLKDTGRGPQIVSSIVSTAKQCNLDKDVPLPEEGEELPPKERDLVVGKVYAKIMEIESRLLPCGLHVIGEPPSAIEAVATLVNIAALDRPEDGITSLPGILAATVGRDIEDVYRGSDKGILADVELLRQITEASRGAITAFVEKTTNSKGQVVNVANNLSKILGFGLSEPWVQYLSATKFVRADREKMRVLFGFLGECLRLVVQDNELGSLKLALEGSYVEPGPGGDPIRNPKVLPTGKNIHALDPQAIPTTAALKSAKIVVDRLLERQKADNGGKYPETVALVLWGTDNIKTYGESLAQVLWMIGVRPVADTFGRVNRVEPVSLEELGRPRIDVVVNCSGVFRDLFINQMNLLDRAVKMVAELDEPAEMNYVRKHAQEQAEELGVSLREAATRVFSNASGSYSSNVNLAVENASWTDEKQLQDMYLSRKSFAFDSDAPGAGMKEKRKAFELALATADATFQNLDSSEISLTDVSHYFDSDPTKLVQGLRKDGRAPSSYIADTTTANAQVRTLSETVRLDARTKLLNPKWYEGMMKSGYEGVREIEKRLTNTVGWSATSGQVDNWVYEEANSTFIEDEAMRKRLMDTNPNSFRKLVQTFLEASGRGYWETTEENLDRLRELYSEVEDKIEGIDR

SEQ ID NO: 68108 - protein, 431 aa, Glycine max
  Clone ID: 700894722_FLI.pep
YIDLSFNKLQGDLPIPPNGIHYFLVSNNELTGNIPSAMCNASSLKILNLAHNNLTGPIPSAMCNASSLYILNLAQNNLTGHIPQCLGTFPSLWALDLQKNNLYGNIPANFSKGNALETIKLNGNQLDGQLPRCLAHCTNLEVLDLADNNIEDTFPHWLESLQELQVLSLRSNKFHGVITCFGAKHPFPRLRIFDLSNNNFSGPLPASYIKNFQGMVSVNDNQTGLKYMGNQYSYNDSVVVVMKGQYMKLERILTIFTTIDLSNNMFEGELLKVLGELHSLKGLNLSHNAITGTIPRSFGNLRNLEWLDLSWNQLKGEIPLALINLNFLAVLNLSQNQFEGIIPKGGQFNTFGNDSYGGNPMLCGFPLSKSCYKDEDWPPHSTYQHEESGFGWKAVAMGYACGLVFGMLLGYNVFMTGKPQWLGRLVEGVLN

SEQ ID NO: 68109 - protein, 887 aa, Zea mays
  Clone ID: UC-ZMFLMO17045F04_FLI.pep
EGEQKLHDVVFAKTKQWEKIKAEFEAKLLEFEQELIRAGAENDALTRSLQERAELLMKIDEEKGQAEAEIEILKSTIQSGEREINSLKYELHVVSKELEIRNEEKNMSVRSADVATKQHQEDVKKISKLEAECQRLRGLVRKKLPGPAALAQMKMEVESLGREYGDHRVRRSPAKNSSFHRPMSPVPDYAMENIHHMQRDNEFLTARLLTMEEETKMLKEALAKRNSELQSSRSMYAKTTGKLRSLEVQMLTGNKHKSPSTPNMDIHFDGAFSQNGSNPPSMTSMSEDGVDDEGSCTESWTNALVSEPCQFKKEKAAKSSTTESSNRLELMDDFLEMERLACLSSEVNGNGSTVDKMKVDNVGATFAGFTERDGVKDLQSASPMSETPSNKQCLSEKSPLLNFQSRISSLLDSESPENNAGKVLDSIRNILKDIEDEADSVNVNGTHPSDGTLSSESKFAMDQDLKNAILKILDFVKLLDQEISKFQGQSPDYDGLCEKTQQFSALVDKVLSNVDVLNDIVIALSVILSETSQIKFTLLRDNSNEAESNNLDCVDKVTLLENKVQLEPVKDNVPGICPLLPHSSSDPEFEGPADARFDVKTAVKVYSPEEYEQLKSEKANLEGELAKCNKIIEETMARLSDMEKKLEDLTSKLADSEKSNSLNETQLKCMAESYKSLESRKIELENEIEALRSRIDALTAELFDERQSHQEDLVKYRDLEEKMERYEMERSSILVDEDPDNKSKQEREIAAAAEKLAECQETILILGRQLQAMRPPAESLGSSPNRQRMEEFLKDAAGTTAGEYFQKPSGQPDTDQDMLGTGNVSPISGYKTHMIPSDADVSPFPSPNTSKRPKHRSRSSSSSSFTNHQLPDKQNRGFSRFFAKSKE

SEQ ID NO: 68110 - protein, 254 aa, Glycine max
  Clone ID: 700890457_FLI.pep
KNLTGLVEWYGKNKRLRNLVNLVIVGGFFDPSKSKDREEMAEIKNMHDLIDKYQLKGQFRWIAAQTNRYRNGELYRCIADTRGAFVQPALYEAFGLTVIEAMNCGLPTFATNQGGPAEIIVDGVSGFHIDPLNGDESSNKIADFFEKCKMNQSQWNVISAAGLQRINECYTWKIYANKMVNMGNIYTFWRQVNKEQKEAKQRYIQMFYNLIFKNLVKTVPVPSDEPQQPVGKQPSLKSRSTGRSHSRLQRLFGN

SEQ ID NO: 68111 - protein, 361 aa, Zea mays
  Clone ID: UC-ZMFLMO17050B08_FLI.pep
LGRSLPPLGFLPPPSMGALTDSRKRLSADHCLSADHRLPYPSSPPSLTPPFKRAKLSPIPEHDPSTSDFPPIRPSPQIIHSAAAASTSSTPGPSPSSTTASTPLPHRRRLPPPPFQRSIHGPQRILRVFQLGGAARAHAAGHSWFSPQSPPPRPLGLQQYVELVNSVTHPAPPTPAAITNATRQAEAAPFEVVAIEEDEDERKQQNEEEVMGSVVVRRVPPYKELYEASRQKRDAKLKTLEFEVRLTEQGRLSLERLAEALPRITPKKEEVPEPFVPLTDEDEEMIRQALHGKNRHERLAVHEPSNIVITREIMQCLNNQEWLNDEAINLYLDLLKERELREPCRFLKCHFFNTFFYKKWV

SEQ ID NO: 68112 - protein, 414 aa, Zea mays; identical to SEQ ID NO: 56301
  Clone ID: UC-ZMFLB73298F04_FLI.pep

SEQ ID NO: 68113 - protein, 78 aa, Zea mays
  Clone ID: UC-ZMFLB73299H06_FLI.pep
HHVQDTMKNEARINWIEKEIELNMQELAQSLLLRCDEKTSNKKTKKTLWDVLRSLYYATHSPQHMIDRHVSRVIFEPV

SEQ ID NO: 68114 - protein, 983 aa, Zea mays
  Clone ID: UC-ZMFLMO17176D04_FLI.pep
VFSLTQSRNVQVSLLRTHFMANAGRGLPRTQKNHKSKAYYQRKRGPLPTAHTKNHKSKAYYQHRGMVPGVLDSKSPSHRHAHFLLCSIFILISSNTATLSSAQASNRSEDDRQALLCFKSGLSGNSVGVLGSWSNDSLNFCNWEGVTCSTAIPIRVASLKLRSVQLRGKLSSCVANLTSLVQMDLSNNSISGEIPDEIGSLPLLQTLILSANKFEGSIPPSLGMAASNNSLLTTLILSKNRLSGEIPHFHKMAFLQSLGLTGNLLSGNIPPSLGNISSLTSILLAENSLRGPIPETLAQIPKLDILDLSNNMLSGNVPDLLYNVSSLTSFNIINNGIGGKIPSGIGRSLPNLVSLIMGGNAFSGEVPASLANISKLQLIDLSSNYLRSSVPSLGSLTYLTQLLLGSNKLETEDWTFLTSLTNCRQLLKISLDGNALNGSLPKSVGNLSTSIQLLSLRGNQISGTIPPEIGNLVSLTKLAMDQNMLSGIIPLTIGNLTNLVVLALSTNRLSGEIPATIGNLPQLIQLYLDDNMLSGRIPAQLVQCTRLTMLNLSVNSLDGSIPSEILSISSLSLGLDLSNNNLIGTIPSQIGKLINLGLLNVSSNKLSGEIPSELGQCVLLLSLQMEGNMLDGVIPQSLKTLKGIQHMDLSENNLSGQIPDFFENFSTLYYLNLSYNRLEGSIPTSGIFTNSNAVMLEGNKALCQQIDIFALPICHITSARKRKINERLLLITVPPVIIALLSFLCVLTTVMKGRITQPSESYRETMKKVSYGDILKATNWFSPVNRISSSHTASVYIGRFQFDTDLVAIKVFHLDEQGSLNSFLAECEVLKHTRHRNLIQAITLCSTVDFENNEFKVLVYEFMANGSLDMWIHPRPHQRSPIRVLSLGQRISIAADVASALDYMHNQLTPPLIHCDLKPSNVLLDYDMTSRIGDFGSAKFLSSSLNSTPEGLVGASGTIGYIAPGKLYASFVYGLLNFSFTSL

SEQ ID NO: 68115 - protein, 220 aa, Zea mays
  Clone ID: UC-ZMFLMO17021B11_FLI.pep
TPQTSRLTPPSSSPVLRRSCHSRRVSAPLGPPPRRRHMSTQSISPASASAQFTYPAAAAPSYFPVPFHLQNAQYTAWTAAAPAVPVYNAIYPMPQVQQAQQLFQKDSKIITPEALATVKAAIANSEKDKKVDATKKAVPRKAAGQSWEDPTLADWPESKISNSLLSFFTMFCKCSNSVGMESLTWQRCGILALIARCLADNNHEKMSVLQARSNALSIML

SEQ ID NO: 68116 - protein, 588 aa, Zea mays
  Clone ID: UC-ZMFLMO17021A12_FLI.pep
KQKANIASLNNCVSMDNLTVNPIDPVVLNEGEQTGTAITEQVPVPLNLVLENNNDKDQGEQSSETSEQLMSKEPQKRDIKRQKRTWSHTCKFDDDDLLMTAVIYKLTARYRNSFHRKLRNKFGFRRLPTYRWENEDKGDRKKIPGEARTVLNKLLEMGIVATVDILQCHGPGGKNVLKDGNITASGIQCQCCGTTFTMSKFKCHAGLRQEVPSLNLFLGTGKSYSLCQLQAWSIEQKVRKEHAKDTMSLQADQNDDTCGSCGDGGELICCDNCPASYHQACLSCQDIPDGNWYCSSCLCDICGEVIDSKELVTSLPALECSQCERQYHVKCVSAKVPCNEDGPGTWFCGRKCQEIYMTFRSRVGVPDHMDDDLCFTVLRNNGDKKVRTAEEIALMAECNIKLMIAASIMEECFLPILDPRTGIDIIPSILYNWRSDLHFNYKGFYTIVLESDDSMVSVASIRLHGAIVAEMPLVATSKENRQQGMCRRLMDYIEEMLKSLKVEMLLLSAIPHLAETWTSTFGFREIDESDKKRLSKVRLAAVPGTVLLKKDLLCECSGADAGEPPSPKPFQVYSRVPRGRTGLDAVCQ

SEQ ID NO: 68117 - protein, 515 aa, Zea mays
  Clone ID: UC-ZMFLMO17021C09_FLI.pep
RSGQPDTVANVWNLGLIQQLSNERLRRLKMSSSCICTLANRMTQPLQRRVRRPALLNGLAARGLHLVGLLPRLAPLLAAAHEGPHRPLQLRGLDEVVTPPVHLHGHGHAHDGHEFERVQVLLRVQRPRRQRHAVPQALHRRVPPAVGHEAAHGRVGEHRLLRRPPRPHEAPVPGPLQEPRREELVQVGVRRVPRSGSGRPAQRPQEPVPAPLQPRRGLARPRRVEPAQAPEAEEHHRRTRLRVEPPDARLVTGRTSPRTEVEHRTDRVQRRRRPSRHAPASGDGGEQPRLELGHRVDDDAVGVHETPAVVHEPREVGAVLASQEPRDACRGHGRQARHVHRALERLEVGGESLGKGRQPQREREQRGRGGEVDVRRHGEAARHVQHGGGEEVDHERRGAELPRRGLHVRPVELQVPRLELLQVAGAVRRGLHGREVVEPDASNAGLRDAPDVRAHLGGRLRRRRLHDEDGHRELPAQAVPAARAVAQQALPGFDERHEVAGARLREEQHVEARHT

SEQ ID NO: 68118 - protein, 333 aa, Glycine max
  Clone ID: 700891088_FLI.pep
KLVGCGSAVPALQISNDDLSKMVDTNDEWISVRTGIRRRRVLSGKDNLTSLAVEAARKALEMAKVDPDDLDLILMCTSTPEDLFGSAPQIQKQLGCKTNPLSYDITAACSGFVLGLISAACHIRGGGFNNVLVIGADALSRYVDWTDRGTCILFGDAAGAVLVQACNSEEDGLFGFDLHSDGSGQRHLNASIKENESNNALDSNGSVVGFPPKQSSYSCIQMNGKEVFRFAVRCVPQSIESALQKAGLPASSIDWLLLHQANQRIIDAVATRLELPSERVISNLANYGNTSAASIPLALDEAVRSGKVKAGQTIATAGFGAGLTWGSAILRWG

SEQ ID NO: 68119 - protein, 465 aa, Zea mays
  Clone ID: UC-ZMFLB73092G05_FLI.pep
YCCEVLWHFLHPLYGINKNFNCLGDPFEQMEGNDVPLGNMLQGVPYESLDLRGSSMQNYAPNSGKHIFSSSQMPGTFTMSMTRATEPDDFPGFQFKEQGKSDDHHHQHHSHHSKNCKSDGEEHVVAEDATDTPSGKGKKGSAWHRMKWTDSMVKLLITAVSYTGDDHGADSGGGRRNFTIMQKKGKWKAISKVMGERGCHVSPQQCEDKFNDLNKRYKRLTDILGRGTACNVVANPALLDSMTHLSDKMKDDAKKILSSKHLFYEEMCSYHNNNRVNLPEDHALQHSLLLALRCKEEHDPQRDPSGDADEYDQSADSDYEENDDDQHPVHINMREPSMHKRKRHSDVALVTSSSHEGSERSDPHAVTVDINKAFTDATNMVLLQQDLASQAIEIQKRRLQIEAKELELTKQRLKWERFRKKKDREIERIALENEHMMIENKRLELELRHKELELELKLKDKGNHP

SEQ ID NO: 68120 - protein, 345 aa, Zea mays
  Clone ID: UC-ZMFLB73295A06_FLI.pep
VAPSLCDCVRVRVRVRSGFGRIGRLVARVALQSEDVELVAVNDPFITTDYMTYMFKYDTVHGHWKHSDITLKDSKTLLFGDKPVTVFGIRNPEEIPWGEAGAEYVVESTGVFTDKDKAAAHLKGGAKKVVISAPSKDAPMFVVGVNEDKYTSDVNIVSNASCTTNCLAPLAKVIHDNFGIVEGLMTTVHAITATQKTVDGPSAKDWRGGRAASFNIIPSSTGAAKAVGKVLPDLNGKLTGMSFRVPTVDVSVVDLTVRIEKGASYEDIKKAIKAASEGPLKGIMGYAEEDLVSTDFLGDSRSSIFDAKAGIALNDHFVKLVSWYDNEWGYSNRVVDLIRHMFKTQ

SEQ ID NO: 68121 - protein, 619 aa, Glycine max
  Clone ID: 700894830_FLI.pep
VKGKTLMLNDRIQNPDALQHVLRKAEEYLGTVPPETPYSEFEHKFQEIGLERGWGDNAERVLESIQLLLDLLEAPDPCTLETFLGRIPMVFNVVILSPHGYFAQDNVLGYPDTGGQVVYILDQVRALENEMLHRIKQQGLDIVPRILIITRLLPDAIGTTCGQRLEKVFGTEHSHILRVPFRTEKGIVRQWISRFEVWPYLETYTEDVAHELAKELQGKPDLIVGNYSDGNIVASLLAHKLGVTQCTIAHALEKTKYPESDIYWKKLEERYHFSCQFTADLFAMNHTDFIITSTFQEIAGSKDTVGQYESHTAFTLPGLYRVVHGIDVFDPKFNIVSPGADQTIYFPPTETSRRLTSFHPEIEELLYSSVENEEHICVLKDRSKPIIFTMARLDRVKNITGLVEWYGKNAKLRELVNLVVVAGDRRKESKDLEEKAEMKKMYGLIETYKLNGQFRWISSQMNRVRNGELYRVICDTKGAFVQPAIYEAFGLTVVEAMTCGLPTFATCNGGPAEIIVHGKSGFHIDPYHGDRAADLLVDFFEKCKLDPTHWETISKAGLQRIEEKYTWQIYSQRLLTLTGVYGFWKHVSNLDRRESRRYLEMFYALKYRKLAESVPLAVE

SEQ ID NO: 68122 - protein, 130 aa, Zea mays
  Clone ID: UC-ZMFLB73238C01_FLI.pep
LEGTHYVVHPNGSSMFITRMSEPSTEPFPWQTDGEFDVERSFAGEGIANGYGFRYPSSKPGSLFVLQNGLLAFVWRETGAVLTLQRLDLDELLKKGERVPALQPVPNFAYLTKSYSNVFTSFPVGAASPR

SEQ ID NO: 68123 - protein, 587 aa, Zea mays
  Clone ID: UC-ZMFLB73244A08_FLI.pep
RPYTNQIRYNVSIVKTDTSTLPPIINADEIFIVISTTNVGTDSEDVSAMKAIKAKYQVKKNWMGDPCVAGTFRWDGLTCSYAISDPPKITALNMSFSGLTGDISSAFANLKAVQSLDLSHNNLTGSIPSSLSQLPSLTTLDLTGNQLSGPIPSSLLKRIQDGSLNLIYADNPDLCTNAGDSCQTAPQGKSKLVIYYVAVPMALIVVALAVLLCCLLRRRKTRGLADVSVKPRDKTPTSLASMAADEHRLSSLRLENRRFTYEDLEMITDSFKRVIGRGGFGYVYEGFLEDGTQVAVKMRSQSSNQGAKEFLTEAQILTRIHHKNLVSMVGYCKDGVYMALVYEYMSEGSLQEHIAGKRLTWGQRLRIALESAQGLEYLHRGCNPPLIHRDVKTSNILLNAKLEAKVADFGMSKALDRDTYASTNTLVGTPGYVDPEYLETMQPSTKSDVYSFGVVLLELVTGRPPILHSPQPTSVIQWARQHLARGDIEVVVDASMGGNHDVNSVWKAAEVALQCTEQASAQRPTMGDVVAQLLECLDLEKGRSANESFCDGDDSGSATASLSHSSAFVTGRIFGTVPMVETGPATR

SEQ ID NO: 68124 - protein, 445 aa, Zea mays
  Clone ID: UC-ZMFLB73256C04_FLI.pep
KSAAGFTPVKASPTTRSATAKAAGLSEVLAPVEATMEKLPQGAGGEDVEEIEEVEVEEEVEVEEEEEGESDQASIQALLDSFPKDQLVELLRDAAIAHGDVLTTIRRVADADPAQRKIFVHGLGWDTTTDTLTEAFGPYGEIEDLKVVTDRNTGKCKGYGFILFRHRSGARAALREPQKKIGNRSTACQLASVGPVPGGAPNSAAPAPVQLQLPPVSEYTQRKIFVSNVGADIDPQKLLQFFARFGEIEEGPLGLDKVTGKPKGFALFVYKTIESAKKALEEPHKHFEGVMLHCQKAIDGPKPNKLGGAGGFFGAGASSGGKGFAGYGATSHSLPGTVGIVQPMSPLAPGLASLPGGISAAPGVDPALGQALTALLATQQGGGLSFNSILGVGANGSGLPPQGPTGALGGSSVQGMQGGYMGGYGGSGGYGGASSGGPGRHYMGH

SEQ ID NO: 68125 - protein, 389 aa, Zea mays
  Clone ID: UC-ZMFLB73147B05_FLI.pep
RRHVGDRIGGTAPVAAAESKPRRLRGHKKGAVTCCVASSARPGVVASSGEDGCLCWFDLRTKDALLTMEAANKPISSICFKPGNEDFVYISAGNEILSFDVRMGTQSKPLETYNYNRDEINQIAVSSKGFLAAADDSGDVKIVNTIQKCLYKRLREAHTSICSSVQFIPWRPWTAITGGLDSKLAAWDFSKGRTLFSIDYGSPELQNGSSSGSAGQCFNPAFVHSVAVSEEGILGGLYKVCAVARGDGAVDVVDLEYELAPAKSKGPPRAAILTTRSKGAELGDGSCNQSRAKRIHLDYTMGGHTAAVSCVAFSAFGEKGKFLISGGNDASVKLWDWSKGFYSETNSKVDLVLDIDVKKKVNWLCTAPTDSDNLIVCDTSKVVKVYSFR

SEQ ID NO: 68126 - protein, 357 aa, Zea mays
  Clone ID: UC-ZMFLB73202B10_FLI.pep
QVPSSRTAQPLKNPSSRRHLRRQSTTCPPRRDVAQISSPPAAAGSAAGTGHLNRHYKACLAKLGKTQGGGTQTHLNFAADGTISTWVYNPQVARDEIAKFIVCEDLPIMLGESQNFKNLIQRAFCPQYQPVTRKTTKSDLIAIYKNKLAALKESFKKVQFSFALTSDIWTSSHQKTCYVSVVAHYLDNSYALNKRVIGFRMMDESHTGDAIANHILEVVRDFEIDGKILSITLDNASANTTAIDILTPRLQPYIQGYIIHHRCVCHIINLVVQAGITVANKYLNNIRAAIRFITSTPQMISRFAEYCKAQDMRPRKFGLDMKIRWNSTYHMLKSLEGYEQLITVFVNANGGKVSKIL

SEQ ID NO: 68127 - protein, 223 aa, Zea mays
  Clone ID: UC-ZMFLB73256G05_FLI.pep
TKPVPFSPSSTNAFPPSIPSGSSASVPWSPKRKSSPATTRTSPPRSGRMSRRTSQRPMRIPWTGSATGRHPQVLALPPWSPPSTCSILGVLEWGLQWMLSTPPWIQFTLNCPKWRSNGPMERALTASPGPASLTRANRHRRAHLRPSASPMAHVLGPAFPLLTGTVDLGPMWSISTSRSRERSQMQDLVHQHLVRAQLRMQRQADKNRSERSFAIGDWVYMKL

SEQ ID NO: 68128 - protein, 172 aa, Zea mays
  Clone ID: UC-ZMFLB73253A02_FLI.pep
INIYEPMFVKVIKHLQGPSMTSRSWWWRRWERTPRRFASRGGDPTSVLNRHLVPRLRRRRLLPPLARLRGPRWRQAPPSRRHLPLQHRPPRPRSAAPMSMMATRRTAPRAPPRSAAATPTQLLLVRSVCRLMSSWRHADLTATKRATHVLTDLAKNYKNRCSHCRGVHPIEF

SEQ ID NO: 68129 - protein, 355 aa, Zea mays
  Clone ID: UC-ZMFLB73257H08_FLI.pep
VPRKNSWPTQFQKNGPTYDNIGLFFFARDVQSYENHYSKLVENMLKNDLVLRGSVGTVELLIFPSNILSKNFQRWNMLYFLWGLFRVSKKDSSNLPSYLSTSRVERNFNDDLQAMDWMPSTHSFSQNRSDLAEPDPDLLKSTNFEPSLEASREVCLDGENSLNQLVRRRALDDHLDSDAKACSTISNGAMGSSAMSMQRKHQKPDYPEHQDKKRDTFGGNVSERDFDVNTVPVTCSVSLTHLQEEPGKLSTAIDLMDIDHGVSAGALDRSHASGGAGKRSFETAEVAAEVPEHKKTKLDNNVVPISSGPRENACTNDGNSDKLMPGSSSSDGKRVFPLDLNAVGDEDIVNIPAFR

SEQ ID NO: 68130 - protein, 544 aa, Zea mays
  Clone ID: UC-ZMFLB73260E01_FLI.pep
AAACLRGHSISSSRPPRSGLPHLSPAEDDPPASERAPRSRKAGGVMKPPAGASGKGGAVDPSLPRFRCQECRRALVVVGVESYADRLPAHAAPGNHASSVQGSVMGASKMDNSYVVLSRQNKSQGPRIPPRPPSAAAAHADPSQSTRAIEGSYIVLPPPAASIYRTSASEGGAQLTPSGVISSSPSLGNNSGFHSSVTVLKRAFEIASSQTQVEQPLCLECMRVLSDKMDKEIEDVNADIKAYEACLQRLEQEPYNILSETDFQKEKQKIEEEEKKLKAAIEEAEKQYSEVRSEMENLEIKSKQFEELEERYWHEFNSFQFQLTSHQEERDAVFAKIEVSQVHLELLKRTNVLNDAFYISHDGVIGTINNFRLGRLSNVEVEWDEINAAWGQAALLLHTMAQYFTPKFQYRIKIHPMGSYPRVTDIQNNTYELFGPVNLFWSTRFDKAMTWFLTCLQEFAEFAISLDKQNNVPPEKSLKLPYKIDGDKVGSHTIVLSFNKNENWTKALKYMLCNLKWVLYWFIGNTSFAPPSVSLHTQSLKNKS

SEQ ID NO: 68131 - protein, 777 aa, Zea mays
  Clone ID: UC-ZMFLB73152H12_FLI.pep
LPSSLIFLLNISSSFSCSSATGHRHAMATTLHKPLGAITVDDLAAAAPGSDATALHAALRRALDSHGPTEVWGELCRSVLCPSVPFAVHRMLYYGCFAGFPSPTPPAWTPDPKESVLTNVGRVLEARGRNLIGDAYKDPITSFPDLHKFSNENPEAYWKMVFEDMGIQFSVEPSCIWRENTAYPGGEWLPGAELNAAVNCLTAKPGRSSDGPAIVWRDEGKDSDPLNFMSLEDLRKKVCLVANAIDALELPKGSAIAIDMPMDVNAVVIYLAIVLAGYVVVSIADSFAAPAISMRLKLSEAKAIFTQDYILRDDKELPLYSRVVEAKAPMAIVIPVRGSLLIKGLRVDDLSWQDFLGRVNYTEAENYTAVNQPAYAFTNILFSSGTTGEPKAIPWTHITPLKAAADGWCHMDIRKGDVVAWPTNLGWMMGPWLVYASLLNGASMALYNGSPNSSGFAKFVQDAKVTMLGLVPSIVRTWKNTDCTAGLDWSSIRCFSSSGEASSVDDYLWLMGRAGYKPVIEYCGGTEIGGGFVTGSMLQPQALSAFSTPAMGCNLFILDSSGNPLPQDSVGIGELALDPTLFGSSTTLLNADHQEVYFNGMPEWHGKILRRHGDEFERTSDGYYRAHGRADDTMNLGGIKVCNALWKYATTCCNVAFPDPHMEFHDHFQVSSIEIERICNRVHDAILETAAIGVPPVGGGPEQLTIAVVLKDQSSQIEDLNQLKLACNMALKKLNPLFKVSSVVIVPSLPRTASNKVMRRVLRKEFSQAAQAKHSKI

SEQ ID NO: 68132 - protein, 524 aa, Zea mays
  Clone ID: UC-ZMFLB73189G06_FLI.pep
TPSLPSPQLAMHKLLPRAASFLDAAAAAAAAPLLLSFPRMPTLRLSGSPFVAMRPGGNPSRIRAPPWLHCDAGWRRGLCSAEAARRGGDTEEMEKDGGGRSAPERKQKCRNDALVGRGELLTIPGVGPRNLRKLVDKGFDDVAQLKQLYRDKFFGKSNEKMIEFLQNSVGIIHKNHAESITLFIKESVDEELKGTDTSKLPKNRRLTFCIEGNISVGKTTFLQRIANETIELRDLVEIVPEPIAKWQDVGPEHFNVLDAFYAEPQRYAYTFQNYVFVTRVMQEKESACGIKPLRLMERSVFSDRMVFVRAVHEANWMNEMEISIYDSWFDPVVSSLPGLVPDGFIYLRASPDTCHKRMMVRKRSEEAGVTLDYLRGLHEKHESWLLPSKGGGSGVLSISQLPVHMEGSLHADIRDRVFYLEGDHMHSSIQKVPALILDCEHDIDFNKDIEAKRQYARQVAEFFDFVKKKKESLTAESETADGDKSINKQIVLPHGGGLWVPGSSPLPESALKSFDFRRTMSSST

SEQ ID NO: 68133 - protein, 582 aa, Zea mays
  Clone ID: UC-ZMFLMO17292A08_FLI.pep
GLVICFCNSWYFENYCGYCISHKPSFIFQIQKLLGIHRSQYKNLAMPRSTEVQRFLLPVSECEFNITSAIEDLSSMPACPRGHRPLRATGAAISTAIALLEGCCSPSTGGRIMIFTSGPATVGPGCVVETDLGKTIRSHRDIFNSNAPLTDKARDFYKKVAKRLTDHALVLDLFACSLDQVGAAELRNPIEVTGGLMMHTESFEYEQFKICFRHMFRREGTNYLNMNFNATIEIVTSKEVKICGALGPCISLRRKNNSVSDKEIGEGGTNYWKTSSLSSKTSIAFLFRVDCNHKADPPTVFFIQFMTRYRHGDGSYRLRVTTVARRWAAPRSPEIAAGFDQEAAAAVMARLAVYRAETYHVRDVIRWLDKMLIRFTAKFGNYVPEDPSTFRLSTNFSLYPQFMYYLRRSQFIDVFNSSPDETAFFRLMLNREGVVGSLIMIQPTLFQYSFDGPPIPVLLDVSSISPDVILLFDSYFYIVIHYGSKIAQWRKLGYHKDPNHENLRKLLEAPEVDAEALLVDRFPVPKLIKCDHHGSQARFLLARLNPSVTQKTQFSKGSEVIFTDDVSLQVFIEHLQELAVQG

SEQ ID NO: 68134 - protein, 278 aa, Zea mays
  Clone ID: UC-ZMFLB73165C02_FLI.pep
TPFQKSVFDSIPGTPVQKSVFDYSVPSTPMQNSVFDYSVPSTPMQKSLFDSVPGTPVQRSVFDSVPSTPMQRSVFDSVPSTPTQKPFFDSFPSTPMQRSLFDSGPSRAESPTASSMYGKEQKGFFDSSVPSTPMYNSSFTPRYSEAGDDSFDTMSQYSSFGMHESNSFGQRDSLSRFDSFSSNADNGGNDTFARFDSFRSTSDQGGGNSFMRYDSMNSSSDHDGIGTFARFDSMKSSNYNSRGYSFDDEDPFGTGPFKSTETTSHSPTKHGTDTWSAF

SEQ ID NO: 68135 - protein, 1055 aa, Zea mays
  Clone ID: UC-ZMFLMO17294H10_FLI.pep
STQMQSSQQPMMQMSSGLQPGQTAIPQTQSMTMHSATQSGIQQNPLNSVQQSVQPLLHQPTQSVVRQQQHPQSMHQQSSLQQTQPTQQPNIPLQQQQPQLMNQQSNLQQNQLMNQQSGVVETQQQQRLPVQSNNLLNMQQTQQMMNQQSMSLHQPQQLANQGNMSSLHQQQHQQNQQQQQLLGTGPNARMHMLQQQKVIQQPQQQQHAQQTSMGLIQPQSQQNQLQQPQQHMMSQFQSQPNQMQQQLGMQQRLQTSAGMLLQQNNIDQKQYVQAQRGLQEAPSTSVDSTAQTGHPGIGDLQEELYQMIKSLKDQYFVELNELYNKVSIKIQQIDNQMPAQKSAEQYEKMKGFKGMLERTLHFLQVNKSNIHPGLREKIPIYERQILSILSSQRRKPVQAPGQQTFQQSSGQAPSSNISQQLQTSQGLQQHDSHTSQMPQASLPSMNTGVQTSGAPAPQGTNFGVPTTQQNVTNAPQAGSNLENAQGNNFNHVQHGSMGAALQQERTGPMQGALNAQQQSSSNMISNNAMSTMQTNNNANANSLQQLKQQRQEHQMMQSQQMKQRQQMMQQIQQKQTLQPQLPIQQLKKQQQQGQMQFPQLHSGNDVNELKVRQGAAIKSGMYQQLSQRNYYQQIKQGGVFPISSPQTLQTSSPQISHHSPQVDQHSLLQSQVKTGTPLHSANSPFVPSPSPPVAPSPMPMDSDKPLSNLSSVTSAGQAGHQQTSLAPQTQSIAVNTPGISASPLLAEFTSADGSPANVPTQVPAKSSAAERPLDRLLKALRTTQRESLSAAVSDIGSVVSMIDRIAGSAPGNGSRAAVGEDLVAMTKCRLQARNFITHDGSGASKKMKRDTSAMPLNVSSAGSVNDSLKQSYGVGTPELQSTATSRVKWQRAEVNHALMEEIQEINQQLIDTELHVSEDDAESFTTSEGGKGTVIRCTFTAVAVCPSLKSVFASAQMSPILPLRLLVPASYPKCSPVLLDKFPDEQCRNSDDLSTKAKTKFSVLLRGLAEPMSLREIARTWDACARKVITEYAQQTGGGSFSSSYGCWESCVGAC

SEQ ID NO: 68136 - protein, 513 aa, Zea mays
  Clone ID: UC-ZMFLB73176E03_FLI.pep
QRRFKANLPLFPFSESPAFSCLPVQDPQNYRRAAAATMPLSHRNLLLFIPSVIVLVVTSAAALSVSTPVELTVTSHPPASVHLPHARPLAGGGTAGPYCTRVLLQGRPSRIRDPSRFFHALRLRANATRPHGLELCFHRNATVGPCKCAASQWQKMPKSGLWMQVISPYDYRILDFRMPADPSRSVVVSTEEEFLLHRVVFFVVGLVLMVVAHTLSESVVFYYGGAMTIGIFLVILIILFQGMKLLPTGRKSSLAIFAYSSVVGMTTYFLHYLSGMLRSVLVEIGIAEDMHNPLGIFALVCVVLAGAWFGYWGVRKLVLAEDGSVDEGVAYFVEWAILIVSAVMILQSSLDYLFAFAALIFCVIIKAIARIEGKSKVLHYIFGNSSRYGDFFEDYSSMNGGRQDGKLHGGYQRRTESRNSPLAGSAKSLSQGVARDSFYSTFHTTPERRKFSKEEYEAFTREETKKAMKQLLSSPDFNRWALANADRISVAPPGGNYSSSNSNQQRHRFLGLF

SEQ ID NO: 68137 - protein, 487 aa, Zea mays
  Clone ID: UC-ZMFLMO17220D07_FLI.pep
RTAGRRRGGGGTISFIGPACLCRLLFSFFSLLFFFLLCLFNSISILRFLIWGRLAMGFGMGNNNNGASSSSSRLDPAAPLLPRHGSSGGREGGGLSSQPKTFANVFIAVVGAGVLGLPYTFSRTGWAAGSLLLFSVAALTFYCMMLLVACRRRLADEHPKIASFGDLGDAVFGAHGRFAVDVMLVLSQFSFCVGYLIFISNTMAHLYPITAAASSSSALLSPKALVIWAMLPFQLGLNSIKTLTLLAPLSIFADVVDLGAMGVVLGQDVAAWLAKPVPVVAFGGAGALLYGLGVSVYAFEGIGMVLPLEAEAANKSKFGVTLGLSMAFIAVMYGLFGVMGYVAFGDATRDIITTNLGAGWLSAAVQLGLCINLFFTMPVMMNPVYEVAERLLHGKRYCWWLRWLLVVVVGLAAMYVPNFTDFLALVGSSVCVLLGFVLPASFHLKVFGAEMEWPGVLSDVLLVVIGLALAVFGTYTSLLQIFQSSSA

SEQ ID NO: 68138 - protein, 334 aa, Zea mays
  Clone ID: UC-ZMFLB73124E03_FLI.pep
PNLVRLIGYCADGDQRLLVYEYMLLGSLENRLFGPAGKEPLDWNTRMKIAAGAAKGLEYLHDKANPPVIYRDFKSSNILLGEDYYPKLSDFGLAKLGPVGDKTHVSTRVMGTYGYCAPEYAMTGQLTLKSDVYSFGVVFLELITGRKAIDHTQPSGEQNLVAWARPLFRDRRKFCQLADPLLHGGYPKRGLYQALAVAAMCLQEQAASRPLIGDVVTALSYLAAHPYDPNAPSTKDSKTCPSTPRAKTHRRTTSVPDAQHAAESLILNFPDMRKETVRGGEFEKDRTEGSGSSSSSGRNDCLDVPRLLSVPNGKVCGEGNNIQKSTVKVGAREN

SEQ ID NO: 68139 - protein, 499 aa, Zea mays
  Clone ID: UC-ZMFLB73143A04_FLI.pep
RLAMLYYPRSHSSFSPSKRLNPSLFLWDTLRYSLVSTEIASRGRMSSHSAESKSCLESLRGELNSSSGFILSLLFHAAHSARNLNRLEVLLRFEGIQLLAGSICSCISGYKDILNATKRKGSLPSMVDPASEGALFPDVQFWKQCADPVLAQDPFSSLMSALFCLPVQFLSSAEFFIPFVHLFYVVCAIQALVTCYGEETFDRSNFNDCLLNDVCKTMSGYDIARDYFVSKYIDPSCHPKDMVRRLTYPYLRRCALLWELLRSSATSPLYDGSNIWEGSHLYLSNSTQDDSSSLAMELAGLRELEDLFQIQSLDLILQDESVHMLALKWSQHFCEEYNPRKYRGTLFSTPAVPFRLMQLPDVYQVLLERYIKMQCPDCGSVPDEPALCLLCGKLCSPSWKPCCRTGKCQNHALQCGAGIGIFLLVRKTTILLQRSARLTFWPSLYLDAFGEEDNEMHREKPLYLSQERYTSLTYLVASHSLDRTSEVLRQTTIGFYGSD

SEQ ID NO: 68140 - protein, 371 aa, Zea mays
  Clone ID: UC-ZMFLB73032D01_FLI.pep
RTRDNRIILFENICSVGSFCERHFGREVVDYFVDPFVAGTSAGDPESLSIRHAFPALWNLERKYGSVIVGAILSKLAAKGDPVKTRHDSSGKRRNRRVSFSFHGGMQSLINALHNEVGDDNVKLGTEVLSLACTFDGVPALGRWSISVDSKDSGDKDLASNQTFDAVIMTAPLSNVRRMKFTKGGAPVVLDFLPKMDYLPLSLMVTAFKKDDVKKPLEGFGVLIPYKEQQKHGLKTLGTLFSSMMFPDRAPDDQYLYTTFVGGSHNRDLAGAPTSILKQLVTSDLKKLLGVEGQPTFVKHVYWGNAFPLYGHDYSSVLEAIEKMEKNLPGFFYAGNNKDGLAVGSVIASGSKAADLAISYLESHTKHNNSH

SEQ ID NO: 68141 - protein, 420 aa, Zea mays
  Clone ID: UC-ZMFLB73128A06_FLI.pep
KKNHRLQEYVKSEYDHSCLRSCRSRALYKGLKVGSTPDLMVAYIDFFLGGDEKRLDVASTIQKRFPMCLIFGGDGSYMSPYYLHSDTLLSNLLGQYVSTAIWNRLVAGLNAQLRTVRQGSVRSTLGPVVSWINSHGNPQLERHGVRVELGWFQSTASAYYQLGIIVAVNENFYKNLRHHEHATEFCERSRKNVAVPLQDFNQANLDQPCTSYAVSRKRLTGGVNGGIINEGTLKSLHYKRDYLFPFSLLLRNSRPLGYAETLQLLICIVLLGDFSITLLMLVQYYWISVGAFLAILLIPPLALLSPFLAGLNALFSRGLKRSSVTRIFALWNITSVVNIIVAIIYGSLYFWLSSLAVSSVHQVYNTKSFKSREDNEWWILPTILFLIKSLQAGLVNWHVANLEIQDYSLFSPDPDRFWAM

SEQ ID NO: 68142 - protein, 102 aa, Zea mays
  Clone ID: UC-ZMFLB73139A03_FLI.pep
EIPNSSLESIVDVGGDNLAEICQIFCATRRLHEAATIPFFSHATLHKLRIASGLTHGCGRESRVSRVCHVAGVISDHILDAVMMLMEDVYIYRASKMTYIMP

SEQ ID NO: 68143 - protein, 451 aa, Zea mays; identical to SEQ ID NO: 61496
  Clone ID: UC-ZMFLB73169D04_FLI.pep

SEQ ID NO: 68144 - protein, 191 aa, Zea mays
  Clone ID: UC-ZMFLB73114E04_FLI.pep
GRRGEVVRTNSTAVAAMSVQEYLGKHLLSRKSEEALNTAVRAKAPNPALFIVGHMRREAPTVITRVRARQILDGRSAPAVEVELHTNKAVHRASTASVGALEGAAADAAGASERRKFLARGVAYAVRVINDKVSEALVGMDPQQQTQIDQAIMHLTGRATRLSLEQILCLECQLQLAKLVLLKKRFHSTSI

SEQ ID NO: 68145 - protein, 327 aa, Glycine max
  Clone ID: 701052519_FLI.pep
CFLFHHGLDFLVISIPLGTVVNEKRKTMDETKILLELKSVSSLCVHSFINLLCEETISFLSVFSSDPLFHCIVAFCTLVFLYLPHLFLKIILSPVPILTAILLLSILRLGAIQRLQHERRENHVKHEEQPIVYEENKGSKYKGEKQSPCTIEPDETKSVEQVHQWVHSETEVISDMGFESSSRFVEWNVKAPLEVIYEEYGEGEEAGDDANENVGIMRYPSLSRFYPESDSDSESESEFPAIGDWDSPEDLEFRWGEEEEEDDGDDDDEEEEDREGLIEIALDGCKRKRNLEFNFDEENLIEIDISPSRYRELSGDDEVFSGEISYN

SEQ ID NO: 68146 - protein, 437 aa, Glycine max
  Clone ID: 701054946_FLI.pep
ATGCFIIESKGSCRMEDVPLPALFEQARKIHNSATATASAADQVRFSLLILSLFFFFCVLHRFVFGVREVVKKGCEALHRCEDMVNNLGLFSPNETKEDISTTNLKYILVPFYLAELTEKLAQDDRIHILKASQAKLKEFISFCEAMELVPKEELESYIEGASKTVADQRARKIARFKRQRAAESKLLEIKEQKERRGRSTKAAALSTPVEAGEEEVLDDDGEEEREAWITTISLAICKALDLLDMLKKEEEMLSAVKDRQSKDGDKEFSKDVLDERAKKAEAWHHDSAVRARYTKPSSPITCATFAQDVLEGRAKASQAHDHKHQPLIFGPASLVNGNITTERERMAAQVFQPSHRMPTMSIEEAGLKEMEIMNKWQERNVRLMEEANSSWHNDRKSKPGEDDDEDDAAQEKARAWDDWKDDNPRGAGNKRLTPCG

SEQ ID NO: 68147 - protein, 80 aa, Zea mays
  Clone ID: 701174728_FLI.pep
LLPNTMVYNIVSKQCFSKPCYFWSYQNYGIIMCKTLLPNRPSEFFKMALAPPFLMKKGQTGPQEFFQNGSSSSLFNEKGP

SEQ ID NO: 68148 - protein, 343 aa, Zea mays
  Clone ID: 700268040_FLI.pep
PSCWFDPNPTKSMADGGNCGPGGGNASAPVCSFVRKPPKNIRKRPAAPAGSDDDDDGGGGALAAARSKKGPPSSTAGKLVFSTAGASSEAPRFQYESSRTIQSTDTRATATLETETEFDRDARSIRERQLKQAEESLKKNPSAVAASASASTAGEVYKGIHGYTDYKAGFRREHTVSSEKAGGSHGPLRASAHIRLSQRFDYQPDICKDYKETGYCGYGDSCKFMHDRGDYKSGWQLEKEYEEAEKARKRRIAMGGGGESDDEAADDEDEEEALPFACFICREPFVDPVVTKCKHYFCEHCALKHHSKNKKCYVCNKPTLGIFNAAQEIRKKMAQDKKQQQQE

SEQ ID NO: 68149 - protein, 362 aa, Zea mays
  Clone ID: 700454781_FLI.pep
GNSATLDAFLVQHDMENIYMWVFKERPENALGKMQLRSFMNGHSRLGEPQFPFSADKGFVRSHRMQRKHYRGLSNPQCLHGIEIVRAPNLAGVPEADLKRWMELTGRDANFSVPTEASDFESWRNLPSTDFELERPATAAPAKSSSHGHHKKLLNGSGLNLSTQPSNHSSGDGMEITATCNKRRKDSSPTAMEEDCSNSNSDKAQDMDVSHTFEPSWMNDFSGVMRHASGPVTAAKTIYEDSKGYLIIVSLPFADFQKVKVSWKNTLTNGIVKVSCTSVGRMPLLKRHDRTFRLVDPAPEHCPPGEFVREIPLPTRIPEDATLEAYCDETGTGLEIIVPKFRVGPEEHEVHVSMRPPSSWCQ

SEQ ID NO: 68150 - protein, 208 aa, Zea mays
  Clone ID: 700425463_FLI.pep
RSSRRLSSSPTAATHQRAGAFFPMEIGSLPPMAPRPAPPLGQPGRGGPCPCSFFLLTPGSSSSPWKPAAMAPPLLELPSPAHRMPVAQLDPPPHGASSPCRRSSTSPPGRHFPAVLPSVLPTAAGMEIGSSLHGSRAPMDGALFPFSTARELPGPASARSMTMAPSSNISFPQTALAMAGALRSASAQLPLPQPHNVGASRVFDEMLG

SEQ ID NO: 68151 - protein, 313 aa, Zea mays
  Clone ID: 700427851_FLI.pep
PDQSRAACFSTPCASTEQPVLIAMSAPLVDAEYMAEIERARRDLRALVASKNCAPIMLRLAWHDAGTYDAKTNTGGPNGSIRFPQEYSHSSNAGIKIAIDLLEPVKQKHPKITYADLYQLAGVVAVEVTGGPTVDFVPGRKDSSICPEEGRLPDARRGASHLRQVFYRMGLSDRDIVALSGGHTLGRAHRERTGFDGPWTRDPLKFDNSYFLELLKGDSEGLLKLPTDKVLVEDPEFRQHVQLYAKDEDAFFRDYAESHKKLSELGFTPPRSCLSSRSANKHKSLLVQAAAGLAVATAVVAWAYLCESNNKFI

SEQ ID NO: 68152 - protein, 538 aa, Zea mays
  Clone ID: LIB3593-004-A11_FLI.pep
LNKNKARRRRHLSRRPRVTASGVDGGRGSWPFTTMPDPTTKPPSPRPRRRRRLCGLCLGTALLALLVAALVHVVAPLPRAASASARFSVIIDGGSTGTRAHVFVTGHDGSPDLALSTVMRVSPGLSSFAADPARAGESLKPLIDFARDKIDGAGSAAGEAEVRLMATAGLRLLEERTQEAILASCRDVLRASGFRFEDAWAKVIPGSDEGIYAWVAANYALGRLGGDPNRTVGIIELGGASAQLAFVSDEVLPPKLSYNYTFIETTYTLYTNSFLNFGQNAAQDSFHEMLRSRGSSENATLADPCAPRGYSRNEEMMLRMSGASRSTLENQYVDNGTGNFTECISSSLLLLQKGKEKCQYQQCHLGSTFVPELRGYFLATENFYFTSKFFGLKKSSSLSDFMFSGEQFCNQDLSTLRKKHPNRSDEDFSRYCFSMAYIVALLHDSLGVSLDDKRIEYSNQVGDIQVEWALGAFITLIQNASLKPLHTAVESTHSNRPLFAVLGMFLLCGVLFVSRWRKHKTKVIYDLEKGRYIITHIS

SEQ ID NO: 68153 - protein, 292 aa, Zea mays
  Clone ID: LIB3150-095-A8_FLI.pep
SQKVSNIGRQLLNQHVVELLNVKQHTFVVAGHKVDGNTLPTKTTTTTNTMQVVLWLGGKIIVDDQGHLLNINTTSKQVSGDEHTGGARPELPHDDVSSVLVHVTMSGRNGVVPAPHLVSEPVHLAAGVDKDDTLGNGQGLIQVTQCVQLPVFLVHIHIELLDTLKGQLISLHKNSHWFVHELAGNLKGLRWHGSREDSNLNLGWQKLEDVINLILETTRKHFISFVKNKHLDVIRAEGLSTQHVKHTTRCTNNNMHTTGENPLVLTNRCSSNACMDFNTKVVTKCAHNFLNL

SEQ ID NO: 68154 - protein, 395 aa, Zea mays
  Clone ID: 700258580_FLI.pep
NRLLPLLGAASPLPSPIHIHLRVCRLLSTSTSTATVPAPFSLENYLVAACGFAPAQARLVSKKAFNELSRESKRSSEEHSCRRLISASNPDAILALLSGAGLSRADIAAVVFADPLILRASVSKIAPRLVALRDRVGLSTPQIARFLLVGSRALRRCDVVPKVEFFLSFLGSFDRVLAVAKANLGIFNANLEKVIKPNIDLFRQRGVRNVPKICLHRPRTLSFNLERVKEFLLRAEELGVPAASPLFMQAVGVVTSFPPEKVAAKLDFFKRTLGCSESEVSNAVSKMPQILALSEATLLRKIEFLVNEGAIEPQYIMQRPILLAFSLEKRLVPRYRVIKVLQGKGLLNSNMSLSSLASLAEETFKSKFVDCHKDCVPGLADAYAAACASIVPSTV

SEQ ID NO: 68155 - protein, 169 aa, Zea mays
  Clone ID: 701175303_FLI.pep
RRIPSHFGYLSNQGAGSGALVSPGRREDTNGLVVTRETVDTGLDENETELAILVLAVALKVLADGDGLLDEEVKVLRDLRGEAVRLQDTEDLVTSDVADLGDTVAVTEDNTNLTGGGTLLGELADLVSDLVGSGLEPCWRSSGVRNGRGGDTLSLGVKTTHFECCGVPK

SEQ ID NO: 68156 - protein, 525 aa, Zea mays
  Clone ID: 700051726_FLI.pep
RKKIKREGSHRSPIACLPSHPPRRSPAPGTMSSYSGDRSSSSSLRPTNTSFDSYKFDFGINSSRSSGSRPLRDQRPGAATNPPTRPATGATWMHQPASAKPSWTHQPSPAAASAPTMAGPGSGPTSMVGDIFGRSWSSAAPSSGFGIPQANNPGLFSDLLGSALGSSRSQSNAPLRSAAAPQASRPAGEKPNVNASSSPFSMGGMAGALPKTTGAPMGSGGYGVGGRPMKPVGMAATAAAQPMGQQRDPFGSIDPFAAKPGSMNAVKQANSVKPDQGFGAFQGVNSSVAAGFGSFQSTDAGSGGFQSAGTTTPSNFTPPPAPASMPTPVSAAVNSSMDPLDNLFASTTSAPTAAAASNGDSGGDMFGEMDGWVDVEAEFAGGDSGGTTTELDGLPPPPSGLTISAAKAKGMDSYKGGQYADAIKWLSWAVVLIEKSGKDADIVEVLSSRASSYKEVGEYKKAITDCSKVLDQDKDNVSVLVQRALLYESTEKYRLGAEDLRLVLKIDPTNRLARSTIHRLNKLAD

SEQ ID NO: 68157 - protein, 479 aa, Zea mays
  Clone ID: 700096218_FLI.pep
QSRSIAIGGQKSMAAPAAAPLDEGKAKKVLRQVEFYFSDSNLPRDKFLRETVEQSDDGLVSLPLICSFSRMKSHLGLDADVKPETVPEETVLAVAEVLRPSPALRVSEDGKKIGRASELLKPDEIIEQVDSRTIAVSPLPCNVKQEDVQSFFTNYAKVNSVRLPRNIANKKHFCGTALVEFSEEEEAKRIMETALVFAGANLEIRPKKEFDAEQKSKKEAYEKTHLKKDNQYEGYQKGLIVAFKLEKATADTVVQQDNIDKENDSATKLDVSSSMEKPSGQGPEESILESDVIKQGMSSDDMTKEKDLNTGEATESEKCISDVPIESDKHGDSEPLSREGKIISGNVNVKNQISREDLKEAFKKFGAVRYVDFSIGDNSGYLRFEDSKAAEKARMSAVLADGGLIIKDHIVTLEPVTGEAEKDYWDTIRSIQGKYKDSRSYKGRASNNQRGGKRFNAKRDRNPDSEKNSNKARKVEAIA

SEQ ID NO: 68158 - protein, 396 aa, Zea mays
  Clone ID: 700220960_FLI.pep
QHIDAIERLCHERALTAFGLDPACWGVNVQPYSCTSANLAVYTGLLQPKDRIMGLEPPSGGHVSHGYYTPSGKKVSGASIFFESMSYKVNPQTGYIDYDKLEERAMDFHPKILICGGSSYPREWDFARMRLVADKCGAVLLCDMAHISGLVAAKECRSPFDYCDVVTSTTHKNLRGPRGGIIFFRKGKNLRKRAGSFSQGDENEYDFEDRINFGVFPSMQGGPHNNHIAALAITLKQVATPEYKAYIQQVKKNAQALASALLRRKCRLVTGGTDNHLILWDLRTLGLTGKIFEKVCEACHISINKTPIYGDNGSISPGGVRIGTPAMTTRGCLEEDFESIADFLIRSTQIASNVLKEHGKVQKEFLRGLMNNKDVMELRNQVEAFASQFAMPGFDV

SEQ ID NO: 68159 - protein, 488 aa, Zea mays
  Clone ID: 700432159_FLI.pep
PWLTGFHPQPSHFPPSSQMAVAVPNAPGRLFLLQSTPFPNPSSSASAARAQSFRVPPLRLSLFRRMAGRSLTVIAGASGGSERDLSASAVSVEALDSVASDSDLETKEPSVSTMLTSFENSFDKYGALSTPLYQTATFKQPSATDYGTYDYTRSGNPTRDVLQSLMAKLEKADQAFCFTSGMAALAAVTHLLQAGQEIVAGEDIYGGSDRLLSQVVPRNGIVVKRVDTTKISDVVSAIGPSTRLVWLESPTNPRQQITDIKTISEIAHSHGALVLVDNSIMSPVLSRPIELGADIVMHSATKFIAGHSDLMAGILAVKGESLAKEVGFLQNAEGSGLAPFDCWLCLRGIKTMALRVEKQQANAQKIAEFLASHPRVKQVNYAGLPDHPGRALHYSQAKGAGSVLSFLTGSLALSKHVVETTKYFSVTVSFGSVKSLISLPCFMSHASIPASVREERGLTDDLVRISVGIEDVEDLIADLDRALRTGPV

SEQ ID NO: 68160 - protein, 455 aa, Zea mays
  Clone ID: LIB3076-033-D8_FLI.pep
PHIEITPFPPSRPSVLCTVLPFGARVIIGRLLVLVPAGDDEVGKEVEKAEHGEQPEEVVEVAAVEVLRDPPDAAVPGGDVGDDGHQDRAEVVAERDGGERQRGAHAPHGVGRLVVEELQLPHEGEHLRAPDDEVLRYLPEDGDGHDVVLAVQAVPRDGAQPHDVQHARRHHGEDGDDEADAHALQLREPARPPGVGAHQGHDGAVVHGDPDDDADGVHHGQRRRGDLEPGPHALVQRVTLQHEHGAHLRVHRREHDPAGPDGQQPDHALELLHLRHRAQAPRARLRAVLGRHHGSPVEARQLLRVLQLAAPLDAGLPVHRLVQPRLVRGHGHVPLARARDEHLRDARQRAAPGLLVPVQRRAHEEAADGDGHDHGGDAEAPAPAHVRLHVHQHCGRHQRADVDGEVEPVEEGALALLLPLVVLVELVGAEGGHARLDPARAQRDEVQRHEHHRRL

SEQ ID NO: 68161 - protein, 220 aa, Zea mays
  Clone ID: LIB3594-007-D11_FLI.pep
TSIISYTQREQISSNNHVLLRRSQFFLSRLPTSPGSVCLVWLAGAIIHHSSVAEHMRGADGHGGGRVAGQLPGAEQRVVRRRHLLLDVHGDAAELLDDAEHLVDGAEAGAEFGGASAEHGVLLLDARVLRRDVGGAGRHARVLGLQERRLLGQLVQVLLLPQPRPPRRLAVRQPPLLAPARVRRRVAVRPGRPPRRRQRRRRHQDTVFFPPVGLATLPPT

SEQ ID NO: 68162 - protein, 151 aa, Zea mays
  Clone ID: LIB3354-071-G12_FLI.pep
TYCTVSTQRYHVRSVLPVDSLTEFAHAFENAGYGTSSGVHEAYPSSPNHGEALPHPGELRLRPSLLHPGTRRPHAVAGCPGEAGPREPSRRHLQDQGRRPLPLLLKAAVPQQDPAGDRADPSSCGAAQGELPRGDRRRHGDRASQVMTACM

SEQ ID NO: 68163 - protein, 169 aa, Zea mays
  Clone ID: LIB3354-012-B1_FLI.pep
LDRPIRRSVLSISSQQAYSWKPTSQLRRSARRTTATASGTAPRTAAAGPPGSPPCRCRRQGLPGSWPRECLRGSPRRRHRRLRRRRPRRHTGSACWGPTGRRTLPGSSGTWPWRRPRRRRSSLRRRTCPGAISAHQHGAVTTPVSTQQSSRVVGFTTETEQPADRGSSQ

SEQ ID NO: 68164 - protein, 775 aa, Zea mays
  Clone ID: UC-ZMFLMO17290F07_FLI.pep
EDESKPKDVAKQTVNGDVTIADEGSQKSQDSSSKTKPGKSVLIKQEERETGVVSARVLSRYKNALGGIWVVSILFFCYALTEVLRISSSTWLSIWTDEGSLKIHGSGYYNLIYGILSFGQVLVTLSNSYWLIISSLRAAKRLHDAMLRSILRAPMVFFHTNPLGRIINRFSKDMGDIDRNVAVFVNMFMAQISQLLSTFVLIGFVSTMSLWAIMPLLILFYAAYLYYQATSREVKRLDSITRSPVYAQFSEALNGLSTIRAYKAYDRMANINGRSMDNNIRFTLVNMGANRWLAIRLETLGGIMIWFTATFAVMQNQRAENQKAFASTMGLLLTYTLNITNLLTAVLRLASLAENSLNAVERVGTYIELPSEAPPVIEDHRPPPGWPSSGVIKFEDVVLRYRPELPPVLHGISFVINGSEKVGIVGRTGAGKSSMLNALFRIVELERGRILIDDCDTSKFGIWDLRKVLGIIPQAPVLFSGSVRFNLDPFNEHNDADLWEALERAHLKDVIRRNSLGLDAEVSEAGENFSVGQRQLLSLARALLRRAKILVLDEATAAVDVRTDALIQKTIREEFKSCTMLIIAHRLNTVIDCDRLLILSSGQVLEFDSPENLLSNEGSAFSKMVQSTGPSNAEYLKSLVFGSGEERSRREEIKLQDIQRRWVASNRWAEAAQFALARSLTSSHSDLLALEAAEGNNILRRTKDAVITLQSVLEGKHNTEIDESLTQYQVPADRWWSSLYKVIEGLATMSRLGRNRLQQPSYNFENNNSIDWDQM

SEQ ID NO: 68165 - protein, 934 aa, Oryza sativa
  Clone ID: UC-OSFLM202020B05_FLI.pep
SLQQLVAYSRGSGKHPQLMPSTPRWAVANGAGVILSVCDEEVARYETANLTAAAVPALLLPPPTTPLDEHLVAGLPPLEPYARLFHRYYAIATPSATQRLLFGLLEAPPSWAPDALDAAVQLVELLRAAEDYDSGMRLPKNWMHLHFLRAIGTAMSMRAGIAADTSAALLFRILSQPTLLFPPLRHAEGVELHHEPLGGYVSSYKRQLEVPASEATIDATAQGIASMLCAHGPDVEWRICTIWEAAYGLLPLSSSAVDLPEIVVAAPLQPPTLSWSLYLPLLKVFEYLPRGSPSEACLMRIFVATVEAILRRTFPSETSEQSRKPRSQSKNLAVAELRTMIHSLFVESCASMDLASRLLFVVLTVCVSHQALPGGSKRPTGSDNHSSEEVTNDSRLTNGRNRCKKRQGPVATFDSYVLAAVCALSCELQLFPFISKNGNHSNLKDSIKIVIPGKTTGISNELHNSISSAILHTRRILGILEALFSLKPSSVGTSWSYSSNEIVAAAMVAAHVSELFRRSRPCLNALSALKQCKWDAEISTRASSLYHLIDLHGKTVTSIVNKAEPLEAHLTLTPVKKDEPPIEEKNINSSDGGALEKKDASRSHRKNGFARPLLKCAEDVILNGDVASTSGKAIASLQVEASDLANFLTMDRNGGYRGSQTLLRSVLSEKQELCFSVVSLLWQKLIASPEMQMSAESTSAHQGWRKVVDALCDVVSASPTKASAAIVLQAEKDLQPWIARDDEQGQKMWRVNQRIVKLIAELMRNHDSPEALVILASASDLLLRATDGMLVDGEACTLPQLELLEVTARAVHLIVEWGDSGVSVADGLSNLLKCRLSTTIRCLSHPSAHVRALSMSVLRDILNSGQINSSKLIQGEHRNGIQSPTYQCLAASIINWQADVERCIEWEAHSRRATGLTLAFLTAAAKELGCPLTC

SEQ ID NO: 68166 - protein, 910 aa, Oryza sativa
  Clone ID: UC-OSFLM202041D12_FLI.pep
YPSKEKRLVDEVLATFVLHHPEHGHAVVHPILSRIIDGTLSYDRNGFPFMSFISLFSHTSEKEYSEQWALACGEILRVLTHYNRPIFKVDHQHSEAECSSTSDQASSCESMEKRANGSPRNEPDRKPLRPLSPWITDILLAAPLGIRSDYFRWCGGVMGKYAAGGELKPPTTAYSRGSGKHPQLMPSTPRWAVANGAGVILSVCDEEVARYETANLTAAAVPALLLPPPTTPLDEHLVAGLPPLEPYARLFHRYYAIATPSATQRLLFGLLEAPPSWAPDALDAAVQLVELLRAAEDYDSGMRLPKNWMHLHFLRAIGTAMSMRAGIAADTSAALLFRILSQPTLLFPPLRHAEGVELHHEPLGGYVSSYKRQLEVPASEATIDATAQGIASMLCAHGPDVEWRICTIWEAAYGLLPLSSSAVDLPEIVVAAPLQPPTLSWSLYLPLLKVFEYLPRGSPSEACLMRIFVATVEAILRRTFPSETSEQSRKPRSQSKNLAVAELRTMIHSLFVESCASMDLASRLLFVVLTVCVSHQALPGGSKRPTGSDNHSSEEVTNDSRLTNGRNRCKKRQGPVATFDSYVLAAVCALSCELQLFPFISKNGNHSNLKDSIKIVIPGKTTGISNELHNSISSAILHTRRILGILEALFSLKPSSVGTSWSYSSNEIVAAAMVAAHVSELFRRSRPCLNALSALKQCKWDAEISTRASSLYHLIDLHGKTVTSIVNKAEPLEAHLTLTPVKKDEPPIEEKNINSSDGGALEKKDASRSHRKNGFARPLLKCAEDVILNGDVASTSGKAIASLQVEASDLANFLTMDRNGGYRGSQTLLRSVLSEKQELCFSVVSLLWQKLIASPEMQMSAESTSAHQGWRKVVDALCDVVSASPTKASAAIVLQVKILLLLYLHTCYHI

SEQ ID NO: 68167 - protein, 603 aa, Oryza sativa
  Clone ID: UC-OSFLM202113B07_FLI.pep
NKVDCNSAFVRNMDDHNLDYKGSGALEELEMLTVNAKEAQELILTKILERNQATEYLSKFMNGSTNISAFKRHVPVVTYDKVHPYILRIATGEESSILCGEYILELLRSSGTSRGEPRLMPSILKDLDRRTYLYSLIMPIMNKYISGLGEGKAMYLLFVKAETLTDSGIPVRSVLTSYYKSPHFLHRKHDLYNNYTSPDEVILCPDSQQSMYCQLLCGLVERQHVLRIGAVFASAFLRSISFLEQHWRDLVNDIRIGQLNSSITSPACRLAMLNFLALPNPELADQVEAICSCGSWKGILGRLWPNVKYIEAVLTGTMAQYIPMLEFYGGGAIPFVCTMYASSESYFGVNLSPLCSPADVSYTILPNMAYFEFIPLEDGLRLTDHEEVIENDKLVSLVDVKVGCYYELVVTTFSGLYRYRVGDVLQVTGFYNRAPQFKFICRRNVILSIDSDKTNEEDLHNSVTTAKKILENQNYLLLEYTSYTDISTVPGHYVLFWEIKSTHDERPAPLDAQLLESCCAAVEESLDYVYRRCRAHDRSIGPLEIRLVEAGAFDALMDLLVSHGSSINQYKTPRCIESSLALKLLNSKVIACFFSPQDPECGM

SEQ ID NO: 68168 - protein, 347 aa, Zea mays subsp. mexicana
  Clone ID: UC-ZMFLTEOSINTE104B11_FLI.pep
KLAVSDGMDLRVLIAYRYLFGSAFLGPLAYFVERKNRTKLTWRVVFLSFACGLSGGTMAQNLYIAGMKFTSATFASATTNLLPACTFVIALVFRYEKFAIRSLSSQAKVAGTLLGVGGAMLLTFYKGVDITPWHSNLNLVATLTQHHHHHTTTTTTNYAMGSLLCVCSCFFYALWIVVQAKLSNEYPFHYSSTALMCIMTTLQSSIFALCFDRDASQWRLKFDIRLLSCAYSGIFASGVALVIMAWCVQQRGPLFVSVFSPLMLLIVAVLSSLLLGEKLHLGTAMGAVLIVMGLYAVLWGKGREAAAEAARVSVNDHPTTSNSNSSEEDDDKKRHVSVPMPPAPNSV

SEQ ID NO: 68169 - protein, 204 aa, Zea mays
  Clone ID: LIB3354-086-E3_FLI.pep
LQGLVGFGSAFGESQEMGGAAAGTKWIHHIQRLSAAKVSAEAVERGQSRVIDASLTLIRERAKLKAELLRALGGVKASASLLGVPLGHNSSFLQGPAFAPPRIREAIWCGSTNSSTEEGKELNDPRVLTDVGDVPIHEIRDCGVEDDRLMHVISESVKTVMEEEPLRPLVLGGDHSISYPVNNGRWLCQETATGWIEINHQRRA

SEQ ID NO: 68170 - protein, 256 aa, Zea mays
  Clone ID: LIB3354-125-G5_FLI.pep
LGITWKLSVYEKLSVWRLITSLFAFSSTPELIFGAALLYYFRVFERQIGSNKYAVFIIFSTMVSVLLQILSLGYMKDPSLNPLTSGPYGLIFASYVPFFFDIPISMKFRIFGLSFSDKSFVYLAGLQLLFSSGRRSIVPGLSGILAGLLYRLNTFGVRRLKFPELATSLFSQLSLPFSSNPYQGLPITENDGSIPSHQAHQIEDARAATQDPTESSIAALVTMGFDRSAAIQALALTNYDVNLASNILLEAQALQQ

SEQ ID NO: 68171 - protein, 1174 aa, Oryza sativa nipponbare
  Clone ID: JC-OSLELIB3474034A06_FLI.pep
EFSQFLGQALELPSMSASNEKWIDGLQFSSLFWPPPQDSQQKQAQILAYVEYFGQFTADSEQFPEDIAQLIQSCYPSKEKRLVDEVLATFVLHHPEHGHAVVHPILSRIIDGTLSYDRNGFPFMSFISLFSHTSEKEYSEQWALACGEILRVLTHYNRPIFKVDHQHSEAECSSTSDQASSCESMEKRANGSPRNEPDRKPLRPLSPWITDILLAAPLGIRSDYFRWCGGVMGKYAAGGELKPPTTAYSRGSGKHPQLMPSTPRWAVANGAGVILSVCDEEVARYETANLTAAAVPALLLPPPTTPLDEHLVAGLPPLEPYARLFHRYYAIATPSATQRLLFGLLEAPPSWAPDALDAAVQLVELLRAAEDYDSGMRLPKNWMHLHFLRAIGTAMSMRAGIAADTSAALLFRILSQPTLLFPPLRHAEGVELHHEPLGGYVSSYKRQLEVPASEATIDATAQGIASMLCAHGPDVEWRICTIWEAAYGLLPLSSSAVDLPEIVVAAPLQPPTLSWSLYLPLLKVFEYLPRGSPSEACLMRIFVATVEAILRRTFPSETSEQSRKPRSQSKNLAVAELRTMIHSLFVESCASMDLASRLLFVVLTVCVSHQALPGGSKRPTGSDNHSSEEVTNDSRLTNGRNRCKKRQGPVATFDSYVLAAVCALSCELQLFPFISKNGNHSNLKDSIKIVIPGKTTGISNELHNSISSAILHTRRILGILEALFSLKPSSVGTSWSYSSNEIVAAAMVAAHVSELFRRSRPCLNALSALKQCKWDAEISTRASSLYHLIDLHGKTVTSIVNKAEPLEAHLTLTPVKKDEPPIEEKNINSSDGGALEKKDASRSHRKNGFARPLLKCAEDVILNGDVASTSGKAIASLQVEASDLANFLTMDRNGGYRGSQTLLRSVLSEKQELCFSVVSLLWQKLIASPEMQMSAESTSAHQGWRKVVDALCDIVSASPTKASAAIVLQAEKDLQPWIARDDEQGQKMWRVNQRIVKLIAELMRNHDSPEALVILASASDLLLRATDGMLVDGEACTLPQLELLEVTARAVHLIVEWGDSGVSVADGLSNLLKCRLSTTIRCLSHPSAHVRALSMSVLRDILNSGQINSSKLIQGEHRNGIQSPTYQCLAASIINWQADVERCIEWEAHSRRATGLTLAFLTAAAKELGCPLTC

SEQ ID NO: 68172 - protein, 152 aa, Zea mays
  Clone ID: LIB3591-009-F2_FLI.pep
KTPAWSLGLGLILGFLWLDARERHAKLLLGDDDGPLLPAVAEHLLRIDEPAPCDDLVPDALRRSSLSKDDGLFSSGEVGHEDPRRRESRLRLEVRGRSWGGEAAGPEGSTPPPPWTGTSACSSSRHWPRRLRRCRALAGAASSLAGDLVAAR

SEQ ID NO: 68173 - protein, 322 aa, Zea mays
  Clone ID: LIB3592-055-H10_FLI.pep
LVRLPKTPALVRGRSTGTMISTAHSRQQHHAFEKSPGNSHMKSIDRKLQQAMSQAASKYMQRIYPLGMQRSSSSLTLSSLSLSQNSNDSSISSSNASWEPKVPLLYAGTFSPWGDVMVSREMRREDDDKVSDHDVEGGEEDLDCSEPGSLRRCSWITKNSGMLIDHNWTEILKRRDMYREAFADFDPSAVARMEEEDVAEISGDRELRIAECRVRCIVENARCIQRVAREFGSFSGYMWGHVNHRPVVGKYRHHKYIPFRTPKSEAVSKDLVRRGFRLVGPVIVYSFMQAAGMAIDHLVDCFRFHDCVRLAERSWGITNVAA

SEQ ID NO: 68174 - protein, 221 aa, Zea mays; identical to SEQ ID NO: 47536
  Clone ID: LIB3594-005-F3_FLI.pep

SEQ ID NO: 68175 - protein, 247 aa, Zea mays
  Clone ID: LIB3594-012-D12_FLI.pep
HESYLFILINIWYEARTQIQLRRYVYARTYKCVHVSCTRSLNIIVQIQITRPCMQSLFRSRAEGDLVVAVAATGMGLHVVGVVVRVGASRVRAHQPHAGAAGEGHGEVVAIDDRDVVEVLAAADGELGQRQRRLPRQRAGQRAAAVARLAAPAVAVEGAAGAAPHAAGAGAGRHVDGPRPARVQLRAPAHRGGRGPHGEPAVVGDGEGGGVGAHASQGGGQEQQEDRGRGGGGHCWCSALFLVESKQ

SEQ ID NO: 68176 - protein, 343 aa, Zea mays
  Clone ID: LIB3594-016-B6_FLI.pep
RLDVSILHVVQNSQRHGAEQRPAGEEGVEVSRDDIQQPAHGLRREHGPVGRQHDVVHGEELRGHVGLVLEHVQPRAADDALPQAPHQLRLVDQAAAADVDQHAALSQRLQHLAAHHAPRLLRERARQHQHVAGQGQGARRGEEGVGARARRLRRAGVVGDAAPHGGQAPRHQRADAAEPHDPHPLAAHLGGERVLAIGSPPAAPEMRLGGGDPAQHGDDEADGVVGGVDGEGRAGVGDGEPAAAAGTEVHVVQPDGGRGHELQRREPVDELGCHGHEPRHEQDPGLRRRGRVGVPGQDEAVPALQRRREVREQRLRQQHERRRRRHPLGSCVPLGLGRPPVRQ

SEQ ID NO: 68177 - protein, 362 aa, Zea mays
  Clone ID: LIB3594-049-B7_FLI.pep
VRERDREIIDRSIDDHGEATTSCFHACSCSARCDVRVHSYNRALHRRLLRHAGQQPAVQQRRGAALQVQGHQRHAHLLPRRQSPRRPAQLRHRAHPRHRQRRRRPGPARQERLVRGLVGAEQRAPLLPRRRHQVRRGGQRGAGRRHAQPPPGDAQPGRRPGARRLPGHQVLHVGALRRGRQLVPALQRLLRAGLHGGRRALPGRHRRAAARQRVPLLRVPGQPARHQPGLRHVPAGHHRQGQRQRPQLQQPVRRHGGRRRRRAREGRRAQRQGRRVRERLALGRRLRGQRRQRAEIQPGTHRPRRPRHAQEDRPAGDLRLRHVQREPEGRRSHGEELRPLLRQQAARVPDPVQLIKSGGSEE

SEQ ID NO: 68178 - protein, 344 aa, Zea mays; identical to SEQ ID NO: 59183
  Clone ID: LIB3595-022-C8_FLI.pep

SEQ ID NO: 68179 - protein, 181 aa, Zea mays; identical to SEQ ID NO: 38491
  Clone ID: LIB3596-043-B4_FLI.pep

SEQ ID NO: 68180 - protein, 181 aa, Zea mays
  Clone ID: LIB3600-004-H10_FLI.pep
SPVSSCVVSSLHTLSLHMVVLSLSLGYVHLMVVVVAADGGGGGALARVSGAVVPELFPDELLVDEGGALELRQRQPRREQHLGRVPHGYPVEERLGEHLQEGDEGVYDPVGQPLLVVRLGRALHRAHRRVQRVQQGDARPGDGVEVADERPGLAHLSLSLCSRPVDQPMEPTATNSEELLG

SEQ ID NO: 68181 - protein, 555 aa, Zea mays; identical to SEQ ID NO: 37250
  Clone ID: 700089183_FLI.pep

SEQ ID NO: 68182 - protein, 265 aa, Zea mays
  Clone ID: LIB3606-008-G12_FLI.pep
LDMCWILASHRAGYVSIWNYNTQGRVTALKVTKEAGDGYGYICIYAYTMDKVKKFEAYHGKPVSLLAVHSTYPFLLSSSSCDRSIKLWAWDQQWACTRTFDAHTSGVQHVRFNPADVNTFVSVSCGGACVKVWEIHSSTPITTLFGPNNVDYFTDADRQFLLNIWSQKATILDLQTQKTVHRLLVHQREMRDVACHPTLPILATRLDDGTVCLWDATTYRLERIIRLESSIQHTAFKDTADSIWLVVACEDGMEILKINMPTSTK

SEQ ID NO: 68183 - protein, 280 aa, Zea mays
  Clone ID: LIB3606-019-A9_FLI.pep
QMWHLKLIALIYGSLFFMHIPYARGSDLNTDKQALLAFAASLPHGRKVNWTSTTQVCTSWVGITCTPDMKRVREVRLPAIGLFGPIPSGTLSKLDALEVLSLRSNRLTINLPPDVPSIPSLRSLYLQHNNLSGIIPSSLSSSLTFLDLSYNSFNGEIPSKVQDITELTALLLQNNSLSGPIPDLRLPKLRHLDLSNNNLSGPIPPSLQKFPATSFLGNAFLCGFPLEPCPGTPPASPSSPSSQNAKRSFWKKLSLGIIIAIVAGGGVVFILILILLVCIF

SEQ ID NO: 68184 - protein, 177 aa, Zea mays; identical to SEQ ID NO: 61781
  Clone ID: LIB3606-031-D12_FLI.pep

SEQ ID NO: 68185 - protein, 371 aa, Zea mays
  Clone ID: LIB3606-051-B10_FLI.pep
QHSRRILRPSSLQPPSKLPRARVVVSIATMLSSHHEAMLPYAPPPPPPSLLVDRRYRQLQQAGEAAPSCPRCDSPNTKFCYYNNYSLTQPRYFCKGCRRYWTRGGSLRNVPVGGGCRRNRRAKSSLRSAVGGGGGGHRFPGPVVRPDLVLEGMVSNPAQEMPGVPAAADGSTIDLAMLYAKFLDHHPPAEEGLGSAVTPELAVALAGPGRVDEALFDTFSDLSPPAGVLAAPPVQFDPPCGHDDGFDDWSSGAPVRSAGPSSTASTATATTTMPPCADVSVHAAFGEEFNFAKDQSCLLFDSLGLPTDDVGDLSSSSWRSIVPGLSTLEDTEYDLLDSSFPDDALSLHEGMVSGTDHDCWSVVDCQGLEAL

SEQ ID NO: 68186 - protein, 646 aa, Zea mays
  Clone ID: LIB4172-044-D6_FLI.pep
SRHSTREGERRGEKKEDPFPCFFCRFCGSLQVAMRRHGWQLPYHPLQVVAVSVFLALAFAFYVFFAPFVGRKVFQYVVMGLYTPLVLCVFFLYIWCAAANPADPGVFKSKKYLSLYGSSKHKHLKESRKGSSDARLQIEGTREKQEHEVAASSERSITQYKDNNPSCLSPTFSASLLLFYPLSFVFSCCQPHESSSEQQATEEGMFFCSLCEVQVLKYSKHCRVCDKCVDGFDHHCRWLNNCIGRRNYRRFFILMSTAVILLILQSAIGVLVLVLCFVERKEFSMQIVSKLGSSFSVVPFVIVVASCTILAMVASLPVAQLLFFHILLIKKGISTYDYIIALREQEQDDLSGQQSPQMSRVSSYTGLSSTSSFGPLRRGSWCTPPRLFLEDQFDVIPSEAASSHNSATKRKEDQGKRKKGSGAVKISPWALARLNAEEVSRVAAEARKKSKVLVPIRKDDYSRGHETDSSYGGTSSGRIDLGPDSKRRTNRRGRQPSDLFLKPVAKISTDAIDSASSDMSNLAPLQLEARSAFHPSRAASSVNVGGSSPDSSLDSPDLHLYRVSAVSSSGAEDLQLTALTAPGSTSQQGIQLSRSTSDGYEASGGEDSDRIPSQIVHRSSNWASIILNSDQSASSSGILVPKNRLS

SEQ ID NO: 68187 - protein, 942 aa, Zea mays
  Clone ID: LIB4172-048-E2_FLI.pep
KATQGMAEDASHGASSSTVIPADGPESTIEINIKTLDSQVHKLRVDKNAPVSVLKEKVVEATGVPLDQQRLIFRGRVLKDDHLLSEYHLEDGYTLHLVARRAAEGQTSSGASEGNTNANVNVTGNGGLLDDISRSVRDLLGSLGVAMSGGVTNTAFSVPLTSTPEGPNNVPGRTQPMNPAQPGFSVLNHQIQVTQLHPPGAIPRNMIIPDSLTTLSEYMDRIDRVLQNNGVPPSRDSESQQQPTVDDANANPRYPSADVLASVIERAQQLLGGSAASALSRIAQRIRQDGGTADASLRREIQTESVQLGISMQHLGAMFFELGRTMMMLRTGQSPSEAFVNSGPAVYINSTGPNPIMVQPSFQNTPPFGVSNIPVLGGISGAFGIVDPSRHMNIPSNGASATSGSAAGTTTGSEGAIHGNRQDAARTQGGNPPGFLAATRGLPTRTVVAAVPARSSGEAPNHIFSVILPVQVRGQVVVPNQSSQGSQTAVGNGAQGNSTSAIPQASVGGVSGVPLIAAQVANALANAPSQVSLSTQSAADQGFHLTTDNRADVLSSSTPATTPQNGPSGTSGSSLPSQDRNTLNVPSLDSIQQHPQLGDTCADTADLSGDATAISTHDAPSNPSVDSSVLKNKSSDEVGSQTTEPSASGSAEPLGLGGGLIPIPKRRSKAVKPSGSTTDPSRDLSSVSQNQDPISVAQQFLEGFASRNTNGSRSNTLSSGPPSSVPQATEVPPRRQGGGQPDIGSMISGMLNNPVFSNMLSNVATQAGGSSADLKSVMEGLQSPAIVDTISNIVQNVDEQDLGAMFGSGRGQGGMDLSRMLQQMMPVVSQALGGAGGRSAGANGGQHRSRPQRIDGEGNAPASSSQIDLHEARQSIEQHESPENIFRAVLETAAQAHGEDNSIQGMVEELATDQELADDYMKLLMEQVRQRIQSESQSGSQP

SEQ ID NO: 68188 - protein, 312 aa, Zea mays
  Clone ID: LIB4185-002-H7_FLI.pep
EAAAAAAMKFGKSLSGQIVETLPEWRDKFLSYKDLKKRLKLIGAGNGAERQPKRARRDDSGEADAAAAAAAMTPEEAEFMQLLEAELDKFNSFFVEKEEEYIIRQKELQDRVARAAGRESKEELMRVRKEIVDFHGEMVLLENYSALNYTGLVKILKKYDKRTGALIRLPFIQKVLQQPFFTTDLLYKLVKQCEAMLEQLLPVSEASVSSEDGKGDSNDEEKLAKPSSSLVNGGGMPELDEIEYMESMYMKSTVAALRSLKEIRGKSSTVSMFSLPPLQGNNAQDSYQIRAEQLDEEPERWSKVTVIEQAAK

SEQ ID NO: 68189 - protein, 597 aa, Zea mays
  Clone ID: LIB4570-007-A11_FLI.pep
RLEGVRSSSCGPSNKVLLGEGAMTYFPEEVVEHIFSFLPSHSDRNTVSLVCKVWYEVERLSRRAVFVGNCYAVRPERVVLRFPNIKALTVKGKPHFADFNLVPPDWGGYAGPWIDAAARSCVGLEELRMKRMVVFDENLELLARSFLRFKVLVLISCEGFSTDGLAAIASHCKLLRELDLQENDVEDRGPRWLSFPDSCTSLVSLNFACIKGEVNSGALERLVARSPNLRSLRLNRSVSVDTLSKILLRAPNLEDLGTGNLTDEFQAESYSRLTSALEKCKKLRSLSGFWDASPICVPYIYPLCHQLTGLNLSYTPTLDYSDLAKMVSRCVKLQRLWVLDCISDKGLQVVASSCKDLQELRVFPSEFYVPGASAVTEEGLVAISSGCPKLTSLLYFCHQMTNEALITVANNCPNFIRFRLCILEPKKPDAMTGQPLDEGFGAIVRECKGLRRLSISGLLTDKVFMYIGKHAKYLEMLSIAFAGDSDKGMMDVMNGCKNLRKLEIRDSPFGDVALLGNVAKYETMRSLWMSSCNVTLKGCQVLASKMPMLNVEIMNELDGSSEMENHGDLSKVDKLYVYRTTAGARDDAPNFVKILQS

SEQ ID NO: 68190 - protein, 366 aa, Zea mays
  Clone ID: LIB4571-012-B11_FLI.pep
RCVQTSDQCRRRAVRRGQGSKPVRKAAMERYEVIKDIGSGNFGVAKLVRDVRTKELFAVKFIERGMKIDENVQREIINHRSLRHPNIVKFKEVVLTPTHLAIVMEYAAGGELFERICNAGRFSEDEARFFFQQLISGVSYCHSMQICHRDLKLENTLLDDSIAPRLKICDFGYSKSSVLHSQPKSTVGTPAYIAPEVLARKEYDGKVADVWSCGVTLYVMLVGAYPFEDPDEPKNFRKTLTRIISVQYAVPDFVRVSMECRHLLSRIFVAKPEQRITIPEIKNHPWFLKNLPIEMTDEYQMNLQLVDMNVPSQSLEEIMSIILEARKPGDGLKHAGQLPGLGSMELDDIDVDDIDVEDSGDFVCAL

SEQ ID NO: 68191 - protein, 365 aa, Zea mays
  Clone ID: LIB4606-005-A1_FLI.pep
REHFFFFFLLNRSIHLLSQQRRRTLAPPTLNKRIQPREGEGGKKNEIGPLKITATNRRPYLFRLFCDAEPIEVLAASSESDQTRGSGGEMPCDDDLLSVSHRCPGLQGDALLARDGEHGCVVQEVLELDDGLQHPPEVVGAHEPGGAEPAHGVDVDGEAALAELEARHLAAREAADEPPVDVPERGDGGPQAVDGRLHGLGLEHEERRLGLVGAQAQRQRVPRLVRQDGEARGHVGGGGRERQALALAQVRRRDAQQPQQLQGRRPPHRERLHDELAPEPDALHVAARLEVRRLLRAAARLLLLLLVLVLLPLLLLCHGVLVLSAGVSCAAGVVVVVPGEKAVMTSPPFLVAAAGTISQRCLSEL

SEQ ID NO: 68192 - protein, 175 aa, Zea mays
  Clone ID: LIB4668-008-F6_FLI.pep
RGRRQDSLQAPHLAQGGSPEITATMVKAVAVLAGTDVKGTIFFSQEGDGPTTVTGSISGLKPGLHGFHVHALGDTTNGCMSTGPHFNPVGKEHGAPEDEDRHAGDLGNVTAGEDGVVNVNITDSQIPLAGPHSIIGRAVVVHADPDDLGKGGHELSKSTGNAGGRVACGIIGLQG

SEQ ID NO: 68193 - protein, 267 aa, Zea mays
  Clone ID: LIB4719-008-E5_FLI.pep
FLPTPSSHQATTHLLSTSSRLHYPPTPNLRPPHPPTIDPPRDLRHPPPPPRRIDDDAGRRVPVPTAAAARPRRRRAARPDHGGGGGAGGGGPAVPGRRRRGGHLRRGGPARPHGPAPAPRRPRPRHPRPLLRPRRRRARRRPLPRRLPGLRAPRRRLARRGRARARPHRRPPLLQVGAIRRRRRRRRVDSGWLWLLRCAVRCGAAGRSTRRRLAKLCARHPAAAAVVSSGFGNANLLRYLPSLLECFGSLAKIFYLILLINTNNAEQ

SEQ ID NO: 68194 - protein, 175 aa, Zea mays
  Clone ID: LIB4729-056-B3_FLI.pep
LLRHFVCKAPPRSIDHCTGRRHRARSQGLANETAAMADRDRSGIYGGAHATYGQQQQQGGGGRPMGEQVKGMLHDKGPTASQALTVVTLFPLGGLLLVLSGLALTASVVGLAVATPVFLIFSPVLVPAALLIGTAVMGFLTSGALGTLVTGCVVHASAVCSSSVMENIGQMYSLA

SEQ ID NO: 68195 - protein, 234 aa, Zea mays
  Clone ID: LIB4729-021-C5_FLI.pep
GTADTIQLLSYIKDINRAQKTNAAATTTAATHLTVLLLYYCKKEMSARRIARLGASELGDGFGALGDGVLGELAGKDEADGGLDLAGRNGRLLVVPRQLGRLRRQLLEDVVDEGVHDGHGLGRDANVRVHLLQHLEDVDLVRLHRLLCLLLPLLLATLLACGLARGEPLLGLGLLPRRGLLRRRLLLRRLLGGGLLLGLGRHWNRAAVSGLGFLSTRSGRRWLLVWGRDCLLLG

SEQ ID NO: 68196 - protein, 186 aa, Zea mays
  Clone ID: LIB4729-041-A2_FLI.pep
IRSSRPPPSPPPLPSTRSSTERRSPSTRPPVPRVLNRNRRPREQCEAPTAMARTKHQAVRKTQERAAGTGGRAASGGDSVKKTKPRHRWRPGTVALREIRKYQKSTEPLIPFAPFVRVVRELTNFVTNGKVERYTAEALLALQEAAEFHLIELFEMANLCAIHAKRVTIMQKDIQLARRIGGRRWA

SEQ ID NO: 68197 - protein, 586 aa, Zea mays
  Clone ID: LIB4729-018-C5_FLI.pep
LRRSVSLASPCPAVLLPDFASSWLRRHLSFRRIVSLATLPQTAEIMAGHRNSHGKRQSDFTENGGGKRRNPGDDTYAPGPDDTVYRYLCASRKIGSIIGRGGEIAKQLRTETQAKIRIGESVPGCDERVITIFSTSRKTNTIDGAEDEVCPAQDALFRVHERPASDEGLGNEDSEEISPQVTVRLLVPSDQIGCIIGKGGQIIQGIRSETGAQIRVLSNDHIPACAISGDELLQISGDTVVVRKALHQVSSRLHNNPSKSQHLLASSLTQPYPGSTHLGGSSTAPVVGITPVIPPYGGYKGDVAGDWPSLYQPRRDESSAKEFSLRLLCAAANVGGVIGKGGGIIKQIRQESGALIKVASSNSDPDDDCIITVSAKEFFEDPVSPTIDAAVRLQPRCSEKSDLESAEQSYTTRLLVSTSRIGCLIGKGGSIITEIRRTSRANVRILSKENVPKVAAEDDEMVQITGGLDVARNALVQIATRLKANFFEREGSLSAFPPVIPYHPLPAGVSDEPKYLGRDTKPVGHYLYSSGFRTSDDTIPSDSYASYGGSQAPGRGYGAYSGYSARSSNSGLSGHSSLHYGKRHGY

SEQ ID NO: 68198 - protein, 209 aa, Zea mays
  Clone ID: LIB4730-021-E10_FLI.pep
RPPPAASSLLPDQTLPVPAAAAAAAMPPKLDPSQVVEVFVRVTEARSARRRRWPPRSARSVSPRRRLVRTSPRRPPRTGRASASPSSSPCGTGRPRSPSSPPPRRSSSRRSRNPRGTGRRSRTSSTASGAPSMGRTPRTCSRRSMMVRSRSPQLKGYTTRNHRTLLKCGVLFQVQFLHLNRLLLSALVPSSLVRDLISTLCLIKLHLPI

SEQ ID NO: 68199 - protein, 590 aa, Zea mays
  Clone ID: LIB4730-022-B2_FLI.pep
RTASPSHSTPVHHRSHSPAAVAMASAAHSLLHTPEAHRAATRSPFSPPAPTPFLHLRPHRLPLRLRSTSPTASDLTAFPPNPNGIFASDRPIDVDAATEAELRENGFRSTRRTKLVCTVGPATSRPDQLEALAVGGMNVARLNMCHGDREWHRAAIRAVRSLNEEKGFAVAVMMDTEGSEIHMGDLGGASSVKAEDGEVWTFSVRSFELPLPERTINVNYDGFAEDVRVGDELLVDGGMARFEVIEKIGPDVKCRCTDPGLLLPRANLTFWRDGSIVRERNAMLPTISSKDWLDIDFGIAEGVDFIAVSFVKSAEVIRHLKSYIAARSRGSDMAVIAKIESIDSLKNLEEIIRASDGAMVARGDMGAQVPLEQVPSIQQKIVQLCRQLNKPVIVASQLLESMIEYPTPTRAEVADVSEAVRQRADALMLSGESAMGRYPDKALSVLRSVSLRIEKWWREEKRHEALELRSVSSSFSDKISEEICNSAAKMANGLGVDAVFVFTKTGHMASLLSRCRPDCPVFAFTTSTSVRRRLNLQWGLIPFRLAFSDDMESNLNRTFSLLKARGMIQSGDLVIALSDMLQSIQVMNVP

SEQ ID NO: 68200 - protein, 173 aa, Zea mays
  Clone ID: LIB4738-037-H6_FLI.pep
ARGASDGCSRSVHPGGFVRSKAASELEDAGQAVGRRGGRASPGDGPREAPQGHHRPPARHQQRRGRRQLQAGAVDAVDPDDAGDAVVVVVVDDAARRRQRVAQRLPPGEQPGHQGHGRQPLRPAAAQLPHRLRLALQRRDQEQPPLDRARWMDSEEAMFAGPCGYLKRTHALL

SEQ ID NO: 68201 - protein, 167 aa, Zea mays
  Clone ID: LIB4738-059-H7_FLI.pep
ARGASNGCSRSVHPGGFVRSKAASELEDAGQAVGRRGGRASPGDGPGEAPQGHHRPPARHQQRRGRRQLQAGAVDAVDPDDAGDAVVVDDAARRRQRVAQRLPPGEQPGHQGHGRQPLRPAAAQLPHRLRLALQRRDQEQPPLDRARWTVKRPGVSVRPCLLVLVVI

SEQ ID NO: 68202 - protein, 145 aa, Zea mays; identical to SEQ ID NO: 53346
  Clone ID: LIB4740-016-C11_FLI.pep

SEQ ID NO: 68203 - protein, 153 aa, Zea mays
  Clone ID: LIB4740-019-F1_FLI.pep
ASSNGLGDEVPGRGPRPAARRQRLPGQRGGCVRRLPETNSSSIATAAVAHQHAVPSAAVQLRRQVPQERAETGRVRQRAGPRQGVHRQGAHRLVLPTAGRARRPGGRRLPLHRAQGQRARHQSRRPRQAHPAPQLLRQERPSGLPARLIYTSG

SEQ ID NO: 68204 - protein, 589 aa, Zea mays
  Clone ID: LIB4741-015-D2_FLI.pep
LLFFVPDFYPQTHRRGTTGQFSFRRNLSLLPAYVGTGPPWSGHSSRLGPFLPLLVLFSIAEAPPELTPEENRCPRVFSQNYFPEDLQIESNPMPHVKPAAGLPPYHHRALPGPGQGPVPTGHGMMHREVRDQYGPPGPRMHLPPLGHGPAPFPYDMLPPLPPPEVLEQKLVAQHGEMQKLVIENGRLAASHASLRKELAAAQQELQRLQAQGEAAKAAEEEEMRGLLDKVGKMEADLKARESVKVELQQAHAEAQSLVAMRQNMVADVQKLSKDLQRNLGEAHQLPALLAERDVARQENQHLRSTYDYERKLRVDHSESLQTMKRNYDSMVTELEKLRAELRDTSNLDKSGFFYNSTTQKADGISSHLSVGQIAYDTGYGSTQARATPTGLADLSGVPGGAGLRSGFDPSRGNAYDGSHVANLSSSKTGTHDASRGATGFDSLKGSGYDASKAHVTGQASATAAHGGIAGYYGSNQAAHAWGQSASPYGSVQVPPSYASGSNTSYGAAAAAAVRPYGSAQAQPSYGQTQAPSAYGHTQLPSSYSLAQAQSPFTAAQGSSPYGLAAQPPAYGSGRAGSNAGSYEAPQGRK

SEQ ID NO: 68205 - protein, 366 aa, Zea mays
  Clone ID: LIB4742-009-B11_FLI.pep
PARSPVSSSSIISNSESSSNTSFSWIIQRGTPVCCSSSSLVARGGGGGATMYRSAGVAMAWNVFRFCTALRGLGSIMILLVLAIVGVTYYAVVLCNYGPALFTGGGTTLAALAVLLSFHFLLAMLLWSYFSVVFTDPGSVPPNWNLDFDVEMGETAPLASSELCSQMNSQQSVALGNMTNPRVRYCRKCNQLKPPRCHHCSVCGRCVLKMDHHCVWVVNCVGALNYKYFLLFLFYTFLETTLVTLSLLPHFIAFFSDAEIPGSPAALATTFLTFVLNLAFSLSVLGFMIMHISLVSANTTTIEAYEKKTTPHWIYDLGRKRNFAQVFGNERKYWFIPAYSEEDLGRTPALQGLDYPVRPDFDGQEL

SEQ ID NO: 68206 - protein, 509 aa, Zea mays
  Clone ID: LIB4743-005-A11_FLI.pep
GLATSPESHRSRELPAAMSDHRAKRPSDGAATVASPAAKRARDPPAPALPTNKEAPDMAPKTRIFCDILASRADDEELNAELDKADIRVSIADVEQVLRFSYAHPRAAAAFFRWAGYRYLGHEHSPYSWNLLVDILGKNRLFEPMWDTVKSMQSQQLLSLATFASIFSSLAATPGGSPLKAFMDMPRYGMTRDTPALNSLLSALCRANRLDDARAAIPVARAEAGTRPDADSYAILLEGSEAAADLRVAREVFDEMVQAIGFYPDNVPAYDSFLTTLVSSDSSTALPEAMEYLNVLSRHGCSPGEKFFRAALAAHLDARQLRGAMNLWDDFVGRRGLVPDMEMYNTMIKLQGGLGHAELIVGYLDDMISNGVFPDTNTYNVVLQLLLKGKKHREAAAIFSEMVKNECWPNEGNCSLALRMFLDTHYWETGIKVWCCMVENGLPPLQECGNMLVAKLKDDRLPEACKYAEDMIDRGIKLSSATLSKLKQRLQRIKKGEIHDHLLAKWKAH

SEQ ID NO: 68207 - protein, 445 aa, Zea mays
  Clone ID: LIB4743-014-C11_FLI.pep
ADTSMEAHASRGRRTLEEIRQKRAAERMQHAVPIAASHVDSHGNQRAGAEHLARVQELENGNTELERENKMLLSKIAEKEVEKDALVNRLNDLERNVVPSLKKSLNDIYLEKDAAVVAKEDALAQLRSMKKRLKEAEEEQYRAEEDSASLRAQLNTLQQQMGHTYSGYTMGTSSEESVAMEKEIQDLQAQLKQESLLRQQEQQQLAEQSQLRQQEQEKLAKEQTRIASLEAEKQQLEDQITMLTKKATEDASEFAARKAFSMQDREKLEQQLHDMALMIERLEGSRQKLLMEIDSQSSEIEKLFEENSALSASYQEAIDVTVQWENQVRDCLKQNEELRSHLEKLRLEQVSLLKVSNIATQSDGQTENSISNPPQMVIENISLKDQLIKEQSRSEGLSAEIMKLSAELRKAVHAQNNLARLYRPVLRDIESNLMKMKQETYATIQ

SEQ ID NO: 68208 - protein, 353 aa, Zea mays
  Clone ID: LIB4746-005-C3_FLI.pep
ITMITRDVRSNMDNCDLIYMCNMCTKISLACHQVPCAMLLPSAACLAVGRERQSSSGKPAAAPRYESEQNKQYSAKDGASGVSIAERYFLTRERCTIMAIRSSHEWEPEFLPLVAPLVGKPVLPLGLLPPSPDGGRGASANANGEHATVRWLDAQPPSSVLYVALGSEVPLRAEQVHELALGLELAGTGFLWALRNPSGVPDADVLPAGFQERTRGRGLVTTGWVPQPSVLAHAAVGGFLTHCGRNSLIEGLLYGRPLVMLPIFGDQGPNARLMEGKKVGLQVPRDEHDGSFDRHGVAGAARAVMLEEETRGVFVANALKVQAIVADKELQDRYVDEFIQQLLIRGRPCPASS

SEQ ID NO: 68209 - protein, 196 aa, Glycine max
  Clone ID: 700728048_FLI.pep
FIVWDNSDLVTHEIMGGLKNVYAIGAGMVAALTNESATSKSVYFAHCTSEMIFITHLLAEEPEKLAGPLLADTYVTLLKGRNAWYGQMLAKGELSPDMGDSISGKGMIQGVSAVEAFFELLSHSSLNVLHPEENKPVAPVELCPILKTLYKILISREQSSEAILQALRDENLNDPRERIEIAQSHAFYMPSLLGQP

SEQ ID NO: 68210 - protein, 258 aa, Glycine max
  Clone ID: 700796646_FLI.pep
FVVKAKNIQTQQMACSVPFNNKNLDISFFVFKPTIVIIDDLVHGLKHFSLTTESLGCVQSSIFRSIHGNMIIWYGAWQRRSSKEKEELTSTLKSMLSNISSMAVLIEHSFLEAYGGESRDGSSTAKFSTGDIISLNSAVTTTNDLNDLCYAVLAILRSRFAKMEGITAGLCFKGQSKPRVVCIHVWKSLHFCYSWILNSDHRNWMMPYLERFSINMKYDIFRVVYVRGDNVVDLNCISTHQMLENGKESSRQGQVMQN

SEQ ID NO: 68211 - protein, 99 aa, Glycine max
  Clone ID: 700564276_FLI.pep
REAGSSSSSVDLSHSRQPSDNLQGQFSATNYDSGIDIENGLLASELFSSSARYGRRVSGSFRRHSYSGPLNTGRSKRLWQIIRKLSGGSISEHGTMFKL

SEQ ID NO: 68212 - protein, 269 aa, Glycine max
  Clone ID: 700904034_FLI.pep
IGADRTASIETVMNHLQETALNHVKSAGLLGDGFGSTPEMCKKNLIWVVTRMQVVVERYPTWGDIVQVDTWVSGSGKNGMRRDWLLRDCKTGEILTRASSVWVMMNKLTRRLSKIPEEVRQEIGSYFVDSDPILEEDNRKLTKLDDNTADYIRTGLSPRWSDLDINQHVNNVKYIGWILESAPQPILESHELSSMTLEYRRECGRDSVLDSLTAVSGADMGNLAHSGHVECKHLLRLENGAEIVRGRTEWRPKPVNNFGVVNQVPAEST

SEQ ID NO: 68213 - protein, 45 aa, Zea mays
  Clone ID: 700342185_FLI.pep
PSPLGSRGHLGFTATVAATWPFPISCNPAWACVCFVLTCFSIVWC

SEQ ID NO: 68214 - protein, 380 aa, Zea mays
  Clone ID: 700467522_FLI.pep
RLRAAPQEGRAPGARCGQAADMATEASTSAAGGIWVEGMSADNIKGLVLALSSSFFIGASFIVKKKGLKKAGASGVRAGVGGYSYLYEPLWWAGMITMIVGEVANFAAYAFAPAILVTPLGALSIIISAALADIMLKEKLHIFGILGCVLCVVGSTTIVLHAPQERTIESVAEVWDLATEPAFLSYAAIVLAATFVLIYYFIPRYGQTHIMVYIGVCSLVGSLSVMSVKALGIALKLTFSGMNQLIYPQTWLFTIVVVACIVTQMNYLNKALDTFNTAVVSPIYYTMFTSLTILASVIMFKDWDRQNPTQIVTEMCGFVTILSGTFLLHKTKDMVDGLPPTLPVRIPKHEDDGAEGIPLRSAEGIPLRSPRATESFRSTL

SEQ ID NO: 68215 - protein, 356 aa, Zea mays
  Clone ID: 700571578_FLI.pep
GFERPSPIQEESIPIALTGSDILARAKNGTGKTAAFCIPALEKIDQEKNAIQVVILVPTRELALQTSQVCKELGKHLKIQVMVTTGGTSLKDDIVRLYQPVHLIVGTPGRILDLTKKGVCILKDCSMLIMDEADKLLSPEFQPSIEQLIRYLPASRQILMFSATFPVTVKEFKDKYLPKPYVINLMDELTLKGITQFYAFVEERQKVHCLNTLFSKLQINQSIIFCNSVNRVELLAKKITELGYSCFYIHAKMLQDHRNRVFHDFRNGACRNLVCTDLFTRGIDIQAVNVVINFDFPKNSETYLHRVGRSGRFGHLGLAVNLITYEDRFNLYRIEQELGTEIKPIPPQIDQAIYCQ

SEQ ID NO: 68216 - protein, 102 aa, Glycine max
  Clone ID: 700868646_FLI.pep
YYDCYNMKLNFVIILPLCLTILLLMFFSALLIYNKIYNSVLCQSIKQVAALKSQLQLMSHAMYSSIPFQGISLVTMILSEPDTEALWRKEIKVIFNFLTLLF

SEQ ID NO: 68217 - protein, 334 aa, Zea mays; identical to SEQ ID NO: 61906
  Clone ID: 700051176_FLI.pep

SEQ ID NO: 68218 - protein, 249 aa, Zea mays
  Clone ID: 700204395_FLI.pep
NLPSGPRPVVRPFAPLKLSDRVATRVGRMPVDVEAAMAPPQAASACSSSSIGRDSDECSPPGKEEEGEGEVQSAYEGGGGGSLAGLEALEEALPIRRSISKFYNGKSKSFVCLKEAITFSGSAKDITKSENAYSRKRKNLFAYIIMYGNSHEPRAAQVYETAAPKRHASLSRNSLVTLASSSSRSSSSISIEEHELPEHLDSPRSPDGFISAPRSGSCVPDASVPRSLSMMDLHRLNRSSSSVRLKDGK

SEQ ID NO: 68219 - protein, 423 aa, Glycine max; identical to SEQ ID NO: 43754
  Clone ID: 700757167_FLI.pep

SEQ ID NO: 68220 - protein, 152 aa, Zea mays
  Clone ID: 701160722_FLI.pep
PPAVGHLQRRVAAGSTSGILHGIRGGSSRTRRRGRTRLIRRRAVPAASSRRRRRPCSSPPSSRCFHLTRRAAASICTCHTPSPLAPGRPARCSSPLWHRRPRCSRNLHLSPWTAPEPCCTVSLLLGTSRASAAMRLVLGQLSFLQNDHLCSL

SEQ ID NO: 68221 - protein, 53 aa, Zea mays
  Clone ID: 700342601_FLI.pep
ELSCVSLTVLCSSLVGCARGGKLSAAAGGWSMNSCKRHCQKCWGYKKSGAFNF

SEQ ID NO: 68222 - protein, 357 aa, Zea mays
  Clone ID: UC-ZMFLB73091B09_FLI.pep
NKGMKHDGLAGHLLASAQLCLPQKNGFVPSVIALSSSPLVCERIGDNVTICKNNAWKIKVNSQLGTIDSWKVNDVELMSKGILPCFWRAPTDNDKGGFFTKPYDSRWREAFLDNVSFHSSQFSVKELPDNTVEFSTLYYGVPGHLPKPDDEASESILFRVKMVCRIHGSGDVVLDYEVNPRSDLPPLPRVGVVFSAGRSLSHVTWYGRGPFECYPDRKAAAHVGVYESSVEELHVPYIAPVECGGRADVRWVALRDAGGLGLYASAHGGSPPMQMSASYYGAAELDRATHVHRLVKGDDIEVHLDHRHMGLGGDDSWSPCVHEQYLLPPTRYAFSLRLCPLLPSSSCHDIYRSQLPS

SEQ ID NO: 68223 - protein, 445 aa, Glycine max
  Clone ID: 700678863_FLI.pep
LIETWNPNNKPFQCAGVALSRCTLNRNALRRPSYTNGPQEIYIQQGKGIFGMIYPGCPSTFEEPQQPQQRGQSSRPQDRHQKIYNFREGDLIAVPTGVAWWMYNNEDTPVVAVSIIDTNSLENQLDQMPRRFYLAGNQEQEFLKYQQEQGGHQSQKGKHQQEEENEGGSILSGFTLEFLEHAFSVDKQIAKNLQGENEGEDKGAIVTVKGGLSVIKPPTDEQQQRPQEEEEEEEDEKPQCKGKDKHCQRPRGSQSKSRRNGIDETICTMRLRHNIGQTSSPDIYNPQAGSVTTATSLDFPALSWLRLSAEFGSLRKNAMFVPHYNLNANSIIYALNGRALIQVVNCNGERVFDGELQEGRVLIVPQNFVVAARSQSDNFEYVSFKTNDTPMIGTLAGANSLLNALPEEVIQHTFNLKSQQARQIKNNNPFKFLVPPQESQKRAVA

SEQ ID NO: 68224 - protein, 106 aa, Zea mays
  Clone ID: 700622136_FLI.pep
RMSLQQQECAAQPGLLLHQAGRQQPVLKRLDAIYRPGHGLTPQEVLEQLQALPRPVQGNLVPCASDRHQCQPLVHLAPPTDLIKVHRVRFQHEGSEEKNVKMDGWM

SEQ ID NO: 68225 - protein, 342 aa, Zea mays
  Clone ID: 700381174_FLI.pep
EIAPCNEPRKSTHRRIEKDPSIEEFEVKLKVANERLTNIDENINKLSGTEREEMGNFCGSDWTKEQDMALRKAYFSARPSPHFWKRVSKMVPGRSAEDCFNRIYNDLSTPTPIAPRPRTSKTTFSPIGNLTLSDPKLPNILEPTVGRQKTAKQKSLVAQKTVRHLLQKHCRIDQAQEADHFSIFESSPSALQLNLSFEDSPGTPDSYMNSDSLGKHSGSSSARKKPFSRLRTKPSEPSPAVLKPIKNAILHEKYIDQLARREGTKRPRRRTPAGSKTADSGKSLSEQQAGSLKAAKNALISEATDFISSFKALQANSLAHVVENSEDEIECDASDCSYDDKE

SEQ ID NO: 68226 - protein, 438 aa, Zea mays
  Clone ID: LIB3632-034-F9_FLI.pep
LCIGRIRQTATFFRISSNNSRAAAAALRRLLLGSVPPPGSRPPPQSLSSFRDAEGAAQMGCLLLDHLSRLPGTSPVPARSLARLQKPLGLTVPVLRFLRRHPTLFSEQPHPRFPTLLSFSLTAASHTLLSRLADAYAHDAHLRLARLLLLTRSRSLPLASVLPLRFDLGLPFNFAAAFPASHPGVFAVANNRISLRSTSGLPEDIAVSSLQRRHAAAIDSATYRALSRPPSSSSAPLAFPMRFPRGYGGMKKVKAWMDEFHRLPYISPYDDASGIDPESDIYEKRNIGLLHELLGLTVHKMVRRNAIRLLREELGLPHKFTRLFTRYPGVFYLSLKCKTTTVVLREGYERGKLVEQHPLAAVRDKVHYVMRTGVLYRGKGLSKLVLDEDVTEEEGALNGEEFEGEGMDGDADVECFRMEIVDDDGSADDVDDEGYSDG

SEQ ID NO: 68227 - protein, 272 aa, Zea mays
  Clone ID: LIB4172-024-D2_FLI.pep
EGRESSRARRAPCEERSEMSGEAAAVGGGEGEANGIPPNVTIYINNLNEKIKLEELKKSLTAVFSQFGKILDVLAFKTLKHKGQAWVVFEDVASATEALKRMQGFPFYDKTMRIQYAKTKSDIIAKADGTFVPRERRKRTDEKSEKKQKREHHHDAGASQIGMGVTAYPGVYGAPQLTQIPIAGGQRVMMPEIIVPNNILFVQNLPHETTPMMLQMLFCQYPGFKEVRMIEAKPGIAFVEYGDETQATAAMNNLQSFKITKENQMVITYAKK

SEQ ID NO: 68228 - protein, 221 aa, Zea mays
  Clone ID: LIB4185-031-A7_FLI.pep
STGIIKEQSGAAALPRREIIRAQENRSAMEATATPRTQEVMKPEPGTAKVTVDEVTLRKFELSDVDAMMAWASDPQVAAVCRWEPYESTEPLLAFIRDVVLPHPWFRAICLRGEPRPVGAVSVSPTGDPCRAELGYVLARAHWGRGVATAAVKRTVATVFAEVPGLERVEALVDVANPASQRVLEKAGFTREAVLRKYGAIKGVVRDMVMSSFIDTDPVPE

SEQ ID NO: 68229 - protein, 544 aa, Zea mays
  Clone ID: UC-ZMFLB73220A11_FLI.pep
KSKGLMDINESLRVLAKLREASWTPPESVHHARLSYDAPRFSYDGKEATSKLREVPRLSLDIKEGHLWNREIDSRLDPSLSSADRNSNTVTGSNAAFETQQEQPACKRLPSVVAKLMGLEELPEHNQSTASSHACNTVQENKQDAMLNSLSISYQYEHAPQQERNPDSTVRNLPNSKFPVQTAPWKQQERIVLPRKLPKGSKGAHGREPAAPWNQLKDLDFQQPNKDLRALKQILDSAKGLLENKKREEAFMPKLYNGNHDDQEMASANMRLNRNTNNMWMPEESNAESSFKSPIVIMKPSKSANLYSKVDSSVFPLGGSSDLPQPQTSNSTDRRKASTINRTAKGQYAKLSPRVPTSQPLVSCDRRSYGRNDDSSNNQKSSSLLVTESSTRRQQLPRNSSVSMQKNKNSTSPKLLQRKLDPERRARPPIPSAESNKSERQSGDRNNSETVSPRSKFRRKLVRPQGDDGMPIGLNNRTRSLYQHDNDMSIRSDGSISVASELDIISNDRSTGVNISNFEQGIGTPSGRNPQKVVKNFLAIMPSF

SEQ ID NO: 68230 - protein, 476 aa, Zea mays
  Clone ID: UC-ZMFLB73226D08_FLI.pep
YNPPGNDVHAFARELNEIFDSEWESVERKFRGRNLVQEQKTKAIKVRAIVDSKSTVARGQVACSNPKSLAARGPVPCSNSFAKKTLTDALSSKVKIKFSVRSSAHTSSKDIPVQTAGVKEGSLNHSFPTGNKEAYLNCTFPFAKENAKISSTRETERSSGSTGNDSWSCNDISTSPIASSVQGEESYLCDEPLSPSRALRAAMLRSRFAGTIVKAQQKALLDHGKNIDPVKLQLEKERLEKRQQEEKARIEAQVKAAEAAAQQKFEEEMRVKREQEREAARLAVRMMKKTVDIDNSDFLKELENFSKTWQSNPPGKLIVDFIDGDLPPGLGSPLERLGLFMKNDLEDEVEQEVEDSASPSMDVDMRKDLAGHEMQDSISPVKVIGTKDDFQGADINTRKDFQEDAAGHEMQDCISAVKVIGTKDDFQGAVGHEMANSLSPSTFVDTKKYSEGTEHEMVDSISPLMDPNTEEGEISC

SEQ ID NO: 68231 - protein, 162 aa, Zea mays
  Clone ID: UC-ZMFLB73238G10_FLI.pep
AVDGEQRGEPLPEAAEREQRRRSGLRRPADGPAGVRRRRRGEEGIPAVVEEAGRRRRRREGLRRRQREWREAAGLCRGEAGDGGGGRELGSQPRHDVGAHPRRRQGGLPHAAPRPAALRQRQGRGGLLPRQLARHALQGLQARGAHLQQHMHLHLLISGVQL

SEQ ID NO: 68232 - protein, 653 aa, Zea mays; identical to SEQ ID NO: 56213
  Clone ID: UC-ZMFLB73264B06_FLI.pep

SEQ ID NO: 68233 - protein, 326 aa, Zea mays
  Clone ID: UC-ZMFLMO17033D08_FLI.pep
HLLPQPLCPSPCHQGPRSPERDLAATQAMESPFRADLLRGKAALVTGGGSGIGFEIAAQLARHGAHVALMGRRREVLDKAVAALRSEGLRAVGFDGDVRKQEDAARVIAATVEHFGKLDILVNGAAGNFLASPEDLKPKGFRTVIDIDTVGTYTMCYEALKYLKKGGPGRGPSSGGLIINISATLQYTAAWYQIHVSAAKAGVDSITRSLALEWGTDYDIRVNGIAPGPIQDTPGMRKLAPEEMGNKGKRETMPLFKLGEKWDIAMAALYLASDAGKYVNGAIIIVDGGLWLSRPRHIPKEEVKALSKVVEKKVRASGVGVPSSKL

SEQ ID NO: 68234 - protein, 205 aa, Zea mays
  Clone ID: UC-ZMFLB73270C11_FLI.pep
ISWIYRLEGELRKEMGWGISRLIGLKAAVLLSVACFFQGLGVILISFPLIYASVIAILVSIASHPSIDLPLLLGKASDGSFPLWSWIIFSPFLLFIHLFVLIRRFVKNEPLYTEVADGVFVGGWPSSVEHLPPGDPAIIDCTCELPKSSTISNNAYLCVATWDTRAPQPSQIESAVRWAVRQRSQNKPVYVHCAYGNFALLPMFG

SEQ ID NO: 68235 - protein, 83 aa, Glycine max
  Clone ID: 700890821_FLI.pep
GKLPGDTTSLLKAWWQSHSKWPYPTEEDKARLVQETGLQLKQINNWFINQRKRNWHTNNPSSSSNSKSKRKSSAGEASNQSFM

SEQ ID NO: 68236 - protein, 542 aa, Zea mays
  Clone ID: UC-ZMFLB73260H04_FLI.pep
PIIFQRTKATCFAYGQTGSGKTYTMQPLPLRAAQDMVRLLHQPVYRNQNFKLWLSYFEIYGGKLFDLLSDRRQLLMREDGKKQVCIVGLQEFEVSDVQIVKEYIERGNAARSTGSTGANEESSRSHAILQLAVKKHIIVKDTRRQRDRDANEAKNTKAVGKISFIDLAGSERGADTTDNDRQTRIEGAEINKSLLALKECIRALDNDQIHIPFRGSKLTEVLRDSFVGNSRTVMISCISPNAGSCEHTLNTLRYADRVKSLSKGGNTRKEQSTGPTTTSSRDSLSALSYSLPAEAEEIPNQVQEKRPVDTYRKGTENFISNPSVESDRNSFSTIPNYSNRGREENGAASGNDRESYDLKSSQPAYTSKPQLVQNSANTQEEEKVTKVSPPRRKAYREDKSDRQSNYMKKDNGPETSRVGYKMQQAKQLQQQQRPASASASSRQSEKESSCDDVEIDAILEEEEALIAVHRKEIENTMEIVREEMNLLAEVDQPGSLIDNYVTQLSFLLSRKAAGLVSLQSHLARFQHRLKEQEILSRKKPSR

SEQ ID NO: 68237 - protein, 265 aa, Zea mays
  Clone ID: UC-ZMFLB73268B01_FLI.pep
QLLHFKQEGFLLGAGSPSGSDAHISSSGIVQGHAYSILQVREVDGHKLIQIRNPWANEVEWNGPWSDSSPEWTERMKHKLMHVPQSKNGVFWMSWQDFQIHFRSIYVCRVYPPEMRYSVHGQWRGYNAGGCQDYDSWHQNPQYRLRVTGRDALYPVHVFITLTQGVGFSRKTNGFRNYQSSHDSSMFYIGMRILKTQGCRAAYNIYMHESAGGTDYVNSREISCELVLDPYPKGYTIVPTTIHPGEEAPFVLSVFSKASIRLEAV

SEQ ID NO: 68238 - protein, 272 aa, Zea mays
  Clone ID: UC-ZMFLB73272D06_FLI.pep
MAGRHRAPRQYHDEPRGYRDGPPPPLPRPRPLSPRRMAEELSRRRAEIRRIHEDNQRLADEIVSLKQTMPRLQEDLRISSQAVPKLRAEKELESRELTQRNLKLEAELRALEPLRQDALHLRSEASKLQSLRQELAAKVQGLSKELELQKSESQKMTALVAERDALCQELLQARANLEFEKKAKPELTAQVQAMEKDLVAMAQEAEKLRADIAKRNTPTSFSSRGTYGASLSTPGMGLQGMYDGGGYSMAGSRYGSGTGAWSSHDPHGYPHL

SEQ ID NO: 68239 - protein, 299 aa, Zea mays
  Clone ID: UC-ZMFLMO17025G08_FLI.pep
ALEHPWAFAFGLLGNVISFMTFLAPIPTFYRIYKSKSTEGFQSVPYVVALFSAMLWIFYALIKSNETFLITINAAGCVIETIYIVMYFVYAPKKAKLFTAKIMALLNGGVFGVILLLTLLLFKGSKRVVLLGWICVGFSVSVFVAPLSIMRRVIQTKSVEYMPFSLSLSLTLSAVVWFLYGLLIKDKYVALPNVLGFIFGVVQMVLYVFYMNKTPVAAAVGKDAGKLPSAADDHVLVNIAKLNPALPERTSGTMMHPVTQMAAVPARSCAAEATAPAMLPNRDVVDVFVSRHSPAVHVV

SEQ ID NO: 68240 - protein, 930 aa, Zea mays
  Clone ID: UC-ZMFLMO17031G03_FLI.pep
GKANCLLISKKGQEVGRYFFASSKLMSFLGYQEAKPTASQINNAGVHDLHVNSVGLHQQTISIEEKQIAVPVNSVALFNSSGDSHQQKLQKDEAPIEVNAKECRKCNLTFHDQSAYMQHQLSFHQRKAKRRRVSKSGELGTNIDGNYEKTQQKTSGEVSGNFGHSAANVRYEGLSPAELLDGRPSLMAVPCGSQEITILPQQGKEPCVLPQQGKEPSVLPQPGKEPSVLPQQGKEPSMLPQQGKEPSVLPQQGKEPSVLPQQGKEPSELPQQGKESSGDISVNQKDPLKEMNGFPEQEKGLVAGELVSAHHKDPLMDITDAFEMIKKHPAREPSSGHHLDTVDNSDDHKTHNEACDNVVTSLSIDAERKLGVCNSMNVHENISLKDPELSNADYSQKFNRSDETCDVHKEVSSTVNDPDERKCTDDSTRCTNMSCDLLHGKIVSSPEEHDFSNQLESNPLSVSRNEPDLNSIGTEVDGGNITCNAENPRSFKSEKSAELKIMDCEMTSFKDSEIKNDVRVRDVNLNSCLDSISSPISGGNNETSDTPDDAIRSSIIAQCFGTTSNDDTACKDGNFANQNDTCKGENFVNQKNVTMYQSNLTMEPIPRAQINVDCFTSSCSMTPEIKDYGNRGEDRAKEALVNSQNMTSNETGFDAEAYNSDIFNGTITESSLAQLSNVISMKNAFANCYSLSDLNTLTGGTATDDIDMHNIRSSFVSSTSRTEPNEHCTLDFDIKGSMLEALEKSDSDLDNQYNDAGPSCDSLPATGTSGTIDDFMSMQTNFGSFTSLVRAVEDVPLSRIIQDQRCDLQLGFGGPKQQMYPSFEQQLRMASAGAPPYGTIGRHDPIPVPEPTLMLGYAPQLGNCPPPFQLGWGPSYSKMVGMLQSVCVWCNSPFQHFGTVAEQQADSLGYICPSCKGKFSGHLGINGPSI

SEQ ID NO: 68241 - protein, 86 aa, Zea mays
  Clone ID: UC-ZMFLMO17041C12_FLI.pep
LASNQLLYPNHSLIIVPFQIFCWLHQYHVNFAQVQECVHITVCSLLTAFCGCHDGLLVNLRHTMRIASIHSKTITEQHCLSEDITS

SEQ ID NO: 68242 - protein, 215 aa, Zea mays
  Clone ID: UC-ZMFLB73345A07_FLI.pep
ENGEADECDGTPTSVAESSSSVSVGEVVSHGKRINDIAEDNMRAHNILYEAVGENISGPSFHLNEYSSGTIQATGKPNDCRRIDSAVRNLLLKGLGQPFSEEDIIGIYRTPLLDQRGQVRCGLFQKEIEETRSRRGNANVRYAWLPCSRYTMEQMAMRGALEIAKPHKGSICGVGTWLAPANCTNSCARYSDFHEDGIIRMMLCRVIMELHRMGC

SEQ ID NO: 68243 - protein, 242 aa, Zea mays
  Clone ID: UC-ZMFLMO17067B05_FLI.pep
FILFAELDYITSMSRLRALWQASFNATKRALVWSSDDLIPPSERCIFNFNSKDELKRWHLYSDSEYGGLSSASLEITDGASVGDTPLTGVFSGNLSLDMSEESTWRIRRYGFCGMRSKKFDGFIDLDAYDTIAMKIKGDGRCYISTIYTENWVNSPGQQEDNSWQAFVYIPPQDRWEVLKIPLDRYLPTWRGNVIQAKLEMNPARIVGMSLSVNAEGGVPGAKTGPGDFRLDVAWIKALRAL

SEQ ID NO: 68244 - protein, 420 aa, Zea mays
  Clone ID: UC-ZMFLB73286F04_FLI.pep
EKVSASPISMELTGAALRRYALPSASPVAARVGRRRRPARVACVGGGGFAEEGHLRYYEAAPRRKAVEAVARDLGKLRAMGLVAGDAAKEKVLSDATDLLLQELSQMKDAEYKINKVEKEQNAAMKALKKQEKRTKKTAIMMMKCEEDESSESSESDCEDEATMNVEQGLVISTAVPEVVASSISAVPAMECDKAAVKAMKKMEKEQMKAMKKMEKEQKKAAKKAMKMEKEAKKMAMATLNGCRDEDDSSCSSESSESECEGQVMRMSRCVTITAPEMPPPSTGLPIIVPQIPEPLAPQPSQSQPSEPATAVQATRVSSVAVTETSTTSRIEVCMGGKCKKSGAVALLQEFEKTVGTGGAVVGCKCLGKCGLGPNVRLRSGASAEGSAKGNPLCIGVGFEDVGTIVAGLFGGADLGMTPT

SEQ ID NO: 68245 - protein, 740 aa, Zea mays
  Clone ID: UC-ZMFLB73259H01_FLI.pep
SRMAEYENELSTSDPAKAHKLFNSKAKDFSFQKRKIDSVKNLYYAMRKRVRNDPRNSGDLGFLVPCSCTAIGSECICGGLPNNIEPELNSVSRYGQVGSRYTIGHSYSEMNEHAFHTKHTESMTRDGDGTSNVVYGYSDVGQLYEHHAYTANNHGNREGNNLSLKSITNFQDSMQFQQLDNNQCGNGVVDSKALVIPNHFSGSVQEPMPLQMIGQPEGSEAPGGAILSLQRSDRLALADDKDVKSEDRDPLTFEAHLDGGISGLDHATEFMDFPYFTNSEDLDILNSENLLNSPSEGIQEDLDDTALVVHGVRSTMQNLVHADEANMSCDQIDLGDVKNNVDASGIILFPTSLVVPCPGLYVECKLNTEDTEIPCNDDVSTPTEYPLECCTSTFGQKSENTIYSVSPAISPPSIAEQPNPSTSEQKEDSVAHDEGGVLGAKPSEGALTVGGLLPGNIDTNDANTCMLALPSFSTAGFGEGSPCSLGPHESFDNSHGLTLQNSVQAPDQMQHNSLDGKPELGDKAALQNCMPSNALPDLDIQNTIANAPTPAQAEECPDYEKDVPNYYDLEALILDQDLIPWDQDSDFMHPEVTGFPHPESRKALIRLEQGARSCMNRAIMSHGAFAVIYGLHLRCYIKDPEVTLGRETEDIKVDIDLGKEGRANKISRRQAVIKMDESGYFHIKNTGKCPIFVNSKEIPSCKRINLSSDSLIEIKDMRFIFHVNQEAVRQYIDRDLKPER

SEQ ID NO: 68246 - protein, 426 aa, Zea mays
  Clone ID: UC-ZMFLB73303C01_FLI.pep
NGFTKEEVCNKQINPEIPTEDQFSRGQKHDTLLMDRVPSVKNPFNLDDDRNDDLFELPTESCFLEVPNVVESRKQVDSTSRMVVPPIVSNQIRMAEVQQCHNSIERILSSSSASENGEVVGPEDITVRSSSELVNKTCLTDHALQENGHTSGDIFVPSQAASTELSTISMQDISALSEVEIMQTEDASAKDMTAVCSIDCIEMKQAINTTANDTYAAIVEEKKLIEGTTARMNGVRETYYVEEQTQASDTKELSAVQNIGNSEENKQTENTDAKETNARFNANDVEHKTQTAKEIAAAESTSSVEEKQQLNIVVVQDGSNKKMNEEIASTGAQLNSGRVRVPLKVLLAEASMENQVKKPSTKERMLSFRRQVTKDNNLSVKSGSRKSGPDDHHWSSPAKLPHKDVDKISREKKQPWMPFICCHSVR

SEQ ID NO: 68247 - protein, 284 aa, Zea mays
  Clone ID: UC-ZMFLB73120D05_FLI.pep
RYHTSAASNQGGTGLVGSCSPHDNSSEAVKTDSTYNMKSNSDAAAIKQGSNGSSNNNDMGSTTKDVVTKPSTNNERVMLPSAIKANGYTSTFHPVQQWMVPDNATAGKAKADEVANNAGRNSHPGDVQSNLTQQHRPTLHYVHFENSGSGALQCGSSNVFDPPLEGQATNNYGVKAGSNSGSNKGQNNGSTAGASTAAANAGRTDTEIRAIDKSGPGGGSGSGNDTYVRRLAASMTPRQEQLKKYREKKKDRNFGKKVACFQLHINIYSLFVFNCICLRRESIG

SEQ ID NO: 68248 - protein, 277 aa, Glycine max
  Clone ID: 700555378_FLI.pep
PHWLESLQELQVLSLRSNKFHGVITCFGAKHPFLSLRIFDVSNNNFSGSLPASYIKNFRGMMSVNDNQTGSKYMGNQYFYNDSVVVVMKGQYMELERILTIFTTIELSNNMFEGELLKVLGELHSLKGLNLSHNAITGTIPRSFGNLRNLEWLDLSWNQLKGEIPVSLINLNFLAVLNLSQNQFEGIIPTGGQFNTFGNDSYAGNPMLCGFPLSKSCNKDEDWSPHSTFHLEESGFGWKAVAVGYACGFLFGMLLGYNAFMTGKAQWLARLVEGVLN

SEQ ID NO: 68249 - protein, 381 aa, Glycine max
  Clone ID: 700555866_FLI.pep
AKGEEATAELDAKMKKFTEDAIKFKMDDTAELYDFDDEKDENKFDFKKIVSENWVEPPRRERKRNYSESEYFKQTMRQGGPTKPKEPRIPRMPQLHDFQFFNTHRLSELYEKEVRYLMQAHQKNQVKDSIDVDEPEEVGDPLTAEELEEKEQLLEEGFSSWSRKDFNAFIRACEKYGRNDIKGIASEMEGKTQEEVERYAKVFKERYKELNDYDRIIKNIERGEARISRKDEIMKAIGKKLDRYKNPWLELKIQYGQNKGKLYNEECDRFMICMIHKLGYGNWDELKAAFRMSPLFRFDWFVKSRTTQEITRRCDTLIRLVEKENQEYDERERQARKEKKLAAKSMTPSKRSMPRQTESPSLKKRKQLTMDDYLSSGKKKK

SEQ ID NO: 68250 - protein, 185 aa, Zea mays
  Clone ID: 700581970_FLI.pep
FMYDGMEHYCLEDAHIVNLFSFSKAYGMMGWRVGYIAFPNEADGFHDQLLKVQDNIPICASIIGQRLALYSLEAGPEWIKERVKDLVKNRALLVEALSPLGEDNVKGGEGAIYLWAKLPDSCSDDFEAVRWLANKHGVAVIPGSASGGPGYIRVSFGGLKEEDTRLAAERLRRGLQELVTDGMVQ

SEQ ID NO: 68251 - protein, 311 aa, Glycine max
  Clone ID: 700899544_FLI.pep
SCLGKLRDGRSVAVKRLYENNFKRVAQFMNEIKILAKLVHPNLVKLYGCTSRHSRELLLVYEYIPNGTVADHLHGQRSKPGKLPWHIRMKIAVETASALNFLHHKDVIHRDVKTNNILLDSDFCVKVADFGLSRLFPDHVTHVSTAPQGTPGYVDPEYHQCYQLTKQSDVYSFGVVLVELISSLPAVDITRHRHEINLSNMAINKIHNQALHELVDPTLGFESDFKVRKMINAVAELAFQCLQSSKEMRPSMEEVVETLKDIQSDGKHKSQPEVMDITSTADDVVLLKDDPPPPSPDSNAVSKSTTPNASG

SEQ ID NO: 68252 - protein, 396 aa, Zea mays
  Clone ID: UC-ZMFLMO17330H04_FLI.pep
FEFSGFPHAPAMVSDQEIASCVESVLRGSAGGPGEVSLTAVLQQAEATLGVDLSHKAGFIRDQMDLFFGPRLQPQPLTTPQLAPPPPQAVVAPADAVPQHQVLPQAPPSAQQMQPQPQQLAPLQPHLMFQTIHQLPAISPVPAVSAPPAMAFYPPPPLAFRYTTGLAGAATGGTVSFQQPAPGAGGTASPNAAPQVAGDNKESSSKRKRGGPGGLNKVCAISPELQTIVGETAMSRTQIVKQLWAYIRQNNLQDPDDKRKIICNDELRVVFETDTTDMFKMNKLLAKHITPLDPKSQLHEVKRMKAPTMSPQPGRPIDQPSIVISDALAKFIGTDGTFPQDDALKYLWDYIKANQLEDVINESILCDSKLQELFGCESIPMSGLSEMLGHHFIKKT

SEQ ID NO: 68253 - protein, 909 aa, Zea mays
  Clone ID: UC-ZMFLMO17333D07_FLI.pep
QRPTIVQDTADGRCLDEVHGNIEFKEVAFSYPSRPDVMIFRDFSLFFPAGKTAAVVGGSGSGKSTVVALIERFYDPNQGQVLLDNVDIKTLQLKWLRDQIGLVNQEPALFATTILENILYGKPDATMAEVEAAATSANAHSFIALLPNGYNTHVGDRGLQLSGGQKQRIAIARAMLKNPKLLLLDEATSALDAGSESIVQEALDRLMVGRTTVVVAHRLSTIRCVDMIAVIQQGQVVETGTHDELLAKGSSGAYAALIRFQETARNRACPSTRKSRSSRLSNSLSTRSLSLRSGSLRNLSYSYSTGADGRIEMVSNADNDRKYPAPRGYFFKLLKLNAPEWPYTILGAVGSVLSGFIGPTFAIVMSNMIEVFYYRNPSKMESKTREYVFIYIGTGLHAVVAYLVQHYFFSIMGENLTTRVRRMMLAVILRNDVGWFDQEENNSNLVAARLSTDAADVKSAIAERISVILQNMTSLLVSFVVGFIIEWRVALLILVTFPLLVLANFAQQLSMKGFAGDTAKAHAKTSMIAGEGVSNIRTVAAFNAQDKILSLFCSELRVPQMHSLRRSQISGALFGLSQLSLYASEALILWFGAHLVRTHVSTFSKVIKVFVVLVITANSVAETVSLAPEIVRGGESIRSVFSVLNSRTRIDPDDPDAEQVESVRGEIDFRHVDFAYPTRPDVMVFKDLSLRIRAGQSQALVGASGSGKSTVIALVERFYDPLAGKVMIDGKDIRRLNLKSLRLRIGLVQQEPVLFATSILENIAYGRDGATEEEVVEAAKVANVHGFVSALPDGYRTPVGERGVQLSGGQKQRIAIARAVLKDPAVLLLDEATSALDAESECVLQEALERIMKGRTAVLVAHRLSTIRGVDSIAVVQDGRVVEQGSHGDLVSRPDGAYSRLLQLQLHHG

SEQ ID NO: 68254 - protein, 432 aa, Zea mays
  Clone ID: UC-ZMFLMO17334H10_FLI.pep
TLVLIFFVRTYSGHKLCPYVRRIYRYFTRKKESVSCRVVSARARALPSARFSSQQIIHILCACGMPSPLHSWSRRPGHQLHAGQVAAELLEHHQQVAAGVEPGARDVVVPLGDVAAAGLALGLAVRPRVAAAAAAAGGGLVRPVPPDVAAVHPRLALAHAAHVQGHRRVAGRRAEVGLVPCQGLLPCRAAPLDGRATGDGLHAQRLAVEADLVGPLLVAEVPLPLVEAGQRDRTEHSDVPRLVVGALVREADCCAEDGDLVAPLPHLHVAAVCQLGAVVAAIHGAVGLAVDEHLQGVAGRVDGQLRPLPGLQELLVRVDVHVGGVPQVVRLVPRHAELLHQPVLGEGAAVQRVGGLAVRLPREAARGAHPRRRRRLAHRRRVEHGGLAVGQHADGPGREVVAPPVEHHPRRGAGVVVGQERRAGAAARLEHV

SEQ ID NO: 68255 - protein, 381 aa, Zea mays
  Clone ID: UC-ZMFLMO17340D11_FLI.pep
LLGRRDYRGGDFRDRFDRRRSPHRRHSPDGDSRGHRSLRDRRPNSQERESSYSRSPSRKSEMRHEKKPDDGETNSSRSLSVSDNNDDRKKETLLSGDDKEDHEIQLKQIRQDMELLRDDKSLLEIILDEKNAEVRKISSRLNDLDLQLRKEKEECHRMTSKIKKFLKAHARFLKAQEELKRSQARFERLGDLLASDILKRGANEEVSSINVDEDPNVPYERSPNAAIAKKRSIPYSTSEEAKAVKKRRERDSDTTRPDKYRFEGTIAGFEKLSKGTEPTKSLYLKKKLWEDEKDKIGNFVSSANTDKVKESPVKHVLPSTGMAAHALDDLFEAVELEDRRDTSIENDADDETRSPVMPPQPPPVVNTYEQYEADDEEVDVE

SEQ ID NO: 68256 - protein, 470 aa, Zea mays
  Clone ID: UC-ZMFLMO17341H02_FLI.pep
RDETKKWDPVTYSRPNIYPSAANDDTPGGSLAARTGGSFGDAGEDDTAAEQVLADVGGEGVVTEEELDEEEPANEHHKVLAGALLVVDGGVLGLAAVGPVDVLQQLAALLAEEPAGHELLGRGAEHAGVLGGARLVAEQHLALLHLEHGVVALDLQVFLGVAVLELDGRVQAQRLPHDRLGQLHLLHRREGDLAAGLGHGASNLSHQPLVELLAGAGDVGQDAREQHLEAAVAVEGGGEEEVVAGLLARQAQALGGVQRLLRHRGEVLVQRPVVALDEEGREVERVEQRLLEDHGEAEREERVELPDEPLGRLGGPALAEVRRRGAHAEVGLADEVEGGDVVELVELGLAALGEVRLDGGEQRGEVGAEDGDDVVLAGEQEGEEQLLHLGVGGLGGVEVGADAVAAGEGGGGHVGAREQVPLLHLVHVEEDGEALGVQDRHHPRVARHEGARRDVHAHHGGAVALDAGLE

SEQ ID NO: 68257 - protein, 545 aa, Zea mays
  Clone ID: UC-ZMROB73015D06_FLI.pep
GDGTPPSPRELYTIPASSGWFRWDGIHETERRALPEFFGGAGGAGFGTATRNPRIYREYRDFIIAKYREDPARRLTFTEVRRALVGDVTLLRKLFAFLDSSGLINFSASSSSVPASRQQEVGVVVEAPVGLQVTPRPPASYFAEEKRVAAGGEKENEFRLPPLTSYSDVFGEWAPGKAPICGFCGEECNGADVETLQDGFKVCSKCSKSNNDNIKEEANKCPGDKKENMENHASSAWTDTETLLLLEGVLKHGDDWDLIAQHVRTKNKSECIAMLIQLPFGEHMLGTINGKFVSRLHINQTDDGKTNQHIMESSSHSTEMADGMQIDGSEDSADKSVEEYPTKRRRLFFSMDATTSLMEQLAILTTAASPDVAAAAADAAIKAFGNENPQARKAFRLNEQEYKTKAFASNHVQQIDHKVSNKDTAMHGQSGSDKQEKKFIASAYQLRAAVATAVGVAAARAKMLADQEEREMELLMASVIETQLRKMQYKIKHFEELDSLMDQEYTAIQQMKGSLMNEWIKVLEHAFRAGVSLPRDELLTKLLLN

SEQ ID NO: 68258 - protein, 90 aa, Zea mays
  Clone ID: UC-ZMROB73017B03_FLI.pep
LPLKLHRVGALMINVAIDIDHCEGSLWSCSSSSSLEDDIAMAGGTRGARLFEGSFAIMAPPDLILDSMALISEAASSRGTARAPQARAVA

SEQ ID NO: 68259 - protein, 151 aa, Zea mays
  Clone ID: UC-ZMFLB73277B08_FLI.pep
HASALSSPSPRSRLPRVPLDRTPPPGSHRRQYLSPDRPSLYPDRVPVGLPPPPPYYRCRGLHRRRAPARQMELGDKAVGFLLTLTSLTLFTYYTFWVIILPFVDSDHFVHKYFLPQEYAILIPVLAGVVLLSFLSVFVGLVMLKSKKKKTA

SEQ ID NO: 68260 - protein, 370 aa, Zea mays; identical to SEQ ID NO: 58861
  Clone ID: UC-ZMFLMO17163E07_FLI.pep

SEQ ID NO: 68261 - protein, 474 aa, Glycine max
  Clone ID: 700659163_FLI.pep
KAKARKPKPPTFVSRFSTTFSAMARKPLLKQTLATLFLLFVLYAIFNAFFQPTDSSAFDAAATFSSASSVLLSGATTKSPAINVFLYDLPRRFTSDVIHHHALARGGASRVTPDDDAAAPKYPGHQHMAEWYLFADLSRAESERAGSGSPVVLVADPEEADLFFVPFFSSLSLIVNPVRPPGSNSGSEKPVYSDEENQEALVEWLEKQEYWKRNSGRDHVIVASDPNAMYRVIDRVRNAVLLVSDFGRLRPDQGSLVKDVVVPYSHRIRTYQGDAGVEDRNTLLFFMGNRYRKEGGKIRDILFKILENEKDVIIKHGAQSRESRRAASQGMHTSKFCLHPAGDTPSACRLFDAIVSLCIPVIVSDNIELPFEDTIDYRKLAVFIETSSAIKPGYLVSKLRALTPDRVLAYQKELKEVKRYFEYEEPDGTVNEIWRQVSKKLPLIKLMINREKRLFGKQVECSCVCTNQTAVRTL

SEQ ID NO: 68262 - protein, 97 aa, Zea mays
  Clone ID: UC-ZMFLMO17126F10_FLI.pep
LGVSVVYTISFCVSCLQEQVRAFIEGTGDSDVLVLNVQDPFQRLLLHGVCEFYNVTSMTTSSVRDGKPWKSTTIKKRHVTGLPPRITLVSFLRMRKN

SEQ ID NO: 68263 - protein, 718 aa, Zea mays
  Clone ID: UC-ZMFLMO17061A07_FLI.pep
ARSTASDRFPLVRVSQRIAVMPRPMASSSARGRAKDSDPSSSSAAADSSMASLIERATSTTAHAVDPVLLRAIKSSARASDAAIRDAFRLILSLMSKPHSHVRLLAFSIADELFMRSKLFRSLLADSLDGFLPLAVGFRRANPLPPPTTSAALLRKAAVQALERWHHLFGAHYRQLRLAVEYLKESARVQFSGLRATVDARAAREARMQEIYAGKVEQLRENLASIKAEIRSTIDEIRNGLEIIRAEHKKFEGYYVDDEEEIASLSMRSIRTASLMAGEWVPETQENEAVFDALREAHRLLVSKHLVTVQEWITVLVRVNLPDNRFRDSALKDFIDVKNEIRAVRDHCSELGLDLDNFHRRKGDQEEEDNEFWVEGNIEAPNRARVQSSLDVASTSKDTEKGKWVVGGVSHIGKAPVAANGTRNLDPEKSKLLAEAPVLPWSSVLDRWGSSGDVHVNQRGLEVESHWGRVDNDATIPAAKIAELNVHCSIYREDPVEILPCHAPLKKGGLCQRRDLRVCPFHGPIVPRDAEGNPIEQNSGSSDAEVNPVEHLDIGGHSNELNGISDDDCMEGTSSRMAGVNNDYGDIAGTCDLGKITAEQLARQSVKNVRKREMDRKAQERAQRARIRQHNEDVLRNAALASTSYSAAAYEQPTEAHGRRGRRGKAKAPTLASMLKKKVTTKDRIAERLLNARATDATVRDVSHNEDMSYREAFPNQW

SEQ ID NO: 68264 - protein, 403 aa, Zea mays
  Clone ID: UC-ZMFLMO17072C03_FLI.pep
LADNFSGHLSSLPSTAKSINRTDQHKPNLPPADRANPSAVASLSVLHRPLQPRPRAPQIRGRTSPARTADQATYVARRRSEFCIFPSVLAAATAMAGGGSRRAGAAEQPKIGSGNVFAALETLKKKKKPADKGAKPAAREDPKPEVFWAPAPLTAKSWADVEDDDDDDYFATTAPPPRPVWGDAHRDAAKDQHDAPALEEEIESEDDGLDDDADEDHEDKADDAVPAEPTAKNATAPPAPPKDTERQLSKKELKKKELAELDAVLAELGLGTSNNSIQEEPNGKKGADQVADGEKKEDAPAPLESKNSKKKKSKKEKSSKELKEAQDQANGSEAAAVAEPDEDTASVDVKERIKKVASMKKKKSSKEMDAAAKIAASEAAARSARLAAAKKKEKSHYNQQPVR

SEQ ID NO: 68265 - protein, 343 aa, Zea mays
  Clone ID: UC-ZMFLMO17108G04_FLI.pep
RRIAAAGSASLDPDPGDMPRNDDRYGNTRLYVGRLSPRTRSRDLEYLFSKYGRIREVELKRDYAFIEFSDPRDADDAQYNLDGRDVDGSRIIVEFAKGVPRGSGGSRDYNGRGPPPGTGRCFNCGVDGHWARDCQAGDWKNKCYRCGERGHIERNCQNSPRNLRRERSYSRSPSPRRGRGRSRSYSRSRSYSLSRSPSGSPRGGRRDRDERRSRSLSYSRSASPRRSVSPVKEKERSRTPDGSRSPSPRDKVSPPPKDNGAHNGSDREDSPGGREMSKRSRSPSDGYRSPVGNGRSPSRSPSPKVNNGDDPSPKGNNGDDPSPKGNNGDDDEHRGSPRGSQSP

SEQ ID NO: 68266 - protein, 384 aa, Zea mays; identical to SEQ ID NO: 63376
  Clone ID: UC-ZMFLB73317G02_FLI.pep

SEQ ID NO: 68267 - protein, 233 aa, Zea mays
  Clone ID: UC-ZMFLMO17295D05_FLI.pep
YGILQSFNKAKDFVWRHDLFEDSMVAAGLSGIESGTKLYISNLHYGVTSEDLQELFSEMGHLKHCAVHYDSYRHPTGSAEVIFTRRSEALAALKRYNNMRLDGKAMKIEVIGAELGLSAAAVPQISVVPGASRRGQREVVMMPGGSGFGQGASGPSSSLPGWKRGGFVRRGQGRVSFPQRGRGQVRSRGRGRGRSSFVQSRGRGYVRRGNAEKSAKQLDKELDNYNSGAMNVD

SEQ ID NO: 68268 - protein, 393 aa, Zea mays
  Clone ID: UC-ZMFLMO17289H03_FLI.pep
ALRIVMISVTNHFPSFEALALVQIERTLEDISQKLQLVQRLHTRFLLLPNLQDVTRTIQHPSIHEWSSNGMHRSICFVNKATGYILIAEPPSFLTIYDVIAIIVSHRLGAPMILPIASVFACPDGSEKEVLQILHLGSDFGVSKREGRYDASLGAQLLSQDARQVQFLPLRPFYSGEIVAWKTGKEGEKLRYGRVPEDVRPSAGQALYRFPVETAPGEIRMMLSSHVYSFKSVSMADLLSAPSQVNGDVALGGQEKLLATNTGTEVTKDADAGLEYGKVSSTELVQAVHDMLSAAGVRMDAEKETLFEATLSLQDQLKESQVALLVEQEKAEAAVKEADVAKAAWACRICLNAEVNMTIIPCGHVLCNRCSSSVSRCPFCRTQVARMMKIFRP

SEQ ID NO: 68269 - protein, 79 aa, Zea mays
  Clone ID: UC-ZMFLMO17277A06_FLI.pep
KWLNPKRIIIQKNLEYRRQEAEPRAKHICPGTKRKQISHLWHIGPQLFSASELASIRIDLVKSIQNQHKHIIDRTTKQA

SEQ ID NO: 68270 - protein, 491 aa, Zea mays
  Clone ID: UC-ZMFLB73236D07_FLI.pep
LSVFCRAAFDQECVPRTADKRLVRQVSAECRGLPLALKVIGASLRDQPPKIWLSAKNRLSRGEAISDSHETKLLERMAASVECLSEKVRDCFLDLGCFPEDKKIPLDVLINIWMEVHDLDEPDAFAILVELSNKNLLTLVNDAQNKAGDLYSSYHDYSVTQHDVLRDLALHMSGRDPLNKRRRLVMPRREETLPKDWQRNKDTPFEAQIVSIHTGEMKGSDWFQMNFPKAEVLILNFASSLYYLPPFIASMQNLKALVLINYGTSSAALDNLSAFTTLNGLRSLWLEKIRLPPLPKTTIPLKNLHKISLVLCELNSSLRGSTMDLSMTFPRLSNLTIDHCIDLKELPASICEIGSLETVSISNCHDLTELPYELGKLHCLSILRVYACPALWRLPASVCSLKRLKYLDISQCINLTDLPEELGHLTSLEKIDMRECSRLRSLPRSSSSLKSLGHVVCDEETALLWREAEQVIPDLRVQVAEECYNLDWLAD

SEQ ID NO: 68271 - protein, 591 aa, Zea mays
  Clone ID: UC-ZMFLB73283H08_FLI.pep
KKINLNLKRKHDNLMKEKGEIAKENQSLVKQMEDLKSTQKTTSETTLEQAIKEKDFRIQTLERTLEKERDDNKKEKAKSRRNENTIFGALQKVQQDKKQVEESIDKHKQAVRELIENYPGLSSEVPPISALEEQLLSYFRAAKDMEESSSPFRDGAATQTPVVETAPVDAPTSAGVAGRPVDTSSRPAKAKMTEERAVPKPSSEVRRPGGRRPLVRPTLERTEEPHADTDISAVDASTVQDKGGPPAEQETSGILPVLQPLSRKRLITSSQTVDSASQGEANDVNPPSKKPKEEESSQGTSELKSGQPPLGDVAAQVNVLPATDDLDGQQPTEEIDTDQAPEPMVEVEATREEDGGDKDDSGDASTDIKGQDADANIDANAIPLEEEHVVAKSEAIIESFDDDRKTEDSKEDAQRTTATDVDDDMEEGELAEEPEDKSDVDMSEIEGEATAERAAVEPDQSPITQPGAADASPSRTADASPAREPSPSPVQAGASSRPQNTSTATEAREPSSNPAQAGASSEQRNTSTVVEAAETRSRTINLSERARQNRQTRFQRAQQPGTARGRGQQSVTLRKDATGRGSRGRGGRGQS

SEQ ID NO: 68272 - protein, 223 aa, Zea mays
  Clone ID: 700381533_FLI.pep
SPSRQATNPNSKTFSPSHRRRSSPSPPMDLSAVQAALSDKSYSTLASLCDELLLQAASQGFTTDEWPYSVHLLAHLYINDLNSARFFWKSLPQEVKDTRPELAAVWRIGQCLWKRDYAGVNTAAQGFEWGPDLADFITAFLESYRQRIFKLLTSAYSTIRVADVAHFMGMSEEDATNYAAQNGWSLDAAAKMLTVKKPKSQTNQKLDASKLQRLTECVFHLEN

SEQ ID NO: 68273 - protein, 255 aa, Glycine max
  Clone ID: 700891140_FLI.pep
KMELEKLHDSINLILSLQSKNGGMTAWEPAGAYKWLELLNPTEFFADIVVEHEYLECTASAIQVLVLFKKLYPEHRKEEIENFIAKAVTFIEDTQLENGSWYGNWAVCFTYSSWFALGGLVAAGKTYTNCVTIRKAVKFLLKIQNKDGGWGESYLSCPRKMYVPLEGSRSNVVQTSWALMALIHAEQAERDPTPLHHAAKLLINSQLEDGDWPQQETLGVYLRNCLVHYSFYRNIFPMWALAEYRTNVLLPSFTI

SEQ ID NO: 68274 - protein, 462 aa, Zea mays
  Clone ID: UC-ZMFLMO17238B10_FLI.pep
ETVETSDFSALEAPASVPDESPKMEMKHDPESELIETTNADADHVTDQKAENDVDEPFMSLDQQYAQADDASRNPCPLPGKFEPSNEDSGDAYNSEQTLEMEGKRFVARKPCNPAFAAAQLKFEELSTNSTVSRSSSPPHLDGVSKSRMHTASSQEDYTPKQDGTGIQESSVGHDTKMRIAASECGTEISISSTLDSPDRSEGDGGEIVLEIGALENRNYVTGKADKDSSIVVHPGVKNAPEAEAQPQKEVEENGHVPALETEPHTEPEVADLHGQLEKSVTSYATPEGTPMSRTTTIPESHGTPSSEVSVNTKRSRSKKPKSHASKRSLASPGSDSVGRSSTENFSKESRHAKRESSSSKAAKSDQGDQEPRVSNSNSNPLPSYMQFTESARAKASSPKMSPDVQDSNAARKRHSLPMTNGKHDSSPRMQRSSSSQAPQGVKSSGPSPHSASGGADKRWHI

SEQ ID NO: 68275 - protein, 327 aa, Glycine max
  Clone ID: 700890292_FLI.pep
KFSEANKLGEGGFGEVYKGLLPSGQEVAVKRLSKISGQGGEEFKNEVEIVAKLQHRNLVRLLGFCLEGEEKILVYEFVVNKSLDYILFDPEKQKSLDWTRRYKIVEGIARGIQYLHEDSRLKIIHRDLKASNVLLDGDMNPKISDFGMARIFGVDQTQANTNRIVGTYGYMSPEYAMHGEYSAKSDVYSFGVLVLEILSGKKNSSFYETDVAEDLLSYAWKFWKDETPLELLEHSLRESYTPNEVIRSIHIGLLCVQEDPADRPTMASVVLMLSSYSVTLPVPNQPALFMHSRTESNMLKWVQIDQSITKSTTKSVNEMSLSGDIPR

SEQ ID NO: 68276 - protein, 314 aa, Glycine max
  Clone ID: 700891028_FLI.pep
TCFFRQFGHSVVLADYLTLRKGFIMNHNLSFKYDFHSYMIRSMEEEFQRIVGVSGPLWGFVIAFMLFNIKGSNLYFWIAIIPVSLVLLVGTKLQHVIATLALENAGITRFFPEAKLRPRDELFWFNKPELLLSLIHFILFQNAFELASFFWFWWQFGYYSCFIRNHLLLYIRLILGLAGQFLCSYSTLPLYALVTQMGTNYKAALIPQRIRETIHGWGKAARRKRRHGMFTDDSTIHTDTSTVLSIEEDDQLIDTPEVELQPATAVTATPSPIANETSSRAVTPLLRPSASISSVQCSSKAEAIPRCSSMPSGR

SEQ ID NO: 68277 - protein, 495 aa, Zea mays
  Clone ID: UC-ZMFLB73092B08_FLI.pep
AMAAAVAPPLCTWLVAACLSAACGDGEKENERRHRGGGVGGFFGSRRRLGSGRRGVGRSGMAMSVALHPERTAVENKKPDMKQRRVVVTGMGVVTPLGHDPDEFYNNLLRGISGISEIEAFDCSHYPTRIAGEIKSFSTDGWVAPKLAKRMDKFMQYLITAGKKALENAGITEEVMNELEKSRCGVLIGSAMGGMKVFSDAIEALRVSYKKMNPFCVPFATTNMGSAILAMDLGWMGPNYSISTACATSNFCILNAANHIRKGEADVMLCGGSDAPIIPIGLGGFVACRALSQRNSDPAKASRPWDVDRDGFVMGEGSGVLVLEELEHAKQRGAEIYAEFLGGSFTCDAYHMTEPHPEGKGVILCIENALADSGVTKEDINYINAHATSTQMGDLKEFEALNRCFGQNPQLRVNSTKSMTGHLLGAAGGIEAVAAIQAIRTGWVHPNLNLDNPEKTVDVRMLVGPQKERCDVKVALSNSFGFGGHNSSILFAPFK

SEQ ID NO: 68278 - protein, 397 aa, Glycine max
  Clone ID: 700892519_FLI.pep
KELSGGRNHFVESCGLPISTYFSALKLLWLMENVDAVKEAIKKKDALFGTIDTWLIWNLTGGVNGGLHVTDVSNASRTMLMNLKTLDWDASTLKTLNIPAEILPNIVSNAEIIGEVGSGWPIAGVPIAGCLGDQHAAMLGQSCRKGEAKSTYGTGAFILLNTGEGIIQSKHGLLSTIAFKLGPKAPTNYALEGSVAIAGAAVQWLRDGLGIISSAAEIEEMALQVESTGGVYFVPAFNGLFAPWWREDARGVCIGITRFTSKGHIARAVLESMCFQVKDVLDSMHKDSGESESQKTEFLLRVDGGATVNNLLMQIQADLVGCPVIRPADIETTALGAAYAAGLATGIWKEDFIFNTEEKLKNARVFRPVMTEEVRKKKVDSWCKAVSKTFDLADLAL

SEQ ID NO: 68279 - protein, 385 aa, Zea mays
  Clone ID: UC-ZMFLB73007D08_FLI.pep
HHRRGEPGDCCLSANRRLRLAGCAHRGKAVPSGGSGEGDEALLLASPDGGVEHVLQRLVPEGEPEVLELLGREAHRLEVVLDPGEPLRDVVLGVPIPEHGGEAVDGDVVRGADVAPGRGRVLEEEDLGVAEVVEVDELHLLEDRVVGRVPRDERQRGDEAGRHGRADERADHERRDDGDQVQAVLRRVRQGRLLRQGFRHEVHPSGHLDATAEVDVGPAFLVVDGPLPLLQVDRPGGGSEDDAPHGAGLLACPHDAYHPFHRRLDYLILRVFGQEVHGRGDVEDAGAAPDGVVEAAFLRQVGFPYGQALRCSGKVHQWLRLPNVRGIAHGRPDGVAGLEELHDEPGADEARRPRDQHLPFLARTGTSLHYRLPRFFLRERALAQD

SEQ ID NO: 68280 - protein, 482 aa, Zea mays
  Clone ID: UC-ZMFLB73265D07_FLI.pep
TLQWRQRPNISKSMAKNPKAPDTRSGRSPTRRPRPRRAKAVPEASSAADIEDLAPSVPGAAAPGAAAPTALRAQLLRWYDAHRRDLPWRCVSGSEEERAYAVWVSEVMLQQTRVPVVVAYYERWMARWPTVRSLAAATQEEVNEMWAGLGYYRRARFLLEGAKQIIEKGLFPCTALALREVRGIGDYTAGAIASIAFNEVVPVVDGNVIRVISRLYTIADNPKESSTVKRFWDLVGQMVDPLRPGDFNQAMMELGATLCSKTKPGCSQCPVSSHCQALALSREKSSVQVTDFPRVVPKAKPRSDFAAVCVVQIAQGLEEEAADPKGNDHLFLLIKRPEEGLLAGLWEFPLVLVDQGKTDLLNRRKAMDKYLSKLLSIDMVRKPDVILREDVGEHVHIFSHIRLTMHVELMVINLKDGVDRLCKKGADSTKLKLVNESCVESMGLTSGIRKVYNMVRAFKEKSLAVSEIGHVPTRKRTRRLKR

SEQ ID NO: 68281 - protein, 249 aa, Zea mays
  Clone ID: UC-ZMFLB73263C05_FLI.pep
EAAFALGQMQDAEAIPALVAVLKDLSLHPIVRHEAAEALGAIGLEKSIPVLEESLTTDPAVEVQETCELALGRIEENKKVNGAESTTTSPFLSVDPALPSKHGLSVDQLRGLLLNEQESMYQRYAALFALRNDGGDAAVSAIVAALSVKSALLRHEVAYVLGQLQNKAASDALSTVLKDVCEHPMVRHEAAEALGSIADQESIALLEEFAKDPEPIVSQSCEVALSMLEYERSGKSFEFLFLQTPHVQS

SEQ ID NO: 68282 - protein, 367 aa, Zea mays
  Clone ID: UC-ZMFLB73253D09_FLI.pep
GSGISGTSVRLTAGAGLPVHMKGELNTAFIGLGDDGGYGGGWVPLAALKKVLRGILKYLGVLWLFAQLPELLKEILGSILKDNEGALLNLDQEQPALRFYVGGYVFAVSVHRVQLLLQVLSVKRFHHQQQQQQAQSNAQEELAAVEINEICDYFSRRVASEPYDASRVASFITLLTLPILVLREFLKLITWKKGLSPVHGDIATAQRARIELCLENHSGSASSDNTENSSLAKSNIHHDRAHSSVEFALTFVLDHALIPHMNVAGGAAWLPYCVSVKLRYSFGDNNHIAFLAMNGSHGGRACWLQFEEWERCKQKVSRAVETVNGSGVAGEVGQGRLRMVAEMIQKQLQLCLQQLRDDPLSAGSTAS

SEQ ID NO: 68283 - protein, 204 aa, Glycine max
  Clone ID: 700846408_FLI.pep
KMKNTIFFALFLVCAFTSYLPSATADTIFDINGDFVRNGGTYYILPVIRGDGGGIEFAATGNETCPLTVVQSPLEVSKGLPLIISSPFEILSIQEGLILNIGFTFVPPCALIPSEWTTVKGLPEGLAVKLTGYENKVPGWFKIERVSLEFNDYKLVFCATEDSTCVDIGVYIDGEGNRRLVVTENNDPLLVHFKKVEVESSATA

SEQ ID NO: 68284 - protein, 278 aa, Glycine max
  Clone ID: 700725239_FLI.pep
LEFNVCKLHIVLLFLSSSDSMSSITGIQGQPLEVTVVSCSKLKDTEWISRQDPYVCVEYGSTKFRTRTCTDGGKNPVFQEKFIFPLIEGLRELNVLVWNSNTLTFDDFIGSGKIQLHKVLSQGFDDSAWPLQTKTGRYAGEVKVILHYAIANQRHKLVSGHAPSAPPYVATATPPVPSSYSTSYPPPPSATSYPPPPSPPSATPYHTTGSYSYPPPPPPPTAYPPYSSHSSPYPPSSYPPQPSSYPPPPPPSSYPPASAYPYPPPAGYPSGIYPPPPY

SEQ ID NO: 68285 - protein, 293 aa, Zea mays
  Clone ID: UC-ZMFLB73303A10_FLI.pep
HKFFTVQKDYRLVRNCICGQIYDSSPVDFVSDVGTQFLQKPAVGNLSQSTILRSWMAKVLASGMDTLFPSRIEAQRAEYWHTLYSAAGLGPVLIFCSEDDNLAPCHIICGFARRLIELGTDVKLMKWSDSQHVGHYNSHEIEYRKAVDDTLKKALVTFCHRSQLYDSNMAGDQEYKIAHSVCSLHNAAANSNESLRRVANSPSDHFFLPSSKDHDESREPSSLIEDQRRHISHPPCMEPKGVLGQILFDVCVPNNVEGWDIKPTVSPNGRPTFASARQLGPFNPIRYFRRSRL

SEQ ID NO: 68286 - protein, 197 aa, Zea mays
  Clone ID: UC-ZMFLMO17025D05_FLI.pep
PASSSPCSVMAWTPDELPSARSSPAELLPSLPRVFLSLPWTPEFRYSPWLSDESLPSLLDIFELGSCVRAALLPWRVPAPGWISLLSSVTCLGTVFCTLAGFFASISRGNVLLLAPLVATRVVFLAGHQRVVEGRFFTIASPRPSPSMAGVPLSSIAAMLPRSCCSPWPTASNPCSMSPHFASSPSWFLEFVVMRCR

SEQ ID NO: 68287 - protein, 271 aa, Zea mays
  Clone ID: UC-ZMFLMO17082C08_FLI.pep
VSDYARDLEEMQMISKEDYLVSLRRKSSAFYRGLPKYRGLLRQLHNSRWDTSLGLGNDYMSLSCGKDIMLDGKFAGSFGLERKIDLTNYIRWWLPKKTRQSDTSKTEEIADEIRAIESSMQQTEPYKLPSLGFSSPSKPSSMGLSACSILSQSDAFKSFLEKSTKLSEECSLSKEIVEGKTVASVPATGYDTGAININMNELLVQRSTYSMAPVMPTPMKSTWSPADPSVDPLFWSNFVLPSSQPVTMATITTTTFAKNEVSSSDPFQSQE

SEQ ID NO: 68288 - protein, 553 aa, Zea mays
  Clone ID: UC-ZMFLMO17235A02_FLI.pep
FAFSGAVGSPRRLRMGNCCVTPKAADDAGGGKKPKEPKQKKGKKPNPFSIDYNRSGQASAPKLVVLRDPTGRDIAARYELGAELGRGEFGVTYLCTDRASGEALACKSISKKKLRTAVDLEDVRREVEIMRHLPKHPNVVTLRDTYEDDNAVHLVMELCEGGELFDRIVARGHYTERAAALVLRTIVEVVQMCHKHGVMHRDLKPENFLFANKKESAALKAIDFGLSVFFTPGERFSEIVGSPYYMAPEVLKRNYGPEVDVWSAGVILYILLCGVPPFWAETEQGVAQAIIRSVIDFKRDPWPRVSDNAKDLVREMLNPDPKRRLTAHQVLGHPWLQNIKKAPNVNLGETVKARLQQFSVMNKFKKHALRVIAEHLSVEEAADIKDMFEKMDLNKDQMLSFEELKLGLHKFGHQMPDADVQTLMEAADADGNGSLNYGEFVTLFVHLRKIGNDEHLHKAFAYFDRNQSGFIEIDELRESLADDLGQNREEIINAIIRDVDTDKDGKISYDEFATMMKAGTDWRKASRQYSRERFTSLSLKLQKDGSLQMTSTR

SEQ ID NO: 68289 - protein, 189 aa, Zea mays
  Clone ID: UC-ZMFLMO17238D06_FLI.pep
FASVLLFKRLACPCLALCAFVTATRLRFPILPCLILRFDFELGRFLLRLICSAAAGLPCSRRSPSGVPLSCDAGSGPVFGGGVIEFAVYFFPAIHLVIVCNSSSHRVDLVSSRLLSVWVAGLDPIWCGEFVMFAWTRRQVSILSDPTVHWLSLGHGFGGFRPNLPVGYHQKLSLGHGFEDFRLNRLPVR

SEQ ID NO: 68290 - protein, 846 aa, Zea mays
  Clone ID: UC-ZMFLMO17245G05_FLI.pep
LTLGAITLSQYGENLEGLLILRYLFGLPSDPSGSLESSGESPSEIELFMKTYEEKICQGIENSATAVGKTLLRKLLNSIKLLRSILENSGQSADTVQMVLEEGTDSLSEIARSVVMTAHLMPSLANVSVNDESPFLFSNMWKVIVDSEEPLDCQEGEFAKRLVWELPDSSLDRQLAPGQSARRKLALGESASRRVRDNQLPEPTGQFSRGLNTSNASSGHTRRDTFRQRKPNTSRPPSMHVDDYVARERNIDGASSASNIVNSTPRGTLSGRPPSIHVDEFMARQRERQNHAPAPTGDAPQAKSQTTSLDDSLRTKPENLRQPKTDLDDDQEIEIVFDEESGSDDKLPFPQPDDSLQSPPVIIGENSPGPVIDETENQENERVPFFQRATSIPKDDENLGIGISSQTAMLSEANSSLELKHSVSSPGKNSFRDHAEESNYDSIGVSGRPSLQADHQQLSRRHEKRSPRKFSETSLSNGFHGREHRHSNNHPPLPPMPPPISSVSMQNTDSVNRQSSSFSARDRPTPNPSGYPTQSFDSSMPSAFTGLQGQTQYMLAGAGSSSANELPNVEAKLLWNTFPANRIPLETFSSGLPARPMPPLTPYSAVATQHATMNSGSPANLYSQGSVVQPSPTASIISDSNLAMNSASGSMLASNLLPSFASQFLMSRPSMPTPFFGTPLQQVQFSSGLPQNISNPQPPVSIQPRPPPPPPPPQQPHPSQTLQQLGAIQLPHQDQQHSYPHSAILPQVTLQFPNQLPIPQVQLYHQSQQESGQTLRQVGEQSQLQNQGMQADSFSQQQQDSGINLNQFFSSPEAIQSLLSDREKLCQLLEQNPKLMQMLQDRIGQL

SEQ ID NO: 68291 - protein, 275 aa, Zea mays
  Clone ID: UC-ZMFLMO17266H05_FLI.pep
CPPPRAFLLPPRIPRTAPSPAPRTAPPARAPRTAPSHARPLPSPSPSPSTALPSVMAGSTDAYQSGTHYLSMEGEAPTICRWKVIDAVMVCGQHRRHPRPTSRSSRPPSPRESAVVVPDRLPRPLGHRPLVACPADGKAWRVGAAVWEVGRWLPRCRIAAATARARCSISARPSTMKASRRSVTIPRICRWRRAADGQHLRPPASTRVSTPRRQKTPAPPSPSLPSPALHDCKQRQKGCFRDMEPGRIPWRNSLQWKYRKRSSLMASFQLVESQR

SEQ ID NO: 68292 - protein, 240 aa, Zea mays
  Clone ID: UC-ZMFLB73208A07_FLI.pep
AQTEEISINDDEWNDGLLATIREKVHMEADRKAMSNQVIYCLDGARIGIQYETFFAGEPCEIFHCVLESKSFLEKMIMIEHTLPFFLPVRELESDLLSSNSIKFIDHLEEILQAYIDRREQVRLIKELYGNQIGELFHSLPYNMIEFVLEDFECKVTISIRYSDLLQTLPSQARVLAWPLRSAKKISTRSSSASAAQPVPFHLSYAEEALKTLCLPEAYADIVLELPHALKRILSSRDSD

SEQ ID NO: 68293 - protein, 301 aa, Zea mays
  Clone ID: UC-ZMFLB73319D05_FLI.pep
SSVPSDKKYRNEDNVSLGDQSDGAVMPSPTKKLQICKGPSDAPSIRKSTIRILGVKGAALPPTGKSQVETRKCFANATAEVISASTNEISEPDNAAAPLLAQQLPPDTAKNSTVIMHTHETSKVNQLAATWPRANFQTDYNKKPSNVPIMANQPSGFAGATAPLVTPKMEIGNMKDSSNPLSNPAYARALVIKQQEQLLQQYKLGSSPQRQHHGQHLYIKGPALFENDDPPPVKPLGTRCQLCKLDVAFRTQGDAGRDANAPPVIAVLACHHVFHSRCIESVYGLAEPAECLACLESGAAH

SEQ ID NO: 68294 - protein, 518 aa, Zea mays
  Clone ID: UC-ZMFLB73279G08_FLI.pep
KNGRLQLLFLNGNRLTGELPNVSMPSLTALNVSFNNLSGEIPKSFGGMPSTSFLGMPLCGKPLPPCRAPGSEASPSQPPTPTLRPEAPAPTDNRGRGRHHLAGGAIAGIVVGCAFGFLLIAAVLVLVCGALRREPRPTYRSRDAVAAELALHSKEAMSPNGYTPRVSDARPPPPPSVPPPPAVSAAAVGRKKLFFFGRIPRPYDLEDLLRASAEVLGKGTHGTTYKAAIESGPVMAVKRLKETSLPEREFRDKVAAIGGIDHPNVVPLQAYYFSKDEKLMVYEFVAMGSLSSMLHGNRGSGRSPLSWESRRRIALASARGLEYIHATGSMVTHGNIKSSNILLSRTVDARVADHGLAHLVNPAGAATTTRVAGYRAPEVVADPRRASQKADAYSFGVLLLELLTGKAPAHAVLHDEGVDLPRWARSVVKEEWTSEVFDTELLRHPGAEDEMVEMLRLAMDCTEPAPDQRPAMPEIVARIEGLGGTASTSTATARSGRSASVDEADDRPLRTTGSIRQS

SEQ ID NO: 68295 - protein, 64 aa, Zea mays
  Clone ID: UC-ZMFLB73305G02_FLI.pep
GLNDPIARGIGTASSAHGLGTAALSAKEPEALPFCAIAYGLTGIFGSLVCSVPVVRQSLVFIAG

SEQ ID NO: 68296 - protein, 177 aa, Glycine max
  Clone ID: 700893952_FLI.pep
IISSEFVKWLKKQNILTVGHLTAKSDVYSFGVVLLEMLSGKRAVDKNRPSGQHNLVEWAKPFMANKRKIFRVLDTRLQGQYSTDDAYKLATLALRCLSIESKFRPNMDQVVTTLEQLQLSNVNGGPRVRRRSADVNRGHQNPSSVNGSRVRRRSADDISRLETPNAYPRPSASPLYT

SEQ ID NO: 68297 - protein, 437 aa, Zea mays
  Clone ID: UC-ZMFLB73073A06_FLI.pep
PPSSSSLLLRQLDWEATAVMAPPRWKSGDGRRRLLLLLCCCLLAFPCHAQVLTNNNISHRSDQGGIHSFVGTYGINYGRIADNLPPPEVVVRLLKLARIRNVKIYDAEHKVLDAFRGTGLNLVVAIPNEFLKDMAANPAKAMDWLTENVQPYYPSTRIVGITVGNEVLGGQDAGLAQALVGAVLNVHDALKMLRLDAKIELSTPHSEAVFANSYPPSACVFRNDLMVYLRPLLDFFSKTGAPFYVNAYPFLAYMSDPSHIDINYALFKPNAGIVDPKTGLHYNNMFDAQVDAAYFALEAAGYSGMEVRVAETGWASAGDATEAGANMENAITYDRNLRKRLFLRKGTPYRPDRVAKAYIFALFNEDLKPGPTSERHYGLFKPDGSVSINIGLKGLLPSSAPPRPLVAFKRAGAWGWILQYSAALLPCTLFSLALLGI

SEQ ID NO: 68298 - protein, 688 aa, Zea mays
  Clone ID: UC-ZMFLMO17064D10_FLI.pep
AAASSVPSSRSQRQIQTSQPSSPNRKSANRCRQPAGEECEDEGDSELYEQLRAEAFHRTWSKIQSTIDEVLRAINLKLFDQVLQWAKESFASAHAITKKHHTEVQQPYPLLTDVICRRIPTVFVLTKNAEFVDDITTFHDLAGHMKSNGCHIVKLSAAELSAKHGVGGCFRSLLGQLLSDVPDVADVSALASWYCEAENFDQPIIVIIDDLEQCSGDVLGEFVMMLSEWVFKIPVFFVMGIATTLDAPKKLLSSEALQRLEPCKLTLGSPSDRLNALVEAVLVKPCAGFCISHEVALFVRNYFFRHDGTITSFITALKLACSKHFSMEPLSFLCLGMVEEDSEEFWHDKLESLPQTIWKHAFDLPSNKNARNSCNMVEGLSRLLKSQKDWSSVLLCLYEAGRHDKVQLLDIFCEAASPDWQTENAPDSYLFASKVALLGVKSGSARRFIAQVMNTIRYLPTEILLHVLEVWSIHLKGMSEINDRVKELRSKGCGADSVRAKRKSTANTGNGVVLINEEAAALLQDVIRKYLVPAECLPFHEIVCFKNVDILRSALIGNPRRMIQLDLLRSQSHLKCSCCSRSGAAVSGSLHDTSILCSLAQEYGDMINLHDWYTAFEGIIKSTNSKAKGKSCSSPSKKKKKSNPTPLEGDGMIQARFCSAVTEMQVTGLVRMPSKRRPDLVQRIAFGP

SEQ ID NO: 68299 - protein, 410 aa, Zea mays
  Clone ID: UC-ZMFLB73291A01_FLI.pep
NRCQIAVHQECYGACAVQDLTTWLCRACESPQQKRECCLCPVKGGALKPTDIDGLWVHVTCAWFQPKVSFPVDETMEPAMGIMSIPVEYFKKTCVICKQMHGACTQCYKCSTYYHAICASRAGYCMELQCSERSGRHITKMVSYCDFHSTPDPDNVLIVKTPEGVFSTKFFLQNGEKQTAARLVRKENHQEKVLPPIISDCLVAKCLTYEMSKYKKQPGEAIAHRIMGPRHHSQDFIDGLNACMDRKDDQSFSTFKERLRYLQKTENLRVSCGRSGIHGWGLFAARNIQEGQMVIEYRGEQVRRCVADLREAQYHREKKDCYLFKISEDVVIDATDKGNIARLINHSCMPNCYARIMTVSDDRSEIILIAKRDVSAGEELTYDYLFDPDESEDCRVPCLCKAPNCRGYMN

SEQ ID NO: 68300 - protein, 350 aa, Zea mays
  Clone ID: UC-ZMFLMO17341B08_FLI.pep
RMPPCAAGKRSSIYRGVTRHRWTGRYEAHLWDKSTWNQNQNKKGKQVYLGAYDDEEAAARAYDLAALKYWGAGTQINFPVSDYARDLEEMQMISKEDYLVSLRRKSSAFYRGLPKYRGLLRQLHNSRWDTSLGLGNDYMSLSCGKDIMLDGKFAGSFGLERKIDLTNYIRWWLPKKTRQSDTSKTEEIADEIRAIESSMQQTEPYKLPSLGFSSPSKPSSMGLSACSILSQSDAFKSFLEKSTKLSEECSLSKEIVEGKTVASVPATGYDTGAININMNELLVQRSTYSMAPVMPTPMKSTWSPADPSVDPLFWSNFVLPSSQPVTMATITTTTFAKNEVSSSDPFQSQE

SEQ ID NO: 68301 - protein, 236 aa, Zea mays
  Clone ID: UC-ZMFLMO17332E03_FLI.pep
NPQTLRPNLCATGVTTAGAAAMNAFRFLGDMTHLFSVLVLLLKIYATKSCSGVSRKTQELYMLVFVARYLDLFTDYVSLYNSVMKVVFITSSAAIVWCMRRHPQVRRTYDKEQDTFRHTVLVAAAFLLALIFHERFTFREICWAFSIYLEAVAILPQLVLLQRSRNVDNLTGQYVFFLGAYRAFYILNWIYRYFTEGHRSRWIPWLAGLVQTALYADFFYYYFLSWKNNVKLELPA

SEQ ID NO: 68302 - protein, 515 aa, Zea mays
  Clone ID: UC-ZMFLB73043G03_FLI.pep
FGEPAVIRFWRALRAGMGLQQSKEELLYQQVNYGNVDGIRTLRGQGAGLEWIDKEGKTPLMLACMRPDLFDVAKVLIELGANVNAYRPGSHCGTALHHAAKKGLQQTVHLLLSHGEKGHVNVVRAIEGRLCLFCGWMRENYAPAFLDAIAPQFMTRKIWAVVLPREVRTPTRPLKLEIAIYPELQASKPRSVLKLWKCQIEQPKLNQADPSIIIFDKGTKTRYKILPAYEGDKQQLQWFYNACCGMAQVLNTAPVAPANLPMPNPAPAISSVAPSEQSAPSKEDVELAMAINASIQSAIAEGVSVPNVQPNASTPNNNGWAAPPSNSHNGWGPPATPAPSKTSGQSQVRVDAPSSSTYNGWDVPGTSSSQSSSKPHQTQTNPPVLIPQEALQALPTPTAPPFAEETFYNGPVHYPSIDSTPVDVTMPATTGGGSTTVIATAAPTEQLENEADASDSGKTPSGTCVICLDAPVEGACIPCGHMAGCMSCLKDIESKKWGCPICRATINQVVRLYAV

SEQ ID NO: 68303 - protein, 452 aa, Zea mays; identical to SEQ ID NO: 47541
  Clone ID: UC-ZMROB73078D04_FLI.pep

SEQ ID NO: 68304 - protein, 108 aa, Zea mays
  Clone ID: UC-ZMFLMO17333F05_FLI.pep
LYIGLSALLVCTLLFYKIIISWCLCRTVGKLCNAPSTFVVHNHIRFMYSLGQTMQFVFPIVSFSSLFFLQICWCCFCRCMFEGSEWSSRHCRVLFCAINCDRVAILCL

SEQ ID NO: 68305 - protein, 215 aa, Zea mays
  Clone ID: UC-ZMFLB73301C06_FLI.pep
PLPCCGGGGYPGYGAGGYGAGAAGYGYGANPAVGYGNYGAGGYGGVPAAYGGHYGNPGAAGSGYQGGHPGSNRGPWGSQAPSAYGTGGYGGSAGYSAWNNSSGGGNALNSQAPGGPAGYGSQGYGYGGYGGDPSYASHGGYGAYGARIDSAGNPATGGSSGYNAGYGSGGANSGYSSAWSDPSQGGGFGGSVNGGAEGQSTYGTGYGSVQPRVAQ

SEQ ID NO: 68306 - protein, 313 aa, Zea mays
  Clone ID: UC-ZMFLMO17287G04_FLI.pep
LLLPQIIARNFSLLRRFSFIVFPHFALTVHSNKDIDESSAERLYDAVKYTTANMMLIQVPVLGTTKEFWRLSDKATRISRKLALILRSHHSVGKYLAAPLQVSNIWIGNNGSVKLRGVGFTGKGFSTERVRDDYKRMSRILMALITLSGGDRSKLPPDYKEFLLLLESDTLTMEDEFLIVNNAALLPIKNRTEVFLMLHDRIVDYLGCADKTKKKKKKRILSSLPYKEDWLDTAKANTKINQWVANVQNEYRATPHDLLRLNRNVRSHMHRYSDGDDIEEVLYCEWPELLMVMQKMLHLEGELEGTDIQNKFG

SEQ ID NO: 68307 - protein, 164 aa, Zea mays
  Clone ID: LIB148-028-G3_FLI.pep
HNPTMCTTPQCAGGSGSHLISLLLVLLLLFRRRVLVLLVLGHQVVHVALGLSELHLVHALPGVPVQEGLAPEHGRELLTDAPEHLLDRGGVADERGRHRQARGGDVAHARLHVVRNPLHEVGRVLVLHVQHLLVHLLGAHLPAEHGRRRQVAPVPRVGRAHHVL

SEQ ID NO: 68308 - protein, 100 aa, Zea mays
  Clone ID: LIB189-011-B10_FLI.pep
FMSEQLLRRPPLRRARQIKPRVVDLRSSCSAIGLVSVELLFTVTPSSFNTAPLRCRYSVASLRCQFLHDISYLCSRRQKDPKRMWKNKPQVDASNTRRKA

SEQ ID NO: 68309 - protein, 382 aa, Zea mays
  Clone ID: LIB189-002-D7_FLI.pep
KEAAQRKDSSENQGQNDALELDNLRMEMQADERPLEPGNKRDRKWQKNVYGLGSASGQKETLSRRENPRSDRGMVHSNDSKTIYYRKGGTEVDNVDDHPLEKQDHQDTSSDGSKKRSRPVDNASGGNRPYLDENKKRNLREDGRYAHYEDWRSERNTAADTSGYKAQSEEKPVWTNTRTGSREHSLDRQRIECGDSYRGTYNNRQRHEWLHPHASGNSSRIGWDDRRQWSSSRSPFPSAEFGGDRSCSRAHPRGSKYRTGGRHDHPQYLGLGTPQHGTSRPHHTMGWDRDTFHDHQHGRRPPHHTMGWDRAPFRDHQHGEYDDSRYGEYDATDNGPDSAHRPYTAAGVAGRSAPSYQLAGGYGEGSRAWRPVTDKYAPWPLP

SEQ ID NO: 68310 - protein, 350 aa, Zea mays
  Clone ID: LIB148-022-G2_FLI.pep
SHSDPVDSGLIIVIKMIIHLLCFPGPAAGAPPSPSSSASVRVPVGLPHDRRAKSRLVPPFRCASSGMELGATTALYPLHRCKTIYLVRHAQGIHNVAGEKDFGAYMSHELFDAQLTPLGWNQVDGLREHVKKSGLAEKIELVITSPLLRTMQTAVGVFGGEKYTDGVNAPPLMVENAGHSGRPAVSSLNCPPFIAVETCREHLGVHPCDKRRSITEYRPLFPAIDFSLIENDGDVLWEPDVRETNEAVALRGMKFMDWLWTREEKEIAIVSHSGFLFHTLSMYSKECHPTIRDEVSKHFANCELRSMVLVDRSMLGSYSSRFNYAGKNPTGLDVPSDIADKKQVDEAQKN

SEQ ID NO: 68311 - protein, 164 aa, Zea mays
  Clone ID: LIB148-023-D3_FLI.pep
SADQLRALAIIPLPFLQCAAPARPRAGLRVHEELEPAVLLAGLQQLLRRQAHLPQHEASTLAVRPQAEPRPPALADHGDRRRECPPAPRPPQHDHVVLVVVVAAAAAAAGVVGLLLLLPARRQRGRPCAANGRSGGDGVVRHVAVAARRRRRSRSSLRWSRNRG

SEQ ID NO: 68312 - protein, 364 aa, Zea mays
  Clone ID: LIB148-042-A4_FLI.pep
KGDTLYTGSDSKNIRVWRKQKDSGGFKSSSGLVKAIVMSGERIFTGHQDGKIRVWKVSAKNGMHKRVGSLPRLRDFLRGSLNPSNYVEVRKNRSALWIRHSDAVSCLSPTDPAQGLLYSGSWDRTFKVWRISDSKCLESVVAHDDNVNSVVAAFDGLVFTGSADGTVKVWRREQQGKGTKHTAVQTLLKQEHAVNALAVSAVAPVLYCGSSDGLVNFWEGDRHLVHGGVMRGHKKAVFCLAAAGALLLSGSADNTIFVWRRDCGVHSCLSVLTGHTEPIRCIAVVEDNGENSSESNAGDSAAGGGSSASRWIVYTGSLDKSIKVWRVTDEAPDPLFHGSGDAPQIFDRYPGDAFGTSGSTTSFR

SEQ ID NO: 68313 - protein, 221 aa, Zea mays
  Clone ID: LIB143-011-D8_FLI.pep
SFPFKVNHFLNAFICCSCSSINIFRQVRTAYTNLLHYDNVSLVPLNRKRLGQRIKYTLSFWGDTNTNSLSFNLCLPECSILPGINGVEVQHAAGRIERVVTLTDHRELPDVVRFEDPHVPPLPPLRPTHALLDNEEVGGAVEGDDLALELLPQGGLRGDHHADRELLAASLHAAAVRCSMGAGGGGEEMELRGGWGDLQPAVEPVGLPLTTRVRSSPRLVH

SEQ ID NO: 68314 - protein, 107 aa, Zea mays subsp. mexicana
  Clone ID: UC-ZMROTEOSINTE013E07_FLI.pep
NQYLHLKRILGMEGTNRRHACTSTIILQVNIRLEKKEQEALEGGGSQLFEQTYQLIVPTHCSESVTRMFHAYAVKKLPNMHKLIVSNIAPAHYAAYPFWGSIIARAY

SEQ ID NO: 68315 - protein, 113 aa, Zea mays subsp. mexicana
  Clone ID: UC-ZMROTEOSINTE022D04_FLI.pep
VTQCSTNHYDTITPIIGFRQSDKKNLFSEALPGKKHNSLCMLSSLFACFHQFVHLLGAVHVADQVDHSGAVSPLVVVPGHKLHKVAVQGNASLRIKDARPAVTLEIGGNKVLF

SEQ ID NO: 68316 - protein, 101 aa, Zea mays subsp. mexicana
  Clone ID: UC-ZMROTEOSINTE023H04_FLI.pep
GGEEEEDREVPVQARRGGEAAAHRGRRRRARPLQNHEGEDGVQVGVLLNSTISDQMPTPCTHARGPVSSIGRYIVPPSRTFVLKLICSFSTVSFLLCTREL

SEQ ID NO: 68317 - protein, 113 aa, Zea mays
  Clone ID: UC-ZMFLB73221H12_FLI.pep
ARSRVAHSCSPLPPAQLALRCCSRSSSRSITGGRLASAIPAGGLLRRIISLSLSLTQGRCRAGGPARRRSRRRRSTSLSRGCRRCSPARAAVAAARYEYTIQRMRIQTKMCMI

SEQ ID NO: 68318 - protein, 371 aa, Zea mays
  Clone ID: UC-ZMFLB73144B09_FLI.pep
FLIDSIPIAEFQGRPLADHPGVKNGRPPGALTVPRDLLDASTVAEAVSVISCWYEDKTEWGHRVGWIYGSVTEDVVTGYRMHNRGWKSVYCVTKRDAFRGTAPINLTDRLHQVLRWATGSVEIFFSRNNALLASRRMKFLQRIAYLNVGIYPFTSIFLIVYCFLPALSLFSGQFIVKTLNVTFLTYLLVITLTLCLLAVLEIKWSGISLEEWWRNEQFWLIGGTSAHLAAVLQGLLKVVAGIEISFTLTSKSGGDDVDDEFADLYIVKWTSLMIPPIVIMMVNLIGIAVGFSRTIYSEIPQWSKLLGGVFFSFWVLAHLYPFAKGLMGRRGRTPTIVFVWAGLLSITISLLWVAINPPSQNQQIGGSFTFP

SEQ ID NO: 68319 - protein, 157 aa, Zea mays
  Clone ID: UC-ZMFLB73151F07_FLI.pep
NGDKNLSRFNKLLKLCTLTILHIGNRLRHPTRSSPSNRTKPPQCSWTRARYRRLQLSSSVTGLLGVDYAFLGVGTDGNRSLQRRSRRNAAMRSLELLVDEGGADVSWWTQAWRSSATTGELGGDARPSSSPTAPPHRLQIHRAPTFDSCWLFNLPGW

SEQ ID NO: 68320 - protein, 444 aa, Zea mays
  Clone ID: UC-ZMFLB73160F01_FLI.pep
RALQLGKFLSVIRWLPSGSKGVVVDIAAEGLSHRVVLLDGVDVQALELDHRLHVALEGVELPQPRDLSSSLGLLGDLGQLAVAALVVEQRVGGSLRRLEPVQRPLRGGPLRLPLFPPVVLLGGEGGLVLEEVVPCPAAEHEADEELEQVQGEVEDDAVEPDHTCPAPADTLDPGEAPVGVDSEEGGNKLSEQERGDQEQTRALHEGPATGTGDEDQSLAHDTDLEVQGGHHLMLAVPDRPHTEFVREEVGLVHSPEENDSHQSKVASKHDARSKDLLQLPTVGQRRWLNSVLRDGHDSTVIENGNDKNHEGREIVLPDQRNEHKSEHYTDCDGNCIDGVVLHPLEDASAGEDGADNDAKTWLSKDNIGSTPRSVSSIRNSNTDVSLLKSRGIVDTISSHTNDVLLLLQSLHDLVLVFREDSGKTIGLLNELIYRKRFKRSILVL

SEQ ID NO: 68321 - protein, 213 aa, Zea mays
  Clone ID: UC-ZMFLB73146H06_FLI.pep
RSSHTNSDPSHTQAAGNTKTERMAVRRSRRGLGGLGLGRARSPGLLRRRVTGLGVRGAGLDEVEEAAAHLLGVELQRLDPLLHGGGGGASRGGRGVEGLGLDGARRGLGVGGRHRTVALAEDGVSRERLHEAPHHRVPRALRRRPDAEREGRGVVSPGRGGGDGVGELVGGHFRKLPEEPDGNPRVGAGWGGGGGEVTELLYPFGGCGDFKAV

SEQ ID NO: 68322 - protein, 392 aa, Zea mays
  Clone ID: UC-ZMFLMO17016C07_FLI.pep
LAGRLRRRLAVRDWAFVAHRLPYRFPDLADLDLFPASIAAPTTAAPHGTAASPLLTCGAVSLTLDTSADPPLGACRFIDDDALDRGLAAVAASFPNLSRLSATAASESGGLMAIAVGCPTLQELELHRCTDLALRPVSAFAHLQILRIVAASPALYGTAEGGGVTDIGLTILAHGCKRLVKLELQGCEGSYDGIAAVGRCCAMLEELTIADHRMDGGWLAALAFCGNLKTLRLQSCSRIDDDPGPAEHLGACLTLESLQLHRCQLRDRSALHALFLVCEGAREIQFQNCWGLEDDMFALAGLCRRVKILLLEGCSLLTTRGLESVITSWGDLQSLEVVTCNKIKDEEITPTLAELFSNLKELKWRPDNKSLLAASLVGTGMGKKGRVFFKRV

SEQ ID NO: 68323 - protein, 173 aa, Zea mays
  Clone ID: UC-ZMFLB73011H03_FLI.pep
IPFLRYFYSLQCRSPSFVMDDDRSMEVVVVGPRPERRRLVDATQEVAEAAGGLRGLDGDGAAVTVLLQLRGGGVQELVHTHAGGNTMSAADGRVERDQAAAGGVVRRRRRRMVHGALGRRRRARDVEVDLGAVLAAVAAGRLRLLVQVDQLRRPPCCLPALQCQYLHASEAID

SEQ ID NO: 68324 - protein, 163 aa, Zea mays
  Clone ID: UC-ZMROB73058D05_FLI.pep
PPPSPAPAPALHLSMGQIESQVTPPAEEPSPPTVEPSPSSPAPPPSSLEAIAAEAMSFDEDDTEESIDVKVQKALDCPCVADLKNGPCGGQFVDAFSCFLRSREEEKGSDCVKPFITLQDCIKANPEAFSKEILEEEENDEEADKSNLKVRAPSWSRESKPKV

SEQ ID NO: 68325 - protein, 321 aa, Glycine max
  Clone ID: 700763959_FLI.pep
SSPLRCSGGLGLDLNQVDEASDVGNCLSSNHKIDVPIMQVKPSLGGPPNREVNVHRDFDLNNGPSVDEVTTESSLFSLHARSSVPSQPLVSGLRVSTAEPVNFSWLPSSGNTYSAVTISSIMPDRGDHPFSIVAPNGPQRLLTPAAGGNPFGPDIYRGPVLSSSPAVSYASAPFEYPVFPFNSSFPLPSASFSSGSTTYVYPTSGNQLCFPAVNSQLMGPAGAVSSHYPRPFVVGLAEGSNSGSAETSRKWARQGLDLNAGPGGSDVDGRDGNSPLPSRQLSVASSQALAEEQVRVQLAGSVRKRKEPDGGWDGHNQSSWQ

SEQ ID NO: 68326 - protein, 361 aa, Glycine max
  Clone ID: 700740544_FLI.pep
ENKSETEKSIPVTKKDGENPTPAKAEVPDNEFEKRIRPEVIPANEIGVTFADIGALDEIKESLQELVMLPLRRPDLFKGGLLKPCRGILLFGPPGTGKTMLAKAIANEAGASFINVSMSTITSKWFGEDEKNVRALFTLAAKVAPTIIFVDEVDSMLGQRTRVGEHEAMRKIKNEFMTHWDGLLTGPNEQILVLAATNRPFDLDEAIIRRFERRILVGLPSVENREMILKTLLAKEKHENLDFKELATMTEGYTGSDLKNLCITAAYRPVRELIQQERLKDMEKKKREAEGQSSEDASNNKDKEEQEITLRPLNMEDMRQAKSQVAASFASEGSVMNELKQWNDLYGEGGSRKKQQLTYFL

SEQ ID NO: 68327 - protein, 218 aa, Glycine max
  Clone ID: 700749669_FLI.pep
AFYGVVQDGPGATLATVAEYMVDGSLRNVLLRKDRYLDRRKRLIIAMDAAFGMEYLHSKNIVHFDLKCDNLLVNLKDPMRPICKVGDFGLSKIKRNTLVSGGVRGTLPWMAPELLNGSSNKVSEKVDVFSFGIVLWEILTGDEPYANMHYGAIIGGIVNNTLRPTIPSYCDLDWKTLMEQCWAPNPAVRPSFTEIARRLRVMSAAASQIKGQGHKASK

SEQ ID NO: 68328 - protein, 224 aa, Zea mays
  Clone ID: UC-ZMFLB73193F08_FLI.pep
PPHSISFPIPHLLRFPPNRILIAPSMATLTMQPIGPTPAPAAQQDPSKGENPPTVDGTDLGDIDSGWVILKNSDVVSADLAAAAVCGGQRLGSSTIPSWARWVLGGVVYTLVPFYNRVRHLEDETVGFVENAVEVVEHLAEVTEKLAANVAKQLPEDGSLQKAVEEVEHIAEVVDDDAEKVEAVTEKIDKVSDEIDAAVEPVIAELEKELDQSTTSDDGVDTKN

SEQ ID NO: 68329 - protein, 141 aa, Zea mays
  Clone ID: UC-ZMFLMO17159B11_FLI.pep
VFIGSSLSLLRDLVEWMGWTSTPVAWSSRKLHFMNFVSPSQLPTTPLLRFVMVIGVAVILDQLVLVVVLRAEDPEFHGRLVRVLEVVVEHEASSLVDVVCLDLLVLPSLVAVVPPVVVVPIFQRQMPLTVKRTMTTIALHR

SEQ ID NO: 68330 - protein, 241 aa, Zea mays; identical to SEQ ID NO: 64702
  Clone ID: UC-ZMFLB73157D09_FLI.pep

SEQ ID NO: 68331 - protein, 101 aa, Zea mays
  Clone ID: UC-ZMFLB73189C09_FLI.pep
TRIGWYGTMQPNGQRNAAVWPKLDSPPACPIMASSGHSTSYQIWGAIFGTQASHRIKHSPFAFAPVAGRCGAAVPPSSEEHPVRAARRRRAGGRRGAHGRR

SEQ ID NO: 68332 - protein, 271 aa, Zea mays
  Clone ID: UC-ZMFLMO17277E04_FLI.pep
APHQGLLTSYFPCFHQIDTEITDILIEWGMPSTMRAIHPIYFAKCLTKAIHNNNGEKMDSPSNGLSIVGYLRPAFIEEESYLRSMFHGDNGGYSSDWKVNETDEYNRDTRPVSGTSRLIDDDKSRFDFNHAETRTDSMIYKLEIMTIELFSMYGKQFKIDPQDFQDSEPDILANSASSIIERIKENSDQCAAALRSLCRRKKGLTVEEASLIGVDSLGIDVRAFSGLEAKTVRFSFNAQALSERSAEKKIRRMLFPRYQRKNVKASTEDES

SEQ ID NO: 68333 - protein, 224 aa, Zea mays
  Clone ID: UC-ZMFLMO17283C09_FLI.pep
AFTPIHPASHGRQGLRQPRRGRPAAVVPAPASDPPSPGPDRGRDRADHLPGGPPHAPALLPTGRVAPAARPLQLHLPVLVPPLHDAAGDAGLAQPERARGGVLRPAGRVRVVQVPAGDGGRGAAARVPGPRRRGRVVARAVGPRRPLRALPRRRAPPGLPGGLPRPPGQGRRPRAVEGRQLDLRPLPPLRHLPRVPRHRRRQRRPRRFRVQVPDHHVLPRRGLN

SEQ ID NO: 68334 - protein, 302 aa, Zea mays
  Clone ID: UC-ZMFLMO17288F09_FLI.pep
ARSRRGRRHQTSRWWSDPIRSGWLDGRGHTSRGTVAGDVAGLAAVVAGAVASTPAAAEPPSATAATAWAVPGHVAGLAAVVAAATTTAAATAVAAAAAGAVPGHVARLAALEAATASSSSSVAAAPVAASAIAASAVGARAVPCHVAGLAALVARAGTAPAAGSPAAAPATTVAATAAARSATAAGAVAAAASSSASAAPDEGSVGAGHVDGLSAAVVTLRDGKLHLLALRERAEALRLDRRLVHEEIFAAVLGGDEPEALGVVEPLHRPPLSRRRRHRNPRTLALRMLGLDFFFSLPCPSL

SEQ ID NO: 68335 - protein, 326 aa, Zea mays
  Clone ID: UC-ZMFLMO17290G05_FLI.pep
TGWLTVKTVCISEARDETRVTVGEKEEKEKASSGTATRQQWSDQASASRARTSSLSHFSLALGEVVLLAAVSALAAGAAAGPLARVRRRVLQNLAERVVLVLERGHPLLQLRIAELQALGLRLQLRQVRLLPLPRLLRGHAVPQQPLQPVLLLVPRGAPALLPARRRLRPRRHLPLLAVLPLGTLIRAGARRGRRRRAAHLRHPPYLLVALRPSFREVVASGAGGALAAGGQRARGARLRLLLLLLLLLRSHLPPPVLPSPLRQQIRISSLQPPLLLGLRLLPEKKKIKSLRTPRTGGRQTRGEKSRCRSDERERTREGRREKESV

SEQ ID NO: 68336 - protein, 213 aa, Zea mays
  Clone ID: UC-ZMROB73050F12_FLI.pep
IGRLISPSSGCSGTSSPFPDPEMQASSRSALRLFPVREPPKILDGEGVATQKLIPRHMRNGGSLLDGQISAAVPVVDFSARLQPNEHAMDHRVSFELTVEDVARCLEKKTAISGDSGTASFHLAPTGSGDHHRESNEARAGLYVDESYHDLPEKARRSLSLRLAKEFNFNNVDVGSVEPSVGSDWWANEKVAGMTTEPKKNWSFHPVVQPGVS

SEQ ID NO: 68337 - protein, 477 aa, Zea mays
  Clone ID: UC-ZMROB73052A10_FLI.pep
APCIVNVCIAATHPCPSSPTNESYLVHELLEGVHRGGWQAEQHVDALPLLPVRQEQDDFLLRQRDRARHDGLAPPEVGAVELEARPGGDEQRGRERRPGPRRLEVVHRRAHVVVGDHPHGVLHQPRRARHGRGQQLAGRGKGVGEHDAVAEVAPRERRREPAPPVHGEQQLGALLGRQPQRPGARAPHQPRQRLEGGAAAQGAVGERKPAHALQPVRVEAEGAVQQLLRAVERRRVGDVGDLGELVVGEGGHGRVARLQDASVQERRHGELGDAARRLRPRVDELHGADAVEHAVVHGQAEREAPTLEPRHLRGHGGHLEDVLSAGDGVDELAERGGVGLGEVADGVEVAGGVGLHEHGALAGQLHGELHLRADAQPPRQRVVVHQHARQRVAERACHVHVLLAFAAAGRGRLVAVHRLHDHRDVLVQVGQVVLPARRRRLRRRHQRRLAALHAQLRRLLARRQRRSAVLLHLDNHG

SEQ ID NO: 68338 - protein, 242 aa, Zea mays
  Clone ID: UC-ZMROB73053B03_FLI.pep
CLRSPDGRSTQPDSSWLSYLQAANAIWTYAYTLPAYQYNAHVTPSSPSPPSRRRPPTWRATAPTASGAAWTRRSYRAWRETWPPRGGAWRAAASRPRSRRTPRGAARCARPARRRSTRGTRTARRRGGPWRPRPGGTPPWAACSRPRRSRRARGSGAPWSERRARAGLATRGTRSAAAACPPRRRTAGRRGGAGRARRARAGSRAWAAAAPPRGTRAGAGAAGARAGAPPPGRPPPPSGTGA

SEQ ID NO: 68339 - protein, 323 aa, Zea mays
  Clone ID: UC-ZMROB73053D06_FLI.pep
SAMSSSTSDAARDDVVSSPDLPPLSAHVAAAAAAAAAAASSGGGIGLGGGGSGRRLPPPCWTHEETLALIEAYRDRWEALRKGNLRAADWDDVANAVTARCGRFPTATHKSGVQCRHKIEKLRKRYRAERSRSAGRSKGPKWPFFPLLHDLAGGGVPDPSPNAIVKIKTKGPAPPASPPSPVSSPSSSEEAVRSRSLHGLISNGGAGSGLRFTIPKACRTKPAAAAAVKPERSGGEDDAESEAMAEVAAALRSVGEGFLRMEERRLELSLQMEKERMESEMKRTQTMLDAQQLFLEAFLGKQQQQQQHKKARVSPSSAAMEED

SEQ ID NO: 68340 - protein, 228 aa, Zea mays
  Clone ID: UC-ZMROB73055F12_FLI.pep
AEWQTPSYYLAPEAFFPLDLPSHPHVRPRCRSGGLGGEGEARGANVGAPGAGGRSGGAGGRGRRLDLRRGAQAQRPGVLLLAAAPLHGLLPGGGRRAAPDLAAARGRRRRVRQGARRLRRLVPPGAPRPGRGGRGGSAGAGDLTECRRRSRRGGRRQPSCAMAMAMAMAGLRCRGDHFQWHGWGQPLCGRVQAGARPWLCSLGLLHSIVSLCSGVRYRGWITIMNHVV

SEQ ID NO: 68341 - protein, 464 aa, Zea mays
  Clone ID: UC-ZMROB73056F10_FLI.pep
KGDWLCPKCDFMNFAKNTVCLQCDAKRPKRQLLPGEWECPRCNFLNYRRNMSCFHCEHDRPSDEYANRQMEAKQSALRNRLERPPRKSDISSAWNFDFEDNESDGADVAAFEYADSSKVRRESSSAGSMSYRGVSKGSDDEEYRMAETMTTGRGNKFSERDSLPSSRDGFNDFDDEDDDIDSYELDLSKGSHTGGVSRMSYSDLESASDSEGFSEIDNSRESRYGNSKESRYDNGRESRNDNNRESKYAAKVEDEFEDHHSLRSTHLADSWQKTRGRSGSNDYRRASFGSESDDEINSYPDEDIDKGPRNNGSRSQGSTNRASVRHNALAYSDDEPFSDDVDSGMADRFGPRQTKSSTNIKDNFRDTRRNLNGRRSSGDRYGRTERNERDRYGRTEQRNERDRYGRTERNERFNNFDMHRGGSVLDKGRGARGNQLDSGSRGLQRNARRNWDRSGGFDGRHKGV

SEQ ID NO: 68342 - protein, 328 aa, Zea mays
  Clone ID: UC-ZMROB73056G11_FLI.pep
HSHLMATTETMEMGMGVVVDGVSSNGSGGCGGLVVTELSHIKELVRQLEVHLGGSPDLCKHLASQIFSLTERSIGLITSSSSSSGLDGARRKRSAGDAGLASPLSATPTSGVTDGPFKNTKKRKAMEQRRQRVSSAGGENPVDDGRSWRKYGQKEILGAKHPRGYYRCSHRYSQGCQATKQVQRTDEDPTLYDVIYHGEHTCAPHRPAAAEHNPDARGHLQTLSAGLTVKTEGLPDPPRGRGAATPLYLSASSTPPSTSENWGVSPATSGSTHVASFRPFEAAEWRGQAEHQEVVSALVAAIAPPPAVDSLDDLLIDIDLDDIASFFA

SEQ ID NO: 68343 - protein, 320 aa, Zea mays
  Clone ID: UC-ZMROB73059C05_FLI.pep
LQSVGRAAAMEGKEEGRIFVGGLSWQTDERKLQDAFGRFGKVVDVQIMLERHTYRHRGFGFVTFEDRRAVDSAIKEMRGQELDGRTISVNKAEPKMNTDDTRFDSGGGRGEYRGGRGDGPPPGNCYECGRPGHWVRDCPSAAGGRSGRFPSKFSGGGRGDRFSGSDRFNDRYMDDRYDGGRYGYRDQVDARDKYGGGRDRYANDRYPAGGDHFDGDRYGGGLDRYAPNGYGRERERSYERDGVRGGGGYDRSGSRGGGSYDRDGPRGGKGGGYVRDGPRGGVADRYGGGGPARYDGGSYRERPGPYDRPSRGGGRFDERH

SEQ ID NO: 68344 - protein, 320 aa, Zea mays
  Clone ID: UC-ZMROB73062A12_FLI.pep
DGGRLGLGDESSAFVPHSNPNLRDLRLLALGGIHSAALTTSGDVFTWGYGGFGALGHHVYHRELLPRQVNGPWEGKITHISTSGAHTAAITDSGELYTWGRDEGDGRLGLGSGGGPGEAGSLSVPSKVNALPVPVAAVACGGFFTMALTSDGQLWSWGANSNFELGRGSNFSDWRPQLVPSLKSTRVIQVACGGYHSLALTDEGKVLSWGHGGHGQLGHPTLQNHRVPLAIKALSDERIVHIACGGSTSAAISEKGDLYMWGNARDCQLGIPGLPEVQPLPVKVIFLRDDDEGLGPSRVISVAIGASHAMCLVSTQQTEK

SEQ ID NO: 68345 - protein, 167 aa, Zea mays
  Clone ID: UC-ZMROB73064C12_FLI.pep
QRHPISVCTAILGSTCLRSATRTSTAALPISSTASGARRCPGDRPSRKSNVQKRKVSRLFQSTSMHPKPVPQKEPLSAALSALTLVVQFNGWLSFFLLLYYKLPLRPETHKTYYEYTGLWHIYGLLAMNSWFWSAIYHSCDTIWTEKAIFFIRCCLSRVFPHFDDSW

SEQ ID NO: 68346 - protein, 94 aa, Zea mays
  Clone ID: UC-ZMROB73068A03_FLI.pep
PEAITRTPRPRTSLLAKSVINGEWRFTTQPPDLGASFAVLARLRNCILRASKRRDGTPVATRYDRFELECGGIVGQCHQRWVEVSVESRKERFV

SEQ ID NO: 68347 - protein, 155 aa, Zea mays
  Clone ID: UC-ZMROB73075C08_FLI.pep
KGPAKSFFCGSTMEVFGKSVIAEPSNVIFLSAILNTEGSNPSHKCDKRCQSERILGNMYRCKLTETTHICDKNCNQRILYDNHNSLCRVSGQLFPLSPLEQQAVRGIRRKHEVDSSEGCCFKRRRGAQLHPSPFERSYSAVYPIPSQVGDGMDMS

SEQ ID NO: 68348 - protein, 210 aa, Zea mays
  Clone ID: UC-ZMROB73075G11_FLI.pep
TAKGIAYLHEGLEPKVVHRDIKSSNILLDKKWSPRVSDFGMAKVLGSGSSYVTTRVMGTFGYVAPEYASTGMLNESSDIYSFGVLLMELISGRSPVDYNRPAGEVNLVEWFRGMVGSRRVEDLVDPRIAAPPPPRVLNRVLLVCLRCIDADAHKRPKMGQIVHMLEGDEFPFRTEHRSPRASHRTSMATRPSLLSENVGATDDSDKSMWR

SEQ ID NO: 68349 - protein, 326 aa, Zea mays
  Clone ID: UC-ZMROB73079F01_FLI.pep
GDRSTTPLLPMSSSGPLPATGTHHGSQRAECKSQGSTSARKVQKADREKMRRDKLNEQFQDLGNALDPDRPRNDKATILGDTIQMLKDLTTQVNKLKAEYTSLSEEACELTQEKNELRDEKASLKSEVDNLNNQYQQRMRVLYPWVGMEPSVVMGPPPAYPYPVPVPIPSGAVPMHPQLQTYHFFHSQASGTIQNTCIPYMAYTQPCHPPTDQPSNQLNTPVAHSSSHRSNSPAQDCRSKSSTLQQPSCGVRSSDAGDIATDLELKTPGSSCQSHAEIAYNDSSSDLKTKKHCIKQINDCTLTESSSSSRCSSNGPPDVSNSAIDE

SEQ ID NO: 68350 - protein, 130 aa, Zea mays
  Clone ID: UC-ZMROB73079G07_FLI.pep
LICKSRGRGRKRDQRPSMDKRASSTSLLVLISILLALADPVAAGMKATFAAGVGVAADTAVLRHLMTTRLEDGVAPELTVDVELHRRVLAGGFVKSNVLNPDKAACIKSCPARGRPYTGRGCSNIYQCPH

SEQ ID NO: 68351 - protein, 433 aa, Zea mays subsp. mexicana
  Clone ID: UC-ZMROTEOSINTE091B12_FLI.pep
QFDKFRRQEDGSFSSDIAGDPKGLLGLYNAASLLNHGEEVLEEALLFARRHLESIRRGGGLHDSPYLSEQVGRSLKIPLPRTLKRLEAVSYIPEYSSADDTTYIHPEILELARLDFNLLQHVHQNELRTVTQWWKGLCGVIGPDYGRDRIVECYFWAFSMYYEEEHARARMILARLIMLSSLLDDTFDDRATLEECRELNKAIERWDESDDISLLPECIQKFFLEVMRNFAEFEDELEAHEKYRVAYARKAFQLLSKSYLQEVEWCHQGYTPSFDEHVNLSTASAGIQVLCVGMLVGMGDAATKEVFEWMIGSNNRVVRACAEVTRFMDDMADFKRGKNKTDVATTVECYMKEQNVTGEVAMDKIGSFVDDAWKTLNQAALVGDRALLPVVQRVAGLAMSMMVFFHGKVDRYTDSEHLKETLEDLFVNHVPLY

SEQ ID NO: 68352 - protein, 636 aa, Zea mays
  Clone ID: UC-ZMFLMO17067D05_FLI.pep
IEFHGSLLKVSPVSIYSHSGLPFPAVRAKVSWPRKASRGVALVTCASGEAEFIVKDCFALGVGGRYVNCEVSNKWANCVFVTGIPLHVTEPELYDAFHSTTTRRILDIHLLRGQPTASSSVSECTEALMRAISLFMPNRNFPCQKFRVQVFPPEEKDSMMKATITFDGSFHREAARALDHLQGSVLPCCLPWQIIQCEHVFHSTVSCPMRIYNVISQDVGALLESFRSQKGVAYNLEKNENGNFRVKLTANATKTIADLRRPLELLMKGKIINHPDLMLSTVQLLWSRDGMEQLRSVERETGTYILYDRQSLNIKIFGSTDNVAAAEEKLVHALVQLHEKKPLEVCLRGRNLPPNLMKEVIVKFGADLEGLKNEVPAVDLQLNTRRQTLYVRGSKEDKQRVEGMISELITSSDHNAQLSSENACPICLCELEDPFKLESCGHMFCLACLVDQCESAMKSQDGFPLRCLESGCNKLFLLADLRSLLPDKLDELFRASLNAFVASSAGLYRFCPTPDCTSIYQVAAAGAQGDRPFVCGACSVETCTKCHIEYHPFISCEAYKEYKADPDATLLEWRKGKENVKNCPSCGFTIEKSEGCNHVECRCGSHICWNCLENFKSSEECYGHLRSVHLSYADLM

SEQ ID NO: 68353 - protein, 104 aa, Zea mays
  Clone ID: UC-ZMFLMO17037C05_FLI.pep
VAQPAAFPSITPFTKIIHTYLHLILAEVMVLHYSTSNTKPDPPTAKVGVLNSNQVRAPCLLSLSSCSTHPPWIVRIAAVSTSTHASERFTGPFHVIKIDAIIPS

SEQ ID NO: 68354 - protein, 302 aa, Glycine max
  Clone ID: 700740321_FLI.pep
ARRKQSLYYIITFTFQYLLFLPVSHTQQLKKKMVDNDSLSEFLASAVDAAQKAGEIIRKGFYQTKNVEHKGQVDLVTETDKACEELIFNHLKQLYPTHKFIGEETTAAYGTTELTDEPTWIVDPLDGTTNFVHGFPFVCVSIGLTIGKTPTIGVVYNPIINELFTGIHGKGAFLNGNPIKVSSQTELISSLLATEAGTKRDKETVDASTDRIKSLLFKVRSLRMSGSCALNLCGIACGRLDVFFELGFGGPWDVAGGAVIVREAGGVVFDPSGADFDITSQRVAASNPFLKDALVDTLRQMV

SEQ ID NO: 68355 - protein, 156 aa, Glycine max
  Clone ID: 700748296_FLI.pep
PPSHPFTPQQARPETTSENIEALLDAARYDDMDDVKSLEASGVPLDSKDEQGRTALHMAAANGHIDIVEYLISRGVDLNSPNEEKNTPLHWACLNGHVEAVKKLIMAGANVSVLNSHERTPMDEAVSGGKPEVMDAINEAVALVELRGAMVFAQET

SEQ ID NO: 68356 - protein, 235 aa, Glycine max
  Clone ID: 700749102_FLI.pep
KSDQKATERAIDFMYGWFMDPLTSGDYPNSMRSLVRTRLPKFTAEQSKLLIGSFDFIGLNYYSTTYASDAPDLSEARPSYLTDSLVTPAYERDGKPIGIKIASDWLYVYPRGIRDLLLYTKEKYNNPLIYITENGINEYNEPTLSLEESLIDTFRIDYHYRHLFYLQSAIRNGANVKGYYVWSLFDNFEWSSGYTSRFGMIFVDYKNGLKRYQKLSAQWFKNFLKKERRLYSSSK

SEQ ID NO: 68357 - protein, 242 aa, Zea mays
  Clone ID: UC-ZMFLMO17070B09_FLI.pep
RDAYAAFSLGAGVPLESRQRRKRKYRVESAMNPFAKKPTPREVMRSSKRDLTNATRGIERDIASLQQEEKKLVAEIKRTAKTGNEAATKILARQLIRLRQQISNLQGSRAQIRGIATHTQAMHANTSVATGLQSASKAMGALNKQMEPTKQMKIMQEFQKQSAQMDMTNEMMSDSIDDVLDDDQAEEETEELANQVLDEIGVDIASQLSSAPKGKIAGKKVQVDESSELEELEKRLAALKNA

SEQ ID NO: 68358 - protein, 212 aa, Zea mays
  Clone ID: UC-ZMFLMO17151G10_FLI.pep
IDACKQELVNRSMSSVSVKQSISAIRPNSKVDGNRIAPSKIMSVVNESYRSTVGCGQAEEDVGIQQEKKHSCASEHGMVNLPINCTSSQLGAPGIPKFGKDSVNLWTTDALELSTEGMTPKIGADSTDRRLRSGKILGMPSGGLMNRGHKLKKIQQEASSKQMVNQGATSTVDLTSHENDFSAAEIVVEEKLESHSSCLKGRGGPAKRKRER

SEQ ID NO: 68359 - protein, 75 aa, Zea mays
  Clone ID: UC-ZMFLMO17159G04_FLI.pep
QCKRWYMKVLIHNQPVSLTSYKQDILMQLGEQKKKERNSARHLLACRSGHRWCPLQILQLVPKAEIRDDNPCRKN

SEQ ID NO: 68360 - protein, 344 aa, Zea mays
  Clone ID: UC-ZMFLMO17161C02_FLI.pep
EEMAYNQGRGKSSVIIEEIEEDDKAAIAEVQRATKKKQCPENGDESQLQLAVRNSPTESLESEDEDGFPVSFSESKKSSEIISNKNVGKDKETSNKDLKRKSGAISDRGDSSGGVKAEIDGASKKKKKGKDKSTVMDTGKVNKEEKEVKQHDSPADPASTKHKKKKNKNKSASGGDTSEQSAKNNNIDKDNEEASAQEANKKNKKKKAHDISRSESQAGTGLGESDSKEPLQTRTFANGMMIQEVEMGKPDGKKASRGKKVSVRYIGKLKNGTIFDSNVNGRPFEFRLGVGQVISGWDVGVNGMRVGDKRRLTIPPSMGYGSKRVGQIPQNSTLIFDVELVNVK

SEQ ID NO: 68361 - protein, 346 aa, Zea mays
  Clone ID: UC-ZMFLMO17157E04_FLI.pep
GDIARKFIKDQELLSFIDAECFIVSTVNALQTPMINASMVLCDRHFGGINYPVGGVGGIALSLADGLVEKGSEIRYKANVTNVVLENGKAVGVRLSNGKEFFAKTVISNATRWDTFGKLLKEKELPEEEKNFQKNYVKAPSFLSIHMGVKASVLPAGTDCHHFVLEDNWNNLEKPYGSIFLSIPTVLDPSLAPEGHHILHIFTTAGIEAWEGISRKEYEEKKEMVANEIIRRLEKKLFPGLQDSIVLKEVGSPKTHRRFLARNDGTYGPMPRGKPKGLLAMPFNTTSIDGLYCVGDSCFPGQGVIAVAFSGIMCAHRVAADIGLEQKSPALDAGLLGLLRWLRTLA

SEQ ID NO: 68362 - protein, 377 aa, Zea mays
  Clone ID: UC-ZMFLMO17157H05_FLI.pep
KVGVLLLNLGGPETLDDVQPFLFNLFADPDIIRLPRLFRFLQRPLAKLISTFRAPKSKEGYASIGGGSPLRKITDEQANALKIALEKKKLNANIYVGMRYWYPFTEEAIDQIKKDKITKLVVLPLYPQYSISTSGSSIRVLQDIVKEDSYFSGLPISIIESWYQRDGYVKSMSDLIEKELSAFSNPEEVMIFFSAHGVPLTYVEDAGDPYRDQMEDCIALIMGELRSRGILNSHTLAYQSRVGPVQWLKPYTDEVLVELGQKGVKSLLAVPVSFVSEHIETLEEIDMEYKELALESGIKNWGRVPALGCTSTFISDLADAVVEALPSASALATRKPDDIDSSMDLTHYLTKMLFGSILAFVLLLSPRLVSAFRSTML

SEQ ID NO: 68363 - protein, 262 aa, Zea mays
  Clone ID: UC-ZMFLMO17163F09_FLI.pep
SHLVSPTHAPGTPAVCFPSLSLECRGTISGAYGTTTQKQCILLSLQVSNSRHFKARQGWSGVAPAGLVRCRDDRFRRWYPIICRRIARAADRAGRWVAVSHHTEAAAIGSLHFDKACPSRVMLLVDAYEAIVVSRLHVILPAIHVPSPSVQHQLLGLRLEVAQLAELRQVVVPGVDGGGFREGVHRRVAARRLGRAPRRDAVEVAPNLGLHPCRLLGWQVWVAARRPLHRHGRFFVSLLGSQLWLWLWLGSDLWAGDTRGFA

SEQ ID NO: 68364 - protein, 357 aa, Zea mays
  Clone ID: UC-ZMFLMO17163G08_FLI.pep
RSRSLREGETARRRGSGMGKGAELWDDSALVDAFDRAMFSMKEMHCKSKRATPSEDGKTELAAATAEEEPITAGAADVCGEEDANCDSTHCDLSELQQQPYEDRQTIEHAPLQETDPGKETHVSEAKTLSTDASTNAGGNWSSSQQTGQYNELLRQYYELEEKSRNILEQLQQTNYSNYQASGYASTAQQQQVPVYSATVPDPYSSTTQSSCCNWNVPLVSVSCCSAGQPSGGSACTPPTAGCSVSLTCDQCPGATTAYPSVSNFMQVPTMVSTNDDQVDKAAMMTAEAAFNFMRSTISGQPSTQGSKSDTGKEESTNMGMNPNLDSDLAALLNSWYAAGFYTCRYLMLQSTKNSRP

SEQ ID NO: 68365 - protein, 106 aa, Glycine max
  Clone ID: 700750531_FLI.pep
DRYLRPWIIPVPEITFTARTDEDECLVLASDGLWDVMTNEEVGEVARHILRRRRRSLSMEEASPAQVVADSLTEIALGRNSKDNISIIVVDLKSKRKRQQRPPLIS

SEQ ID NO: 68366 - protein, 197 aa, Glycine max
  Clone ID: 700762745_FLI.pep
PGALLMGDAFNMRHPLTGGGMTVALSDIVVLRDLLKPLHDLHDASALCRYLESFYTLRKPVASTINTLAGALYKVFCASPDPARKEMRQACFDYLSLGGVFSDGPIALLSGLNPRPLSLVLHFFAVAIYGVGRLLIPFPSPKRMWIGARLISGASGIIFPIIKAEGVRQMFFPATVPAYYRTPPVHPLNTHEGNTWN

SEQ ID NO: 68367 - protein, 127 aa, Zea mays
  Clone ID: UC-ZMFLB73139C01_FLI.pep
SSFFSCSFLYYKGSESSNIRILELLKMLLPSPQQVLYVYKVPKVNTPCVVTELCQDNRLDPAAFFRGLKACCPKESPIQRQNLLLNTRQLWAGGHIILVQQSSKPNANVTYQHKIPPEPLKTLRVLV

SEQ ID NO: 68368 - protein, 123 aa, Zea mays
  Clone ID: UC-ZMFLB73212D04_FLI.pep
RGRTTTWTTSEPPTTSSSGPSWRTSSRPRRTDTTGTRCSPWWAPAIHQSEALLPAQESSGPIRCARVSLLRTFARKKSRIFHSMRKGCCLFFCFSYAFRLSLTTGFPINIFNFYFGLKRFYES

SEQ ID NO: 68369 - protein, 271 aa, Zea mays
  Clone ID: UC-ZMFLB73017C07_FLI.pep
LGHGTTATICSPQPVDGLPTGSFLISLDCGLFHTTVVSSDGEVWCWGMERGLGLCPDASFSGVDEGDALYPIRVQSPETNGFKFLGPVQIACGAAHTVLVAGDGYRMWAWGRGRSGVLGRGQTADSYIPCVVMWPPLDENFHEDQMGGSTSRVNDHTSTELEQKLSAASEELQFLRSKLTLMERYANILHISIFRKPLDERALPRSLQESSVFDIRKEFENILDAADTDELNRLEIFYRSMLSGVKDKLLKRRVREMVQQCIISLSREAKP

SEQ ID NO: 68370 - protein, 771 aa, Zea mays
  Clone ID: UC-ZMFLMO17013F04_FLI.pep
GRRVIRKRFLDDPGVATVSRPHRGRKSRNGCSSKKKRSPKSRGLRPRRRAAETALITFPKKGVSTEEDEDDSESFSDSELNTDSTEAEQLEWSGQLRTRREINSPFDIDDVTDPSQFTDNKENSGTGKKLVLRIPRRDLRTQFPLGSGKAECSIQDKAVKSLSLANHEPVEHELTIEPGHSPASKAELTIDGDLHDSSAVCSNNSIRWGEVKMRSSKRCKYSEPAGGLWSSSNNVALQDIEGSSSQQIPHEYGDGIQPSVVQNVQEVQHGTILDNIPENNSTDEHTRENFGDLEKIANNINAHADGVNDTVQVPNTSQPQLKVKFKSRGSADAVGNIMNSKHVKDSVQCGDDSSINQPRNADFYIVPKSSQECLDKSTSLHDSKKPYLDASKKYTAVYKRSKRKNKKKMDSDECPNEDSTSISNDDGGYQPAEYSPVAAASSRLRRSARKSFAYNINGTTQDDISEVKVSYGSHEASTSGRRVVTDVREGMWRQNSRSVGLRSARNKRESNSFLDTHPLGRRHQVSFKYSWLMLLEHEDSYRYIPQLDDEVMYLGQGHEEYLKQVQSSEFCPWNRIKGLKAVELCKIQGLDYATYRGSGESCCKLTIEFVDCTSSGFGKTFMITLRELVNFPDFLVERTRYEAAMERNWTHRDKCKVWWRDEEGQVGGTWWEGRVMAVTPKSPDFPESPWEKYVIQYKEDGSDHAHSPWELHETGSLWDPWKHPHMDLTVRDKLLSEMENLQEMSHRDQDHYGVLKLDKVAEKSDFINRYF

SEQ ID NO: 68371 - protein, 77 aa, Zea mays
  Clone ID: UC-ZMFLMO17150H09_FLI.pep
FHIFKEFLLRYWSFVMGTRLIQADGEIWRVRRRVIAPALHQKYVNAMIGLLGEASQRLCLQDKRIYIKWQTTRAPYL

SEQ ID NO: 68372 - protein, 733 aa, Zea mays
  Clone ID: UC-ZMFLMO17169G11_FLI.pep
SLSTQETKKMLGNQIQGGLGTSGALSHAYVQHPPLRCDIPDTQGLFYDDANKFLIAPTADRILYWKTILPTPSGPPNSDPVNEGPVLSVRYSLDHKVIGIQRSRHEIEFRNRETGETCSKKCRADSETVLGFFWTDCPTCDVILVKTSGLDLLAYEPQPHAFHLVESKKFNVSWYLYTHESRLILLASGMQCTMFTGYQFSAGGIVKIPKFEMMMSKSEANNKPVLAADDVYIVTVYGRIYCLQLDRVSMSLNLYRFYRDAVVQQCTLPTYSSRIAVSAVDNIIMVHQIDAKVVMLYDVSLDSYAPVSAPLPLLLRGLPINSRQVSQTADSQSSAYGGTIYGEGWNFLIPDLICDAENGLLWKLHLDLAAIAASSSDAPSILEFLQRRKSDPSMVKTLCLAIVRTIILERRSVPTVAKAMDVVLDSYTRLMKMGGAFPGVRRIHEQNQQSGSQPIDGSHVVSQESSPGTTVSPAVNPDHGSEAVDIYVQSNPGVEHTIDRGLLNINISSDSVDNTSDAVDKRQQAVGEASRPLSSGTMTQHGQHAGTVAISPIEMFQSVFTLVEDEMMGDPAYLIAVIIEFLRSVSKAGLKAPHNLYVMTATLLARSNRYAEIALFVSNKILEPCKELAMQLMELGLQHPPTRKLGMDMLRERGLHHDYVTAMLQDGYYLEALRYARKYKVITVQPALFLEKALAKNSAHNLAAVLSFFCEFTPSFKATSDFVRYRHILSEMV

SEQ ID NO: 68373 - protein, 505 aa, Zea mays
  Clone ID: UC-ZMFLB73223D11_FLI.pep
DELDLRIASVLQSSGYHADDGFWSEPTKSEVSDDKRHVAIVTTASLPWMTGTAVNPLFRAAYLAKGTRQDVTLVVPWLCKSDQELVYPNSMTFSSPEEQETYIRSWLEERLGFESNFKISFYPGKFSKERRSIIPAGDTSQFIPSREADIAILEEPEHLNWYHHGKRWTDKFNHVVGVVHTNYLEYIKREKNGALQAFLVKHINNWVTRAYCDKVLRLSAATQDLPKSIVCNVHGVNPKFLKIGEEITANRGSGEPPFSKGAYFLGKMVWAKGYRELIDLMAKHKSDLEGFKLDVYGSGEDSQEVQSTARRLDLSLNFFKGRDHADNSLHGYKVFINPSISDVLCTATAEALAMGKFVICAEHPSNEFFMSFPNCLTYKTSEEFVARVKEAMDREPQPLTPEQRYNLSWEAATERFMEYSDLDKVLNNEAAQPGQGRKRKNKRTSQPNLSDIMDGGLALAHRCLTGNEVLRLATGAIPGTRDYDKQHCVDMGLLPPQVQHPVYGW

SEQ ID NO: 68374 - protein, 150 aa, Zea mays; identical to SEQ ID NO: 50775
  Clone ID: UC-ZMFLB73217G03_FLI.pep

SEQ ID NO: 68375 - protein, 184 aa, Zea mays
  Clone ID: UC-ZMFLB73223E11_FLI.pep
YMTSFFVTVLKIYKAISCLLDALRCTIYQARLLVGRRLSYRVNTDNASSNLVEEEQYLTLVRKSPYHHGDRATVLLNWKLLAVEFLPEEDAVFVLLLCMVIARTMTEIRREDVAGLLVRRRISEARAGQRDWGSVMLPGSLSPDPHLQPWYRNATQVLSSAETGPVLTKYSPADGKDMLYRKKK

SEQ ID NO: 68376 - protein, 146 aa, Glycine max
  Clone ID: 700790774_FLI.pep
LHFISQFSPMARPLLTSSMHNLLFSSMPIPTLFLAILSVLCLFSIITFLCGSDKLKKLHLEAEKEAAIKTNSKEHKLISKLNSNIGNRALSMVKMLSWRKVQEGEVEGEYSDQDEEALWRKNILMGEKCRPLSFSGKIENDSEEKN

SEQ ID NO: 68377 - protein, 76 aa, Zea mays
  Clone ID: UC-ZMFLB73270A04_FLI.pep
GPEWSRSLNSKFLLYNFKLLKQADSALQPQCGVRCPCGASSRRPLCLLLGEELAAVRALHSESVNSSSTSFFSDCL

SEQ ID NO: 68378 - protein, 360 aa, Zea mays
  Clone ID: UC-ZMFLMO17185D02_FLI.pep
SACPPRLSPRGFNPDWVGWTATQLGVNWDCYSAAACPSCSWIGEANRLVCCSLLGRIMKLKNSAVETFKENNMIFTSEGNLHSKKMREDYVASPNQPGAVQTRCKWIIGDVTEVFDRSTWKLGKILKMLKNNYFVIRLADCIQLKEFHISSLRIPRGLEAPQSKPFHAADKATGRGNRRPADGALPGARAADQMGHRAYELGSSGKKRKATADASHHLGRAAAAHSRKVAAASNPNGGSYPHSSSQAIEDAECSVASCSVDDLYRLGNGGNAKRRPAAAGCLPDDAMSACPCTPGARDGEDDDAAGVHGLELEAYGSTMRALYASGPLTWEQEALLTNLRLSLNISNEEHLLQLRRLLSS

SEQ ID NO: 68379 - protein, 356 aa, Zea mays
  Clone ID: UC-ZMFLMO17055G03_FLI.pep
KNSTRLVISAVATVGALLLVALMCFWGCFLYKNFGKKDMRGFRVELCGGSSVVMFHGDLPYSSKDILKKLETMDEENIIGAGGFGTVYKLAMDDGNVFALKRIVKTNEGLDRFFDRELEILGSVKHRYLVNLRGYCNSPSSKLLIYDYLQGGSLDEVLHEKSEQLDWDARINIILGAAKGLSYLHHDCSPRIIHRDIKSSNILLDGSFEARVSDFGLAKLLEDEESHITTIVAGTFGYLAPEYMQFGRATEKTDVYSFGVLVLEILSGKRPTDASFIEKGLNIVGWLNFLAGENREREIVDLNCEGVHTETLDALLSLAKQCVSSLPEERPTMHRVVQMLESDVITPCPSDFYDSE

SEQ ID NO: 68380 - protein, 256 aa, Zea mays
  Clone ID: UC-ZMFLMO17129B03_FLI.pep
FRMAGDDGAQGAAGSPYPDGRISLARRSYYVDVPHVQQAFTWDCGLACVLMVLRTLGIDCCDGIADLERLCRTTSIWTVDLAYLLNKFSVSFSFCTVTLGANPQYSAESFYREQLQEDIDRVDELFGKALDAGISIQCRSITAYDIAFLLLSGHCIAIALVDKSKLNLPCISDHDVQQHNDEPDYMGHYVVICGYDADDCEFEIRDPASSRKRERVTMKSLDEARKSFGTDEDILLVSLTGKSGMKLSRKLLACSM

SEQ ID NO: 68381 - protein, 208 aa, Zea mays
  Clone ID: UC-ZMFLMO17138G11_FLI.pep
EVEDTFLRTIWCSYGLPACCQRSFGAFILLLICLKFIMVMTGKVFLRLLLAIALVALFGRVGGGIYTKAADVGADLVGKVERNIPEDDPRNPAVIADNVGDNVGDIVGMGSYLFGSYAESSCAALVVASISSFGINHQFTPMVYPLLVSSVGIIACLITTLFATDFFEIKAVSEIEPALKKQLIISTVVMTIGIALMLAWSSIHLHHL

SEQ ID NO: 68382 - protein, 178 aa, Zea mays
  Clone ID: 700621982_FLI.pep
IRHETDRIDGGGIAVVKPRGRSDEPQDQETQARSERPWIMAGAVDRILFTGRRYYIYTPRRRPPPLDSRAPSPGRASSVAAAAGAAAAGAALAGVAVAAAALGGRLEAAGAGLGGRRGEDRGLDAAGGGGLHVRVHTAAVASAAAGAAGAAPALAAAARRHDHRRREEVWFLLVLLPC

SEQ ID NO: 68383 - protein, 302 aa, Zea mays
  Clone ID: UC-ZMFLB73080A10_FLI.pep
NCLRQRPPRLKSRRQFGRSRTAAVFSFPSLLAKKPTQPLLLLLLRLLPPQLTPARLSPHSATHATDRPTTSPFPPRNPQGSGFGGTEGGGPPTGPGDMLGDLLSRILLLLFGYAMPAFECFKTVEARPNDARMLRFWCQYWIIVAMVIAVESVISWMPMYSEMKLAFFVYLWYPKTKGSDVVYDTFLRPIVMQYEPNIEQRLFHLRAKSGQLISFYMKNFADKGTAFFMDVLRYVVSEKPEGSNAEQRSKKSGWSPFATKRRPPSPPPEPLFDSNPDAAVLAEALRGAIGAKPRRAPNDKHY

SEQ ID NO: 68384 - protein, 683 aa, Zea mays
  Clone ID: UC-ZMFLMO17300E12_FLI.pep
KIKPLLDYLLALRYQNTKLLISDTLLDTVGKLQAALLLAQAFVSEQHPDTPFQQMAHRFHEWGLEKGWGDTAGACGQTLGFLSEMLQAPDPVSVDRFFSRVPSVFDVVIFSVHGYFGQHKVLGMPDTGGQVVYILDQVRALEEELLQRIKGQGLTFKPNILVVTRLIPEAKGTTCNVELEPIDKTRHSSILRVPFKTQDGQDLPHWVSRFDIYPYLERYAQDSCTKILHILGRKPDLVIGNYTDGNLVAYLVSRKLGVTQGTIAHALEKTKYEDSDVKWREMDHRYHFSCQFTADMIAMNTSDFIIASTYQEIAGSKDKPGQYESHYAFTMPGLCRFATGISVFDPKFNIAAPGADQSVYFPFTLKHKRLMGLHPQIEELVYGKEENDEHIGYLQDRSKPVIFSMARLDKVKNITGLVEWYGQNKRLRDLANLVVVGGLLDPKHSKDREEIEEINEMHSLINKYQLKGQIRWIKAQTDRVRNGELYRCVADTRGAFVQPALYEAFGLTVIEAMNCGLPTFATNQGGPAEIIVNEVSGFHINPLDGKEASNKIANFFQKCNEDPMYWNRMSTAGLQRIYECYTWQIYATKVLNMGSMYGFWRTLDKQEKQDKQHYLHMFYNLHYRKLANTVPKVGEQPEQATAAALPDRSATRPKERGTQIRIQRTVSNLLGPVLPASHLSDAA

SEQ ID NO: 68385 - protein, 481 aa, Zea mays
  Clone ID: UC-ZMFLMO17186C05_FLI.pep
KVDELKSEAKFLVRQLSELQESRQSLQAEIVKLIAENSSLSSKVYRSREKETSFDEDFSTLVDEAIRTDILGVIFRSLYEERTSQLQRLHEDFGSLHAAGNELYQEIKLMNKKLGDLQLENNYLEKELSRTLSICDGSGTEISSGRRRAMRRDTKLLKSGRKSQEGGQNMEQRKEVDNAGLEKSNEMLRVELQKLKNELQVLKSKEQPVIDVKSCDAEITKLLASMQLATANASLFKEKVLELIVTCESFEISDMVQKEVLKEEITRRNSYVDELKDKLNAIEIENRRLKVDLNGDFTLLGALQTEVDALEKQTLSLAKDCLPPSMLKKEENPLSPQLSKIAVRPSEDQNTTKVVKDMELQKLHGTIKALQKVVSDTGVVLEQERLDFNSNLQDARKQIEMLKLKEILDSDASDVNYERMMKDIQLDLVHTPSRRAAASSHGRHRKKNSVAATAQSDDNKMLALWSVDRVSSGSRRHDMDL

SEQ ID NO: 68386 - protein, 393 aa, Zea mays
  Clone ID: UC-ZMFLMO17266B02_FLI.pep
AHSPRLRPAGSLFLPFLLCAAAADPISHSRVPRYCCSFREIDRFLLLAIGVALAACRPSLRRAACGALLVLLTMGGWNRSLYVTGHRDRSAGASRTPLPPPSPDYGDKHQQVPLWEREFCRHVGDITWEQFCENKQYVGQFHKLEPWDDSAAFDCFQNAKARFWASYHGQPSDIPLLDDPDLYIDKVDHQCEVDPELVADLDSVGLPFESDDNPASAKGWTNAGADNKCTQNGSGNWDAFVEKPAEVSKWDSEANLASNTTWGGQANVATPEAVWRGQSFSKWGNDSNTSRGVPLEKPSWRGCNKNRYTPNSWSSNFHSRPSDNRYQQLEDPSYTSGTGRKWNGGDGGGYVKQRSFKHRNQDQGQHQQPRSGSWQQDQRGRSRQWRPVHSRAP

SEQ ID NO: 68387 - protein, 180 aa, Zea mays
  Clone ID: UC-ZMFLMO17181C01_FLI.pep
SLKKREKERERERGREGAKKEKLIQQNNDLERQKKKKKEKQRRNIIPRCPMPAYRHHHEPMQFNQAKHLYPAASRVTASGRLAACLPTATAPLRTCPLRPRSPPPLPSPSPSPSGRRRSPRSSGPRRGRPAARPVPWPRTPWPPAAAPPSPPRRWRPGAPARRRTPRRSTPPAPRTAPTG

SEQ ID NO: 68388 - protein, 213 aa, Zea mays
  Clone ID: UC-ZMFLMO17185C05_FLI.pep
QDSLMLPKVDRPMEPNNGSFVPSTNQVWFGAASREPSHSGSSTAMTTYSAGFEMCDELPPAGQAMSICESSRKNAANGTTIGRSKGKEYRERVQQDNLKDERKMSSTNTSGASKADNGDPMKKRRVERSRKMAEAKERSSTPVIPSDMQAVLKRCETLEKEVRSLKLNLSFMNRKDSEQTKQIEELQQKNEDLAEEKERLLEEIERIVSDPNT

SEQ ID NO: 68389 - protein, 141 aa, Zea mays
  Clone ID: UC-ZMFLMO17294C10_FLI.pep
RSRGWWRQPCRASSSSLYLWSCATRCCHKQPKPPPMSGTPRQGSQTISSAPAPPQSLQLYDCSYTEEEPTTAQQQKVHCPLSTPCSESPCHHPDVGLPKRLPKLPHQIEVPLAGYSHIASIGRSVHHVENPSVVACTINDT

SEQ ID NO: 68390 - protein, 642 aa, Zea mays
  Clone ID: UC-ZMFLMO17317H12_FLI.pep
ALQFGDWRRLVRTKAGIGGGWCAPVRGIGCSSQRTHDVCFLAVGSDMARGMRKCIIQSQEEYLVEEPIGETSHRPRDAAYDHHPSARERQKESDNGNEFNDLDHHKKDTTSFETTSGVYPSPDDADIEDSVAGETNEAISRGPNKLKHVWNLQKGKRIVVNCNELGQPIGEEAGVLGKFLGMVARNGCLCSLSFKDWRLLIGKKDRNNEQKNKQDVLKQVKMRFLYPARMEKWILRTIEGVLDDQWVALVNNWFTTKSQDISEANRINCAKRKATHTSGTKSFARNREDMREQDPEKKYPHRAVLYINTHKSNITKNRNPHVVALKELLVQQPSLADTSHGKVAWKGDALSQILGEEKPGHIHGLGLVPNPDQVFGGSTSRHLKHLNLTSLDATSSEDVVSLRLQVEKLIDRVQKQDDTILNLQNTLELQKSHHECLDEPLSASKDLQPTMNQKVNLLDELNSTMADEIEHDGYEELQAQCKKSKIQEKGKPPMPRGGLQGGRVSTSLNVKNRSNAAKVMNQDTARNSSNHEPYKSKGSLENYLPSTKDDQSTSKRKVGSHIFLMSWRNQNKKVALGTIIGCDPKQQVGGDPLGKEFWKVRLGLVLVRDEPLIRPYNNFVVLGDINNDPIAWPSSCIEKAAL

SEQ ID NO: 68391 - protein, 579 aa, Zea mays
  Clone ID: UC-ZMROB73049C11_FLI.pep
STPVQQPPKIRPARAARDRRPRRTRVMTTPRRHADPSPSPSPSSPPQLLSRLRSGASSFLARQYSTGKGGDNTGPSKPKGGGSSAPRHLRPGFVDPSSWKHFDSRAVGIKPGAIHTDAWAVLKKLRREAYLVGGCVRDLLLKRVPKDFDVITTASLEQLKKNIFRRSRIVGKRFPICLLKMRDSVIEISSFRTVANYGNRSEVVDYVAELNGSDVRDILRWKDSMRRDFTINGLFFNPMNCKIYDYVNGVRDMRKNKVCTVIPAHISFMEDPARILRGFRIAARLGFQFSSETSNAIRDFSSSINNIDKARLMMEMNYIMSYGAAAPSVRLLRKYGLLDILLPFQSAYLSEQMKGGSSDRHLMLMKLLSNLDRLLSADRPCHSSLWLALLAFHSTLVIYPQDTLVIRAFAAVLYFGTWETTVKFLREEVGAEVPFAPETMGPSRTKLDCLKEQTSHLASLVNSSVDILTCPHDLEQSLARFSEPLQFSGVVVASNNDRKKLSAVFEGLASDLHSYDGRRGMRGIDYSSLKLGDLAEVRFVLGKVIMDTMYDKLPCESTEDEGAAADVAGGSLPPLSALF

SEQ ID NO: 68392 - protein, 479 aa, Zea mays
  Clone ID: UC-ZMROB73035A07_FLI.pep
GPAAVLPQLQAMSCFRCFSGCRTKRGKGEKRREGSTAPASPAAASFPSTVSTGAPSNLTFSTASSAVVTSHSEDSSAVMRPEATKSSGSASVSSARSIPELYEERGASSLREFGFRELRAATSDFSRLLKVGEGGFGSVYKGVVRLPGGPAGGTVVAIKKLNPNGHQGHKQWLAEVHFLGVVEHPNLVRLIGYCAAQGERGPLRLLVYEFMTNKTLDDHLFNKAYPVLPWDIRLEIALDAAEGLLYLHEGLEVQVIYRDFKASNVLLDEEFRAKLSDFGLAREGPSAGDTHVSTAVMGTLGYAAPDYVETGHLTTKSDVWSFGVVLYEILTGRRSIERNRPKNEQKLLEWVRLYPVESKQFSKIIDARLEGHYSKQGTRKIAKLANSCLAKHRRDRPTMREVVESLKQAMQHKELDGKAGALNETSPPEEMSGKPSTEDVAVASARRRMLHLAALGENANSIARRRFMFMRTAASPTPT

SEQ ID NO: 68393 - protein, 377 aa, Zea mays subsp. mexicana
  Clone ID: UC-ZMROTEOSINTE006B07_FLI.pep
CTSSCDIKEQCCDKPSPLVKDSSQINVCDTALCHPKDILSRLTLPHQQDLDSLLTPGSESTAAVKPVRGASLPPFPWSHSQAGGCRQSVDCGKHGSSRSYSQWQWVRVGSNLTSLDYEDTSVHRIDHLLQEMDAAKLCRMDSCDGQYNLCGTESTSGSLAQNIQSRKNGGEHGSQQLQTLDRVDSLDGFQKHDSEHSLLKTSQVSPKIQHAAEILCDMRRSIESLSGQGYSNGVIKWPKSPSEKVMKARKPSSQFGITESSSGSRNNDATWNGSSHSTKKFCDRKNDSACLNYPGKETIRWPVPVEGGASPVRSSERGPMLDMRQPHGNGGRHPVQVPSQVARLEKEYENQQKLRKATLTSSLGPPGDWSRERNRRV

SEQ ID NO: 68394 - protein, 246 aa, Zea mays
  Clone ID: UC-ZMROB73028B02_FLI.pep
SNQMAEPRNLVATYDTGRRSCARSSGRVQAEACATARSMAMSRWRREREEGREKAFTMPAMAAAAAPALLLWPSQPMCPTCCTSVGYPITISRSSSSSSSSSPPSSPANICDRLRIPFISLDTPAATRPGAVAVAAAADDATAFSFVMASPAPSSDEPAPARATVAAAVEDGSPCAFLSPGSATDTADCDMQPMEKGKTAKRSPPPTEELPRRSFMYDRPDGMGWSRALGTAVRRRLSSPLVSPRS

SEQ ID NO: 68395 - protein, 267 aa, Zea mays
  Clone ID: UC-ZMROB73030F06_FLI.pep
HPRTVKNNPDGTMDIDKIVAAIRHPDLHYPTTRLICLENTHGNTGGKCLSVEYTDKVGEIAKSHGLKLHIDGARIFNASVALGVPVDRLVKAADSVSVCLSKGLGAPVGSVIVGSKAFIDKARILRKTLGGGMRQVGVLCAAAHVAVRDTVGKLADDHRKAKALAEGLKKIEQITVDSASVETNMVFFEVMDPRISPDKLCQVLEQDNVLALPANSKSIRFVIHYQISDADVGYALACVEKAIKELLEGSTELGHSINGATKSSYGH

SEQ ID NO: 68396 - protein, 288 aa, Zea mays
  Clone ID: UC-ZMROB73002H04_FLI.pep
WQLARREMIKNTVATLMVRLHHLPLPRAAPAPTYRCGRHLALAPPLPRLRASAAVMSTAAEQTIADQKRTLRAEVRRALKALSADQRASEDLAIQTTILDSSWFKASKRLCAYISCQQLREVDTSKILAECLPSNPGQEELAKDLYVPRVEDKNRNMRMLKITTMDDLVKNSMNILEPSPVDATGNNREDVLSSLSPVDLFLLPGQAFDRTGRRLGRGGGYYDTFLLKYQELAKEKGWNQPLLVALSYSVQIMDEGIIPVNSTDVPIDALVSSSGVIPISAAALQRMQ

SEQ ID NO: 68397 - protein, 552 aa, Zea mays subsp. mexicana
  Clone ID: UC-ZMROTEOSINTE058C07_FLI.pep
TMEIGLRGPTNLFGHPTDKQMIELDQALSQWNTDFDKVPVTKIAFGHFPLSFSALTESGKSIKDVFLKQSLAAYLCGHLHTRFGKNLKRYYHRAVQESSLSEHYYQHNMHQGDAFQGNKENCSEEASHIEEFWEWEMGDWRKSRSMRILAIDDGYVSYTDIDFRLGSKSIIILPTFPLDSRFMQRASAFRDFKCHVMGASSFDTVRALVFSKHEIISVSVKIYDSRPGTLEIVFDSEMKRVDSNETRGNMYLIPWNWRAFEDSSPSRYWLQIEVMDITGDTSVSQLRPFSVNGLPARVNWTWKEFFVIGIQWASIYHPALWCAFSLIFSLLLVPQVLAVVFKDRFTYKSLCAYGGQRTLLKSLVGGFICCFVELSRLVLVWLLLLLYAIYLVFIPWLFGHPITEDGSLTYMTHKGWILKGPSSSNEVVHAGIPDVMVIVLPHLCFVLVPTIVILAAMAAERTAYREHYLSRSGKKKDDYRKSRTQIEHENFWNGRWISKFLCLLCVVVLCKHWKLCRALVKAYAMNPLLHAPVLFFFVPLLMVFAIYKTRSI

SEQ ID NO: 68398 - protein, 169 aa, Zea mays
  Clone ID: UC-ZMROB73004D12_FLI.pep
KTRENLNLDVHILSYCWCAELIRSAFSSAGCLDGLNIHSNEFAFEDSVSTGEIDRKMQSPLDKVEKFKSIRSDVDSTVPFLSVYIGDSVGDLLCLLEADIGIVIGSTTSLRRVGKQFGVSFVPLFPGLVEKQRQLAEEDASVFKARSGVLYTVSSWSEIHAFVLGSDFS

SEQ ID NO: 68399 - protein, 327 aa, Zea mays
  Clone ID: UC-ZMROB73004E08_FLI.pep
AVPSGLLALLVFCMPESPRWLVLKGRLADARAVLEKTSATPEEAAERLADIKAAAGIPKGLDGDVVTVPNKEQGGGELQVWKQLILSPTPAVRRILLSAVGLHFFQQASGSDSVVQYSARLFKSAGITDDNKLLGVTCAVGVTKTFFILVATFLLDRAGRRPLLLISTGGMIVSLICLGSGLTVAGHHPDTKVAWAVALCIASTLSYIAFFSIGLGPITGVYTSEIFPLQVRALGFAVGVASNRVTSAVISMTFLSLSKAITIGGSFFLYSGIAAVAWVFFFTCLPETRGRTLEEMGKLFGMPDTGMAEEAEDAAAKEKVVELPSSK

SEQ ID NO: 68400 - protein, 322 aa, Zea mays
  Clone ID: UC-ZMROB73005B07_FLI.pep
ILWYGSHLVRSHGSTFSKVIKVFVVLVVTANSVAETVSLAPEIIRGGESIRSIFGILNRATRIEPDDPESERVTTIRGDIELRHVDFSYPARPDIQIFKDFNLKIQAGRSQALVGASGSGKSTIIALIERFYDPCGGKVAIDGKDIRTLNLKSLRRKIGLVQLEPVLFASSILENIAYGKEGASEEEVVEAAKTANVHGFVSQLPDGYRTAVGERGMQLSGGQKQRIAIARAVLKDPAILLLDEATSALDAESECVLQEALERLMKGRTTVLVAHRLSTIRGVDRIAVVQDGRVVEHGSHSDLLARPEGAYSRLLQLQHHRV

SEQ ID NO: 68401 - protein, 182 aa, Zea mays
  Clone ID: UC-ZMROB73036B05_FLI.pep
NLRTCRGEEEELGEEMAGAEGERWVGLATDFSEGSRAALRWAAANLLRAGDHLLLLHVIKEPDYEQSEAILWESTGSPLIPLSEFSDPIIAKKYGAKPDIETLDILNTTATQKDIVVVVKVLWGDPREKLCQVIHDTPLSCLVIGSRGLGKLKRVLLGSVSDYVVNNATCPVTVVKSTSTEG

SEQ ID NO: 68402 - protein, 190 aa, Zea mays subsp. mexicana
  Clone ID: UC-ZMROTEOSINTE002E07_FLI.pep
SQYQNQELMIPNLPEKETASERFQDAEQLVTPNLPEEDEETAPKQFQDEEQKGLQQHQEPDEQASQPEEQKSQQECHEKAPEQFQTLKKLGAPPRLADNVPRFSLQELIQQKQLPTGEAMPARKQGSRGESVLADHNVSGPGAAAGGTTLAMVIKRPEGGKKSMGVIRRCVKALNGMIKAKHSSKKNLHF

SEQ ID NO: 68403 - protein, 208 aa, Zea mays
  Clone ID: LIB3060-001-D11_FLI.pep
YTALAPSSRACMRSCSSVRQMLLTRLSSVSCSSTAQQLHAGVGKFAAAACWSWKKKREELPCFRARLAAKPPRASPAKGGIVPASDDDDGVSLGTVKLPGNIDTARLESLLFQWGNSLCQGANLPLPVPLKVDKVEGGIRLGFVAVEDGATRTLVYIDCLVSPAPDGSGPVFRAIRNGPMKDKEPPGEPRIMRSLLQALEKSIQIARV

SEQ ID NO: 68404 - protein, 441 aa, Zea mays
  Clone ID: LIB3059-025-A8_FLI.pep
NQTVCFIRHVLREPAQRRAGKDGGCDLQPCGVLDGCDDGLCLEVVAEGVDALLPPDAAHLVAAERDGGVEHVVAVHPHGARPQRPRQGVGRVQAPREHPRRQPVGRRVRAPDHLLHAAELENGLHRPEYLLPSDLHFVLGVGKHRRLYVEAPVAYPVAAGDEGGTAVDAGLDVPQDLVELLAVDLRPLFDPVPEGVADDALQGAGLGLLHELVVHALVHERPRPGAAALALVEEDRLVRELDGLVDVGVVHDDERGLATELQRHRLKVAPRRQLEHDLPRARRSRERKLVDTHVAAERCAGRRAEAGHHVQNALGEPSLVEEVGHVERGERRLLGGLEDDGVAAGERRADLPGEHEQREVPGDDLAGHADRLVQHLHVVRAVGRRHQAVDLVRPPGVVPDAPRHHGHLGPRRLRQRLAVVPRLQRRDLLRVPLDQVREAQQ

SEQ ID NO: 68405 - protein, 190 aa, Zea mays
  Clone ID: LIB3059-021-E6_FLI.pep
ASSSTEIGSDMTISDTTTSEVPVHEIPPAVLDVQEEEEIVSAAVPVSVHDVAPLQQAEIGKDVPKHVEKEVEVPQWLKSLAGEEAQDWRAFVRTRINGHTDRTYTHKQYRHQFRSKAEVKLFVDSNGMTTGIFKGRKLQKKKIAGMDAQGAGTSESAGRRASAYHARQKRRRSLGHQLSRSDEKMPPGFI

SEQ ID NO: 68406 - protein, 205 aa, Zea mays
  Clone ID: LIB3059-035-H6_FLI.pep
SLLKTLAHQGSDLLEPSPMALLRALRRALPALSSPAAVLPRRAPHPLPPPPAPRRFLDPIGLRSFSAAAATASQAPPMGATLFGGLMDTRFPKRRPGFANRRKRASLRPKGPYYWVKCKPDEPIPVSQPNQGSVRGRKEKKRIKQRKDFIMAEKKKRRAQYSAAVKRKEAERTERKMAAVARERAWAARLIELKQIEEDVKAVMA

SEQ ID NO: 68407 - protein, 178 aa, Zea mays
  Clone ID: LIB3059-037-A11_FLI.pep
TFKHRFYFKRSWIRSRLTSRTRSEEQPDRAPCGRRLHSALSAAASSTFSSNSTTFSSTFSSTAAGSSGADAFSASAAEAGAGGSSWSGSRAVSVELEMAARRRPIKGLKAVSTVTQASASPPATIAALFRALPSRWPPPPPFAMGARGSTVTDGVARCACVMGVGLWPRALGIWNWGR

SEQ ID NO: 68408 - protein, 240 aa, Zea mays
  Clone ID: LIB3060-014-H3_FLI.pep
YLGQLLTYSSKEAMRAGVSAGHRRHVRHLGGQNALQEHPVLRRRGEDVACAAALHQAAAVAAERRRAGVLLLLPVDRRRCRVLLAPVELVVEEGHVDGRGRRSGREAVVGGEADDRGPVPDPERAGEGRGDARELLHHGAEVGGVRVEQRHGRPPRRAGPPPRRRRLPGDPGPLHPVKQMLLPPRCLGGGAPAAGPSRRRARGGGGAAADAVASVRRVVVGQDRAAGGVVVVVERGPLRE

SEQ ID NO: 68409 - protein, 158 aa, Zea mays
  Clone ID: LIB3059-016-A8_FLI.pep
TNMSPREWIHDGDYTPVIVVMIFIVLLTVASVLFSHYCVGDRAFMRTGYDFEGYVMRKFAVCVDSGLPKRAHHDIKNTNPHEVRVEVVEEVHASEPSTPALPLATPAPPTAPYHVATGARAEEVPSAAEEEQEEDEDWEDDGDDEEFDFEEEGDLLNL

SEQ ID NO: 68410 - protein, 120 aa, Zea mays
  Clone ID: LIB3059-029-F11_FLI.pep
GFVCIPPAIIIEGPQLVQHGFKDAIAKVGLTKLISNFFVVGLFYHLYNQVATNTLERVAPLTHAIGNVLKRVFVIGFSIIAFGNKITTQTGIGTSIAVSGVALYSFIKAKIEEKKQIKSA

SEQ ID NO: 68411 - protein, 339 aa, Zea mays
  Clone ID: LIB3059-044-H2_FLI.pep
AQPTQVKSEPAGVDTARREPEEGWTMSATGRAPCGLPRIGLGTAVQGPRPDPVRAAVLRAIQLGYRHFDTAAHYATEAPIGEAAAEAVRTGLVASREDLFVTSKVWCADAHRDRVLPALRRTLSNLQMEYVDLYMVHWPVTMKAGRFTAPFTPEDYEPFDMRAVWEAMEECHRLGLAKAIGVCNFSCKKLETLLSFATIPPVVNQVEINPVWQQRKLREFCRAKGIQLCAYSPLGAKGTHWGSDSVMDSGVLHEIAMSKGKTVAQVCLRWVYEQGDCLIVKSFDEGRMKENLDIVDWELSEEERQRISKIPQRKINQGRRYVSEHGPYKSFEELWDGEI

SEQ ID NO: 68412 - protein, 359 aa, Zea mays
  Clone ID: LIB3060-003-H10_FLI.pep
VFFVKLSLNLNAGSTTQVLGEMTSAGAATGAALGARTARSCDGCMRRRARWHCPADDAFLCQTCDVSVHSANPLARRHHRVRLPSASCSSPPRDPDAPTWLHGLKRRPRTPRSKPGGSKSNKHEATPSFIAAAASSAAVPDLEAEESGSGILGGNDDHHGFLQDDDEDLLYRVPVFDPMLAEFYNPVADEGEQKPACSLLMPSLAETSPEFASGGSAEADGLSVSFHVPDMELASFAADMESLLMGVDDDGFDCLGFLDEEKPQVNADLDAIVAPAPEPEDKKRKRPEMILKLNYEGVIASWVRDGGSPWFHGERPHLDCHELWSDDFTTGSRELLGGAVTPVTGGEREARVSRYREKR

SEQ ID NO: 68413 - protein, 209 aa, Zea mays
  Clone ID: LIB3060-016-F7_FLI.pep
YLPSDTPKGLEDLRKKDLQALRGDGHGERKVFERVYDYDVYNDLGDPDKNPAHQRPVLGGNKQYPYPRRCRTGRPRTKKDPETEMREGHNYVPRDEQFSEVKQLTFGATTLRSGLHALLPALRPLLINKKDLRFPHFPAIDDLFSDGIPLPAQTGFDAIRTVVPRMVKLVEDTTDHVLRFEVPEMIESKLASRRTHLRTACYLNLKKNK

SEQ ID NO: 68414 - protein, 103 aa, Zea mays
  Clone ID: LIB3062-005-H8_FLI.pep
TVPKARFHSTRKIHTSTATEWATRVGTLAVERWQQHEREHRTHRGPLALGTTRLHTITAPLHVSSISRSCRYVVTIKRIYRTWASVFAFTIPAHCQYYFLDLE

SEQ ID NO: 68415 - protein, 310 aa, Zea mays
  Clone ID: LIB3066-026-D8_FLI.pep
PKRETRATSDRPMAAMARSVSLVVAPLLLLSLLVSAAASARTVGDTVQDACSKTQFPKICVDSLAAKPESQKATPRKLAELFVNIAAEKGSGMATFVHRKYSDKEDSDIFKCYDSCSDDVEEAVAHLNGLVREPTDAKFLELKSWLSSTLGGTSTCEDACKDLPKTSDKDDVVNFSLDFEKLQRVTLDLITEASGTMSAGIALPPSNAGAPSYGAAAPSGGSADAPAGASEGPASASGPSGDDAPASGAGASASAADAPAAAASSGPSSAPAPSSSSESSAAPGPSSDGTSSAPAPSSGDDSDSDDDGSA

SEQ ID NO: 68416 - protein, 158 aa, Zea mays
  Clone ID: LIB3066-002-G2_FLI.pep
DKNLLQVATLIQNCVNTSHNSQYGKSFSIGVSDTARACGTAKRTPLHNSYVSPKKNLGTHREARVKPSPIAVGSSSSPYSCPAPRIVSAVQHTKGARRHTRSPSVRSLPDQTASSPTVRRRGVLGLQVLRAQQMIKKPLASYGQHRNAPAASDPGAQP

SEQ ID NO: 68417 - protein, 244 aa, Zea mays
  Clone ID: LIB3062-012-H12_FLI.pep
HTACPLLPTSLSSSSTLLFPLSLSPLSASVFGLISFSCIFFVFAFESKRNQVLISTGFLKTTATAKIFARELTKEGYVKLHFTKFAEKPPPLAPNSLFLHRSAQIPSLRCAASTSSSVQFQCSVGSVHHAIGGGCSTEKNPPQGSSSSRSPVSSSSTFRKLPWKNTPPWFAATAPGASRRVPRTSGTGASATGGSASFSTALESLSDDPTPTGGGPSEAAGSALTDVKLAAASSSPSFALSSLI

SEQ ID NO: 68418 - protein, 44 aa, Zea mays
  Clone ID: LIB3062-013-H6_FLI.pep
FIGRRHIEMSSIVFSCNYIKLASCHCVYLVYVKYINSYFMTRDP

SEQ ID NO: 68419 - protein, 169 aa, Zea mays
  Clone ID: LIB3116-015-A3_FLI.pep
VTLAIMPNNGVRAVATPVAREEPLLRREDDAAPPKAAGGDGQPLDAGARDAGSFPWLPAAGVVYLTLSSAMALHRCWPDPGDVAFVVSAYVDLVLLFCCLRRYERAEPGSPLRERLKLAVWLLTSALTLLFSYKVAAVMPAAVAAIVWLMGLTTICGGFLAFFCFQKKA

SEQ ID NO: 68420 - protein, 85 aa, Zea mays
  Clone ID: LIB3079-013-A12_FLI.pep
GRWWRGCWSSCSTTRRSRAGCASSCCGASPSCRRLCPRRRRRTPSTLPPESDYWLHFSQGFQPTARHGRPPTSLRLRQLVVDTVG

SEQ ID NO: 68421 - protein, 171 aa, Zea mays
  Clone ID: LIB3115-020-C11_FLI.pep
FLAWVQKYKSNATLTGIDLSSTAPNQMIQFPKHKRIFFAECSGLRIALQSFGGCGGVWFCQRKLLHPLAHDAFTEGVDEGEAPIPVVGGRGDAVEQRQRLLRANRLRRRRRLLHADPNRRMLCLIQREGAQAAPVRRGLYKGPRRRRGLGEKKENQRRPAAVDGIAIGKLS

SEQ ID NO: 68422 - protein, 204 aa, Glycine max
  Clone ID: 700565484_FLI.pep
SLEILILKPIVLHIITMRSSNGASSSRASNANTGRHPVYRGVRRRSSGKWVSEIREPKKPNRIWLGTFATPEMAAIAYDVAALALKGKDAELNFPNSASSLPVPTSSAARDIQMAAASAAAAVGAANDALEGSRGGNASVSLTEEFSGGNLNHFVDEDLIFDMPNILVNMAEGMLLSPPRFDNFAATDYEYMDEDPNLWGFPNY

SEQ ID NO: 68423 - protein, 521 aa, Zea mays
  Clone ID: UC-ZMFLB73266G03_FLI.pep
LGSRLRKDAPPQPHPRPRGLGGLRCCGAVRRGGTDGGRHWISWSWPAPRAIMSSRGLVRLPVSCSAAVDGVNGCLTYSTCRSRNYYYQYSHTTNLQISPVDQMPLPRKLKKSIQRNAYFLTQKRKLVPHCSSDLSTSCRGVPNYLSINVLQDQSNTKQGAIRKALVILNPNSGFRSSRDVFYQKVQSTLKLSGFKMEVIETAYAGHAKVLSSTVDLKKFPDGIICVGGDGIVNEVLNGLLSRDDFDVAIRFPIGIIPAGSDNSLVWTVLGIRDPVSAAIALAKGDFTPIDVFAVKWIQAGVTHFGLTASYYGFVADVLQLSEKFRVQLGPFRYVVAGLLKFLSLPQYRFEVDYLPSSLQGRSSESRPLAEKRHEQLSDDGKVRRGTQTNGRIKDDWVTRNGEFLGIFVCNHFCKPAQGLLSPVIAPKARHDDGSLDLILVHGSGRLRLFCFFVAYQLCWHLLLPYVEYVKIKEVKVRPVGSTHSGCGVDGELLDGERGAEWQCSLLPAQGRLLGQDPGAFN

SEQ ID NO: 68424 - protein, 357 aa, Zea mays
  Clone ID: LIB3136-019-A10_FLI.pep
LLAANALDFGAPGAAHRILPMGLFVRVPTRCSCADGVRKSVSVRYAARPADTLATVSDVVFAGLASSDQIRNENGLTSADPDAPLDAGQKLAIPLPCVCFNSSDNNLPAVYLSYVVQVGDTVPAIAASYETTVTDVMNVNAMGSPVAAPGDILAIPLPACASTFPKSASDHGLIVANGTYALTASNCVQCSCGPGSLNLYCTPTSLSGTCPSMQCPNSDVMLGNVSTHPTGAGCNVSACSYGGFVNGTITASLTAGLQARCPGPRQFPALTEPPTTVSHDSTYLPPLSAPGPAEAGGVMPEPGSPGPGASVQAGPFTLPKVSKANGPAGSVSAAPLAGKPLQILHVLVSCLAFYLQL

SEQ ID NO: 68425 - protein, 300 aa, Zea mays
  Clone ID: LIB3136-048-F4_FLI.pep
RDGCTAPARHLSGPEHASAGGRCETPCRPTVWLLSFSSRFVRSPARSSPQAVMETGSACGASAGAAVSLARSSDTLAARLSFAAGDTPRSPMMDSSTASQRRLFSIATPPATGTDESLEKATVRTPAGECVKRMEAPGAKVSGLNTSLNFSTATPSASVYRPAAFQNATQFSVTFSAYCSPVSGRIIVTLVNFSKSPVTTSRKKAASEASSSAVLPPHFLASAGTAASSRYTPMAVNLMKLPPISRPRTPAPPRKCEPAEPGGRATGGKTTPSTTTSGTAMLNSALREGTGRSATDEATG

SEQ ID NO: 68426 - protein, 186 aa, Zea mays
  Clone ID: LIB3136-049-C11_FLI.pep
TQPASKQAENKDNTATENLITKNKQLQEALQVHRGSCSLRMNNQRKPGDWNCKNCQHLNFSRRDYCQRCRDPRPDLQFGDGYSTVGVLTSLDIRPGDWYCSCGYHNFASRSSCFKCGTIVRDFPAGQGAAGAEGDFAGGRDSAAVRAGWKAGDWICTRPGCNVHNFASRMECYRCNAPREAAGTGR

SEQ ID NO: 68427 - protein, 336 aa, Zea mays
  Clone ID: LIB3136-013-F8_FLI.pep
KADPSASNRLKVYGGAETTADVKKGWNRLALDSLQKQSTSRVNTDEKKNAAQGLVTSSCGTNDTANTPAKLASLYQDNIASIPSLGAPGILGDPQDQPSPVSVLDGPFIIRDNSRNVLYSSPSPQALSRSPLIGSFPRSLPVSWEDPPPEATSPNSLRLSRLFSKADEDLDSLTFIQKLVRSCGMDRASCVLAGPLDPDLLEKVSEHEDDGTRFGRRRLLFDAVNEALAELAWTAELAAYPWGGGRSRLDCNCKNGSGGDSAAEEIWRVIRNWSTLDKYPPCETIEGNVLLEMILRREADSGETARLEVFGLGASVCVVVLEELVEETVVDLLTDC

SEQ ID NO: 68428 - protein, 118 aa, Zea mays
  Clone ID: LIB3136-023-C3_FLI.pep
GSRGHKLVEIRSPTTQSRRHGCFDAGNKLLHAPVAGATLCNCLGRFLGGPRRPCPDRFVGHDLFYFLRDLLPGHQPVLPVPAPVLHPHPNPTAHRYLGVHAVVAAAGPRQQRHAGGSR

SEQ ID NO: 68429 - protein, 176 aa, Zea mays
  Clone ID: LIB3150-068-G4_FLI.pep
ERGGYMEITGFSAPVREQIYKIASVNLCSNITGQILASLVMNPPKAGDESYASYKAEKDGILESLARRAKALEDAFNKLEGFSCNKAEGAMYLFPQIHLPQKAIEAAKAAKKAPDAFYALRLLESTGIVVVPGSGFGQVPGTWHIRCTILPQEDKIPAVISRFRAFHEAFLAEYRD

SEQ ID NO: 68430 - protein, 170 aa, Zea mays
  Clone ID: LIB3136-025-B1_FLI.pep
NSSRVAGDGVVIRGQAYGIRGIRVDGNDALAVYSAIHAAREMAVTEGRPILVEALTYRVGHHSTSDDSTKYRPVDEIEHWRTARDPISRYRKWVQGNDWWSDAEESELRSRVRKELLQAIQVAERMPKPPVTELFTDVYDKIPSNLHEQEQLLRDTIMRHPADYPTDVPV

SEQ ID NO: 68431 - protein, 238 aa, Zea mays
  Clone ID: LIB3136-043-A12_FLI.pep
SCIVFPDQPEKRRASELFKTAIDTIEGVTISSLDDLPTDPVNSFFKSIRNTLDFDFSDDNEGRWKSDEPPSLYIFINSSTRDLASIEKYVEKFATSVPALLFNLELDTLRSDLGLLGFPPKDLHYRFLSQFTPVFYIRQRDYSKTIAVAPYIVNYSGAVFRQYPAPWQVMLKQADGSYACVAESEARFTLGQAKEELLRVIGLQEEEGSSLEFLRRGYKNATWWEENVDQETSSAWRT

SEQ ID NO: 68432 - protein, 247 aa, Zea mays
  Clone ID: LIB3137-013-B7_FLI.pep
FFDVVDRAKASLEARCPGVVSCADILAFAARDSVVLTGGLGYKVPSGRRDGRISNATQALNELPPPFFNATQLVDNFASKNLSLEDMVVLSGAHTIGVSHCSSFAGINNTGDRLYNFSGSSDGSICPSNSGRFFPNTTTFMDLITPAKFDNKYYVGLTNNLGLFESDAALLTNATMKALVDSFVRSEATWKTKFAKSMLKMGQIEVLTGTQGEIRRNCRVINPANAAADVVLASQPDSSGSTGVAAS

SEQ ID NO: 68433 - protein, 67 aa, Zea mays
  Clone ID: LIB3136-011-G4_FLI.pep
DDEKGQCWRSRTADHEEQLACESWRAPEAHRDLVFFFNQRILLPRCAPSEAYLPCASSAFTDRLVDL

SEQ ID NO: 68434 - protein, 153 aa, Zea mays
  Clone ID: LIB3150-051-E2_FLI.pep
ALPSPLSSLPSPCSSLSRPSSSRERMSRITGMSSWHVAAASAPGSRGSGGLFRSPVLAPPTSLFKNFGTATMSKGLMGPSFEASGRYSYSGKQPTTPLSIIFSSPREALGMDIGHHGRHEHHQKEYHASDIADEPLKKKDVSFFDFLGVGVSS

SEQ ID NO: 68435 - protein, 97 aa, Zea mays
  Clone ID: LIB3150-066-H8_FLI.pep
RHKHEHVPSGTPGLQFALSLTARCDTGTSLGEACRVHFYTEDIHIHTHNPKRAPNTVTQVGAEFNGMNGIHSYFSEIIHGAVYLYLKTSKDVFHFVD

SEQ ID NO: 68436 - protein, 79 aa, Zea mays
  Clone ID: LIB3150-083-F9_FLI.pep
FLFIYHIKPHAVQNRNGSVGLLMIAYECKTLGYSFSSIKATRYTQECNRIFRTLQVVSVKCLCRQKAASFSRRCACHTI

SEQ ID NO: 68437 - protein, 129 aa, Zea mays
  Clone ID: LIB3150-093-G6_FLI.pep
GSLKKIPNLSDPAEYSRLGLVPRRADLDMNQHVNNVTYIGWVLESIPQDIIDTHELQTITLDYRRECQQDDIVDSLTCIEEGEEKSMNGSASAAAPHKEERQQFLHCLRFAANGHEINRGRTVWRKLAR

SEQ ID NO: 68438 - protein, 206 aa, Zea mays
  Clone ID: LIB3150-110-C1_FLI.pep
EELVRVDRTVAVALGPRSPESPGTLFVTTRRVIWLSEAEKGKGYAVDFLAISLHAVSRDLEAYPSPCIYTQIEAAVGTEEEAGESNPEANELELSRVSEMRLILADPGQLDALFDVLCHCAELNPDPNAECNGENGWIRGENMSNGDWIHDDVDMVDENVPQFFNANPIGQNGGYDLSRSVFELQINDQRFEDAEEEQESHENNGH

SEQ ID NO: 68439 - protein, 407 aa, Zea mays
  Clone ID: UC-ZMFLMO17207B11_FLI.pep
LSYHKKLHGFIQSEYQRGVSAWNFDIEDLKAQASLIHDDEPPEIKEDEDIARNIEDLSSRNHLGKSFANECNSRQRAFVTTLKSDGNSPTTNEAFDFDFDFSEAATTRRADGHERNIRENDSLPSTAKRDPESNHWTNDVGQRQLSSGGSNSSTAERGYGFERDAVVQTIPDKQRSEARKTASLSGPLSLPTRASANSLSAPIRSSGGFVDSSGDKSKRSVVEIKGRFSVTSENVDLAKVQEGPLSSLSRKSPEGSLLRKSASTGDCLINTKLMRNANQLKEFCNSSVSSSVLIPHLNNLVQQTMFQQDVIMNLLSNLQQDEKVDRTQPGISSQVRTMENGKVADTANSEKERSLLVKISELQSRMITLTDELIAAKTKHVQLQQELNALYYREEIEDVRDEDIEET

SEQ ID NO: 68440 - protein, 318 aa, Zea mays
  Clone ID: UC-ZMFLB73325C06_FLI.pep
PCSCWGRSSARWRGIVEAAVRVWPDSSLAPAPAPAGLAGGHAPGVRRLRGREVPGGACVRVVRGPAEAGRVAALDVRRVQELPVGGVRGGARGGGRVGGVGPEPYGRGHGRRAGAGGAGGGRGRGARRADVQHHGVRPAGQGLHAAGLPGDRPRRGRRGRQDPGVRQAAAAQGDEGREPGVAGRRVLHGRRPRQARVPGGQPRRQEQARPRRQGPRGGRGPLARPRARGRRPVRGRRQRRGRVLVHGAVQVPQRRRARGRRVRARATCARAGGVFGGGMVTREWWSHHPGEGGGGGLGTKYRAVFFLLGFVFKLCFWP

SEQ ID NO: 68441 - protein, 200 aa, Zea mays
  Clone ID: LIB3136-049-B2_FLI.pep
PGVHRGGRSGRRPLRPPLPPHAGKRRSDPLPGGHGVDLWRAAGHRWRQVHAAWVRGRGGGAGVRVHCRVRRVVGPDQVGGHDRDLPAGGEAGGAGPRWRHIGGAHLRAVTVVPGDAVQLQVRHLLVLRRVGGCYGGGRGRVPAGDPGRAYRVHGRGVGEALVLEALRQAQAVFRAHHSDGTSKTGGWARMSWELRRFTAK

SEQ ID NO: 68442 - protein, 85 aa, Zea mays
  Clone ID: LIB3136-058-H12_FLI.pep
EAEVLWQAQGVRCCGAAKSHFSKSSNCDTFVCNLAVPSFVAGWFRSMVRSSMDRSMLQNCSVYVLCYFGCLMPQSLHIDFNCFVV

SEQ ID NO: 68443 - protein, 174 aa, Zea mays
  Clone ID: LIB3150-080-B4_FLI.pep
NRFERSPKESDSWKSQRDTNPFFPLPQAEDRTPKPGSQPRKPGDRRRQVENTLGGRSQAASESRGGVAVLAHGGGHSRRRSGMATPTPMPGSEGTLVAVMPRSPSPTPAEAGTSATETPVLIFLYFHKAIRAELEALHGAAVLLATERTGDVAALAERCRFFFSIYKHHCDAED

SEQ ID NO: 68444 - protein, 731 aa, Zea mays
  Clone ID: UC-ZMFLB73279B08_FLI.pep
SPGVSPSTSPSSGSLVARYAMESSKQLASGIIDMGYKTFSKYRQELLPDGSNSPLSSSPGRRSGKIPSSVHPLEADNAGMVVIKDFTSKAVVSQFRAHTSPISALCFDPSGTLLVTTSVHGHNINVFRIMPTCVANGTGATRYDWTASHVHLYKLYRGMTSAVIQDISFSHFSQWISIVSSRGTCHIFTLSPFGGDASLQPQNSHSDGPPLAPCQSRPWWSKPSFLMDQQLHQVPSTVTNSVVSRIKNNNSGWLNTVSNVAASASGKLSVPSGAVTAVFHNSIYQGSLPVPSKANALEHLLVYSPSGHVIQHELLPSSGSESSGSSPRVGSGHNSQLQDDEMHVTAEPIQWWDVCRRTNWPERDENIANIVLYNQRSSMMAMDVSDCEDSEHSDSTASNDGISGKEIMRVRERSSWYLSNAEVQINSWRIPIWQKSKICFYVMDHPAAESVESVSSGGEIEIEKLPLHEVEIRRRELLPVFKQFLYSERHSSDRNVANGRSNANGGFQNVLSVINDVQYGSVKDNGEYETKSVAPLSGFYTDTRETVNTNGLATQTFSGPGSAVNLQQVGKRNSIESPNAAILAGKAENDSNGYISTPPETNASIRSLSSYCLLDGSVNGMPSPANSASCKPETTNNSVLSNVASTDVTNGCLTTVDSGQQEASDSHSSVEFTQYFQEGYCKISELDDCRELTEAVTDADSSSSHCEREKPEEDGDNDDLLGGVFAFSEEG

SEQ ID NO: 68445 - protein, 476 aa, Zea mays
  Clone ID: UC-ZMFLMO17326E08_FLI.pep
PIYIQEGRLTPRSDVYSFGLVLCELMAGKGVRKGAINLILYANKGCASGKGFREICDAAIANENNMKILKEMQKLAAECLSLTISRRPQMTDVVKRLRTLRKELKNRHENYSEPILASHHSWRKNKKQEMIAPTYNSKLQIKKSLSFFKRSISSSKVQSEPSNVRIFAQEELKEVTHNYSCLLGGGLSGKVYRGTLEDNAVVAVRVFSEVLEGFEEAFVNGGMILSQISHRNVVKLLGYCLDADCPAFVYEYAARGSLSDVLDRHEDFPLDLRAKIAVKIAEALEYLHSPATGIIRHGYVVPSKILLDGNFMPKLTGFSWARKLIKDPIHDRCVSLRVKADVYQFGVLLLMLISRKNFVFYADHDDIVAQFRAARQADGSGRAFFDDDVAGHGGDVGLLEEMGRLSLKCVCEEIDQRPTMSEVAEHLRIITRSWKKCSSSEGATALVSKAMAKKSHVAAEAEATKLDWPPGSDIRD

SEQ ID NO: 68446 - protein, 637 aa, Zea mays
  Clone ID: UC-ZMFLMO17330D10_FLI.pep
AAAFHPEDKGIEQNPQTLDKDELSPSGLPDYMEHVSADGMHPLGSNELSMATRTSETGDGEETIVEDLYKGESELENQNKQLESTPPDQYFSSPGIPAPSVVSTALQVPAGPIVVPASVDPTQENAIAALQILKVIESSAQAGELCTRREYARWLVAASNCLSRNTFSKVYPAMYIDNVTELAFDDVTPEDPDFPFIQGLAEAGLISSKLSRSDMNIPEDVHDNHILFSPESPLSRQDLVSWKMALDKRQLPEVDRNCLFKLSGYIDIDKINTAAWPALAADLDAGDQSITALAFGFTRLFQPNKPVTKGQAALAFSAGDSGEVVLEEVARIEAEKIAEAAVNAHAALVAQVEKDLNASFERELKEERERVETLEKVAEEARVELDRLRAEREEEKNILVRGRAAVESEMEVLLKLRSEVEEQLQNVLSKKVEVSFEKSRIEKLQKEIESDNSAVVQLQYELEVERKALSMARAWAEEEAKKAREHARALEEARNQWERQGIRVVVEGELKDDASAGVTWANAGKENAVDESINQAEALLEKLKTMSGEMEVRSRGAVERVMQHVRSFIAILKQQAADARQWCTEFGACAASRANEVSAQVKGSVSAFGATLGDKSKRAMEECKDGLERISHRFKTD

SEQ ID NO: 68447 - protein, 238 aa, Zea mays
  Clone ID: UC-ZMFLMO17354G10_FLI.pep
KSYLPLHQHTQLTQRLSYRCLHRLLGQLYHWFRLCRQEIMLGCCYLDHLIFFSNRFLKSGVQKAGSKTRYERVGNEQFVTETSKWVFHERGHLKAVNVKHHKVGETNEPGMYRINDDLEYSVEIYEWSGTSWKPYVADDVQLQFFMMSPYVLKTMSNDNKGLYSTSFKVPDVYGVFQFKVEYQRLGYTGLSFTKQIPVRPYRHNEYERFITSAYPYYTASFSTMCAFFIFSLVYLYHK

SEQ ID NO: 68448 - protein, 302 aa, Zea mays
  Clone ID: UC-ZMFLMO17377E08_FLI.pep
SVSCRGTRARSADRRRRRREALRPVAGMGRQPCCDKLGVKRGPWTAEEDRKLINFILTNGHCCWRAVPKLAGLLRCGKSCRLRWTNYLRPDLKRGLLTDAEEQVVIDLHAKLGNRWSKIAAKLPGRTDNEIKNHWNTHIKKKLIKMGIDPVTHEPLDRKTTSSGPATTSQSTKSDEATKEQSPQNDDAVIRDVPADGCSPTESSTNTVSTGGSSSSGGGGHDQDPLVKWLLEEEPATGDEAWLNFTGSVDVDEFSSIAAGPELLPWDGATDWLLDYQDFGLGDSSLVDGYMVNNNSSNGAKF

SEQ ID NO: 68449 - protein, 289 aa, Zea mays
  Clone ID: UC-ZMFLB73099C04_FLI.pep
HFSQSGGPRFLPQSSLLTRPLPVPLPICASISLFAEVLVSMYLLGNKSGKKKVYVDYMNVPLPYAIEENYGGRFFDDDDDLAQVLQDQEILYHLIQGSNGGGSSRTHSIPSSSYGHDRTSNAQKLSGDVNCECELQLAVDEALARELHEMESKLANTSLNDNNGRKTTSSSAFDRGNNSASRPPQVLEEDVIDPDNMTYEELQQLGEAIGTQSKGLPESVIALLPTSTYKTGIFSRKEKHDECVICCMAYKNRDRLTKLPCGHHYHQACVAKWLQINKVCPVCNKEVFS

SEQ ID NO: 68450 - protein, 318 aa, Zea mays
  Clone ID: UC-ZMFLMO17320F02_FLI.pep
LALSPRIFSEVNKFKPDIIHATSPGIMVLGALAIAKMISVPMVMSYHTHLPAYIPRYNLNWLLEPTWSFIRCLHRSADLTLVPSVAIAEDFETAKVVPANRIRLWNKGVDSESFHSKYRRHEMRVRLSGGEPEKPLVIHVGRFGREKNLDFLKGVMERLPGARIAFVGDGPYRSELEKMFTGMPAVFTGMLQGEELSQAYASGDVFAMPSESETLGQVVLESMASGVPVVAARAGGIPDIIPKDKEGKTSFLFTPGDLDECVRKIEQLLSSKDLRETIGMAAREEMEKCDWRAASKKIRNEHYSTAISYWRKKMGKTN

SEQ ID NO: 68451 - protein, 162 aa, Zea mays
  Clone ID: LIB3066-006-E5_FLI.pep
GSGWCGRQRRRRTAAGRPSVRPGEGGGYARPQAPRKPGDCEPGPGGVRRRRRGGRQAGGGGGPGGEEEEEHGQTPRRCLGPAEHKDRSRCLLPRPSLPGRAALLSSSIHLLTQILLPSLALSFVCAADYARSIYATVLCRILTATAMHQTPTPHIILFLPFF

SEQ ID NO: 68452 - protein, 102 aa, Zea mays
  Clone ID: 700049351_FLI.pep
HWLSSAHTWPGLVLLKLDPFPLIFSNPFLLGSDRVTNPMGAAARKPAAAGVLPIWLCLVCASRAQPYIGVNYGEVADNLPSADETARLLRSTSISRVRLYGV

SEQ ID NO: 68453 - protein, 129 aa, Zea mays
  Clone ID: 700083315_FLI.pep
HKSSKLLPLLVLRLTQILNISIKSSKPLSLLVLRLTPLVKASEIISGLSGVLLLQPFTTTVPKHGILCPPVLSFFTSLSKTTRPVTRRNTRSPFLRLFKSFFSFKIKVWCIIISLGESPLLPLLPPLLD

SEQ ID NO: 68454 - protein, 141 aa, Zea mays
  Clone ID: 700087958_FLI.pep
LHCILGAARQERRRRCCKHLLESSGTRRSGGDANADHPIRSRMPATVYLELLDRSAVGGIANISYSPRAQQGQPMTPTQIIPSDPVFLTKIPEDGKPTLLVQTPPVMPVCSLARGGHQRRQTSCSICCMINTAKQCWCFIR

SEQ ID NO: 68455 - protein, 132 aa, Zea mays
  Clone ID: 700087254_FLI.pep
KPRRQCQRSFPRALGFNPPTVRSLSLPESNSASSSPGACDMGYLQEARENHVKKKVEEALRSKMKQKALQECDFYCSKYAECARGRTFSVVWQCRKQAKELNECLHQYTNDAILEEMKKAYMIEQKSKEINQ

SEQ ID NO: 68456 - protein, 123 aa, Zea mays
  Clone ID: 700048951_FLI.pep
VPSLRSPELRSHRSPPPPPASRASPSIAPASSTRPPCPRGSDPAIAMQHRSPEAASASASPTAAAVEAMAPGVGGVEPAVTLDQVPRWSDPDQRISLLSPTAAGSETPASSFLSFSDPLTGDD

SEQ ID NO: 68457 - protein, 59 aa, Zea mays
  Clone ID: 700073256_FLI.pep
EHTNAKMHPTSLPIMAVSICRVSIRLSAFFYFLQFIHTLLVVVLPELIYVSIHIEKQLD

SEQ ID NO: 68458 - protein, 333 aa, Zea mays
  Clone ID: UC-ZMFLMO17084A03_FLI.pep
TDKCLSPGVCSYKFPSLRDTALNAIFLLMQLQHSTNISRVNKGMSLEDFKFIYWMEYAHRMWGRALGFVFAGPFAYFIARGYVTRQLGIRLSALFALGGAQGLIGWWMVKSGLEEPTSEYVQPRVSPYRLATHLTSAFIIYCGILWTALSVVMPDPPTGSMSWVNGAAKIRKLAIPVSAVVGITAISGAFVAGNDAGHAYNSFPKMGDSWIPEDVFSMEPFVRNFFENTSTVQLNHRILAATTLLSVGGLWLAARKIDMHPAVKSLIGSTLGMAALQVTLGISTLLTYVPTSLGSAHQAGALTLLSLTILLVHTLRRPSPARLKSIATAVKST

SEQ ID NO: 68459 - protein, 496 aa, Zea mays; identical to SEQ ID NO: 51318
  Clone ID: UC-ZMFLMO17328B04_FLI.pep

SEQ ID NO: 68460 - protein, 269 aa, Zea mays
  Clone ID: 700099230_FLI.pep
RRRTLSASTHLAAGGAARPDPCVCVGRDGYSSLRSHGEPGDEEQPGALEAEGPVRRCAHAAPAPVQRRQGRHPAREGNVPGGAAHQRRPVHRQPGDARHLQPAHRVVPLQPAGLPHRREPAAAGRRGRPRPRLPPRRALRAHRPAPQHARARPGGRARRRRPRRHPQRLPHHVRRRLLQRGRPVHGAHAHAHRPEEGGRQAADRRRLGQVHRRVLLRWYLRRALGILPPLRARPPLLLQVEYKFIKMHIYNIAPPPILLSACKGMPFQQ

SEQ ID NO: 68461 - protein, 144 aa, Zea mays
  Clone ID: 700158052_FLI.pep
RAAGVLLRRGAGNHEEHVHVARAAHHRPGQLPQLLHLRYRGSIHGHGGQSRMDLRQPQPGPSRLLLLDHGRHFNAQLRRVQRVRQELQAQESRLCSHDVTTNSSAPLISRLVHSTRFLCCMFANLWLAKGNLRVLVQPLVRLSI

SEQ ID NO: 68462 - protein, 200 aa, Zea mays
  Clone ID: 700151629_FLI.pep
DIIMVASGGHEDVSFRDNVLQGKDLKTLHQSLEGTDGVDLGHKDIIMVDHMRKMKNNAIVCNIGHFDNEIDMLGLETYPGVKRITIKPQTDRWVFPETNTGIIVLAEGRLMNLGCATGHPSFVMSCSFTNQVIAQLELWKEKSSGKYEKKVYVLPKHLDEKVAALHLGKLGAKLTKLTKSQADYISVPIEGPYKPAHYRY

SEQ ID NO: 68463 - protein, 135 aa, Zea mays
  Clone ID: LIB3958-006-C8_FLI.pep
SAVRPATSYRSGRNGEGAAGVAAPGGTGSKADEWEKAKLGRVREEYEKMMETIAEWETEKKVKARCQKEQKETELDRKREKALEEYNLEMTRISKISGGARAMAEERKYNDGKKIREKARKMRSTGKPHRTCACF

SEQ ID NO: 68464 - protein, 208 aa, Oryza sativa nipponbare
  Clone ID: JC-OSROLIB3475040A01_FLI.pep
GSALFEMGNTRVIAAVYGPREVQNKGQQVNSKDALVRCEYRMADFSTGDRRRKPKGDRRSTEISLVIRQTMEASILTHLMPRSQIDIFVQVLQADGGTRAACINAATLALADAGIPMRDIVTSCSAGYLCSTPLLDLNYIEDSAGGPDVTVGFLTKMDKVTLLQMDAKLPMDTFETVMDLAIEGCKAIANYIREVLLENTRRLECQRG

SEQ ID NO: 68465 - protein, 195 aa, Oryza sativa nipponbare
  Clone ID: JC-OSROLIB3475042F09_FLI.pep
VSFVKDKESWDLNNTEKIETAGAKKEEGNALFKLGKYVRASKRYEKAAKFIEYDSSFSEDEKKQSKQLKVTCNLNNAACKLKLKDYKQAEKLCTKVLELDSQNVKALYRRAQAYMQLADLELAEVDIKKALEIDPDNRDVKLTYKNLKEKVKEYNKKDAKFYSNMFAKMTKQPAEDGKAGSGAESKQGSEPVTAA

SEQ ID NO: 68466 - protein, 199 aa, Oryza sativa nipponbare
  Clone ID: JC-OSROLIB3475P054F09_FLI.pep
CSCNHAIDANGHGVRALHGGSELEGVGHGGGDDGLGRERRLPWAEQRVVGDLRDVDGRAGHLEDLQDAAERLEAPGELAVAGAEHRVLAVDLAQLPRVGPDLRLDARVLGLEARRLGDQLLQPLLLPRPGSPRRLPVRQHPLPLPLVGATAAAAGVALRAGAPARRRRHGHSTVLVQNLIQEPDLFKRSKKFQRTQERN

SEQ ID NO: 68467 - protein, 273 aa, Zea mays
  Clone ID: JC-ZMSHLIB3569P038F11_FLI.pep
RRTLTAASGPALPKEAAGAGARVRAAAPGRRGRDQEDGRRVQWVFLGCPGVGKGTYASRLSQLLGVPHIATGDLVRDALATPGPFSNKLAEIVNHGKLVSDEIIINLLSRRLEEGEEKGELGFILDGFPRTIGQAEILEGVTDIDLVINLKLREEALLAKCLGRRMCSQCGGNFNVASIDIEGEDGGPRMYMPPLLPPPQCESKLIARADDTEEVVKERLRVYHDLTEPVEEFYRARGKLLEFNLPGGIPESWPKLLQALNIEDPDNKRSAAA

SEQ ID NO: 68468 - protein, 164 aa, Zea mays; identical to SEQ ID NO: 56701
  Clone ID: JC-ZMXLIB3526P043BD08_FLI.pep

SEQ ID NO: 68469 - protein, 81 aa, Zea mays; identical to SEQ ID NO: 40297
  Clone ID: JC-ZMXLIB3527073DE07_FLI.pep

SEQ ID NO: 68470 - protein, 207 aa, Triticum aestivum
  Clone ID: UC-TSRO9316039E04_FLI.pep
WSFPSLAPRLCLSIYITFVSTVDHIVFIIILLNLIIIIVITTSHVQLREVHITKVTKSSVFIILILPFIPVNLEEHRRPAFLLEQPRPPLGLSFLDKVAYSPRGNSRLALLNADSIKELKVKLILHAISRGLCREVEMAIRPQVELHILGVGQLNRQVNLVQPLRPLGARVATHACLLEDISLLLRRDLRFRVQMSRGSRTRRGGRA

SEQ ID NO: 68471 - protein, 447 aa, Oryza sativa
  Clone ID: UC-OSROM202037B11_FLI.pep
LLLLLSLAAADMSIVSYGERSEEEARRLYAEWKAEHGKSYNAVGEEERRYAAFRDNLRYIDEHNAAADAGVHSFRLGLNRFADLTNEEYRDTYLGLRNKPRRERKVSDRYLAADNEALPESVDWRTKGAVAEIKDQGGCGSCWAFSAIAAVEGINQIVTGDLISLSEQELVDCDTSYNEGCNGGLMDYAFDFIINNGGIDTEDDYPYKGKDERCDVNRKNAKVVTIDSYEDVTPNSETSLQKAVANQPVSVAIEAGGRAFQLYSSGIFTGKCGTALDHGVAAVGYGTENGKDYWIVRNSWGKSWGESGYVRMERNIKASSGKCGIAVEPSYPLKKGENPPNPGPTPPSPTPPPTVCDNYYTCPDSTTCCCIYEYGKYCYAWGCCPLEGATCCDDHYSCCPHEYPICNVQQGTCLMAKDSPLAVKALKRTLAKPNLSFLFGNGKKSSA

SEQ ID NO: 68472 - protein, 216 aa, Glycine max
  Clone ID: 700756003_FLI.pep
QTQRIVNGALFLMTLGGNDFVNNYFLTPVSARSRQFTVPQYCRYLITEYRKILMRLYELGARRVLVTGTGPLGCVPAQLATRSSNGECVPELQQAAQIFNPLLVQMTREINSQVGSDVFVAVNAFQMNMNFITDPQRFGFVTSKIACCGQGRFNGVGLCTALSNLCPNRDTYAFWDPYHPSQRALGFIVRDIFSGTSDIMTPMNLSTIMAIDSNIY

SEQ ID NO: 68473 - protein, 206 aa, Zea mays
  Clone ID: 700044912_FLI.pep
TTDVLVDEGGERGLRDGADDALLLLAALEDEHGGDAADAVGRRHVGAVVRVHLAARDLAGVVLGQLVDHRRDHPARPAPRRPELHQHRRLARHHQPVPVLLVRHHNCPDKHISPRVIVSQFTSYIHIYWQLATVYPIITFVHCVLGLADVPRPARGDAAHGQRRERPLRRQHQVADEEPVLAASGGVQRPRSEARLHGHCCLWWTN

SEQ ID NO: 68474 - protein, 383 aa, Zea mays
  Clone ID: JC-ZMSHLIB3587P033F12_FLI.pep
SSIVPSTGRPASLALGSCSDRIERRTRQGSRTRTTMAQGSRSATVPAAASFFALVAVAPLLLCCAPAAAELARLEHPAKDGGSLSLLVVGDWGRKGTFNQSRVAHQMGRVGEQLSIDFVISTGDNFYENGLTGTDDEAFEQSFTDIYTAKSLQKPWYLVLGNHDYRGDALAQLSPVLRKIDSRFICIKSFVVNAEIVEFFFVDTTPFQLKYWTHPKDDHYDWRGVAPRENYINNLLKDLDGAMKTSTAAWKVAVGHHTMRSVSDHGDTKELLQLLLPVLQANGVDFYINGHDHCLEHISSRDSPIQYFTSGGGSKAWRGVQNPTEDDLKFFYDGQGFMSLQLDRSQAKFTFYDVDGKALYSYTRSSLMETGHHLQASGYINEE

SEQ ID NO: 68475 - protein, 126 aa, Zea mays subsp. mexicana
  Clone ID: UC-ZMFLTEOSINTE011A05_FLI.pep
VDASLAGAIIGKGGTNTKHISRVTGAKLAIRDNEADPNHKNIELEGTFDQIKHASAMVTELIVRISGKPPPQAKNNPGRGPGSHAGGPGSNFKTKLCENFNKGSCTFGDRCHFAHGEGELRKPAAA

SEQ ID NO: 68476 - protein, 263 aa, Oryza sativa nipponbare
  Clone ID: JC-OSLELIB3474007E02_FLI.pep
SLLVETSLESTMEQRKFLLCLILGLLATSGPAKTVNADSPFDFYYLILMWPGAYCTDSEYGCCVPKYGYPSEDFFVKSFMTFDSSENTAVVRCNSDNPFDINKLDSIENNLNHYWSNIKCPRTDGVNSWKSEWNSYGVCSGLKELDYFKAGLQLRKNADVLSALAEQGIKPDYQLYNTAFIKWAVNQKLGVTPGVQCRDGPFGKKQLYEIYLCVDKDAKSFIDCPVLPNLSCPAEVLFHPFHTWMLNTTSAANIVMPTETVLA

SEQ ID NO: 68477 - protein, 262 aa, Oryza sativa nipponbare
  Clone ID: JC-OSLELIB3474010C08_FLI.pep
LLVETSLESTMEQRKFLLCLILGLLATSGPAKTVNADSPFDFYYLILMWPGAYCTDSEYGCCVPKYGYPSEDFFVKSFMTFDSSENTAVVRCNSDNPFDINKLDSIENNLNHYWSNIKCPRTDGVNSWKSEWNSYGVCSGLKELDYFKAGLQLRKNADVLSALAEQGIKPDYQLYNTAFIKWAVNQKLGVTPGVQCRDGPFGKKQLYEIYLCVDKDAKSFIDCPVLPNLSCPAEVLFHPFHTWMLNTTSAANIVMPTETVLA

SEQ ID NO: 68478 - protein, 266 aa, Oryza sativa; identical to SEQ ID NO: 53807
  Clone ID: UC-OSFLM202141G08_FLI.pep

SEQ ID NO: 68479 - protein, 281 aa, Oryza sativa
  Clone ID: UC-OSROM202040D04_FLI.pep
EKRLVRERELRALERRELDPVAAGAAAGGGGAVDEALAGGVHAEVELVQLAVAGLVAVALHERLGADAALDGALDLGQRVVAAVGRHAAVAQRGEHGQPRPEAERRLEVAVLVAERRRGAGAVLLPLVRPEPDAVVARARQRRPLRAHAPQQVAHLGGVELAVRVAVLRVAAVVAVGPEAVDAEVGRRLAGARVAAALLRVAVRPGPLQHQEEEVVVLRADAHHREQQRKPDPRRCPRRRRHGCFTHSLTHCNLFLSLLLSLMMMKAVALLQETSHGCADL

SEQ ID NO: 68480 - protein, 230 aa, Oryza sativa
  Clone ID: UC-OSFLCYP179H11_FLI.pep
LQWPGTICASTRHCCAINGCCRSEPLQTFTIHGLWPDYDDGTWPACCRHTSFDMDKILPLKPTLEKYWPSLYCSSSSTCFSGKGPFWAHEWEKHGTCSSPVVKDELEYFTTALDLYFKYNVTEMLASGGIYVSNGKQYALTDVIDAIKCAFGASPQIVCKKGSVEELRLCFDKDLKPLDCLTTTATNENVSKKYCPRYITLPTYDPIVHANSTREIITVESEVYGYLYTS

SEQ ID NO: 68481 - protein, 282 aa, Zea mays
  Clone ID: UC-ZMROB73011A02_FLI.pep
QQQELAWSAMSSQNEEQQIENCTLRHDTSTEQYNRCRGIFIEKPTNADTLPGRRLLGCEVCLDVLDLPAADPECLGEDVGGHGRRGPEERHGDGLRALELAVEGGDDGGGAVPPVLLEVDEAAGEDEDVPRGDGLAEEPVGGGEEADLERALEDEDDLGGARVRVRRVLAARRVVDARHGDAQRVHPRELVHVGRRHRGARRVVGVARAPQPVEEEVVRRDVRLAREPVQLDRGSVVSHADVLEHVRVAGEREGDGAGRGDDVEVDPRHDRPVSASLVCTLA

SEQ ID NO: 68482 - protein, 555 aa, Oryza sativa nipponbare
  Clone ID: JC-OSLELIB3474051H06_FLI.pep
HKYRGTRLLPRALRAESFSHGAAGAAAAPAGAERAGRGEDAVVPLHGDRRRRHGLLHRRLRPLLHLPRHQAARPHLLHRPRQGEPRQPAAQRRRGGERSRVLRHAGGAALLRVARRQARPEERVRDDAADDGHLLHRVGALVLAHAHQRHGDALLLPVLARIRHRRRLPAVGDDHVGVRQQEDPRRVHRRRVRDAGVRHPRRRHRHPHHLLRVPRRVPGAGVPGRPRGLHRPPGRLRVADHPHARRHAGAAHLLLADEDAGDGALHRPRRQERQAGRRRHVQGAPGRDPGGAGQAGADGDPEQQQLRPLLPPVRAPPRPPPRRHRHDMVPPRHRLLQPEPVPEGHLHQHQLDPQGQDHVGAGGGVPHRARPDAHRPVRHRPGLLVHRLPHRHRRPLRHPAARVFHDDRVHARPRRAVPPLDDEGEPHRLRRHVRLHLLLRQLRPQLHHLHRAGGDLPGEAAFHLPRHLGGGGEGRRHHRIVRVPVRGAGPAQARRRVQTRDRGEELAVRARRMQPARVHLHVPRAGVEGEVAGGDVRRGGGRRRRGGRRRRWRRR

SEQ ID NO: 68483 - protein, 587 aa, Oryza sativa
  Clone ID: UC-OSFLM202083H11_FLI.pep
PPEQQRHRHGGRSDARALRAGQRQDAVVPLHRHRHRRHGLLHRRLRPLLHLPRHQAHRPRLLHRRRRVQAGQPAAQRLGGRERRRLRRHAHGAALLRVARRQGRPEERLRHDAALDDHLLRRVGAVVRGHADERHGHALLLPLLARLRHRRRLPAQRHHHVGVREQADARGVHRRRVRDAGVRDPRRRRGGDRDHRDLQEPVPRAAVRRRPGGVHPAPGRLRVAAHPHVRRASRGAHLLLADEDAGDGAVHRHRRQERGARRGRHVQGAPGEDHGGAGGDGLAGGQALHQQALRPLLRRVRAAPRVPPPGHDVDVAPPGHRLLLPEPVPEGHLQRHRVDPGGEDDERAGRAVPHRARADADRAVRDGAGLLVHGGADRRGRAVQDPGGGVLRDDGVHAGAGGAVRPLDGGGEPDRVRGAVRAHLLLRQLRAERDDVHRAGGDIPGEAARDVPRDIGGVGEGGRDRRVFRVPVPGAEPRPGQGGGARLPAGHRRPQLALRARRLQLARLPPHLPCAGAQGQVARGDVTGERGRPAVIHPLIPPPSVCMQDPCICVVSPLEIFVLFFLESIGMHMFFFFLESIRGWMMK

SEQ ID NO: 68484 - protein, 488 aa, Oryza sativa
  Clone ID: UC-OSROM202036H08_FLI.pep
GILPPLNRNSCYSSMFARTTPRVRISAPVKKANFGSVRNSHSLKQRLQHLIPEKAAEIKNIKDKHGDKLLGTCTVSQAYGGMRGVKAMIYETSLLDADEGIRFRGFTIPEVQQKLPKAPGGAEPLPEGLLWLLLTGEVPTQAQVSELSADLAHRNKVPEWVFKLLKDLPPDMHPMTQFIIAINALQKESLFAQKYQEGMPKSKYWEYALEDSLNLIARLPTVAAAIYRYTYKNGQIIQPDSKLDWSANFSRMLGHNNKQFDDLMRLYLTIHSDHEGGNVSAHATQLVGSALSDPYLAFAAGMCGLAGPLHGLANQEVLRWIVNLKKKFGDRNITNEELKKALWDTLNSGQVVPGFGHAVLRKTDPRYTCQREFALKHLPNDPLFKLVAQLYEVVPGILKEHGKTKNPWPNVDAHSGVLLVHYGMTEENYYTVLFGVSRAIGVLSNLVWTRALGFPLERPKSVTTEWVRNWSHTAPMANDDQIATSKAD

SEQ ID NO: 68485 - protein, 199 aa, Oryza sativa; identical to SEQ ID NO: 68466
  Clone ID: UC-OSROM202010G03_FLI.pep

SEQ ID NO: 68486 - protein, 199 aa, Oryza sativa; identical to SEQ ID NO: 68466
  Clone ID: UC-OSROM202001A12_FLI.pep

SEQ ID NO: 68487 - protein, 203 aa, Oryza sativa; identical to SEQ ID NO: 53813
  Clone ID: UC-OSROCYP030G02_FLI.pep

SEQ ID NO: 68488 - protein, 553 aa, Zea mays subsp. mexicana
  Clone ID: UC-ZMFLTEOSINTE42C12_FLI.pep
FVSPTHQSGCRLRAGRNNLTREMGQCCSRATAPDSGRGGANGYGYSNQAKPAQAPPSYNPPQQAAEVRYTPSATNSSAVPPVAVPPKPTADTILGKQYEDVRSVYSLGKELGRGQFGVTYLCTEIASGRQYACKSISKRKLISKADREDIRREIQIMQHLSGQPNIVEFRGAYEDKSNVHVVMELCAGGELFDRIIAKGHYTERAAATICRAVVNVVNICHFMGVMHRDLKPENFLLATKEENAMLKATDFGLSVFIEEGKMYRDIVGSAYYVAPEVLRRSYGKEIDVWSAGVILYILLSGVPPFWAETEKGIFDAILHEEIDFESQPWPSISESAKDLVRKMLTRDPKKRLTSAQVLQHQWLREGGEASDKPIDSAVLSRMKQFRAMNKLKKMALKVIASNLNEEEIKGLKQMFMNMDTDNSGTITYEELKAGLAKLGSKLSEAEVKQLMEAADVDGNGSIDYVEFITATMHRHKLERDEHLFKAFQYFDKDNSGFITRDELESALIEHEMGDTSTIKEIISEVDTDNDGRINYEEFCAMMRGGMQQPMRLK

SEQ ID NO: 68489 - protein, 546 aa, Oryza sativa
  Clone ID: UC-OSROM202016F06_FLI.pep
GVLGMGNQCQNGTLGSDYHNRFPREHAVGYVQGDSYLDLKKFDDTWPEVNNFKPTAASILRRGLDPTSINVLGRKTADLREHYIIGRKLGQGQFGTTYLCTEINTGCEYACKTIPKRKLITKEDVEDVRREIQIMHHLSGHKNVVAIKDVYEDGQAVHIVMELCAGGELFDRIQEKGHYSERKAAELIRIIVSIVAMCHSLGVMHRDLKPENFLLLDKDDDLSIKAIDFGLSVFFKPGQVFTELVGSPYYVAPEVLHKRYGPESDVWSAGVILYVLLSGVPPFWAETQQGIFDAVLKGHIDFQSDPWPKISDSAKDLIRKMLSHCPSERLKAHEVLRHPWICENGVATDQALDPSVISRLKQFSAMNKLKKLALRVIAERLSEEEIAGLREMFKAVDTKNRGVITFGELREGLRRFGAEFKDTEIGDIMEAAHNDNNVTIHYEEFIAATLPLNKIEREEHLLAAFTYFDKDGSGYITVDKLQRACGEHNMEDSLLEEIISEVDQNNDGQIDYAEFVAMMQGSNVGLGWQTMESSLNVALRDAPQVH

SEQ ID NO: 68490 - protein, 271 aa, Zea mays subsp. mexicana
  Clone ID: UC-ZMROTEOSINTE038C05_FLI.pep
QQKPSLASLVRSPRCGASFGHGDTAAIPTMEYVNPLTGFRVDGRRPNEMRQLKGEVGVVARADGSALFEMGNTRVIAAVYGPREVQSKGQQVNSKEALVRCEYRMAEFSTGDRRRKPKGDRRSTEISLVIRQTMEASILTHLMPHSQIDIYVQVLQADGGTRSACINAATLALADAGIPTRDIATSCSAGYLCSTPLLDLNYLEDSAGGSDVTVGILAKMDKVTLLQMDAKLPIDTFENVMGLAIEGCKAIATYIREVLLENTKKLECQRG

SEQ ID NO: 68491 - protein, 274 aa, Oryza sativa; identical to SEQ ID NO: 50964
  Clone ID: UC-OSFLCYP024A11_FLI.pep

SEQ ID NO: 68492 - protein, 190 aa, Oryza sativa nipponbare
  Clone ID: JC-OSLELIB3474024D11_FLI.pep
LTYIHGGRVGVQGRHRAARGEPRQRGIVVGGGRRRRRAAEGAGARAERGGGGVIRGAGAAAAGARVGEVPHRPVPPAVPPALHRAPHLCPPRLLQVQARPHVRHRRQDPQRLRGPRRRCPRRLTGDLAADPRSIHPSIRRQLIATAVHMSLPACYYKSVSMYIYTGMRVIDQGSMYTQMISMHRSLDRDL

SEQ ID NO: 68493 - protein, 154 aa, Zea mays
  Clone ID: LIB3957-001-C4_FLI.pep
SGRTTIEEVQNYALPATSLSMRSAASSTVAIVCALDSSTLISKCSSRLITISTVSSESAPSSENFDSPQTSVWSGRASCFFTISQTLSVVSFLAAQETDLIGIGCRRRNVLPFLNGEKAREFVLIALTGLAKERAEDPAMEAMCVRREGRGRDG

SEQ ID NO: 68494 - protein, 284 aa, Zea mays
  Clone ID: LIB3960-001-H9_FLI.pep
FTRTNMTLQVLGYITISQNKHRPGYTAGAGQQYEHCFVFMCGIALSGTDGDPSLLHLGRGGILVGGLRRRPLSEHRQVSLLLEVLHRVVKRLADRPELQPQVPELLVGELVRLLPRIHLVGAPGWDGVLGEELGEDADDVLAVEDALGAEVAAGRAGALEDAEVRVGHVAHVHVRLHGVGEGAGRAVQVLEDVRDAGVHRRLQQGAHHQHGVHHHQVHAPPPGRLPRRLLRHRLAVAVPVPGFLAELEVAPARLVDHVDHVLGAAHRRLHHLLRVVGDGGGGVE

SEQ ID NO: 68495 - protein, 563 aa, Zea mays
  Clone ID: LIB3969-005-E7_FLI.pep
WGCRADKSSTGGWASAALAVGIELCERLSTMGIAVNLVTYLTATMHLPSAAAANVVTDFMGTSFLLCLLGGFLADSFLGRYLTIAIFAAVQASGTGLLAVSTEVSQLRPPPCGPGAAEPCEQATGLQMGVLYVCLYLIALGTGGLKSSVSGFGTDQFDERDARERAAMGLFFDRFFFFVTFGTLLAVTVLVYVQDHVGRSCAYGICAGAMLVAVAVFLSGTRRYRYKRSSGSPIVHILQVLVAATRKRNIVMQPLTAAALYEDHPEHARIPHTAQFPCLDGAAVMAGDDDNEVGHDGRPTMNPWKLRSVSRVEEVKMVARLMPVWATTILFWTMYAQMITFSVEQATTMDRRMAGFEIPAASLTVFFVGAIMLTLAFYDRVFVPLCRSLMTGRQGLTNLEKIGIGLVLSTFGMAAAAICEKKRLAVAATSVAVGHGSLPISVFMLTPQFLLVGSGEAFIYTGQLDFFIMRSPKSIKTMSTGLFLTTLSLGFFLSSALVSLVKSCTRWLGDTINHSRLDYFYWLLAVLGVVNLVAYIVCAMWAAAPASSQAEQPQHAMAADEKC

SEQ ID NO: 68496 - protein, 196 aa, Oryza sativa nipponbare
  Clone ID: LIB3434-047-A2_FLI.pep
GPHRSVPPVPVGVAAAAAAVATAVAAAAATAATVAAATAVAAFTALAVATAAATTVAAAATVASASAALAVAASASASGAARLGLVDGDVAAVELLAVHPLDGVAHGLLARERHEPEPARPPRLPIVDDLGLEDLAEGGEGGFEGAVVGGPGEAADEAAVLNIRRRHAFPPTPRRRKKNEIEPDPNRTEPGGGGEA

SEQ ID NO: 68497 - protein, 108 aa, Glycine max
  Clone ID: 700836344_FLI.pep
FAGDTDLGLQYVLQGCPNLQKLEIRDSPFGDGALHSGLHHFYNMRFLWMSSCKLTRQACQEVAQTLPHLVLEVINSEEDKADGIEILYMYRSLDGPRDDAPKVVTILC

SEQ ID NO: 68498 - protein, 91 aa, Glycine max
  Clone ID: LIB3054-011-C11_FLI.pep
GSSIMSSGRNYLFAFRKFPEAMDVSLKAERRSGGIIATHYLSILINHELGKVPLNIITKNSPFPPTSRICTKEQSCPHSLQYSTRTKETDM

SEQ ID NO: 68499 - protein, 275 aa, Oryza sativa nipponbare
  Clone ID: LIB3431-040-F8_FLI.pep
NTHIPESEQEACLAGGGEELIARSTGKSSMASADLLRREEEFYASLFDSAKGGDAVKSRGQMIERKIEVLEDMAAKVSNRRSRRWLNDRLLIELVPRLHVEEIKGLFAPPPWGEELPVSAFCRTSVGEWDAFRSIDMDVEARLVQQMKQSSTKQKNHLDRDELVALNSWHHIDRQTREAIKRNFLPDLLEIYEERVRTFIEDTSGKDMLVLNVQDPFQRLLLHGVCEFYNVSSTTTTTVRDGKLCKTTAIKKRSGTGAPSRITLVSFLRMKKKSH

SEQ ID NO: 68500 - protein, 63 aa, Zea mays
  Clone ID: UC-ZMFLMO17269E02_FLI.pep
SLLHPHEMHEGICFCIFIEEGFITFNEKCIYVYINHLLKPVTPCVLMQHLGKNNAISCWHMLL

SEQ ID NO: 68501 - protein, 108 aa, Zea mays
  Clone ID: 700243188_FLI.pep
LRIGQSRCATSPNYQTFNFAAGTDLRVETNNPLCLFPFRFFCIPKYELQNKMEMYLSERNFLVVALQDQNMLVDKPLRPLDQRLEQPYHVTLSPPSAHAFTCSHHRVG

SEQ ID NO: 68502 - protein, 124 aa, Zea mays; identical to SEQ ID NO: 39091
  Clone ID: 700156058_FLI.pep

SEQ ID NO: 68503 - protein, 163 aa, Zea mays; identical to SEQ ID NO: 58272
  Clone ID: 700165156_FLI.pep

SEQ ID NO: 68504 - protein, 151 aa, Zea mays
  Clone ID: 700168541_FLI.pep
NALFLLVSVRTSRSHLPEDAHHLLSLLLCPLVSSKLSLGKLQSALVLANLQKLGDTLLIRSKASNLSDQAPDHGHPLRCFPLAVGRAQRQLALGDDMALVDAHEEARLRLRRRHEDEHFPVRGDKQPRISRRYAGFQISDGDGGAGMGTCL

SEQ ID NO: 68505 - protein, 122 aa, Zea mays; identical to SEQ ID NO: 59518
  Clone ID: 700171345_FLI.pep

SEQ ID NO: 68506 - protein, 193 aa, Zea mays
  Clone ID: 700215048_FLI.pep
WSSPCPRAAARGWAGSCSRPWWCAGRRTCSWTSWAWATTRPRTTWWSSTRHDQRRARDEGARHERRRGRDRAPHARGRARHDRHRDGGRRDRRRPEDGPDVRRHDDLRPEGGAPGAEGTGQAQRRGRDHPRGVAGAARGVRDCVQGRRGRGRLSEHPRASMQAASYLGRRHHGVSSFNLGLCCCWTNEFPSIG

SEQ ID NO: 68507 - protein, 249 aa, Zea mays
  Clone ID: 700218386_FLI.pep
TNRLHILLLLPLARRAAMATAVASHTLLSSAFAPRHYHRRLTRTASVGPCRAAPVGLAVRCEKSDKQKRQPLAALVPREQRFMFEGDELCGPDIWNTTWYPKAADHVTTEKTWYVVDATDKILGRLASTIAVHIRGKNEPTYTPSVDMGAFVIVVNADKVAVSGKKRSQKLYRRHSGRPGGMKEETFDQLQKRIPERIIEHAVRGMLPKGRLGRRLFTHLKVYKGTEHPHEAQKPVPLPIRDKRIQKTG

SEQ ID NO: 68508 - protein, 168 aa, Zea mays; identical to SEQ ID NO: 46845
  Clone ID: 700267950_FLI.pep

SEQ ID NO: 68509 - protein, 205 aa, Zea mays
  Clone ID: 700333954_FLI.pep
TVTKTTITELLLSYSSVIDNKVKHNRRPKCWVNKHRSTTTQQYSPTLSMKLTRSSTSVLDLLLGPQLVAVTTLLLAAVDSPRVQSCIAFAADHLVLVVLASERLQRGLNDSTAEPKHEVERRLLLDVIVRKGAAILQLLPGKDQPLLVRRDPFLVLDLGLDIVDGVAALDLEGDGLPCQRLHEDLHLVGPGRSPGCCDCWCGGFS

SEQ ID NO: 68510 - protein, 191 aa, Zea mays
  Clone ID: 700334022_FLI.pep
ASAVSSSPQLPPPRTSASLYRVPASPRSAASMAEQTERAFLKQPKVFLCSKKATKGNKPGKGGNRFWKNIGLGFKTPREAIEGTYIDKKCPFTGTVSIRGRIIAGTCHSAKMNRTIIVRRNYLHFVKKYQRYEKRHSNIPAHISPCFRVKEGDHVIIGQCRPVSKTVRFNVVKVIPAGSKSGAVKKAFTAA

SEQ ID NO: 68511 - protein, 96 aa, Zea mays; identical to SEQ ID NO: 41063
  Clone ID: 700354852_FLI.pep

SEQ ID NO: 68512 - protein, 180 aa, Zea mays
  Clone ID: UC-ZMFLB73009B07_FLI.pep
GNNTSTVPGLSERPSGTFNTSVTEAWNNISLLQQTALGPQGIDDLDTLQKRGEEVLERLQHGADRRLPRADDQAQSSSCVELQRDRRKKRKAPDVQQMMETYLNFRMKQAHVKEQRAKDAGQFTISGCIKALHTMADVSDEVKVLASDVFKDAENREIFLSYEPRLRSLWLKREVGKLLS

SEQ ID NO: 68513 - protein, 195 aa, Zea mays
  Clone ID: UC-ZMFLMO17297F07_FLI.pep
MLQRLTAVWYGRHRFLVVWWRRAGGVRHRRRRSVGGRLGGRRLRCGSVRRWGRLGCRRLWGRGVRRWGRLGRRRLWGRGVRRWGRLGRRVCGRLGAWSVRRRGRLGRRRLGRRGVRRRGRLGCRRLWRRGVRWRGRLGRGRLGSRWLRAWSVRRRSGSGFWCGFVGRRGGSVCGWRRLGGRRGGSVRRRRGFGAR

SEQ ID NO: 68514 - protein, 211 aa, Zea mays
  Clone ID: UC-ZMFLB73018D04_FLI.pep
LGLGCLLLGLGRLRHGRCRWSLSFCRGLRSGLLCSSCCISRRSSLGGGRCRGVFFLLLFLGLFLLLDGGGGGGGFLFLLVNRRFLRGCLLSGGRGRGLLGRLLGSDDREQRGDLLERGEDGAGQQGRAGLGDAVAHLLGSREFDLGQLLEELGDCGGVLLDPGHLAPLLDQDLEWCRGRLVDLDDLGLEISLLLLELAIDPLLYMHKKHNR

SEQ ID NO: 68515 - protein, 156 aa, Zea mays
  Clone ID: UC-ZMROB73012A03_FLI.pep
PSFPLPGKTDNLIKSTRYKLQNSSGPNHFQPSKRVRSDDVNHNITNEFNGYLISCLFTLHPCMKQNCITYSINPCAASGFLETSAAGVAVLGSSSVTAGTVTVEMGTSSGVSETCMFANSLSNSLCAAGISEMFACPGPPSAFLSSCSTAIFSSAF

SEQ ID NO: 68516 - protein, 466 aa, Zea mays
  Clone ID: UC-ZMROB73019H07_FLI.pep
IHRPERMGYGMSRLDDEYYEAEGQNTGGSGSVQVNDEFATLHNDIFHMTRMRSGLTESYKSMGTNRGIISTAKLLSRREIDCSGKGMFSSGDRAFVLGRHVPMNNPELLDRMDSRAYVSQFSADGTLFVAGFQGSHIRIYDVDRGWSIHKDIHARCLRWTISDVSLSPDQRYLAYSSLAPIIHIVNVGNAARESYANVTDIHDGLDFSQHEDVQYSFGIFSVKFSSDGRELVAGSNDDSIYVYDLHANKLTLRLSAHTSDVNTVAFADETGHLIYSGSDDTLCKVWDRRCLSAGQAAGVLTGHLHGITHIDSRGDGRSFISNGKDQAIKLWDIRKMMSNADSCADGAPAWDYRYSRYPHQHKQLKHPHDQSIATYRGHTVLRTLIRCYFSPSYSTGQKYIYTGSYDSNVCIYDVVSGSQVAKLKWHQMAIRDCSWHPFEPTLVSSSWDGRVVKWTSARDEGASDVD

SEQ ID NO: 68517 - protein, 116 aa, Zea mays subsp. mexicana
  Clone ID: UC-ZMROTEOSINTE016B01_FLI.pep
ACTALLCHTGRARHARLLTHIQYTRTHLFLKTYRYDRGTTFRDDSTCCRAGPGSIYMAGRWARAARHTYQSFVRPYPPVHYYYTAIATATSLPLTVPFAAPCPSPLTTASLSPVRS

SEQ ID NO: 68518 - protein, 430 aa, Zea mays
  Clone ID: UC-ZMROB73050A05_FLI.pep
SDLPSFSPPAAAGEAEAMQVAAARARRLLALPAASGIPGILSGPIPGRASCAEGVLLYRLNGAPASPSSPQHTRGFSSSCFASRSHCNLPSPTIASQWLNEKSVHCHMTTAHFSTEASDMDHPTEAVEEMYQKMLKSVEAETMPPNAWLWSMIDSCSNKEDIKLLFQILQKLRVFRLSNLRISANFNEHLCRKVTEACARVGAVDYGLKALWKHNVYGITPTIGSAHYLLQHAKEQNDNKLMENVIHVLSKNFLPLQPGTADIVFSICYNADRWDLLSKYAERFVKAGVKLHRAAFDIWMDFAAKVGDSQSIWHINSLRGRSVKHYTLATGFACAKGSLLDRKPENAADKIKLLYEHLPDQKKPFVKDELEKLIAGWPTEVVKRQKKDKRKELEEALMKDIPTMVDCLTKSGLDIPVELDKLATPQLQVA

SEQ ID NO: 68519 - protein, 283 aa, Zea mays subsp. mexicana
  Clone ID: UC-ZMROTEOSINTE024E06_FLI.pep
VSKGSSNNKSAQSGCQVIDNDDYDLLCRSGVLVEQEYTVSSWDGHTVLLGDSHVVTFSAGQALWLATNSQQVVCLHGELFFIEKPELLTIANSTSNMAKGISSDSSLKLPPIKDFLTVAVSPIGDLKVAAKTLMGSKNLSKESKAYYEALKKERAAEDARSTLDLEFQKFAFALGNFFQRIKPSKGGESWPDWTLRNARAGNFKKLENKLDSIFKVEQARIEGITHLQKISGEAFDRAHKAETEVIELRHDLAVARKRLKAYDDSYASRDHYNYGNLPPGDQW

SEQ ID NO: 68520 - protein, 292 aa, Zea mays subsp. mexicana
  Clone ID: UC-ZMROTEOSINTE025F11_FLI.pep
TGDTSAALSAYCAAAGIPAIVFLPADRISLQQLIQPIANGATVLSLDTDFDGCMRLIREVTAELPIYLANSLNPLRLEGQKTAAIEILQQFNWQVPDWVIVPGGNLGNIYAFYKGFEMCRVLGLVDRVPRLVCAQAANANPLYRYYKSGWTEFEPQTAETTFASAIQIGDPVSVDRAVVALKATDGIVEEATEEELMDATALADRTGMFACPHTGVALAALFKLQGQRIIDPNDRTVVVSTAHGLKFTQSKIDYHDKNIKDMVCQYANPPISVKADFGSVMDVLQKNLNGKI

SEQ ID NO: 68521 - protein, 280 aa, Zea mays subsp. mexicana
  Clone ID: UC-ZMROTEOSINTE038C09_FLI.pep
IFARIRDMLSKTDILHLASSLGVQMRNIHLLPLPPVEHVPESGNNDVKEVVGICDDTTVLPEWQQLVSTLNRRKQNVKKHLANWGDSIPQVLVEKAEEYLPPNMGFLIKFVKDDGELLYPCPSWIHSNIMDDNILIEGISKLSSSGERERVYDSDRDKINAIHIIDFSDLSIGDPICDIIPLHLDIFRGDSDLLKEFLRSYQLPLLRGESTTDVYRSVRNSKFSRASYRAMCYCILHEDNVLGAIFSLWKELRVAKSWEDVENLVWGELNRYQDSAVRSA

SEQ ID NO: 68522 - protein, 275 aa, Zea mays subsp. mexicana
  Clone ID: UC-ZMROTEOSINTE007C06_FLI.pep
YWCLHLVRCDNTVIHNVSIFGDFKTPNNDGIDIEDSNNTVITDCHIDTGDDAISPKSTTGPVYNLTATNCWMRTKSCAIKFGSASFFDFKRLVFDNITIVDSHRGLGMQIRDGGNVNDVVFSNIKMRTRYYHPLWWGRAEPIYITTCPRHPDSKEGAISDIRFINISSVSENGVFLAGSKHGLLRNLKFKNIDLTYKRWTNYTGGLYDYRPGCQEMVKHKTGGMMLEHISGLEIDNVRMRWARGSLKGWNVNPILFRPSTIDNLSFHDWQSVDVQ

SEQ ID NO: 68523 - protein, 211 aa, Zea mays subsp. mexicana
  Clone ID: UC-ZMROTEOSINTE009G04_FLI.pep
INMRRGYSYSPSPPRGYRRRARSPSPHDHYGGRGRDLPTSLLVRNLRRDCRPEDLRRPFGQFGRVKDIYLPRDYYTGEPRGFGFVQYYDPADAADAKYYMDGQVVLGRQITVVFAEENRKKPQEMRARDRVRGHSYDGRRYSRSRSPRYYRGRSPSRSQSYSRSPPQNPRHRLRERSYSGSPVDSRSRSGSPYEDGYRRSSRRERSLSVSG

SEQ ID NO: 68524 - protein, 208 aa, Zea mays subsp. mexicana
  Clone ID: UC-ZMROTEOSINTE030H12_FLI.pep
GQTCSTDELSRGYFQDFAEIRENAGKIATASKVIIPEVDAVKFPDLDVDSPDGGALHLPLVAPTLQADDGEAGDHKIPGASLVCLSFRASSLKMAESWSLPYLDAFGAAKNMHVYEVSFIDSWVLSLSPMRRAFLKAMRKSNNPRRHVVYAFGDHYDFRKKLQIINLLTGYIYLVDGLGRIRWQGSGSATQEELSSLTACTSILLDEK

SEQ ID NO: 68525 - protein, 255 aa, Zea mays subsp. mexicana
  Clone ID: UC-ZMROTEOSINTE032B08_FLI.pep
DDDGSGKSGAEVVLKGHEAEGYGLSWSPMKEGWLLSGSYDKKICLWDISSGSGAPVLDAQQVFVAHEDLVEDVAWHLKDEHIFGSVGDDCKLMMWDLRTNKPEQSILAHRKEVNSLSFNPFNEWILATASGDTTINLFDMRKLSRSLHTFDSHEAEVFQVEWNPNLATVLASSAADKRVMIWDINRIGDEQSEEDADDGPPELLFVHGGHTDKISELSWNPSEKWAIASVSEDNILQIWEMAESIYCDDLSMQVN

SEQ ID NO: 68526 - protein, 311 aa, Zea mays subsp. mexicana
  Clone ID: UC-ZMROTEOSINTE033F01_FLI.pep
PDLASPGVEVLVSSAAPGPAMNGGLPGFHNAPASKAVVVAAGLFSVAFGFRGHSLNLGLAYQSVYEKLSVWRLITSFFAFSSTPELIFGAVLLYYFRVFERQIGSNKYAVFIIFSTMVSVLLQILALGYMKDPSLNPLTSGPYGLIFASYVPFFFDIPISMKFRIFGLSFSDKSFVYLAGLQLLFSSGRRSIVPGLSGILAGLLYRLNTFGVRRLKFPEFATSLFSQLSLPFSSNPYQGLPITENDGSIPSHQARQIEDARTATQDPTESSIAALVSMGFDRSAAIQALALTNYDVNLASNILLEAQALQQ

SEQ ID NO: 68527 - protein, 298 aa, Zea mays
  Clone ID: UC-ZMFLMO17047F09_FLI.pep
YIHTGTSGPTILTSVNFVQASAGYHGPVRVRRRQSFFAFGPCWLLIRSRTSSFCFFSISTCFFCNSSFWSLSFATSASSSIMYACFLARDLAADSLFLIMRRCLLSTTFSTVGPFRILSAVSNGYGTGDSDDRSPASTFPNPLNTTGVVGAATVTPPPRPCPTTPATIPFPSCRVCGATAFPWEKSPCACGCSRRVWCPPMSSRTTPARTRNSSRVMDPSVCCACACAGSGAGAGAGSGSGAGAGAGAATCCASSPLVRLTISRQTSSTVFWLSVRGSVKEPWRWMGAPCCCCCCCCA

SEQ ID NO: 68528 - protein, 253 aa, Zea mays
  Clone ID: UC-ZMFLMO17057F07_FLI.pep
ALALARDRTERDWRTMMRSGLISLCFHLALAITLAASVPGLARSRVIDMEPQLKPTLQLEPKHGVSQPDRNQEPKPTPQPEPKPEPKPEPKPAPQPDPKPAPQPDPKPAPQPDPKPEPKPTPQPDPKPSPQPGPEPKPKPAPQPEPKPEPKPTPQPDPKPGPQPDPKPEPKPTPQPGPEPKPKPAPQPEPKPTLQPDPKPEPKPTPQPPFPQPEPQPDPEPQPEPSKPGPKPQPEPSKLEPQPGSKPTPEPKP

SEQ ID NO: 68529 - protein, 333 aa, Zea mays
  Clone ID: UC-ZMFLB73225A08_FLI.pep
SNASDGAQENWVDFDSDVENASINENSHSDTDEKEFEEPVSDWEDLDDNALQYQFSPYSNSDEVSQNSSYKTVCQEVELAECIPPVVNPASEEKLTMLVHNEHKAAVCIGKIESEVNSIMDGVGLQPERHTILKKLKELFSMRQQGVSSQDCVESSPDQCVPEETLSCDPLDVTVEDKTSFQEHLGEFDELRQIIADLSKRAEALEKKQKGSDQDLLFLREVVKDSGRKVQQLEYLVDELQFRFDSSLSLPGSMHNTLAKPSIFLIGGYNGVTWLSSLDSFSPEKDTMVGLTPMSFARSYASAAALDGHIFAFGGGGGKSSWYNTGMPWVSMI

SEQ ID NO: 68530 - protein, 308 aa, Zea mays
  Clone ID: UC-ZMROB73028F06_FLI.pep
HSLCSSSALALWQDAVARSFGGTLVVVSMGDKVNPWCHCHWHNPAWKSDTESCAGDLHPPDAGHLTADSVALAPILEFPPPYPSRKRPLVLYQKEKRAPVLPAPLPSKGPPPLDPVPELQGSNETDVTDAGAGEETEEGMHENRDEINALLDTDRQSGGAALSVESVASAGAGAGAAPPPAAKKRRLSSCTDKSVVDTASSAARPPERSMEQEQRVELANDRDAQSCCVGEVESGRRFALGEAEAEAAEGDSPDEQRRRRERIQETVAALRNMVPGGIAKDAAAVLDEAICYLQYLKLKVKTLGAVSL

SEQ ID NO: 68531 - protein, 110 aa, Zea mays
  Clone ID: UC-ZMFLB73224E03_FLI.pep
YKLIKTPVRRPADHPNPYPFFFVTTRKHPTRRHCSHSHRARTARVYHARTHQTKKHIPAVLHHRLRGPSGRSARGSSAYRSCMRRRAGFFLRRPTSEASSTSGPQSVPSG

SEQ ID NO: 68532 - protein, 342 aa, Zea mays
  Clone ID: UC-ZMFLMO17099E09_FLI.pep
RCLPTPSSSPQIRPARRREQAMCPRATDQLCGAAMASVCSLVEEEYIDLDLSSCGELEFRVRRSGASDELLCRGRLQPPAPPRPGGKAQEADGGGGGSGCGGAGRRSAATVAPLQHSHSAGFRDDTQPVARLRTECSRRRKAARTVHAKLLASRAFFRSLFARTTPCSDEQCRGAEVRASTRAAPPPGETKSDCCKAAFAQINNGYGYGYHSGRAAPTTLRSSIEQEKLMDEEELAAARQRKSFSGVIKWRHAASAPPAAAPAKPLSSSSSARRSSGAGGGPALKRSSSARSESEGLIQGAIAYCKRSQQQLGLARKSVSDAGASAPSWPARSAVTAAAYCH

SEQ ID NO: 68533 - protein, 146 aa, Zea mays
  Clone ID: UC-ZMFLMO17100H04_FLI.pep
IHGPPPPGAQKLGFPKYDGTEDPLGKLHKCELFFHSGRSVHVFSILPIALTRVSSCSMKLVALPSDPQAALLQPACSPATAVPNPLSSFVSSSLLCSWVVRCERSAVRPRQWPRVAALRGVLVLASVRQPSSLPPLQQGKVQSGNV

SEQ ID NO: 68534 - protein, 340 aa, Zea mays subsp. mexicana
  Clone ID: UC-ZMROTEOSINTE095E02_FLI.pep
QDQLRSPVDSVSLPAMELSSSVSSTAAAAAQARLLRPPSFRQPGPAGFVSCRSYAIRSKLVRAMPPILASFQPASPRYPSFQDANGKRRNVPCYQRQQTPQVEARSMEEVYDALAEHLLSVLKNIEHLDSKYIVGLAGPPGAGKSTVASEVVRRVNTFWSQKHTKGSGAPLPTKEIAAMLPMDGFHLYRAQLDAMEDPKEAHARRGAPWTFNPSLFLKCLHTLRTEGSVYAPSFDHGVGDPVENDIFVKPQHKIVIVEGNYLLLEEDVWTEIRDLFDEKWFIDIDIDISMQRVLKRHIATGKEPDVAAWRISYNDRPNAELILESRKNADLVIRSVDFSS

SEQ ID NO: 68535 - protein, 167 aa, Zea mays subsp. mexicana
  Clone ID: UC-ZMROTEOSINTE092D05_FLI.pep
FGKPRGFGTNDKGDDIGFNTEVYSASEIDRIARVAFEVARKRRGKLCSVDKANVLEASMLWRKKVTALASEFPDIELSHMYVDNAAMQLVRNPKQFDTIVTNNIFGDILSDEASMITGSIGMLPSASVGESGPGLFEPIHGSAPDIAGQVEMTSVSKISDTRILDGV

SEQ ID NO: 68536 - protein, 111 aa, Zea mays
  Clone ID: UC-ZMROMO17100D10_FLI.pep
KEAPGPSYRGLAARGRGRDRRSREAARSPPAWTLVTPYCKRTRPGRGTNTKAAGFPPLSRSGRLFPPFALRLAPTHLGWGTRRHFTRRPRDPRSRNADTMLTRKHMHGISQ

SEQ ID NO: 68537 - protein, 136 aa, Zea mays
  Clone ID: UC-ZMROMO17114A05_FLI.pep
GADLVGKVERNIPEDDPRNPAVIADNVGDNVGDIVGMGSYLFGSYAESSCAALVVASISSFGINHQFTPMVYPLLVSSVGIIACLITTLFATDFFEIKAVSEIEPALKKQLIISTVVMTIGIALMLAWSSIHLHHL

SEQ ID NO: 68538 - protein, 244 aa, Zea mays
  Clone ID: UC-ZMROMO17119C10_FLI.pep
ESAPASNRSDVAGRGRIQMAAAIEELRLLGSIPVLEGPGEVDGVVGEEGRPRGGGDDEEILRFMDSVDSYLLLMDSLSSALRQGWLDLASARHSMGTSRVSSTLFDHKEQSAATKLQVVDHDGLKSSESKPHFALSKWSLQEECHSTYDLSERDFTEPKMRHRGSVTTPEKGNHESANTTTLSTGADASNHVQRARSKALSVFGGLVSPKLRTAQLSFETALDLIVELANSRSNMLASFSHLKE

SEQ ID NO: 68539 - protein, 312 aa, Zea mays subsp. mexicana
  Clone ID: UC-ZMROTEOSINTE002D08_FLI.pep
QELVREGVKIMLDIMENSSLCAETGTSQEGVGVKNPDECSLEEPQSMNLLPEPALYSPDDFVNEQENRSPSEIVELVKPSVLTFPYSPENTNDKEEKLSPQSVLDPIAEVTSPRHKTPKQDEFSMPTSRVLFKEVDAPSASPALWNGPQVAILDDRATRVSFIKAVLEASGLLSEENSQIWYTEEPLLDVSVLAEVGNSYCLTDDAVLLFDYVEEVLLEIRDKFFGSDPWVNSLKHNVRPAPVGRRLVREVAKGIDSLVGKEFPHTLEQVMMKDLDSGSWLDLGGDTGSVVVELWDGLLDDLLEELVFDLWL

SEQ ID NO: 68540 - protein, 445 aa, Zea mays
  Clone ID: UC-ZMFLMO17095G05_FLI.pep
ADTSMEAHASRGRRTLEEIRQKRAAERMQHAVPIAASNVDSHGNQRAGAELLARVQELENGNTELERENKMILSKIAEKEVEKDALVNRLNDLERNVVPSLKKTLNDISLEKDAAVVAKEDALAQLRSMKKRLKEAEEEQYRAEEDSASLRAQLNTLQQQMDHTYSGYTMGTSSEESVAMEKEIQDLQAQLKQESLLRQQEQQKLAEQSQLRQQEQEKLAKEQTRIASLEAEKQQLEDQITMLTKKATEDASEFAARKAFSMQDREKLEQQLHDMALMIERLEGSRQKLLMEIDSQSSEIEKLFDENSALSASYQEAIDVTVQWENQVRDCLKQNEELRSHLEKLRLEQVSLLKVSNIATQSDGQTENSISNPPQMVIENISLKDQLVKEQSRSEGLSAEIMKLSAELRKAVHAQNNLARLYRPVLRDIESNLMKMKQETYATIQ

SEQ ID NO: 68541 - protein, 217 aa, Zea mays
  Clone ID: UC-ZMFLMO17095A08_FLI.pep
YNMIFFGGQATTKINVAVDRLPQFQCCNTNLEGGPEHMGTIHIGSESMEEIDVAYREAADGISSKRPVIEMTIPSVLDKTISPPGQHVINLFVQYTPYKLSEGSWQDSNVRKAFAERCFSLIDEYAPGFSSSVVGYDMLTPPDLEREFGLTGGNIFHGAMGLDSLFLMRPAKGWSDYRTPVKGLYLCGSGAHPGGGVMGAPGRNAAAVVLEDHVKTK

SEQ ID NO: 68542 - protein, 209 aa, Zea mays
  Clone ID: UC-ZMFLMO17108D04_FLI.pep
MLQRLTAVWYGRHRFLVVWWRRAGGVRHRRRRSVGGRLGGRRLRCGSVRRWGRLGCRRLWGRGVRRWGRLGRRRLWGRGVRRWGRLGRRVCGRLGAWSVRRRGRLGRRRLGRRGVRRRGRLGCRRLWRRGVRWRGRLGRGRLGSRWLRAWSVRRRGRLRCRRLGGRGVRRWGRLGRRRFGAWSVRRRGRLRCRRLGGRGVRRRSGSGFW

SEQ ID NO: 68543 - protein, 331 aa, Zea mays
  Clone ID: UC-ZMFLMO17113B09_FLI.pep
WDMMKLKSGRRPFYKDVKPVDCRSGSSLPHLAAQAKFAAMNMQTEDVKPRRPVQVRRSRWILGDVTEVLDHNSWRLGKITEVLKNDYFVIRLVGCIQPREFHISCLRIPHDCKQLTVGGRDHQAYEEVDHYAKRKAANICASTGARAVKRKLEASRIPPNGLVRRTGKEQKVSTYEFRQLTKNELPPKVSARNAIDGDHFHRPLSSRYNDLPEKPLRTREEDECSVASCSANYSEHSTSDDDHQSVGTGSCFPDDVMSACEYGQETEDAYGSGLFQNVHELELRAYRSTVRALHAAGPLTWEQESLLTNLRLSLNISNEEHLLQLRHLLAL

SEQ ID NO: 68544 - protein, 450 aa, Zea mays
  Clone ID: UC-ZMFLMO17113D12_FLI.pep
LLYTSQPVAEVLLDRCGHHPLTVAVMGKALRKETRVEKWEKAISNLSTYATCAPGPVSYVNEKDVETTLTIFGSFEFSLEAMPENSRIFFMALAAISWEEPVPEACLESIWSALEQCGLFSLVVSKLVEGSLIIKLEDQPLYHMHDMVSLYLENKTNDATRALLSDSISYNVALVAPWLFVFGKECMKRPAEQKMGSFFSLLEFMDIEILLVNTTQALMACRSLSELETNRIGFSKILGPRIAEIISIGSLDLIFAVTAAITVIFSPSDYINLAHSLEIAGSIDKLIDLLGACEDTSTLANLSSVLTKISEHVDATIADEILSRIPMVRIADLLTAENEQWHEIVFTTLASLTKVGKLKAVETMIESGIDNKLLVLLGNGSEISQHHAIITLKTFCELGAPLQGCIGPAVLLHLPWHARISLERFVLSDRNVPQSPKPQQSFEVILHNIL

SEQ ID NO: 68545 - protein, 78 aa, Zea mays subsp. mexicana
  Clone ID: UC-ZMROTEOSINTE024B11_FLI.pep
VPAPNAAPGYAGMAYHHVIQSHHHHPAPQPVANMAGNYGYEFADPTRPQVYYSQAAAPPTLPQYPPIVSPDAGQAEKH

SEQ ID NO: 68546 - protein, 145 aa, Zea mays subsp. mexicana
  Clone ID: UC-ZMROTEOSINTE026A02_FLI.pep
LIHIRTYQDCYPIILTERSVSRQQRNYQRNWCSYEVTTLALASGACCGSAGVISIGSTLLLAASYSDRRSINSLSRRWTFRLDAIDGSMSSLRSWCFFIPRTSESHAGLLGSVDDSDPSMPMGGPRKLSQTSRRRDSSASLARNR

SEQ ID NO: 68547 - protein, 191 aa, Zea mays
  Clone ID: UC-ZMFLMO17117E09_FLI.pep
SLGACRHTAGPLGPSADCEEVQWRWHVIVDWGTVVVTFICNKNAVAGLQIYGKNFDRLVNFICVRMTMHLVTRKFGGNAQSITKNRWLHHMSFLWDYDVKNMDYLKIPKRAPEYRLARNHTDFLCRMKEYIPSRPVFTDGVTAALGEHFSVQPVDLQAALSGDEGFVPSTKLLSQQDLEKKLFRPKNPLKI

SEQ ID NO: 68548 - protein, 180 aa, Zea mays
  Clone ID: UC-ZMFLMO17118F04_FLI.pep
LPQPGEQGGGVPQEPADAALLQPVERGRLGDAGRARQDGLVPRPLLRLLPRVQGRRLRRRRGRPDPLRRHRRHRGHRRPRLRRRRRGLVQPGAGPHPAAADALGAAQVHDLQLLHRPQALPAGPPRRVLHAVAPGYSSPVQQWRARACVCMWSALLLPLRRSVSITGSRQDERHRNMVDK

SEQ ID NO: 68549 - protein, 124 aa, Zea mays
  Clone ID: UC-ZMROMO17006C02_FLI.pep
GVIVSSTGATIYQLYWDFVMDWGFLDLRSKNRWLRDQLILKNKPIYYASMMLNLVLRLAWAESVMKLRLGMVESRLLDFSLASLEIIRRGHWNFYRLENEHLNNAGKFRAVKTVPLPFRELETD

SEQ ID NO: 68550 - protein, 292 aa, Zea mays
  Clone ID: UC-ZMROMO17107B05_FLI.pep
LLCGNHYCTKSCHVLEVPLNHPEGDRTTSISKVNALAMPCEQCNLPCQRVREPPCSHPCPLPCHLNDCPSCKVLVKRPCHCGAMVHAFECVFYNILNAKDQIKIRSCGGPCHRKLPNCPHLCSEVCHPGVCPSVDQCMKKVNTRCACSTLKQEWRCQDVLKEYRKSGRDPKEVPKSQFGVGLLACGEDCKKKLKAPDSELHLRKSQENKIPAVEVVNAPKRRKRRDRGQEVKISKFQEVKTFVLRALLIILLSIIVAAGLYLLWKGIFWLSDWMNEMEEQRASQRYPRGAML

SEQ ID NO: 68551 - protein, 329 aa, Zea mays subsp. mexicana
  Clone ID: UC-ZMROTEOSINTE008D10_FLI.pep
REDKEVFIGFTSFLSPGIIFRCNLASTIPEMKMFREISVPGFDRTSFQVKQVFVPSKDGTKIPMFIMSKKDIDLNGSHPTLLYGYGGFNISITPSFSVGRVVLCKNMGFVVCVANIRGGGEYGEEWHKAGALAMKQNCFDDFAACAEFLISNGYTSSRRLCIEGGSNGGLLVAASINQRPDLFGCALAHVGVMDMLRFHKFTIGHAWTTDYGCSDKEEEFQWLIKYSPLHNVRRPWEQSSGNNCQYPATMLLTADHDDRVVPLHSLKLLATLQHVLCTSTEDSPQTNPIIGRIDRKSGHGAGRPTQKMIDEAADRYSFMAKMLGASWTE

SEQ ID NO: 68552 - protein, 353 aa, Zea mays subsp. mexicana
  Clone ID: UC-ZMROTEOSINTE012A02_FLI.pep
SRLTGDSRYEAAALRALRKLWSMRSSLNLVGTTLDVFTGKWIEYSSGIGAGVDSFYEYLIKAYILFGSDEYWDMFHSAYLAVQKYFRHGPWYHEADMRTGEATHWQLTSLQAFWPGLQTLLGDVTAANLSHREFYNIWQRFGVLPERYLLDYGMLHPTEKYYPLRPEFAESTFYLYQATKDPWYLEVGETIVRSLNYYTKVDGGFASIRDVSTMKLEDHQHSFFLSETCKYLFLLYDDSFLRNQNYIFTTEGHPLPIRSTWHEKFPAAYVPSNWTSVKDEIQPIRASALSSQVCPETIFRRSVGTPWESACHVPDAHASHRCRTDEDCGIEAITCKKRTCSMAGYCGLWLVIY

SEQ ID NO: 68553 - protein, 113 aa, Zea mays subsp. mexicana
  Clone ID: UC-ZMROTEOSINTE019H07_FLI.pep
VLFTVVPWVVVMDRDPRPPGRNAVKEGCYLVSLMATDATMLKCWETVVCGSMGRLIMVTFGGKVFGGFLHSIAQVYFMVVWLLFYFAARCKEVRLGGRQFGLEDVAAALDGFR

SEQ ID NO: 68554 - protein, 91 aa, Zea mays subsp. mexicana
  Clone ID: UC-ZMROTEOSINTE032E06_FLI.pep
ASVFRSNNVRNRVNQSQKSRTDGVLILPLTYIMMMIVSAMIEWSSCCLFRSVLVVLSGLYVCINKLLYKLFFSRYSNSFYEFIIIKLSCLF

SEQ ID NO: 68555 - protein, 372 aa, Zea mays subsp. mexicana
  Clone ID: UC-ZMROTEOSINTE033D09_FLI.pep
ETEHNFLRVEILKLLQPNVMGIDFMKINLANMGDLRAGTKSWSQEHDFQLRLIFLRFFAQILSGYRNFIDTTSATGFNSQAFLKKRSRATNQPVDSMSMIMQFLETQGFLDYLERCNTAEENAHNLLDKLQDATGRGQNPLTIFPSQVSDPEIITIANPEIEGLDNRHCYKRFPANARTEEQEEKRKSILALASGASKQVPSSPSIRVNGGPKAESLSPRERAAERERMVLDIKVKLQGLWLRLLRLGATEDPLSSFEYGTILALIESDAEGIGGSGFVECIREHIHSGWQCRLTDEQFIAVKELLKMAITLANSRNDLATIRDALEVSAEMYRKDPNNVQDYVQRHLLSLSVWEELRYVILSVKTIISVLN

SEQ ID NO: 68556 - protein, 172 aa, Zea mays subsp. mexicana
  Clone ID: UC-ZMROTEOSINTE033F05_FLI.pep
RRLNLAASGQLAVFRPKVDEISLLTINTTTGFNPASAGGFMVAFAGRKYAARSIPIFVSNTSVTVSSFTLVLEFNKGRLQNLHWKKDGCGACSGKSNFVCLGKQTCAIRTQSCKSQGPVDCSIGIQLAFSGTDKHESVLNSWYEVSNLRQYSLYGLYSNLKDTLSGQFNKIF

SEQ ID NO: 68557 - protein, 156 aa, Zea mays; identical to SEQ ID NO: 42676
  Clone ID: UC-ZMROB73033C04_FLI.pep

SEQ ID NO: 68558 - protein, 342 aa, Zea mays
  Clone ID: UC-ZMROB73033F10_FLI.pep
LKEGMGGGGSHADPFDIFSSFFGPSFGGGGGSSRGRRQRRGEDVVHSLKVSLEDLYNGISKKLSLSRNVICSKCKGKGSKSGASMRCPGCQGSGMKVTIRQLGPSMIQQMQQPCNECKGTGESINEKDRCPGCKGEKVVQEKKVLEVHVEKGMQHSQKITFPGEADEAPDTVTGDIVFVLQQKDHSKFKRKGEDLFYEHTLSLTEALCGFQFVLTHLDNRQLLIKSNPGEVVKPDQFKAINDEGMPIYQRPFMKGKLYIHFTVEFPDSLAPEQCKALESVLPPKPSSKLTDMEIDECEETTMHDVNNIEEEMRRKQAHAAQEAYEEDDEMPGGAQRVQCAQQ

SEQ ID NO: 68559 - protein, 464 aa, Zea mays
  Clone ID: UC-ZMROB73039H09_FLI.pep
CTRTIEPQEKHRIHRLLHQSIPIPEYHSILYSAIVDRLARLPWFITSNGRKGAEPFQSKIDSVLAMEKETPPPLHTDQETSVSSEQQRPRPHLSIDIPAASSLPADHLLPMATATQAGTSITPPSTRRGQQTSSNILSTPAPSSSSSKPSSRPPLRSPSFMLRQTVKSLLPLGSFKSSAVKSYEASISKLFGASATKVMARTPSLPLDHALSSSPHPPPVQQKSAALHHMCRSQSLPTTTNMKKAKLLNAANAKSFKRMDSLGGTFRVVPSTPRTPATAVPDDIAPAPPGGPGVDGGEDIPEEEAVCRICMAELSEGSDTLIKLECACKGELALAHTDCAVKWFSIKGTRTCEVCKQDVQNLPVTLLRVQSVQRRDLLNRGGASNTPRYDRYRMWHGTPILVIISILAYFCFLEELLVAHDGIVALAISLPFSCILGLFSSLTTTSMGTTWHPTSTPKHNYIYT

SEQ ID NO: 68560 - protein, 295 aa, Zea mays
  Clone ID: UC-ZMROB73049E07_FLI.pep
WMNACAEVSGVDSVQSVFQVMLNDETVKVGWSTYCTLANIFRKNGLNNEAQACLVKAEAKLSPAGRLGYSFVMTCYAALNDSDGVMRMWEASKSVPGRIPTAYYMAAMSCSIKVGDISQAECIFGKWEAGCRKHDVRVSNVLLGAYVRNRWIEKAERLHLHMLEKGACPNYKTWEILMEGYVQSRQMDKAVGCMKKGLSLLKSCHWRPPVELMEAIGKHFEEQGSADDAYRYIKVLQRFNLTSLPLYKSLIRAYINADVVPPNVLEMIAKDQIDMDEEMDRLIIIAGKIDITCNG

SEQ ID NO: 68561 - protein, 155 aa, Zea mays subsp. mexicana
  Clone ID: UC-ZMROTEOSINTE017B09_FLI.pep
QLSNYSSFEGVPYCKTHFEQLFKETGSYNKSFQSQSPAKITPEKLAPELTRSPSKAARMFSGTQDKCATCGKTAYPLEKVTVEEKSYHKSCFKCSHGGCAITPSNYAALEGILYCKHHFSQLFKEKGSYNHLIKCASVKRAAEAQPEQPASDSSS

SEQ ID NO: 68562 - protein, 171 aa, Zea mays subsp. mexicana
  Clone ID: UC-ZMROTEOSINTE017E02_FLI.pep
EVPSSAQASASTRTKTGLSPSLSRPFSSGNSMTQAHSTTFAPTRSISLTAAQSVPPVAIRSSTTRARSLACTAPTCISILSVPYSKEYSSEITSPGNFFGFLKGTNFAPMAKAIGGPKMNPLASTPATTVIPWSLYRSTKRSMVSRNALGSSSNVVMSWNMIPGLGKSGMT

SEQ ID NO: 68563 - protein, 180 aa, Zea mays subsp. mexicana
  Clone ID: UC-ZMROTEOSINTE024A12_FLI.pep
LPKNRVIGSGTNLDSSRFRFLMSQRLNIAPTSCHGWIIGEHGDSSVPVWSGVNVAGVRLRELNPNVGTDSDPEKWNELHKEVVNSAYEVIKLKGYTSWAIGLSVASLASSMLRNTNNVHAVSTLVNGEHDIKEEVYLSLPCVLTANGVSHIVKQILTESETSQLQKSAALMHQVQQGLKW

SEQ ID NO: 68564 - protein, 235 aa, Zea mays subsp. mexicana
  Clone ID: UC-ZMROTEOSINTE032E05_FLI.pep
NIFLIDYGMLLKTCMVRYCRHNTVTFLHKRHQPSPESKHSGNYHRGNTPNRTTMVLLQEEETSARRIARLGAGELGDGFGALGDGVLGELAGEDEADGGLDLAGRNGRLLVVPRQLGRLRRQLLEDVVDEGVHDGHGLGRDANVRVHLLQHLEDVDLVRLHRLLCLLLPLLLATLLACGLARGEPLLGLGLLPRRGLLRRRLLLRRLLGGGLLLGLGRHWNRAAVSGLGFLSKRS

SEQ ID NO: 68565 - protein, 363 aa, Zea mays
  Clone ID: UC-ZMFLMO17169H07_FLI.pep
YGTKESTYTMKSQGESTSYSYLLYSSGKIHHVVIGPLEDNTIYYYRCGGQGPEFQFKTPPSQFPLSLAVVGDLGQTSWTTSTLNHIKQCEHDMLLLPGDLSYADYMQHLWDSFGTLVEPLASNRPWMVTEGNHEKEHIPFFESGFQSYNARWKMPYEESGSRSNLYYSFEVAGAHIIMLGSYTDYDDSSDQYAWLKADLAKVDRKRTPWLIVLLHVPWYNSNWAHQGEGDSMMASMEPLLYAAHVDMVIAGHVHAYERAERVYNSRPDPCGAVHITIGDGGNREGLARRYRNPKPAWSVFREASFGHGELKIVNSTHAHWTWHRNDDEEPVRTDDVWINSLAGSGCIQEGSRDRESRKILMSP

SEQ ID NO: 68566 - protein, 844 aa, Zea mays
  Clone ID: UC-ZMFLMO17299C12_FLI.pep
SGEQEAKPMQIEGEATCGILEFEEVDKDGEDSLCNDCMVGVVSSNEETELPMKERTDEAVPSVNVGEPEQVTEDTSQDIMQGGLARGVFIGTIFVKPVSDPHVESSLVHKVKAEVHLVDEITAADLKAENMVEVKRTDREVDEIEVKAPGTHEIGNSSEVEPKEEFEMEVDDAVSLHEAAASASENGSEEKSSNIAVDQVEPVNLNVDELAVDDDQPSFNPGYGSAKSSDVAETKNVEAQVTEQKGNAHHASGEWHGDHTQVIGPQRIYIIKVPKFAGDDLWDKIQAAQAHLDQLTQERDAINRRRQKQKAICDEYREKFEAARQEEREARAAHGDKKNDLNSVRSVLEKLHQANSVEELDELIAKKERIMQHETISLKEEKLLIKEINELKSQRKQLSATMGSKAEINEAFDQKDHIHERHKVLKKDSDVLFSNLKVLEENTRKIQKSFADERTALRKLTEEHRAANEIRQKAYSDWTELRSEPSKKNEYFFKYRDARNAAETFRANGDINGLISHCNSQIERVMEIWNKNEDFRKQYVESNKVSTLKRLGTHDGRKLGPGEDPPVIPSRRPSNIYPLSASSPEVITLASTPAPVLAAAAAVPSKENSFPALAAPQTSKRAKSKASGSSAQIKNKSVIVSEEEDLEQTLKEKAHQLELARKAEELDRKAEELARKEEELRKERDAAEKERLRMEQKAKAKEAEERKRRKAEKDKERAEFKARKEAEEREKKKAKRDKKKGAAPADSSAIGDSHAAASATADTDSNASDNPREADVSQPAVAPRRPARPAAAIKQLNRLQPMPAPLRNRGRRKLRQYILIAAAVLTVLALFVAGNYIPRLRSHS

SEQ ID NO: 68567 - protein, 171 aa, Zea mays
  Clone ID: UC-ZMFLMO17301E10_FLI.pep
CKRKLAGGAYKNSSEVTHRTIRANMISSSMLMKELIVVAQARRSPFDNIQQKKLAALGANAARRPFKDFLSTLTRTKESISRATRLAMECAKFGILVSFRAPSCLSLVNGFGNLGPLPNVIFSCGWWRTIAVGQQIDWKNVASHTQLDNSVTRWMQISNTYSSSVSLLGDV

SEQ ID NO: 68568 - protein, 137 aa, Zea mays
  Clone ID: UC-ZMFLMO17176A11_FLI.pep
NLGRRAPEERSPCGGKLQGVVSLVILSMASNSSMFSPYDASASLVAAASAAAFLPPDLLVVAGGGGSFSSLRFLSSRYSPPAPSSHCVCCSCRRCSARARARVRTPSGAAATSMMTTSLEALALRMYLPMARRGWAS

SEQ ID NO: 68569 - protein, 285 aa, Zea mays
  Clone ID: UC-ZMFLMO17293D05_FLI.pep
GGGMNISRHHARIFYDFQRRRFALDVIGKNGCLVEGVLHLPGNPPVKLDSQDLLQIGDKKFYFLLPTRSIFASAAAARHAPIIPQQLPPPPYAHARAGRPRLSEFHDRSFEGDYGREVDEIGNGISETGMRGKLVKRNKKSSGDLDIYGGHRINVEPIGTLGEDSRSEIRSRGDRDIDNQQALQAEEKDVVSSVATVLSDLCGPGEWMPMAKLHNELLEQFGNVWHPSRVRKYLTQDDWSPTETKGRPWFGLLALLRKYPEHFVINTRSKGRMTSEFVSLVSLLS

SEQ ID NO: 68570 - protein, 244 aa, Zea mays
  Clone ID: UC-ZMFLMO17293D11_FLI.pep
GPRPRQSAFAANGRTRDTSPLPPPPPLVATCVLGFRRPARAVAAIPMEADTGCRLEVDDVLSFADDLVGVLRRSDDADANAQVIAGAGLLRTACRSESDHLHLQLKDYQQKLWSCKDKTDKAKAETIAADELSVLQNKMEENLQEDKQLREELRATHNDLENLDHQRASIQDRKNAIKKKDENMRKATYKLSMCVSVTNIIPNLEDRDKISSYTVDKNGKKIQKFEFEKTTPPVEICNTLWKTI

SEQ ID NO: 68571 - protein, 633 aa, Zea mays
  Clone ID: UC-ZMFLMO17317F04_FLI.pep
KILICDVRVQGVGTTNILQPRELTQISTKPVQESSCRIYFSSGWQDTPLYKLENLGYGHLLEGPAVIMNGNSTVIIEKDCKAIITKYGNIKIDINAAPSTVSISEKVADVVQLSIFNHRFMGIAEQMGRTLQRTSISTNIKERLDFSCALFGPDGGLVANAPHVPVHLGAMSSTVCWQLNFWGENLNEGDVLVTNHPCSGGSHLPDITVVTPVFDHGKLVFFVASRGHHAEIGGITPGSMPPFSKCIWEEGAAIRAFKLVERGVFQEKGIIQLLQSPCSDELAGYKIPGTRRIQDNLSDLRAQVAANQRGIALIKELINQYGLITVQSYMNHVQKNAEVAVREMLKTVASRVAKENGSCVVEDEDYMDDGSVIHLKLTLDAIKGEATIDFEGTSPEVYGNWNAPEAVTTAAVIYCLRCLVDVDIPLNQGCLAPVKILIPKGSFLSPSDKAAVVGGNVLTSQRVTDVILMAFQACACSQGCMNNLTFGDDTFGYYETIGGGCGAGPTWDGTSGVQCHMTNTRMTDPEIFEQRYPALLHTFSIRENSGGSGLHRGGDGLVREIEFRRPIVVSVLSERRVHAPRGLKGGRDGDRGANYLVREDGRKIYLGGKNTVTVSAGDILQIFTPGGGGFGCP

SEQ ID NO: 68572 - protein, 249 aa, Zea mays
  Clone ID: UC-ZMFLMO17102B04_FLI.pep
RGHTSNDVEHIETCSSLDKQASDQIGKPAKEYSDSSNMSSLNAFEDPTGIPPEWMPTNVSVPLLNLVDKVFQLKRRGWIRRQVLWISKQILQLVMEDAIDEWIIRQINWLRREDVIVQGIHWIQDTLWPNGIFFTKLDEYKGNAGTSEFDKQSLGSPTLAVGNKKGRTSSFELHLEASRNASEVKKTYFRWNSIGLGQHNWIQAVPAQRKGHVLLPPIQRLHQTARICNARAGPRDSLPRASPANRRHT

SEQ ID NO: 68573 - protein, 206 aa, Zea mays
  Clone ID: UC-ZMFLMO17097D05_FLI.pep
KRDKCQILTDQNPYLELTGPVRAVLLSGHVIFEASLYVKGATRSDDKELSLLAITSLGEFDDAHSYLVEHSYTSRLSILELMLGYLTYSVEATIEVRVICGTWPADGFRFIFEANAGIGQWIVLLETAETADVGDKISLARQVVSVDYHRDRELKVVATITNGSATYTDEKAFKPLKMGASFKELSIGGLGLQVTVYWSCFPFAPV

SEQ ID NO: 68574 - protein, 420 aa, Zea mays
  Clone ID: UC-ZMFLMO170114B09_FLI.pep
TRLYPLTKKRAKPAVPLGANYRLIDIPVSNCLNSNVSKIYVLTQFNSASLNRHLSRAYGNNIAGYKNEGFVEVLAAQQSPENPNWFQGTADAVRQYMWLFEEHNIMEFLILAGDHLYRMDYQKFIQAHRETDADITVAALPMDEQRATAFGLMKIDDEGRIVEFAEKPKGEKLRSMMVDTTILGLDPERAKELPYIASMGIYVFSKDVMLRLLRENFPAANDFGSEVIPGATEIGLRVQAYLYDGYWEDIGTIEAFYNANLGITKKPVPDFSFYDRSAPIYTQPRYLPPSKVLDADVTDSVIGEGCVIKHCTINHSVVGLRSCISEGAVIEDSLLMGADYYETENDKNVLSETGGIPIGIGKNSHIRKAIIDKNARIGENVKIINFDNVQEAVRETEGYFIKSGIVTVIKDALIPSGTII

SEQ ID NO: 68575 - protein, 187 aa, Zea mays
  Clone ID: UC-ZMFLMO17133D11_FLI.pep
LEAVRQVDVVICAVSTKQVLEQKPLIRAIKEAGCVKRFIPAEFGADPTKVQICDMDYGFYEKKIEIRHSIESEGIPHTYICCNFFMRYLLPSLVQPGLDAPPRDEIKIFGEGNTKGVFVKENDVAKFTICTIEDPRTLNKTLYLRPPGNVFSMNELADLWESKLKKSLKRCSISLEDGFNLYIFSVC

SEQ ID NO: 68576 - protein, 339 aa, Zea mays
  Clone ID: UC-ZMFLMO170112C06_FLI.pep
LRPSSGPLALCLARAAAPLRCTMAVLTKVLLRLFFTTGGLIVFLLCPASCLARPPHSSSNSNYYCDWCPRRSTASPDLDASLLRSCGTSRDGDDGGFGCGYGAAEQLDGGGAPHVAAAGADSFSAGAGCGACYQLRCRDRRVCGDGGVKVVVVAGLANRTGFVLTREAFAAMMARPRVSSNDQLLPGLGGNVVEVDFRRIPCEYKNRNLSVRIDEEGSRHPAHLAITFLYQGGQTDIAAVELSHAHAQPPSWRPMAPVGRRGIVTWRTSSAPAGPLQLRLVVTAGVGGKWLRAGGDVLPADWRPGQVHDTGLRVRDVALSSCARSCRGAATAGASEELR

SEQ ID NO: 68577 - protein, 168 aa, Zea mays
  Clone ID: UC-ZMFLMO17309A04_FLI.pep
RLRARRLQREAENPTSIVSSAPDSGQPRNNTPDLPRRSSSPFPSEGMDLLRQIAFAGLEDSERFATAVSELRRIARPSHYGASTSSNPPTNPEPIDGTHIAMALAADQASNSSTMAVIQEDAAFAESAGEPSNAGSSRSLRRRRGSGALGSLDVDGGDLHQNKRRRLN

SEQ ID NO: 68578 - protein, 309 aa, Zea mays
  Clone ID: UC-ZMFLMO17295A11_FLI.pep
EKFTFWQGKLVDGSVVAIKQLSETSRQGKKEFVAEIETISRVQHRNLVKLFGFCLEGNKPLLVYEYMESGSLDKALFGNGRLNLNWSTRYKICLGIARGLAYLHEESSIRIVHRDIKASNVLLDATLNPKISDFGLAKLYDDKKTHVSTKVAGTFGYLSPEYAMRGHMTEKVDIFAFGVVMLEIIAGRPNYDGKLDQDMAYLLEWVWQLYEEDHPLDIADPKLTEFDSVELLRAIRIALLCIQSSPRQRPSMSRVVSMLTGDSEAPEAVSKPSYVAEWQSNTEGTSSSVSTAEAVSVAPFLNPVVDDGR

SEQ ID NO: 68579 - protein, 91 aa, Zea mays
  Clone ID: UC-ZMFLMO17301A01_FLI.pep
VSNIATQSDGQTENSISNPPQMVIENISLKDQLVKEQSRSEGLSAEIMKLSAELRKAVHAQNNLARLYRPVLRDIESNLMKMKQETYATIQ

SEQ ID NO: 68580 - protein, 191 aa, Zea mays
  Clone ID: UC-ZMFLMO17303E12_FLI.pep
VGEGHARRAGLRNLQSINLSFTLVTDIGLKKISGLSSLKSLNLDNRQITDTGLASLTGLTGLTHLDLFGARITDSGMSCFRFFKNIQSLEVCGGLITDAGVKNIKDLKALTLLNLSQNGKLTDKTLELISGLTALVSLNVSNSRVSNSGLHHLKPLQNLRSLSLESCRVTASEMDKLRLVALPNLISVRPE

SEQ ID NO: 68581 - protein, 133 aa, Zea mays
  Clone ID: UC-ZMFLMO17305D07_FLI.pep
DRQCGKKVTKSDSGNWLCDKCNQEFPECDYRYLLQLNIQDHTGTTSVTAFQDRGQEILGCSARELNIFKENKDPRYTDVLINCLYQNYLFRLKVKEEQYGDVRQVKNTVAKVERVDPLAESKFLLDSISRFIP

SEQ ID NO: 68582 - protein, 306 aa, Zea mays
  Clone ID: UC-ZMFLMO17307E10_FLI.pep
FMPLPESLHHVLFGAGGFLTITKLWANDTLTLHFPITLRTEAIKDDRPEYASIQAVLFGPHLLAGLTHGKLPVTDSSHSNDGLTAGIWEVDATGAASVAGWVTPLHSETLNSQLVTLKQSIGGRTLVLSVSIADAKLEMQQQPAPGTDACVHATFRAYGQAGGSSQLLRGPNVTIEPFDRPGMAVTNGLAVGCRGGRDTLFNAVPGLDGAPGSVSLELATRPGWFVATAPTAMHANATTQVVCRANKGGAAFRRAASFARAPPLRRYHPLSFAARGTARNFLLEPLRSLQDEFYTVYFSLVSDGES

SEQ ID NO: 68583 - protein, 145 aa, Zea mays
  Clone ID: UC-ZMFLMO17311H06_FLI.pep
KEASTSGQNPDDVADNSRTICENQKWVWSEGHFLSVGAAVISCRNERAPDGLVADAHLSDGFLHLLLIRDCPLPLYLWHLTQFTKKGSDPLSFKFVEHHKTQAFTFISSHDESVWNLDGEMFQACEVSVQACRGLVNFFASGPEL

SEQ ID NO: 68584 - protein, 66 aa, Zea mays
  Clone ID: UC-ZMFLMO17312D12_FLI.pep
IAALCFRCIRCCYAMLGSSLAQGTVAIICGFQAGVRTLVLLVGLGGFYRASSWFDVFVWYKSDFKL

SEQ ID NO: 68585 - protein, 349 aa, Zea mays
  Clone ID: UC-ZMFLMO17318F07_FLI.pep
EPEAKLEAVTPSRSYELPPESESDAPASTGTQELKPWEQHAAVINLPRYDYRASGSLLLRSHSGFLITCPIKREKSATKEAIPILEEYHANCCVSEHAEPCDVKNAIKKRKLCSEASGSLEEAVTNGNSSSVSESIGSTGNTSSPQSKVNDNVDRASNLSLVKLSRSGLLFFKFPSGGVHVVEMLTEILHSLRSGKLKSPQWCHRIFPIQETCILSEEDLHATVSKLFLDFSRSKTNEDKPIKFAVAYNRRGIDETEKNSNEGSNQQTLMDREQCFKVVAAAVKSVAENSVVDLRSPEVAVLVEMLPVSGVPLGSSVAGVSVLPAELISTKPRLCVRSLVPDAKAGKKK

SEQ ID NO: 68586 - protein, 320 aa, Glycine max
  Clone ID: 700646325_FLI.pep
VGSLSMESKLLRATTISVPSTPSCAFHRTTRKASISFNPTSDFAPKSNLSLQAHAASIESVPTKKRIDESDNLTLDHIRRSLVRQEDSIIFSLIERAQYCYNEDTYDPDAFSMDGFHGSLVEYMVGETERLHAKVGRYKSPDEHPFFPDGLPEPVLPPLQYPQVLHPIADSININEKVWSLYFRVLIPQIVKQGDDGNSGSSAVCDVICLQALSKRIHYGKYVAEAKYQASPDSYKDAIIAQDKDKLMELLTYPEVEEAIKRRVDMKTKTYGQELVVTTKEHRTEPVYKINPSLVADLYSDWIMPLTKEVQVSYLLRRLD

SEQ ID NO: 68587 - protein, 263 aa, Zea mays subsp. mexicana
  Clone ID: UC-ZMROTEOSINTE119C09_FLI.pep
YDRAEQALPARDEVRTLFIAGLPADAKPREVYNLFRDFPGYVSSHLRTGKSSQAYAFAVFADQQSALAALSATNGMVFDLEKNCSLHVDLAKSNSRSKRLRSDDTSPYSPEKRNRKPRGFPDSGAGSNIYISGMGSTSHSLSGYPSAQSYTSLESSTSLSKDPSTFAPQNNPPCPTLFVANLAPACSEQELIDVFSSCAGFVKLKMQNKLGAPVAFVDFKDAISSTEAINRLQGVILYSSSGEGMRLEYAKSRMGLRKRDKHP

SEQ ID NO: 68588 - protein, 313 aa, Zea mays
  Clone ID: UC-ZMFLB73163G06_FLI.pep
KFNARCHGFVRLAQYSEVSNRTEPFKLQKGTGRRWTADRDLDQLQQSIGSNADDSEVIEIVGKNPFLWPDHWPVKDYAKIFDCLVLVPEIETEVVNVRSKIREAGQRARHEAGSSHSKQRRDSSTNPPVPYVAVHMRIEKDWMIHCKKWEQRSKSHEICSSKEEIIHKVSQITDLHRPVVVYLAVADSLLEDDSITSGWRVGMVAYEKKKLGVTDVYDRQPYLIKSAIDFEVCSRADVFVGNSFSTFSNLVVLSRTERLYNLGKASSCGENIGLSSYAYNVMGGDGGPQRWMTDMSDGSLQRLSYGTNNVSCH

SEQ ID NO: 68589 - protein, 196 aa, Zea mays
  Clone ID: UC-ZMFLMO17289C05_FLI.pep
PLHQRGDAGHRGLPHAARPRALPGRPGRQGPRRRLRLRRLRQPLRRRLRRPRRRRRRGSAGAAVLGRRGRRVRGDQRRPGPGQARLRQVLRALPRGLHVPQRRRAQELRAPHEQAQGHAARRQRGRHVRRHLQGRHLHQDQLHAPCWQRRQLGRLGRSHLVDLALPCTLRCLQPVRRCPCPCPWSFIILPTTRLCF

SEQ ID NO: 68590 - protein, 304 aa, Zea mays
  Clone ID: UC-ZMFLMO17194F08_FLI.pep
VAAAAVADRLHGSKEDRKLAIVLVGLPARGKTFTAVKLTRYLRWLGHETRHFNVGKYRRLKLGANQSADFFRDDNPEGIEARNEVAALAMEDMIDWMNGGGQVGIFDATNSTRKRRYMLMKMAEGNCKIIFLETICNDPNIIERNIRLKIQQSPDYAEQLDYEAGLEDFKERLINYEKVYEPVGEGSYIKMIDMVKGQDGQLQVNNISGYLPGRIVFFLVNSHLTPRPILLTRHGESLHNVRGRVGGDTVLSETGELYAKKLANFIEKRLKCEKTATIWTSTLQRTILTASPIVGFPKVFGYTI

SEQ ID NO: 68591 - protein, 186 aa, Zea mays
  Clone ID: UC-ZMFLB73014G03_FLI.pep
APGHGDWSTNLERYTLCQDGIFHKQDQFGRLLPTFIQIIDLAEEEEEEYWMVVSAIFEGKETFSLPSESSYADKSSSEPPSSTPLSDPINNKVHLLRTMLQWEEQVRRGASLAEKSLSASICTKAILREVAIIFWPNGKIMRMSTGSTAADAARRMGVEGKLLWVNGQLVLPQTELKDGDIVEVRV

SEQ ID NO: 68592 - protein, 189 aa, Zea mays; identical to SEQ ID NO: 42264
  Clone ID: UC-ZMFLMO17041G12_FLI.pep

SEQ ID NO: 68593 - protein, 55 aa, Zea mays
  Clone ID: UC-ZMFLMO17085G10_FLI.pep
ALHYSDKFRNVVLYRSVFFPRIPKYCRTVLEIAGFPPPVAIHSLKDLLAGGDLSD

SEQ ID NO: 68594 - protein, 342 aa, Zea mays
  Clone ID: UC-ZMFLMO17159C10_FLI.pep
MLQRLTAVWYGRHRFLVVWWRRAGGVRHRRRRSVGGRLGGRRLRCGSVRRWGRLGCRRLWGRGVRRWGRLGRRRLWGRGVRRWGRLGRRVCGRLGAWSVRRRGRLGRRRLGRRGVRRRGRLGCRRLWRRGVRWRGRLGRGRLGSRWLRAWSVRRRGRLRCRRLGGRGVRRWGRLGRRRFGAWSVRRRGRLRCRRLGGRGVRRRSGSGFWCGFVGRRGGSVCGWRRLGGRRGGSVRRRRGFGARGVRGRRRLVLLGRLLRLGPVLLGRLVLLGRLVRLRPLGGGLLGLRGRGGRRRRRGVPAAVTVPGVGLDLHGQAHGHHHQGQQQSSPAAATHPLSHTHSQ

SEQ ID NO: 68595 - protein, 250 aa, Zea mays
  Clone ID: UC-ZMFLMO17222D03_FLI.pep
AAATMTMATHHPRARAPLRVCAAWDMNPGAATVATPKPSKAKAKPPPATTTPARPPPLTHADLFARSSEAQGGVKKSTYMGFEKWWLPPAPVVKKPRSLYSAVSLAYLGDCIYELYARRHFFFPPLSINEYNKRVMDVVKCESQDLLLNKLLGEDFLTEEERDILRWGRNIVSSKTRTRKRAGIAVYNRASSLETLIGYLYLTNFKRLEQLMFQLGFTSGASSQHIADELRSSFQKTTPASATPPQPATQ

SEQ ID NO: 68596 - protein, 551 aa, Zea mays
  Clone ID: UC-ZMFLMO17219F01_FLI.pep
RGRPAGRSHNPSAALCLPPLRLSSRPASAFHSTARRCRVPTSSPPKFLVSGLDLSESERARMGGGNGETTQLGEPLLAKKAKAYRPRCPGCRVDRLNAEREGVFPLKDLFLIWLVTITCTLPIQSLFPFLYFMIRDLHIAKQTQDIGFYAGFVGASYMCGRAVSSTVWGIVADKYGRKPVIVLTLIAIVIFNTMFGLSSNYWMALITRCLLGIMCGYLGPIKAYATEVCRKEYNHLALAVVSSSRGIGLIIGPAIGGYLAQPADKYPSIFSQTSIFGRFPYFLPCLCISILAVIALIACIWFPETLHKHNGDAVDNSVETVEESLAGTDTEENGGGGCLKLFTNWPLMSAITLYCIFSLQDVAYAETFSLWAVSDRSFGGLSFTTTDVGNVLAMSGLFLFLYQMLIYPFLAKTVDHITLVRAVALLTLPVLASYPFFPSLSGFGLMVVVNCASFLKNTFSVTTITVFNILMNEAVTQDVRAAANGIAVTLMSISKAVAPAVAGIIFSWAQRRQTAAFLPGDHLVFFILNIFTFIGFVFTFRPFFVRGSAKH

SEQ ID NO: 68597 - protein, 153 aa, Zea mays
  Clone ID: UC-ZMFLB73008C07_FLI.pep
SSQPRKQSFPIFSSHSSTNTNVPPSIPTWGRITVSTRTLYFPVPENLSTRSRKHICQCMLGLVCSHCNLCISSSFHGSLVDVSGSNYHIFIIHNHAFRVHIHHESPIIPSLVLIGYPSCSIIVFFCGLLVENGPLDVQVVSSASRLPRQKKFR

SEQ ID NO: 68598 - protein, 282 aa, Zea mays
  Clone ID: UC-ZMFLB73019B08_FLI.pep
AVLEEEEQVEHELPAGAAPQPVLDVPLAGKGELKHHQPVEEAAEVHEDVQCKQEAECEAQTVDQQQELVPEEESVAGKNDDVNVIHECSFSDEVVTELPVGEVTSQGLPKDDPEADMEFEEWEGIERSEVEKRFGAAAAFAASGAGAAALSKLDSDVQLQLQGLLKVAIDGPCYDSAQPLTLRPSSRAKWSAWQKLGNMNPEIAMEKYMNLLSETIPGWMMNETLDTENTGSLPAETILTTMASTSDQRSNQGNEDNSSIGEGHPITSPNPEKGQSSDIPTE

SEQ ID NO: 68599 - protein, 203 aa, Zea mays
  Clone ID: UC-ZMFLB73225D05_FLI.pep
RAPLSHTMASSSASGAGVEGGVGEGPTTLDELYQINVVPAELHFKFRKELQGLRVGLNLEFYNLEVNDFEAKIVLKPLDYERKWKFQYKPISGDIQLLSKKIPVTKFLNLQVGIGHNFQLNATGWKWKLSTCLGGDGVSQIRNKSKLSLFPGFDLRIGWKAEYVLPEIHGAVGTGEPAFSMNYGRLHASIDRVEAIVTQSDQY

SEQ ID NO: 68600 - protein, 89 aa, Zea mays
  Clone ID: UC-ZMFLMO17212B06_FLI.pep
PITQMFATISIFVVTSFKGYKILNFSCYDLQYLKKRSRFPRHLLSRTKPSMNWLKLIQIYSMKVDGGSHLALNATSLQFRPLLNIAAYV

SEQ ID NO: 68601 - protein, 358 aa, Zea mays
  Clone ID: UC-ZMFLB73020H09_FLI.pep
LGENADEKDAEEIIDLASKASIADQQKQVQDNVHYELTHMCQAMDSILCPDTINDPSKGPSEAHNHSQRSGLSFAVGGAASANKQSAIIPATRPLTRAELSKKFRDHFGYTLDIGPSGIPHKDAGQGLFLSGQANAGAVLAIYPGVIYSPAYYRYIPGYPRIDVCNNYLITRYDGTIIDAKPWCFGGETRALWDGSDLVDYNAMAPKGSENNSDRVWRMLSKPLEKGVRENFGEVLERRNPLAFGHFANHPPKGSSPNVMICPYDFPLTEKDMRVYIPNITFGGQETIRMKRFGSFYFKSGGSDNQAGDSLVLKTLVLVSTRSICDEELFLNYRYSNSKRRPEWYSPVDEEEDKRRWS

SEQ ID NO: 68602 - protein, 96 aa, Zea mays
  Clone ID: UC-ZMFLMO17268A04_FLI.pep
SKHGISALTFSMYKKETGYIQRISTRRADCGHVITPAAFISPKNCGAKKKERDSSLSIHDDDTAQDENVYHFNNTNRRLDKRMQPDGFLSAQPAHY

SEQ ID NO: 68603 - protein, 494 aa, Zea mays
  Clone ID: UC-ZMFLMO17053B06_FLI.pep
GGAARVSRELHYRASSVLLPSMHSLVRRGNGYGYGYGGYGSSNPHMNYHRQNTESVTTVVTEMNRMAVDDKPCYGGGVQKQACKVEAFQEHDEAYKGAVAVQQKHSSFKEDKEEVRGAAAAVRSWHDELYKEEEEEKRVVDTEYGARYGGVAAVKKPGYNYKQHEAYGETEGAGYGYGAGGVKKQAGYSYAQEACGESYGGAHHGGAGAVAQTYAYDQQQAYKHKNAAGAGAGYGAPYGGGAVQQHDGHKDVYRHGAAAGGKVKKNGYQYQEAYGGTDAGGYGAHYGGGGGAVQQYGYGGATTDGKVKKGGHQYYGGSGAGGYDSHYGGGGGGAVQQYGGYHKDAYGYGGGATAGGKAKKSGYQYEEAYAGTGAGGYGAHYGGGAAVAQKQGYRQGIYESESESESESESDESDCEEAFLPHGGRTPQGGVQHSYGYGGGAYKHGAGNLGGLRRYQSYESREDLGGGRRYETYQSTVQYTGSPTKNRHVLRYGA

SEQ ID NO: 68604 - protein, 69 aa, Zea mays
  Clone ID: UC-ZMFLB73178B06_FLI.pep
AQQKSSMSEGQPAGGDGKEGNTDRILQLEGELRDMKERLLNMSLQYAEVEAQRERLVMELKAIKKGRWF

SEQ ID NO: 68605 - protein, 412 aa, Zea mays
  Clone ID: UC-ZMROB73028H06_FLI.pep
NCSQSQSQWKKGKLLGSGTFGQVYLGFNSENGQFCAIKEVQVIMDDPHSKERLKQLNQEIDMLRQLSHPNIVQYHGSELSDESLSICLEYVSGGSIHKLLREYGSFKEPVIRNYTGQILAGLAYLHGRNTVHRDIKGANILVGPNGEVKLADFGMAKHISSFAEIRSFKGSPYWMAPEVIMNCKGYSLSVDIWSLGCTIIEMATARPPWHQYEGVAAIFKIANSKDIPEIPDSFSEEGKSFLQLCLKRNPASRASAVQLMDHPFVQDHPAVRAAKSSVLRNTPSSPADGRHTMSNRELPSRKIITPLKDIGLGMRDFTGFSTTVPSPHSPIPGRANMSTPVSPCSSPLRQFKQSNVRGMRSPPHPMLSPGLGNTVSYTQNQTRRNPAPAISDPWMDVGQMKLQSPNISPRRF

SEQ ID NO: 68606 - protein, 69 aa, Zea mays
  Clone ID: LIB3078-023-H8_FLI.pep
TKHEKKANHTRMMDGLSGALICYHSSCLIAEIHLLLLNFTQSLELFDFFIQDSSVLMAFPDRCVSCAKA

SEQ ID NO: 68607 - protein, 151 aa, Zea mays
  Clone ID: LIB3076-015-G8_FLI.pep
QDFPFSFPTERRGILRLLVVDVGEATLTAVVAVEVVGHEDPRAALGVGALLAEAGDLAGGVVNLVELEHGQLHLLVLVLDLLGLGVRLLLALLGASPEAEHQVQRRLLLDVVVGEGAAILELFAGEDEALLVRRDALLVLDLGLHVVDGVR

SEQ ID NO: 68608 - protein, 96 aa, Zea mays
  Clone ID: LIB3079-007-D10_FLI.pep
NSSTSQFWPTDLSQLAAATAYNKEPSKAHYFSPFANTGVDCFFASSLLFMRLAALSASLAASMSFWLRKLGWLVEDSSLAHILSVILTLFLVDVTL

SEQ ID NO: 68609 - protein, 414 aa, Zea mays
  Clone ID: UC-ZMFLB73022B07_FLI.pep
QKKKERPGIYKRFTTVRAHKILGVDCIIEALDISFGHTREDTCCMAHHSVLSTELKLSGSGGLLTGRVTTAVADVLVVRVLAEELHGVLQAPAHGLRQEEVHEHPACGGDARVEVEAAGDGDGVGEREEGHGGGAAHDPVEPRADGSSLRAQPQRVDLGAVDPGDGAQAGRERRHERQHGRDAHRAQCRGLPLGAPVHHVQGRGQREEEDGHPAAAGQQQRAAADAVQEQRGDGYEEGLARAHRHGRAQRVGLGLDARPLEHPRAVHHHAVHARGLLDEHEAEPRHEHAAHGAGRVDEQLLPHPVVARRRRRRRCLAAGADDGGHVVGVGHALGDADHLLDVEQTLLGLGGGVGGLLQHAARVVDAAPHDEPARRLRHGEDGDAEEDGRHGADQEHGAPAEVDGQAREGEVGDV

SEQ ID NO: 68610 - protein, 521 aa, Zea mays
  Clone ID: UC-ZMFLB73026A09_FLI.pep
PFPLQSNQPSMGFFIPPPKVYKPAAEVDLGPDSDEHYISPNVKAPRVAGFLVKMLAWVLETPVLGWIVLGVLKRDNLVYKLVSDAEIPEPPLFTATHTWQAIQEQSVRVTESRLSPAERVQEAVACVPAAAQAQLEPAAGFRRWTVRDFHRAYRSGQATPTMVARRFLAAVEECSGPDLNMGFFISCDPADVLRQAEDSTRRYQQGAPLSAMDGVLVAVKDELDCLPYPTSGGTRWLGSARRCAADAACVAQLRACGAVMAGKANMHELGAGTSGINPHHGATRNPYNVGRVSGGSSGGSAAAVCAGLCPVALGADGGGSVRMPAALCGVVGFKPTAGRLSNSGLLPLNWTVGMPGILAATVEDTLIAYAAIADQSKPSPLQQPELNLPMLTRTRSMPSIRLAKYAKWFDDSSEDIRSLCGKALQMLRTHYGWESVDVTVPEIEEMRLAHYVTMGSECTASLAAKYLDSMDRSEVGWDVRIALSPTGPSAAETTSARSVSDAGRCTSTRRSSRLPTPSSRR

SEQ ID NO: 68611 - protein, 135 aa, Zea mays
  Clone ID: UC-ZMFLB73029E05_FLI.pep
LLKFPAYCFSFTSCTLFIFHTSKLTLINTRNLGAVPLHCHDFGCLRSTHWTPQSIAHLFMPRDEKIILAEGHKLPRSPGLSSSKAYSDSLVGLSFVFTPLSALVASPPLTLASPASFPPSDSTPTSDISPGFLSK

SEQ ID NO: 68612 - protein, 405 aa, Zea mays
  Clone ID: UC-ZMFLMO17014G05_FLI.pep
TSAQASAADSSKAATPGALFEDKPQSANDTWRKLHSDPLLLIRQREQDAISRIKNNPIKMAEIKKSVEAEKKQKEEKKAKKKHKKHHHHKSKSKRHHSDENSDSDEISDGKDERRKRSHSSLHKKEENMSRHKKQHREDSSDSDDEPQRRKQDVSENDEPRRRLHDDNEPRRRWQDDVEPRRRLHDDDEPRRWQDDVEPRRRRQDDGESRRRWQDDDELRGRRQVDEKPRERSYVNRPRYDRSDADDRRRHHSPRDTKPKRVDDGHKTGNSTSEHHSRSEQGSGEQTRQESEHDRNSGPSLNRRRGGVHHMSEEERLARLHQMQADAEVHEEQRWKRLKKAADDDAKEATTVNANQFKGKNFLEDEKKSIFGTDKGGSATIEESIRRRAFYSQGGRDAEGNAFRR

SEQ ID NO: 68613 - protein, 492 aa, Zea mays
  Clone ID: UC-ZMFLMO17063F09_FLI.pep
DASGFPCDRALFLLSQLAGATDSTRSFGWPDGTRKEAGWPPMATRRSRGRRRMSPPRPPGLEQTIWTTRNSCAADLLYKPVVISCGHMSCFWCVHKAMHIFRESHCAVCRQPYIHFPSICQLLHHLLLKLETNDYKRREKEVLEEEKRMQTYSPQIIEFLNYKTNVGSYKENRNEDSKARPPQEVPLNDSVPDEHLKKIKLEDVSCPLCMEMLYQPAVLNCGHVYCVSCLSSLNEETLKCHVCGSLHPGDFPNVCLDLDHFLEEYFPAEYELRGQKVQFKKDQCNRETSSSGTSGRKGSTRALHAEDPSNIHIGVGCDSCGVYPIRGKRYKCQDCTELIGFDLCEACYNSSSKLPGRFNQRHTPNHRMEVDNSALVHRILRHHGIPEEGPEGLMMEVVGPDAMVQILIDNQGMEEGNDEGPGEAAIEEPVGSLGSMSRLSHLFMYNPEMEDGNDEDSGEEAAIEEPVGSLGAMAPLFMYDQEMEDNEEDQAH

SEQ ID NO: 68614 - protein, 209 aa, Zea mays
  Clone ID: UC-ZMFLMO17099E03_FLI.pep
GEHGGEGQLRVPGPGVLQDAAADGPVGRVLVRGGAVRGAVRAAGDRPGAGARADQPGGVGRGVAEARAAGAHRGPADPRGGERELAAQVRGDGGAVPGGLRAGAAVHGRRAVEPRVLPAAAGDARAAGRVRGQRRRGRAVPRGRRRAALGAVVDQLHDHGRPGRLGRHGRGRRRQQGVLPAQRRRGPVNDDRLLECTNRSLFCYRLTVP

SEQ ID NO: 68615 - protein, 565 aa, Zea mays
  Clone ID: UC-ZMFLMO17233E04_FLI.pep
RRRAVRSEQRLIDKLKRLNNSAASIQTLSRWCIFHRKKAKRVVDTWEKQFTSAREDKKISFLYLSNDILQNSKRKGADYVDEFWRVLPRSLKHVYEKGGGEGKNQVARLISIWDDRKVFGTRIESMKNGILGDNPPILDNNGNSLNPSSNPTSNSKAARKDSGTIVKKLTVGGMPEKIVSAYQLVLDQHFDEDTALNKCKTTLGLLERINKDINDSIINGNQPALSLISDLQEQEMTLKHCIKQLESVDMARISLVNQLKEALNEQESKSLVLRDQLQVAQTEAQRVIQLRKQLGGALVTSVTHSTSSPLMITPPEQTSAIMQGSEVRSTHPQSQPLNPAASLPPTVSAVGDESKRTAAAMADKLASLSAPVQVLTSILSSFAAEQAASINGGSSSGEFSGGPPGFHIDKRPRLEKTGQASDMGAPPPFFGQAAQVQQQIGGTHPPAPAPGSFPPPPPPLPSLLPPLLQQFGQNTGGMIGMGGPFGMMAGSMPPPPPLSNILPAGFPRPSGPPPPPPLPPAQSQPQQQSPQAAQQSPTSTGFFQSSGMGFFPPAQVQQSPSAQRQ

SEQ ID NO: 68616 - protein, 234 aa, Zea mays
  Clone ID: UC-ZMFLMO17055D12_FLI.pep
PIALVKFQFLKMKANKRAPRATGKFVNLFGACFPKPMLPATPANHTGNAPPTQNPEQHSPWVMGGGEAIASQSLHAADATVCAPPSSVPASTLPTSTAPPARRGGDRGRGEEGRRPRAIVCVPPSALEPPSACHHPLRRRPHKRQRLSTTRSRPRRPPPLSKVTHHPQLAVLRTSSRPWLEVFNDVRPLLVLMYLAKVSNMVAINPTFLIENMMRKLVLFLQNNRGNNRVTWLN

SEQ ID NO: 68617 - protein, 462 aa, Zea mays subsp. mexicana
  Clone ID: UC-ZMROTEOSINTE007C08_FLI.pep
CPFASADPTSSTPENFSASCLKSYATGDSEWSAFEWMHTDCLPDLIKLACLLPVKEDNLRTIITKYLLEVSGLYGKDYLEHIMLPVFLVAAGDIDSGDFTYFPLSIQPKVRGLRPKTSTAEKLAIMCVFPLLLSGILGSPSSRQQLEEYLRKVLIQNTKDGSFSMHHTTEIINAVRFLCLFVEHHSVIFNILWEMVASSDTSLKINAAALLRALVPYTDVKIASTHILPALVTLGSDQNLKVKYASIDAFGAVAQHFKNDMVVDKIRIQMDAFLEDGSHEASVSVIRALAVAVPHSTDRLREYLLTKIFKMTCITPVGNDIERRRERANVLCEALRALDATDLPAMGIRDLLLPSIQNLLKDLDALDPAHKEALEIISRERSGGTLESISKVMGAHLGIASSVSSFFGENSLLTKKEGGEEHDPAGPTAPEQNLQAQPESTRFGRIMRSGFGDILRGQSKGQ

SEQ ID NO: 68618 - protein, 302 aa, Zea mays
  Clone ID: UC-ZMFLMO170113F10_FLI.pep
QRAAADAVAGPHVRLRVPVPARVPVRQDRHAAAAGAGQLRRHRHRLLPVVAGRRARRDRLRVPGQRVRRALHAAHQRVHAGAGAAGAAVPPLVRPHRRLPHLLHPLEPQARHLHGGRHAHQGLPQPGEQGGGVPQEPADAALLQPVERGRLGDAGRARQDGLVPRPLLRLLPRVQGRRLRRRRGRPDPLRRHRRHRGHRRPRLRRRRRGLVQPGAGPHPAAADALGAAQVHDLQLLHRPQALPAGPPRRVLHAVAPGYSSPVQQWRARACVCMWSALLLPLRRSVSITGSRQDERHRNMVDK

SEQ ID NO: 68619 - protein, 391 aa, Zea mays
  Clone ID: UC-ZMFLMO17048B05_FLI.pep
SNLTESALVKDIYTTSQAVSAPIVVPRDILEDKTVSNVRRGTGETAAVPDDFRIPVHRRKPSLSGSAADSDSSSRSVFTEPDVCSEGLSSLKFSFGLTPYHKKEEFGDVDNEGIAQIAEKMERTVSLDHSQQLNDDKSFESPCSTTETAKVKYVRGVAVPLGKTKSLVERWEKRETSSTDYSPQTGSCGDRASRNDNHPFHLAEPSTTFEKDLSTVDEAMAPVNLVRNHDEFLNAVKLRLTKLEMMRHVFEQSGIKGAIAAVAKLPDNAVQADVVSALKGKLDLFNLEFFSNFLPVLAGLLCSKTERHAMVSLEMLLDLIKIFGPVIHSALSANLGVGVDIQAEQRLQRCSRCFNHLQKIQQSLNPLILRGGQTAQLAQELSLSLQDLVVI

SEQ ID NO: 68620 - protein, 413 aa, Zea mays
  Clone ID: UC-ZMFLMO17054C11_FLI.pep
GEVVPSSAEAAGENDADADDEGEESAQRSTEDSENASEAGEDASGSESGDGEECSREDHDEEEEDMDHDDQDAKAESEGEAEGTTETHDVEGGISLPLSERFLYSVKPLAKHVPTALHDREFSRVFYGNDSFYVLFRLHQILYERLLSAKTNSFTAEKKWRNSKDTNPPDLYAKFMSALYNLLDGSSDNTKFEDDCRAIIGTQSYVLFTLDKLIYKVVKQLQAIATDEMDNKLLQLYLYEKSRSPGRFFDLVYHENARVLLHDESIYRFECCSSPTRLSIQLMEYGHEKPEVTAVSIEPNFSSYLFSEYLCSTPDKKLSEGVYLGRNKRKYSNNDEPSDSLKAMDGINVVNGLECKISCKTSKVSYVLDTEDFLFRLRKRRKILRGGNVPDRLQISSISAAKVQRFNRFLSKP

SEQ ID NO: 68621 - protein, 77 aa, Zea mays
  Clone ID: LIB3067-044-A9_FLI.pep
GAHTAKPEILSVVHNNNQMKRRKTTIAAVSSLINLQFSRFTVTFSKLVSSLTMGVPLNLMYTTIMKTSHATASAISP

SEQ ID NO: 68622 - protein, 156 aa, Zea mays
  Clone ID: LIB3067-035-H12_FLI.pep
LQPTNSCLSLSLYSLHPLLQLEYGFLLAVLLFLQVFERPIHPLQLCGDVLDALLDVGLGLREVLLDQHRSDELVHVGPIAEQLQLLEDELVLADLDGVLLADLVVLGDVFLDLAEGVGLDLEILLHLADGRRGRRRRRHGLPAFLLRRRRLPRPRV

SEQ ID NO: 68623 - protein, 122 aa, Zea mays
  Clone ID: LIB3069-003-C6_FLI.pep
SSNPRAGWRYKARTGQEHTHTHTEDNNITRQHTAALVGLGDRQASSVAQVAEEERDGRAEGGGQERRGEGRGAGGRARRGGLGGEGGAGEGGHGDGRDDDGGAQHLGGGHDGGLPVLAFELR

SEQ ID NO: 68624 - protein, 205 aa, Zea mays
  Clone ID: UC-ZMFLB73115G02_FLI.pep
LRGGELASYWRRASSGAGHGGGEAPVPGQVQGRRRGGRRAQGHDRPRRRDGHGQVFRVGPGRAEPGDADAGLHARLLAHLRLRRRPRRLHGPRQPHRLRRHLHGRHRQGARRRLPRRRRQASAAGMTRWPLSHPPATVRLPFSGRAADPRVPAAAVLVVVLVLSIACYLCSIYLSIYLSTSRTYLLLLFGYLRNKFSVTFMVAYI

SEQ ID NO: 68625 - protein, 194 aa, Zea mays
  Clone ID: UC-ZMFLMO17224H10_FLI.pep
ALSKYVDWTDRGTCILFGDAAGAVLVQACSADEDGLLGFCVQSDGNGQKHLNAATANDESILSNTNGVPGFPPKKATYSCIQMNGKEVFRFAVRCVPQSIEKALQEAGLPASSIDWLLLHQANQRIIDAAASRLDIPSDKVISNLANYGNTSAASIPLALDEAVRSGKVKAGDIIAASGFGAGLTWGSAIVKWG

SEQ ID NO: 68626 - protein, 359 aa, Zea mays
  Clone ID: UC-ZMFLMO17223G04_FLI.pep
GDPPALNIIQYIPSTYNWKAAGLTVTQQIKTLSSSDQYLQISFSISANTRGQTANINFRIPSWTFADGAGATLNDKDLGSISPGSFLSITKQWNSDDHLALHFPIRLRTEAIKDDRLEYASLQAILFGPFVLAGLSTGDWDAKAGNGSAISDWITAVPPAHNSQLVTFTQVSNGKAFVLSSANGTLTMQERPEVDGTDAAIHATFRAHPQEDSTELHDIYSTTLTGTSILLEPFDLPGTVITNNLTLSAQKSSDSLFNIVPGLDGNPNSVSLELGTKPGCFLVTGTNYSAGTRIEVNCKSSLESIGGILEQAASFSRTDPLRQYHPISFVAKGMARNFLLEPLYSLRDEFYTVYFNVRA

SEQ ID NO: 68627 - protein, 496 aa, Zea mays
  Clone ID: UC-ZMFLMO17132F06_FLI.pep
GFGVCVKKSSFTKAGLCRRLVLVCNKWGNGKEDACYQARPTAKTNCQATVVARLLGDDLLHLTDVNLEHNHALNPSAARFLRCYKTLPSGLSKDLVVRAARGECSVAGDIDVPIFDEWGRLKTGQADVLAINAFFTQMQAKLPNSFYVMDFYVEGHLRSVLWADSRSRAAYQYFSDAVWIDTACLRNKYHVPLVSFLGVNHHGQLVLLGCGLLSDESTESFLWLFKSWLTCMKGQPPNAIVTDECVAIKAAVREVFPKTRHRISDWHVVRSISEKIGDLPEYEAMRTNLVTVIYDSLNDNEFEARWKNWIDRFSLQDNEWITFLYENRHLWAPAFLRDTFSAGLCTVSQRESPSTFFEDAVSSETTLVTFLASYMTLLDNKYKMEQQDDFDSLNSSRLLISKYQMEEQLSRLYTLNMFMKFQDELKATMHCQVQLDGSASSFIVIDLTEAGSEMLNKKYEVVHCMATNRMECNCGLFQFHGIVCRHALSVLKWQQV

SEQ ID NO: 68628 - protein, 241 aa, Zea mays
  Clone ID: UC-ZMFLMO17223B10_FLI.pep
ANVDTFIVFRSLTPLLVAIADTTFRKQPCPSKFTFLSLVVILGGAVGYVTTDSAFSLTAYSWALAYLVTITTEMVYIKHIVTSLGLNTWGFVLYNNFLSLMLAPVFWFLTGEHRSVFAAMESRGEGWFQLDAVVAVALSCVFGLLISFFGFAARRAVSATAFTVTGVVNKFLTVAINVMIWDKHASAYGSVCLLFTILGGVLYQQSVTVKGNGAVVAQRELVPEQPEEVDEEKQSLVSSAK

SEQ ID NO: 68629 - protein, 244 aa, Zea mays
  Clone ID: UC-ZMFLMO17220D04_FLI.pep
ERGAQRLLVYEFMPNKSLEDHLFRRANPPLPWNRRLQVILGAAEGLAYLHEGEVQVIYRDFKTSNVLLDKDFRAKLSDFGLAREGPTGANTHVSTAVVGTQGYAAPEYMDTGHLTTKSDVWSFGVVLYEILTGRRSLDRNRPAAEQKLLEWVAQFPPDSRNFRMIMDPRLRGEYSVKAAREIAKLADSCLLKNAKERPTMSEVVEVLGRAVQAHAEPDSGAPGPGPGAKGKKTDAATPSRRRRD

SEQ ID NO: 68630 - protein, 127 aa, Zea mays
  Clone ID: UC-ZMFLB73198F03_FLI.pep
GFRSPNEIQNQHQSTSKRPIEHLENQPFLHLFHQAEDDSMQQVQHCAQFPPIHQCTSTPHLSDNPQHQQQAYLSQHISCLQVGQGHLGGRMHIIPTSPAKFCDECGSPYLRATSKFCSECGTKRLGM

SEQ ID NO: 68631 - protein, 275 aa, Zea mays
  Clone ID: UC-ZMFLMO17052C05_FLI.pep
SAGALGNLSHLLSETAQSSMLMPVYDKNRAETPNLARPKVPPKELFLEQLTAGHESPSTCRSSGQTLYFPFQQPLGYNSESGSGDGANMNSLWFNQSDFNCSTISTVMPPASPSALSTSMGLNLPPDNSRHGGTGIGSTAVDSFYWDGTNPSSSSSTGSRGSNSMGFEPQSTSSILENSVFQWTDIGQEKDTRAHLVEELKWPDLLHGTFAETTTAMQNQSQTLYDDVIKAESQFSMEGICASWFQNQQPQQQLQATPDMYDKDLQRMQLSFENI

SEQ ID NO: 68632 - protein, 306 aa, Zea mays
  Clone ID: UC-ZMFLMO17053E04_FLI.pep
DYVGMPTAPSESNKEPRPEECVNELGIKQPVQHVASEEQEGVQDDAKADANVMNVSFGKGKSEDSFGTINGTNSGDKIESPSGLAERTLTQPTTKGCSKQRGRSSNGRGNRTKKIEEGNASGLIAVAPESEDDDDAPFIDGNQAEGGALWDIFRREDVSKLHDYLMKHADEFRHCNFEPVKQVTHPIHDQCFYLTIEHKRKLKEEYGVEPWTFEQKLGEAVFIPAGCPHQVRNLKSCIKVALDFVSPENVRECIRLTEGFRLLPKWHKVNEDKLEVKKIALHAFNQAIKDITDESSNSNESKWIRR

SEQ ID NO: 68633 - protein, 235 aa, Zea mays
  Clone ID: UC-ZMFLMO17056C09_FLI.pep
SDKLGSIVAKRRKDFTVEFFNHLYYVAESCHDEPEKQTELAKLGNDCVDALQAHDDTTGSLEALNAAELKLKDILNSPSVDAACRKIDDLAEKKELDSALVLMLSKAWSAAKGTDITKSEAKDIMFHLYMTAVANLQRQMPKDIRILKHLIMIEDPEERSSALNDAFTPGPELQGDNVDTLYTSPEALHTWARAIVDAYYNSREGTLIGQARDMMNPKIIKRVEEIVKIIKDKYL

SEQ ID NO: 68634 - protein, 319 aa, Zea mays; identical to SEQ ID NO: 65361
  Clone ID: UC-ZMFLMO17056E11_FLI.pep

SEQ ID NO: 68635 - protein, 226 aa, Zea mays subsp. mexicana
  Clone ID: UC-ZMROTEOSINTE043A05_FLI.pep
LDEMRELYPYLVDEATILVEPAVLERVLLNIEDIDAQVLDKKIRKARKQLADAITESARINDMEVPTIFLFTSSKLQPEKLRVENENNLLVDHLEKMDDVDICAKQRLARVEREVMELRQTVIAYQSQAKGIICESAKGGLQSIVAENQTPANILQKKTEVPNGLIHKKNAAVTSKYHCAVPHNVPPNKPKMQGVMLPPSKAFPGMPRKIDKSPTPRKAIWKGPIC

SEQ ID NO: 68636 - protein, 289 aa, Zea mays subsp. mexicana
  Clone ID: UC-ZMROTEOSINTE062D03_FLI.pep
QSHTVQGYVGNKSAVFPLQLLGFDVDPINSVQFSNHTGYPTFRGQVLNGKQLWDLIEGLEENQLLHYTHLLTGYIGSVSFLDTVLQVVEKLRSVNPDLVYVCDPVLGDEGKLYVPQELISVYQQKVVPVASMLTPNQFEVELLTGLRITSEEDGLTACNTLHSAGPQKVVITSALIEGKLLLIGSHKKTEEQQPEQFKIEIPKIPAYFTGTGDLTTALLLGWSNKYPDSLEKAAELAVSSLQALLKRTVEDYKMAGFDPSTSSLEIRLIQSQDEIRNPTVTCKAVKYGS

SEQ ID NO: 68637 - protein, 410 aa, Zea mays subsp. mexicana
  Clone ID: UC-ZMROTEOSINTE070F12_FLI.pep
LQLSVKKHIPVTETRRQRDRDAIEAKNTKHVGKMSFIDLAGSERGADTTDNDKQTRIEGAEINKSLLALKECIRALDNDQIHIPFRGSKLTEVLRDSFVGNSRTVMISCVSPSSGSCEHTLNTLRYADRVKSLSKGGNTKKEQFAVQSVSSGKESTYTSYPLSCEAEETMEQTQEIRPVDSSRKGVDSFTSNSSIEPEKSSYCMIPSYPHKGKEETSTRSGLNDRERGDSKYNQAGFNSKTHSLQESINSQEEVKVTKVSPPRRKANRDEKSERQVNYMKKESGPEISRTGVKQQQQLKQLQRPSSTSSSQVLSKQSEKEDMEINTILEEEALIAAHRKEIESTMEIVREEMNLLAEVDQPGSLIDNYVAQLSFLLSRKASGLVSLQARLARFQQRLKEQEILSRQKPLR

SEQ ID NO: 68638 - protein, 416 aa, Zea mays
  Clone ID: UC-ZMFLB73128A10_FLI.pep
TKKESSRLVSSANQHYNKPFSWKAPAIILAFEFLESIAYSGIALNLVVYLGTVLHGTTASNAANVDAWNGATFLTPVLGAFLADTYWGKYKTAAISIIFYVVGLLIITTSAVIPSLRPASCEGGSCPPATGFQYFVLFGSLYLISIGTGGVKSALLPLGADQYNDANAEESKSKQLFFSWFFMAVNLGVFISGTVLVWIQQNVAWSLGFGISSICLVIAAVAFLVGTPLYRVQLPTGSPLKSIVMVFVASYKKRGVAVPADSTLLFEGNESSSIVPNKIEHTDEFRCLDKAAVVVEDQEMKDSHRPWLLCTVTQVEEVKILIRMLPIWFTCVFYSAAMSQTATTFVQQGNAMNTKIGSFSVPAASMNSAEVIFMLVWVVFQDSVVIPIARRYTGNPMGLTLLQRMGVGRLLAIPSL

SEQ ID NO: 68639 - protein, 114 aa, Zea mays
  Clone ID: UC-ZMFLMO17292B07_FLI.pep
ESSRSEYLAKEKKLNIRESSTSRAEPSSSAAISGSSRSVAGADRGKEDYFVLPDTALTRSMQLLLAMGFSYIQVMEAYSIFGEDVDSMVCYLLETGGTGASAGGSNHRKGKAAE

SEQ ID NO: 68640 - protein, 174 aa, Zea mays
  Clone ID: UC-ZMFLMO17199H10_FLI.pep
ASRRHAGTCCWVLPRWRWCSRRRHAVRARDAAGGREPHGHGGAAAAVHGDDAATADDEWSRRRRRRVPGDGVRVRPAGDAVPAAAAVLLPPDAAAAPARQHVQRREPQQLHGDVIMSLSCMRGGKGRCGLSKLFLLLPAILPEEGETDHGSASPWLEQSPRIGLDWISVYMRHA

SEQ ID NO: 68641 - protein, 135 aa, Zea mays
  Clone ID: UC-ZMFLMO17204C11_FLI.pep
NTLASNPSVLHTELHVCPVQGGCAWCTDLLPYLVWLLHWRMDSKRRLQGPFSLRITNESGETLVAYQVIPANWAPNSYYRSNIQYEAFGSAAGQATGSAVGLVISSAARLHTLITRIIGLICLVLLYHLQGIEVP

SEQ ID NO: 68642 - protein, 332 aa, Zea mays
  Clone ID: UC-ZMFLMO17240E09_FLI.pep
IRHWRVTSLACSSTSSCSAPEVCGYDLHTTPARHIPVEMDRCRAHWDDTTTRIFLDLCIAEKEKQNYNSKGLTKIGWHNLYRNFKEETRRSYDTKQLQNKFNGLKRMYSLWRLQNDKAGPGGGGGWDKSSSTVTQDADGWDNQITETSAAEDFRGKALAHEDALAVIFGPKDGTNSPSVGGGAGDRTPGGGGGGEEENHARASGDNAACPEESLGCYRSGRASPWSSQDHHIHMVGSRPAKKPKNTGYYAEGVSESMLGSRNESSSAIRREQEEVVELLQLVEKDGVSQGSELFFIATELFRSPIRRAAFRCITTPKNRVAWLRWTWDNVKM

SEQ ID NO: 68643 - protein, 119 aa, Zea mays
  Clone ID: UC-ZMROB73004F12_FLI.pep
VAWEVLRRHFSKKRSVDVRRINPKVPKEEAVAISGRLLQILSDHGPLTVGNTWNHAKDAGIAGLNSKTHMKILLKWMTGRNVVKLTCVHVGNAKKFLYSPSTESSSSAGASPSSTSASQ

SEQ ID NO: 68644 - protein, 169 aa, Zea mays
  Clone ID: UC-ZMROMO17011G02_FLI.pep
LFVTESKIVYKATRPSYLPFMGIVKKEIKVPLHLIVDVIIEQGCLQSAYSLYIFRIESIAHGKPASVDELQFHGVHNPDFLRKVITREASRSIREVQSWKNRLYSEEGPSHVQSSGLHSPSAKVRASPICAAFDSKGKISDNILLHKIEELNRSVKNLESLLVRSHRRE

SEQ ID NO: 68645 - protein, 89 aa, Zea mays subsp. mexicana
  Clone ID: UC-ZMROTEOSINTE008H12_FLI.pep
CRTPPSAQRRRRGMRTRPPPAPLLPRRRRRPCRRWRSWTSPRRRGTKRRPSTCASTRPGRSTGIPSSHERSTTTSILVVVAAAAARFSQ

SEQ ID NO: 68646 - protein, 247 aa, Zea mays
  Clone ID: UC-ZMFLB73280A08_FLI.pep
PNRKRRAAAMDPAAGGAGQQRQNKASAGKKVKKGGGSGGRWPAVKPKKDLQINRLKGTHLLTIPDFFTSAEAKAFIDIAESMGFTHQGSLGPLKGEAYRDNERISVTDPLLAQAIWESGINRIFTDISVSGKVATGLNPNIRFYRYTEGQRFGRHIDESVSLGDGSKTYYTLLIYLSGKGSAKDSSGQALVGGETVFYDQRGGVVAEVAPVQGMALLHLHGAKCMLHEARAVKKNAKYVLRSDVVFS

SEQ ID NO: 68647 - protein, 43 aa, Zea mays
  Clone ID: UC-ZMFLMO17310A12_FLI.pep
NAQFTRQPPSLASKIRHRLSKQTPVLYALTLETINPMKGHKTV

SEQ ID NO: 68648 - protein, 165 aa, Zea mays
  Clone ID: UC-ZMFLB73287D03_FLI.pep
KLSSSLGGCVAIYRPMQLNPRQTASQAAKRIVRRRRSARMTIQSCRLHVQLGPARPRCEARSLLGVVRAARSASLRAASSSAWASAAATSFASRASSPGGSGKRSARRGISSRIRASGRHRRRRRKSRSCDAGRWGARETAASASGGDRSSACARPAAVCVRWRW

SEQ ID NO: 68649 - protein, 41 aa, Zea mays
  Clone ID: UC-ZMFLMO17425F11_FLI.pep
RLASLTVKCSNEHAFPLLIQGFHSVTDHLSIELTYRRKLCL

SEQ ID NO: 68650 - protein, 232 aa, Zea mays
  Clone ID: UC-ZMFLB73136G05_FLI.pep
AITSTLLRYRKLKRQHVSHESSSSLLLEAWKPLSMGFKKRWWECVALPEDVDSSEEELFRQQIRDLAFTSLQLLKDAIFDPECAPLFSLDIYGHIIGMFELNNLDLVVASPVEDYFIYIDGLPESDKEEAEKVTGPFLDALGEDYLVPCEGTAFFPLQSCMNHSCRPNAKAFKRDEDKDGHAVIIALRPISKDEEITIAYIDEDLPYEERQAQLADYGFTCTCLKCQEERPV

SEQ ID NO: 68651 - protein, 285 aa, Zea mays
  Clone ID: UC-ZMFLB73003C06_FLI.pep
IQLHSLLPAAPCQSLEAGRRAFSSCRSPLLSRSLFRSPLHSPLPLSLVSLLANGRRKRAKMGALSSIGVGLAVVSSLLLLALTAELYYIFVHKRRQRRRAAAVSDAASSPSSSSRELLQLFCFKKPPPELASTYAVPEPASAVAVSVGDDDDDDGETVEAQLMRLGSVVGPTRLLFTIKEETREDLESEDGGRGRSRSRSRSLGELLHCAETPPFFTPRASPSPVPTASMDNSYNPLFESPAASPVPTHAPTVSPPPKFQFLRDAEDKLYRRALAQEEAMRARRS

SEQ ID NO: 68652 - protein, 413 aa, Zea mays
  Clone ID: UC-ZMFLMO17083F06_FLI.pep
ALRWSDRPRGAMASVAGSGGGASAGAGGLKTYFKTPEGRHKLQYEKTHSPAVVHYNHNGKTVAQMTVAYLKEKPAGQGSTPSTPSAGSGMRSAAARLLGTGNGSRTLSFGSNGTSRAVSGSSRMGGGIGVSTSASGSQGMANYDGKGSYIIFNTADTLFISDLNSHDKDPIKSIHFSSSNPLCHAFDPEAKDGHDLLIGVFSGDVYSMSLRHQLQDPGKKPVSYQHFVNKDKDKDKDPSQGGAASSQCTCVAWVPEREGIFVVSHADGNLYVYDKFKDGNTDWTFPTVKDQSQVLISHAKSSKGNPIARWHICQGAINGISFSPDGAYLATVGRDGYLRVFDFTKEQLIFGGKSYYGALLCCSWSADGKYLLSGGEDDLVQVWSMDDRKIVAWGEGHNSWVILSLQLFLAIIT

SEQ ID NO: 68653 - protein, 485 aa, Zea mays
  Clone ID: UC-ZMFLMO17136G06_FLI.pep
TAGPVFCFCFLAMANASKHLQPSSKSGNDRKYQGTLVASPAKDISPKCANHIVPSKQLILGGDSIGHLASILIKVVALEAVRRVSKARYPFIWNSVQALQILVYPPFSWIQRWAPLKFLVQGIQKLSMPLLFLSVTTTVSELSSKRDDEPDNNTEHSETPSETNELTSTSGTSDAADGTKEIVQENWLVLLFRELEKQGITLPERFTEDELRRFYIAANGDFSSLLSSVKKTIRWREMFHILTLQELDKWSHLVFWHGFDTMLRPCLVIRLGLACSSIPPCDRPHFGQAVVSQIDHGVVNLTNGEDSRITVLLDCHGISPFRFPMQMMRSFVTVAQENYPNRLGLLFVVRLPPVVRVIAQTFLQVLKPSTKQKLRFEGDSYKKTLAEFLQAVPAFLGGKCSCPRCEKPRNSSVVQAGEGSKNQPRLVSVDTGSPVVDFDFDEEEIPSPYSCENAIRAAIIGLLMVCIFIAFLAGMNDPASVPPSA

SEQ ID NO: 68654 - protein, 150 aa, Zea mays
  Clone ID: UC-ZMFLMO17134E11_FLI.pep
YCSSFRGYSPLRWRFLLSHYKEGNSTSSRSLPAIPLPLSTSSLEVSKAIVQSGRTTWRILRRTSFPSAEVSTTFIIVTAVLHFPPVIRSHSSTEGCASIHSVTSPTRSGSLDLKLLRYECTIGLLCTSCSFVPGKSVEELQRFWLDSVGI

SEQ ID NO: 68655 - protein, 367 aa, Zea mays
  Clone ID: UC-ZMFLMO17107D04_FLI.pep
PEPASTAPPQPTPMPQQPPFNAAAPQPILEQGKSVPSVSGGDWASFDSFGQQQTLQTSSSVNPLESALAQLSFSEAPSAPNVSAYPVSLDPTLKANDGGHSSVLDQSHSLFDAPFGISGNQASTVMSGQGSSVQQSPLAAPTAGPPSQATANPQGTSGIQGAASSTDSKFCSRKELPADIFTALYPPSTQMMPGWQRAPHFGMGYAMQYPPGVGLQSYLHGAFPQPTYQQPVYSQHAYSHPQPVKASNPFDLGNESAHIQAHMPPSGPPGASAGSAPQTLIGNSSFGVPPQQPHQLYQSEAHLSHFMMQQVPNSMPMPEQQPNSMLATQQGLGSFNMGFDQQASLGYPQANTPPSYGSVGGGSNPFG

SEQ ID NO: 68656 - protein, 274 aa, Zea mays
  Clone ID: UC-ZMFLMO17130G06_FLI.pep
LTESFLRLEALLRLPLLLSSLGAELLFAICFLFLLADSRPCYLRKGFFGAGSHVAKEVLHLVNHGFELVLLWKFDHIACRQSRPYVPFLHNFVAIPKLIFGLEHTVLIFRCVYDLILVFVNDGGEVPGERVLVDVLAEEVVLGGEHDLRRRTARDDVERVPEVDIGGADEDDESRVAVVLDFRQQRRAALLLHLPLRPAPAAPGLHDQRAPRRLAPRDPAEKEASAYVDGWQGSPDTRRRWRRPQRHAAHHLHGSGVPLCCLARRALAALHGRA

SEQ ID NO: 68657 - protein, 126 aa, Zea mays
  Clone ID: LIB3078-051-C6_FLI.pep
SDSSLNSSKRECAGSAANNLLKLSPAIPATPDELDELISYQTNQKDVNAENNLEIGSENNLEQICSLRPQESNNNLKRKANQELEPLELAVPSTGAAPQSTGTAPRKPLRLRLTTLGKPKPAEGTS

SEQ ID NO: 68658 - protein, 940 aa, Glycine max
  Clone ID: UC-GMFLMINSOY030F12_FLI.pep
IQQNHFFFSHSLHTMKHPKPQTQSTPTPSPSSRSSSLSSHLAMVELKQKILTSLSKLSDRDTHQIAVEDLEKTISGLSPDAIPMILNCLYDAATDPKPAVKRDALRLLAAVCAAHSDAAAAHLTKIIAHVVRRLKDADSAVRDACRDTVGALAAQYLKGDGGGGGGGGVGTVVGLFVKPLFEAMGEQNKGVQAGAAVCMAKMVECGGGGGGGEAVPVAAFQKLCPRICKLLNSPNFMAKAAILPVVASLSQVGAVAPQSLEHLLPSIHECLSSTDWATRKAAAEALSSLALHSSNLVTNRAEPTLAVLEACRFDKIKPVRDSINEALQLWKKIAGKGDGSPNDSKPSSDGGNESAISSEASDPKKVNLDERKTDSPVKDSSNISSNMDSTKAKAAGISEKAVVILKKKPPVLSDKELNPEFFQKLERRGSDDLPVEVVVPRRGLNSLNSNNEEESEANAKDSKERINSVGNIPNDDFHGSSSNKYRIFERGNDGNSKQRNYDDFGHDRFSERRVNSKELRTKAYDTDDRTENDQREGSANVSGFSKIDGQSEVPFSNNRGNWLAIQRQLLQLERQQVHLMNMLQDFMGGSHDSMVTLENRVRGLERIVEDMSRDLSISSGRRNFAGFEGSSNRPSSKYNGFNDYSSSKYGRGGDGRIPFGERFAQSDGNALGMRGRGPSWRSDMSEGWDHPGYGASRNGQMSSRRAFGGSSADGRSPKSVHESDQAGNRRAWDKAAMPIRLGEGPSARSVWQASKDEATLEAIRVAGEDNGTSRATRVAIPEMTAEAMADDNVGQEKDAIWTSWTNAMDALQVGDIDSAFAEVLSTGDDILLVKIMDRTGPVIDQLSSEVACEIVNAIGQFLLDQNMYDICLSWIQQLLEIVLENGPDTFGIPMEVKKELLLNLHEASTDPAEAWEGVQPDQLLLQLASAWEIDLQQHDK

SEQ ID NO: 68659 - protein, 1171 aa, Zea mays
  Clone ID: UC-ZMFLB73256H10_FLI.pep
AGERQSTRMRIRYLDAALRQDVSFFDTDVRASDVIYAINADAVVVQDAISEKLGNLIHYMATFVAGFVVGFTAAWQLALVTLAVVPLIAVIGGLSAAALAKLSSRSQDALSGASGIAEQALAQIRIVQAFVGEEREMRAYSAALAVAQRIGYRSGFAKGLGLGGTYFTVFCCYGLLLWYGGHLVRAQHTNGGLAIATMFSVMIGGLALGQSAPSMAAFAKARVAAAKIFRIIDHRPGISSRDGAEPESVTGRVEMRGVDFAYPSRPDVPILRGFSLSVPAGKTIALVGSSGSGKSTVVSLIERFYDPSAGQILLDGHDLRSLELRWLRRQIGLVSQEPALFATSIRENLLLGRDSQSATLAEMEEAARVANAHSFIIKLPDGYDTQVGERGLQLSGGQKQRIAIARAMLKNPAILLLDEATSALDSESEKLVQEALDRFMIGRTTLVIAHRLSTIRKADVVAVLQGGAVSEMGAHDELMAKGENGTYAKLIRMQEQAHEAALVNARRSSARPSSARNSVSSPIMTRNSSYGRSPYSRRLSDFSTSDFTLSIHDPHHHHRTMADKQPAFRAGASSFLRLARMNSPEWAYALAGSIGSMVCGSFSAIFAYILSAVLSVYYAPDPRYMKREIAKYCYLLIGMSSAALLFNTVQHVFWDTVGENLTKRVREKMFAAVLRNEIAWFDADENASARVAARLALDAQNVRSAIGDRISVIVQNSALMLVACTAGFVLQWRLALVLLAVFPLVVGATVLQKMFMKGFSGDLEAAHARATQIAGEAVANLRTVAAFNAERKITGLFEANLRGPLRRCFWKGQIAGSGYGVAQFLLYASYALGLWYAAWLVKHGVSDFSRTIRVFMVLMVSANGAAETLTLAPDFIKGGRAMRSVFETIDRKTEVEPDDVDAAPVPERPRGEVELKHVDFSYPSRPDIQVFRDLSLRARAGKTLALVGPSGCGKSSVLALVQRFYEPTSGRVLLDGKDVRKYNLRALRRVVAVVPQEPFLFAASIHENIAYGREGATEAEVVEAAAQANAHRFIAALPEGYRTQVGERGVQLSGGQRQRIAIARALVKQAAIVLLDEATSALDAESERCVQEALERAGSGRTTIVVAHRLATVRGAHTIAVIDDGKVAEQGSHSHLLKHHPDGCYARMLQLQRLTGAAAGPGPSTSCNGAA

SEQ ID NO: 68660 - protein, 170 aa, Zea mays
  Clone ID: UC-ZMFLMO17066B12_FLI.pep
TFYMLLLCSMEIFRPQKEHGLAQTGLKGKFKITTRCLWLDNGRLLDALYKAAHAALLSCPMNCPLSHMERMVAEILRKMVRKYSEKRPDVIAVAMENTTASFSEHLDAKSSGNFEPSSATSHLSRSPAMSLEGSYKTHPDNPEVDAEEALPEATRTALDDATTLLCIYHA

SEQ ID NO: 68661 - protein, 824 aa, Zea mays
  Clone ID: UC-ZMFLB73046D10_FLI.pep
DEGLTSGTVVEGTIQQLFEGHHMNYIECINVDFKSTRKESFYDLQLDVKGCQDVYASFDKYVEVERLEGDNKYHADKHGLQDAKKGVLFIDFPPVLQLQLKRFEYDFMRDTMVKINDRYEFPLQLDLDRDNGKYLSPDADRNVRNLYTLHSVLVHSGGVHGGHYYAFIRPTLSDQWFKFDDERVTKEDAKRALEEQYGGEEELPQTNPGLNNTPFKFTKYSNAYMLVYIRESDKDKIICNVDEKDIAEHLRIRLENDREEKERRKKEKAEAHLYTIIKVARDDDLKAQIGKDIYFDLVDHDKVPSFRIQKQMTFAQFKEEVAKEFGIPTQFQRFWLWAKRQNHTYRPNRPLCPQDEAHTVGQLKELVNKAHNAELKLFLEVELGLDLKPLPLPDKTREDIFLFFKLYEPEKEQLRYVGRLFVKASGRPQDILLKLRMLAGFSQDDDIELYEEIKFEPNVMCEYIDNRLLFRSCQLEDGDIICFQKPSKPDSADRYRFPDVPSFLTYIRNRQVVHFRSLEKPKDDEFCLEMSKIFTYDQVVEKVAEKLGVDDPSKIRLTSHNCYSQQPKPQPIKYRGVERLLDMLIHYNQTSDILYYEVLDIPLPELQALKTLKVTYHHATKDEVSVHSIRLPKNSTVGDVLNDIKTKVELSHTNAELRLLEVFYHKIYKVFAPNEKIENINDQYWTLRAEEVPEEEKNLGPFDRLIHVYHFTKDTQNQTQVQNFGEPFFMVIREDETLSSIKERIQKKLKVPDEDFSKWKFAYISLGRPDYFEDSDTVALKFQRNMYGAWEQYLGLEHPDTAPRKAHTANQNRHSFERPVKIYN

SEQ ID NO: 68662 - protein, 160 aa, Zea mays
  Clone ID: UC-ZMFLB73179F02_FLI.pep
RGQKGRNFLSQNPRQLIPLPPSHDLSSTANPDCRLRLGIRALAAMDGGGGAGGAEGELTAQETALYDRQIRVWGVDAQKRLSKAHVLVCGMNGTTIEFCKNIVLAGVGSLSLMDDNVVTEEDLNANFLIPPDESIYGGRSRAQVCCESLIDFNPMVRVFC

SEQ ID NO: 68663 - protein, 650 aa, Zea mays
  Clone ID: UC-ZMFLMO17171B09_FLI.pep
TRPRAYNALADGDGQSWRRRRLVGSSGLAPPLPCRKGRQPNHSVPLSRGIDPCAGLSGTDAAIDSDFGNPTTSFVLIRSWLSVSPDVYRAAADCPRRAVVVRRRVQAMEHVPVGLHELAEEEGVVGDGGDVDGVRRRVARVEVVGGAHDGGLARAVEHVGVVAHAGDAAVVGEVARHGVLERAVVGAGERDPAAVPGAERLDDVLHVHLDAIDAAGGEVRVQLVVEAQRPARVHQPQAQHGQRVHDDVRLVAHHTRRLHRVRQRALVVLHPLRRRLHAAPVPRHGVPHVHVPDAVLALRLLHQQLQARRLRLLLAAAAAALLRLRLLLELGVLLDPRQPTGELRPFLDDGVGGLLLVLAADLLPPVVDDQEPRRRAAVRQALEALLDALGGDVGVEGVPRAPAEPVHERRQLFLLPVMERLHVSLHHLDRLSDGVERVGPGVHVQHAGPLRSLHRLVPALEGDLQLVAVVALQRRPELALQQRQHRHVHRRVAVAVAVARAALQEHELRLQRDVAAGGAHALGHPPELEPEAAHEAQVPEGAEGEDVHAAGLRGRGADEGAVDQPRPGGVREHDVVRHAGEDAPPVRHQPPIPHRNHGRHRHPLCTWGKDVRPDSELYNAGRHWRNACTFAIYYQPAPSSCVLSHANCCV

SEQ ID NO: 68664 - protein, 486 aa, Zea mays
  Clone ID: UC-ZMFLMO17175C02_FLI.pep
SASSRPRFAGCLPAVHHNMGGGRKRRRRDGSEMPSMHPRNRYAAAAPDFAALAELYPSFRPFVFISGSGRASVDFTDFSSTRELTRVLLLHDHGVNWWIPDGQLCPTVPNRSNYIHWIEDLLSSDLIPPISSSSERVKGFDIGTGANCIYPLLGASLLGWTFVGSDVTNVALEWAKKNVESNPHLAELIEIRNANAAPSESETVVREAASEKILEPAEDVAMPKPHILVGVVKESESFDFCMCNPPFFESTEEAGLNPKTSCGGTAEEMVCAGGELAFITQIIEDSVSLKNSFRWFTSMIGRKANLKLLISKVREAGASVVKTTEFVQGHTARWGLAWSFIAPKPSKIVLGSSAPAKKHHSFMLQGLRREHGAFQILKSTEAFFLASNLSCKTDSSAFSVDVTLSDEQIEAAILHGVDYAGSLEDSSAKLQCVVKGISFRITVFEQIPGTLLIKGSLLNKALSGTFSSLFSRLEDALRAECLSKAR

SEQ ID NO: 68665 - protein, 589 aa, Zea mays
  Clone ID: UC-ZMFLMO17171G11_FLI.pep
CRAGRIEDARRLINGMPFPPDTFTFNPLIRALCVRGRIPDALAVFDDMLHRGCSPSVVTYSILLDATCKASGYRQAMALLDEMRAKGCEPDIVTYNVLINAMCNEGDVDEALNILSNLPSHGCKPDAVTYTPVLKSLCGSERWKEVEELLAEMTSNNCAPDEVTFNTIVTSLCQQGLVDRAIEVVDHMSEHGCVADIVTYSSILDGLCDVGRVDDAVELLSRLKSYGCKPDTIAYTTVLKGLCSTEQWERAEELMAEMLCSDCPPDEVTFNTVVASLCQKGLVDRAIRVVEQMSENGCSPDIVTYNCIIDGLCNESCIDDAMELLSDLQSCGCKPDIVTFNTLLKGLCGVDRWEDAEQLMANMMRSNCPPDEMTFNTVITSLCQKGLLTQAMETLKIMAENGCVPNSSTYNIVVDALLKAGKAQAALELLSGMTNGTPDLITYNTVISNLTKAGKMEEALDLLRVMVSNGLCPDTTTYRSLAYGVCREDGTDRAVRMLRRVQDTGLSPDTTFYNGVLLGFCRDRRTDLAIDCFAHMVSSGCMPDESTYVILLEALAYGGLLDEAKRLLASLCSLGVLDKKLIEEESHYS

SEQ ID NO: 68666 - protein, 312 aa, Zea mays; identical to SEQ ID NO: 57358
  Clone ID: UC-ZMFLMO17188D02_FLI.pep

SEQ ID NO: 68667 - protein, 917 aa, Zea mays
  Clone ID: UC-ZMFLMO17336G01_FLI.pep
EQLPIVLQVLLSQSHRFRALVLLGRFLDMGPWAVDLALSVGIFPYVLKLLQTSAMELRQILVFIWTKILSLDKSCQVDLVKDGGHTYFVRFLDSLDAYPEQRAMAAFVLAVIVDGHRTGQEACMNAGLIDVCLRHLQPENPHDSQTEPLLLQWLCLCLGKLWEDFPDVQLLTLQTNTPEIVLCLLSEPQPEVRAAAVFALGTLLDTTSSNGADDDSDYDEKVKAEINVVRSLLQISSDASPLVRSEVAIALTRFALGHNKHLKSVAAEYWKPQSNSLLKSLPSLANINNPNNVYSPNNILQGSIGPVLRVGSDSSAAGRDGRMSTSSPIATSSIMHGSPQSDDSSQLSDSGLLLRENASNGGPGYTRSRPVDNVIYSQFISTMCSFAKDPYPRIATIGRRALSLIGVEQVVMKNTRFNSGGAHRGETSASNFGMARSSSWLDMNSGNNLIKFRTPPVSPPQHDFLPGLRRVCSMEFGQHPISSPDGLAVPLLSSAAATSNAELSILPQSTIYNWSCGHFSRPLLIGSDDNEEANARREERERLALDYIAKCQRSCMWTYISLHYILLVGFLDYLSVIFWLFTLGIAACKMTNQIASWDTRFELGTKTALLLPFSPIVVAADENEQIRVWNYDDALPVNSYQNHNLSDRGLSKLLLINELDESLLLAASSDGNVRVWKNFTQKGGQKLVTAFSSVQGHRTAGRSIVIDWQQQSGYLYASGDMSSILLWDLDKEQQLSTIQSSGDSAISSLSASQVCSGHFAAGFAAGSVRIYDIRSPDRVVYTARPHAPRTEKVVGIGFQPGFDPYKIVSASQAGDIQFLDVRRSAEPYLTIEAHRGSLTALAVHRHAPVVASGSAKQMIKVFSLEGEQLTIIRYQPSFMGQRIGTVNCLSFHPYKSLLSAGAGDNALVSIYAEENYK

SEQ ID NO: 68668 - protein, 549 aa, Zea mays
  Clone ID: UC-ZMROB73019F11_FLI.pep
GSALIYDDSAQSFRWLFETFKSAMSGKQPKTVLTDQSAALSDAVSSWPGTIHRFSLLHLYLNATKISRDTLQGLETFASDFSRWLYEYEEDNFYSSWEILSEKYNIKDNEWFCKLYEDRERWALPYGRDTFCADIATTLRRDNTNTILTDLIKPEIDLQNFFNNYDKFLEEKRLAEQQADYLGAQITQRVAPLHLLWQAANLYTPTLFEMFRMEYEQISKCVVYSCGEIGPISEYQVTVKDRPQGQFVRFDSTECMVVCSCKKFEFMGLLCCHVLKILDLRNIKELPRHYILKRWRKDAQSESPENYGFAAIDEDPKFSLSKRYNALYRNLYKIAAKASESVEAYAFLENQYEQLVEQVEVLLQAKLHDKSSLSTVLKGNQPNMLNSEVNSSEHRRATGKKIKNVEVRRQQQSLDPNKKKKGRQVLLEPEIEIPLRVEPPTVSNDIQNHLRTTNQFLAPSHMMQAPYVAQQFGLGSLQGFPGMSPFGQIQEPTPLQQPHLQPPSFHSGPQITQAPPPDIQSLQFLSSNPQLGHQTTDQGQYTIPVWDFL

SEQ ID NO: 68669 - protein, 196 aa, Zea mays
  Clone ID: UC-ZMFLMO17229E07_FLI.pep
ESPPSRTPTMTNQNMPPETPIIWLNFSPALRRFDRPLLRQLGKSQAILQWDYHQTADEPNCLTVGLDLIGEYLENFHQPVHLIGHSTSGLLALLYARQCPEKVRSLSLLSVGVYPALDWQAHYYSQFDAMRYSRHLLLGQMAHHLFNCRSLRQTQTIVNILENDRQLGASADVNCPLCSTDKLWGKGDVEPFLGMV

SEQ ID NO: 68670 - protein, 675 aa, Zea mays
  Clone ID: UC-ZMFLB73047F11_FLI.pep
QTKMATYEPKNILITGAAGFIASHVANRLVRNYPQYKIVVLDKIDYCSNLKNLNPSRSSPNFKFVKGDIASADLVNYLLITESIDTIMHFAAQTHVDNSFGNSFEFTKNNIYGTHVLLEACKVTGQIRRFIHVSTDEVYGETDEDAVVGNHEASQLLPTNPYSATKAGAEMLVMAYGRSYGLPVITTRGNNVYGPNQFPEKLIPKFILLAMQGLPLPIHGDGSNVRSYLYCEDVAEAFEVVLHKGEVGHVYNIGTVKERRVIDVAKDICKLFGLDTEKVIRFVENRPFNDQRYFLDDQKLKRLGWAERTPWEEGLKKTMEWYTTNPDYWGDVTGALLPHPRMLMTPGVERHNWAEEIKSLASSPAEASTIAPATSTKSISDAPQKPSYRFLIYGRTGWIGGLLGKICEKQGIPYEYGKGRLEERSQLLEDIRNVKPTHVFNAAGVTGRPNVDWCETHKQDTIRTNVVGTLNLADVCRKQGLLMINYATGCIFEYDAKHPEGSGIGFKEEDTPNFIGSFYSKTKAMVEELLKEYDNVCTLRVRMPISSDLSNPRNFITKIARYDKVVNIPNSMTILDELLPISIEMAKRDCRGIWNFTNPGAVSHNEILEMYKKYINPDFKWTNFTLEEQAKVIVAPRSNNEMDTSKLKAEFPQLLSIKDSLIKYVFEPNRKVPVN

SEQ ID NO: 68671 - protein, 122 aa, Zea mays
  Clone ID: UC-ZMFLB73016H09_FLI.pep
GLIMKTMSNDNKGLYSTSFKVPDVYGVFQFKVEYQRLGYTGLSFTKQIPVRPYRHNEYERFITSAYPYYTASFSTVRSASICYSVDVMKMFLHLLQLHLHMSFIIKFTCVECVIGSLVFLTA

SEQ ID NO: 68672 - protein, 192 aa, Zea mays
  Clone ID: UC-ZMFLMO17125D10_FLI.pep
FGLIFTLGGTGACYARRLAGAPRAGGDGQQGLLGLCAGALLPVARGELVGREERPWGWGGGEAGAKRVGPARQGAGHAVRCGPRRQQATGRAQGQGAGVNWLLPSRPRRARRSRNAGARHRRLSTRCAGACSCAAGEGIHGHEGWGGTREGLRREERNCSAGAEKAARRGRRPTSSDGWLTEGNERSRRWRR

SEQ ID NO: 68673 - protein, 386 aa, Zea mays
  Clone ID: UC-ZMFLB73180F04_FLI.pep
RRLWGEYRLLLLVPAPIPMVASSQLCERRRLELLVVPEDALAVLGLDVDALPGLAPGRLGNRGRVEVVVVPEDGPDRLGGLHGVVVRHGGEEVVRDVRVRDVVEHAVEDAVVAVHGGQRAAQPVPLARVVVGERRVGVLQVGDEHQPRVHDQQRHGVHAHHPPDPERRRQLVQPERHGHDAGVRDEDLGALPVVVDGAVGVEVAGEARVRPPRRVGRQVQRPPEGELHHDVHHPADRVVVHVRGVPRQRLLLLGHEHLVALQGPRVGVVAPVAVLPREVGHHERRVQHQADHVVQERVVREGVVAALVRDDPHAGAHAPLRDPVQRPGGVAERAWERRYDGQREVEERRGDHQVVDHVREGLEHRALEAVWRDGLLDLTQSERRLL

SEQ ID NO: 68674 - protein, 335 aa, Zea mays
  Clone ID: UC-ZMFLMO17277H01_FLI.pep
AVHAVPHSVDIWVNYCEFGICAFEEPAHVRSLFERALSLVGKDYLCYHLWDKYIEFESSQKQLIHLATIFINTLKFPTKKLHMYYESFRKFVTLLEQEVTSCVAEILSEKVHASEMVGTEGSELDISTIIADLFDQKGGHLSPEALKHYLSAGEKLYKMSSKIYKEICYFEASIKRPFFNVKTLDDDQLENWHQYLDFVEKNGDFDWAVKLYERCLIPCANYSEFWIRYSEYVDAKGGREIANHALGRASSCFAKVSLGNIFDILHLPIVLKLCKDPMSLCVMCMVGCGSKDEGYNTCSHLTAGMGNRAPPCGSRLEAWLRRERPDNFFIYTKIS

SEQ ID NO: 68675 - protein, 166 aa, Zea mays
  Clone ID: UC-ZMFLB73276G01_FLI.pep
QHSALLDLDNDTASFGVFDGHGGKVVAKFCAKYLHIEVLHTEAYAAGDLGAAVHRAYLRMDEMMRGQRGWQELQALGDKINQFTGITEGLIWSPKASDSNDRHDDWAFEEVLVELAWFHNSILIFLCLGEHAICLLFINLAVIGFHSESVTGLSLIRFLSSHLFFR

SEQ ID NO: 68676 - protein, 746 aa, Zea mays
  Clone ID: LIB3592-095-D6_FLI.pep
NLAQIIPAPAMATSFGFGSSATAGSTASSPFSSTPSAFSFSQPASASSPAPAFGSSLFSSSSAAASSAPTFGSSLFRASSAAAAPASSPAFGFGSTFSFGQSMAAASSAASAPSLFGATPASSAGTTLSLFGAATSAASSPGFFGATSTAASSPGLFGASATGSAATSPSLFGGTSGLFGGTSSAATTPSPFGATSSTAATVSPFGAASSAASTPSLFSGGATGFSFGSSASGSTTTTAAAPAPSFGFSFNSGPAASSTASTPTSAPALGFGGATGSSLFGSTTSAPLFSTTTASSPASAATTTPSFGFSSSPATTASAPSFGFTPSSGSATTANTAPSLFSSSATTLTTPASSSSTGFSLATSQAAPAPSLFSTSAIGSSSVTTPGFSFGSSSAASTPTLASVFATGSSTVPSAAAASAASGSSFPAVSTSGFSFAVAPSSSAAAATATTTTVTSASTSAGMTTTAPLTGTTGFPNFNLQTTTPASTSSPTLAFGVSTTAASSSATSTTTQATSSAVQVSSTGPTTTTSITPAASQAPKLPSEIVGKNVEEIIRDWNNELQDRTAKFRKHATAIAEWDKRILQNRNVLIRLEAEVAKVVETQTGLERQLELIETHQREVDKALQSMEEEAERVFQDERVLLHEDGAASARDTMYEQAEVVEHELQHMTEQVKSIIQTMNATQGGELESADSMTPFDVAVRILDNQLRSLMWIDEKVNEFSGRIQRLPNNSVSAERDSGIPRFWLS

SEQ ID NO: 68677 - protein, 94 aa, Zea mays
  Clone ID: LIB84-004-D8_FLI.pep
LQCMSEDSHGRGHLPPGLLGSNVQPDAPGIEDVRDTELPRCGCDFSLRTRNAAMVVACAARARQIMRTRGRTWFLWNIVVSCELQYRVRCEARI

SEQ ID NO: 68678 - protein, 485 aa, Zea mays
  Clone ID: LIB3600-018-H5_FLI.pep
EDLGHESLVLDNKEGTIMEDTEYITMEAPPRGSDVFGSAVPVLRGEDDMVQRAVEAPLTAKESVQELSVSDSEDRTQDDKCKDAESSKEILSLSVDITESSDFPVPGNEGIVVQRGNGETISVRKSGQDSHSTEIGDEMEGHKTEEEIPLHDANVSESSVLDDTVLEERKIEGDVTVGMAVKEVTIYTDPCTGEVAGDQVDSIAIALPAESELMQASNVDDVINAALTEGIVLDIGDTSTEGTEHYGEGGVSTAVSVVTVDDVAETVSSRSPAVSVIGDDMTSVKSRPDADSSDQTTGYDALRSKEFREKECVKTEESKTVPTESTSPPRIIQVSRSPAPDGQSRVEDEAAVGSVLEGAANNTDDLATPRAVVVALQSSISAGESEPPSASDRVEYKPANEGFRRNAIAEDTDNYTEEQMREQLDALRTITGYRPTPSLTLEAELVGLYVFVGVEPPVGSGSREDSDLSDLSAKLRLLKSIIGVE

SEQ ID NO: 68679 - protein, 135 aa, Zea mays
  Clone ID: 700240543_FLI.pep
ITFHNKLNTTVFLFLPTQICYKDGAGSSHVKGSEIYGLVPTVAAASRVYFTQSLFSHRHPKSVETHGMMTHDSPQEMAPSGWPNSLAMKSRPNTGEVSACRRRAVAVVGATISWRSSSTNTPAATFLLPLSMLAS

SEQ ID NO: 68680 - protein, 74 aa, Zea mays
  Clone ID: 700431258_FLI.pep
CSPEWFDLLDLDCFGVEYGELPSLNPWRDEESPWALGRPIASESREYPPLSTASASSGISSKVCMVQKKREVKS

SEQ ID NO: 68681 - protein, 86 aa, Zea mays
  Clone ID: 700473457_FLI.pep
SVCLIKNSGNGNGRQLQRTRTGAVTKRTTRGVLEDKLSEIKNGTVLVNSPTSADTHQVGRSDPSYWPSGADSLGAAAASLISSPAS

SEQ ID NO: 68682 - protein, 269 aa, Zea mays
  Clone ID: UC-ZMFLMO17012B12_FLI.pep
TIVSLEIGRLSPVRHFLRSTSLRRRRRRRPAAMRVAPRVLFLVRDAAGYGAALADALRPPPGLTRESSPFELPLGKYGLDGEKACAELLSFSDSSGSPQVTIFVLPDYKPPLAACVVNEVLELISSEATSTERTLIVPYITRSSSYHHGTEHATKASTVLHGAEIGATTDYTHLLVGGTTKPPTSLQIRSEPILCLLEMVRVLKMPTVLVTSGGQQQGKSSTVSDLEVLQSLGEHLAKHTALEFSKGTVLKRGIEKSPIDQEPWRELYG

SEQ ID NO: 68683 - protein, 94 aa, Zea mays
  Clone ID: 700473586_FLI.pep
CPSAAQTPLLYTCSLSCQPVVPVHFFPRSCSSSLFLRPFSARTTFGFSLCCRSFPCNDVDLVSFSSRSSSFSDSFSSLTNLLELQIRAPSPCAN

SEQ ID NO: 68684 - protein, 187 aa, Zea mays
  Clone ID: LIB3067-053-B11_FLI.pep
PPPLDFTHALLHRRPSQTSHYRNQPNRQPEIATASSPILLVVAAVAAEERGSVVEQREDEEEQERDADRGPSHAVDGVGGPAEGEGVGERRGAAVGREEADEEQQAHGEEEEPHRAQQLRHGFRQRLAAAAQEQRARHHEAHHHRQQQAVGRAALARPAVVVLVPSASHCRRLLSLTLSVAAVVVTG

SEQ ID NO: 68685 - protein, 409 aa, Zea mays
  Clone ID: UC-ZMFLB73012D09_FLI.pep
PDRVPVLVHVCRARNWSSSSACLIPVPAVQPLFLFSSSSSSFCLILLLLSDPSVTVCPVLIQVVALRVSIHCQGCKKKVKKVLQNISGVYRCEIDARSNKVVATVSTELDPYMLVAKLRKSGKQAELWPEQPVQQQEQPAPVPPAESQRQEEPKNNQPAEPGRPSEPAEERGAAADTAEAAAAEPSNPLPSPPEPKPSAGGGEAPNPAAQDSKENASADDVGGGDDTAAAPAPAQQGPSEAKGKAKSKQHTAEMEERQPVDARVTVEYDHRGVGGGYVSRMPPPAVMSYNQVRPSVSASYYAPAPAPAPAPMPMGRPGPSQGYIDEHYTPSYSSSSNNYYSSNRSPAYEPYYYSAPQPAPYSYQYQYQPASSSEDYYYSAPPQRSAFSPPREGYGDMFNDENANSCTVM

SEQ ID NO: 68686 - protein, 297 aa, Zea mays; identical to SEQ ID NO: 46699
  Clone ID: UC-ZMROB73028B01_FLI.pep

SEQ ID NO: 68687 - protein, 438 aa, Zea mays
  Clone ID: UC-ZMROB73030A09_FLI.pep
RLSLDMAAATAAGAAATAAAVSLIACYILLHKSRAKLSWFPTVGFSRASGRRVRRRGLVEAIGNTPLIRINSLSDATGCEILGKAEFLNPGGSVKDRVAVKIIEEALESGDLVYGGTVTEGSAGSTAISLATVAPAYGCRCHVVIPDDAAIEKSQIIEALGATVERVRPVSITHRDHFVNIARRRALEANKLAAAQRESSEKQTNGLTHVDSEMLDDKLAVMQRESNKMQNGGPAHVNTEFSHCGKCDVNSDSKGGFFADQFENLANYRAHYECTGPEIWKQTKGNLHAFVAAAGTGGTIAGVSRYLKVTRGVMYTKEEAEGKRLKNPFDTITEGIGINRVTKNFMMAELDGAYRGSDREAVEMSRFLLKNDGLFVGSSSAMNCVGAVRVAQDLGPGHTIVTILCDSGMRHLSKFFNEQYLADHGLTPTATGLEFLDK

SEQ ID NO: 68688 - protein, 369 aa, Zea mays
  Clone ID: UC-ZMFLB73105D03_FLI.pep
EDQFVSANSHLMDAYSRPKFYNAGAMEWLCFRLDVLSSLTFAFSLIFLINLPPGFIDPGIAGLAVTYGLNLNMLQAWVVWSMCNLENKIISVERILQYISIPAEPPLSIPEDRLALAQNWPSEGEIQLLDLHVKYAPQLPFVLKGLTVTFPGGLKTGIVGRTGSGKSTLIQALFRIVDPTIGQILIDGVDICTIGLHDLRSRLSIIPQEPTMFEGTVRSNLDPLGEYTDSQIWEALDCCQLGEEVRRKEHKLDSPVIENGENWSVGQRQLVCLGRVILKRSKILVLDEATASVDTATDNLIQKTLRQQFSEATVITIAHRITSVLDSDMVLLLDNGVAVERDAPARLLEDKSSLFSKLVAEYTMRSTHT

SEQ ID NO: 68689 - protein, 141 aa, Zea mays
  Clone ID: UC-ZMFLB73093E10_FLI.pep
ASGTDGNLSDMMMETPASLAPLQHEARSDYQPSAVTSIMNLNLTSSPESSLESPDLHPFRISMSGADELRSFMSLAASESTAQKTIALSRSTSGGYEASGGDDSDQIPSRIVHRSSNWTNVILNSGRQATMSDLNLPRLHL

SEQ ID NO: 68690 - protein, 385 aa, Zea mays; identical to SEQ ID NO: 68279
  Clone ID: UC-ZMFLB73091H02_FLI.pep

SEQ ID NO: 68691 - protein, 335 aa, Zea mays
  Clone ID: UC-ZMFLB73117C08_FLI.pep
TSQSSKPQSGSPFPVMTPGVGASSSGPGTLSFGLGASSTGSGTASFGVGASSSAPGTLSTFGAAAHSSGPGVFSFGAGTSSSGPSTASFGAATSTSGTGFGNSPFGTGATFANPFSSSSSTGFTFSSPSSSAGASTAASTSVFASTSTASSASAFSNPFGSSSSPPSTFTFGQSGSSGNTFAFGAQPAPTFPSQPSLFSFSSANTSMNSSPQPAFGMINTNTAFSMASPGNDQMNEDSMADDTSQAAPAPAPVFGSSFGQQNNSSAAPVFGAPAVQPGGVFQFGGQQGSAQQNPSFPAVGSLEFQGGNFSLGSGGGGGDKSNRRVIKVKRTPKKR

SEQ ID NO: 68692 - protein, 199 aa, Zea mays
  Clone ID: UC-ZMFLB73117A12_FLI.pep
RKQREEPRKNISILTSTHPHTRHTYLILRRFLASGNLLPQVASMGGFSLSGATGLAAYREEDDEELFETSSSISGDSDDEGHQLSDGEGGAYDLSSVMAQLPVKKGLSRYYDGKSQSFACMSEVRCLEDLRKKETPYKKIKTSRSSVALDEEQDCHTPGRTNSSRAPGSCCANLVARNNGKNMLYRPPPVPVNKSGYRQ

SEQ ID NO: 68693 - protein, 85 aa, Zea mays
  Clone ID: UC-ZMFLB73092F04_FLI.pep
LLDDITKSFAPTSCQREHFGFRTRQTSSVCKNFGHTPLFSSPLVRLVCTCYCSSEFRQSDTDIRADHKNVLAAMELRLFSIFFGH

SEQ ID NO: 68694 - protein, 265 aa, Glycine max
  Clone ID: 700787516_FLI.pep
LRISGFKGSTQNDDSGIRANRLKAPNTSVRLGESGEAHNVPLSYASETNDSIATSSAIHRLFNKWLTMLRTQPSSQEVEKFFEEPTSAGILPKTQQGTQIKESRAVLKVAWSHFLALDATIKIPLLVFVPLYLAVNVKYGAEVSKELTPLWILGPFIVATQVLAIRWLCALYVFSFKQTVKLLKNSPSYCILAHSYVFRGKLKEDISTYVLQPILSVKNRDYKQLTRKKLKELQEWIVEMYLDYVESIWPYYCRTIRFLKRANLI

SEQ ID NO: 68695 - protein, 338 aa, Zea mays
  Clone ID: UC-ZMFLMO17065G09_FLI.pep
KTEEPMHPSNVKMATTTRHTPGNMLCDSFSGDYQLRSGGDASGSVQQAPKYRRLCKYGDKIKRVSSISLDGCDDRFEECNIANKDRPNQIKHAMGTKRKTKRRLDAYIDEEVGVSEDAYVSEDEDDNQSEDKYEDSFIDDQATPTEFTQTEQGDRHNGDMMGFYRQSLFTQSPVVLPSRYLDVSYNSASRTGNSSYSSEARHNYTETPKEIQTQHHTINPSPSYSFVQDRCERGIANCESSTKLDCRKRRLSFQQPLAIPVINLEPEPAPEPSPHVASRVADHLYFDDGFFENLDLDAIEAQATEQWRQKTTQSTQKPVEIKNASDMSFAPPSFDLGL

SEQ ID NO: 68696 - protein, 419 aa, Zea mays; identical to SEQ ID NO: 48395
  Clone ID: UC-ZMFLMO17014D03_FLI.pep

SEQ ID NO: 68697 - protein, 349 aa, Zea mays
  Clone ID: UC-ZMFLMO17248D12_FLI.pep
IGRRRLWGEYRLLLLVPAPIPMVASSQLCERRRLELLVVPEDALAVLGLDVDALPGLAPGRLGNRGRVEVVVVAEDGPDRLGGLHGVVVRHGGEEVVRDVRVRDVVEHAVEDAVVAVHGGQRAAQPVPLARVVVGERRVGVLQVGDEHQPRVHDQQRHGVHAHHPPDPERRRQLVQPERHGHDAGVRDEDLGALPVVVDGAVGVEVAGEARVRPPRRVGRQVQRPPEGELHHDVHQPADRVVVHVRGVPRQRLLLLGHEHLVALQGPRVGVVAPVAVLPREVGHHERRVQHQADHVVQERVVREGVVAALVRDDPHAGAHAPLRDPVQRPGRVAERAWERRYDGQREVE

SEQ ID NO: 68698 - protein, 515 aa, Zea mays
  Clone ID: UC-ZMFLMO17235C12_FLI.pep
HAVRRAHISFRLLRPVPTLHRRQEAPALARGEMSGGSVSAVFYADKYHPIQAGSIDGTDVAPHDNAVLRALICSQAGLYDPFGDPKASGDPHRTVFVGRLSRQTDDDTLRKAMSRYGRVKSMRLVRDIVTGASRGYAFVEYETDREMHRAYEDAHHSVIEGSEVIVDYYRQQLMPGWIPRRLGGGLGGMKESGQLRFGGRERPFRAPLRPIPYDELKKLGIPPPPEGRYMTRYQVPPPPRRKSSNIDIEDSPPGRRSKDRAGVSTYRRQRSSNDDDETLLKRKSSRDGLEESQSRRSARSSITKEDNRYSSQRKSKEHDKGHRKHRRSQDPGEVSPPAEEDGSYERQRTLEEPDRSPDRYHHHWHHRDDTYESRHLRHRDHRKRRRSQEPGEVSPPEEDCSHERERTSDEPGRSPDRYHHHWHQRDGTYESRHSRHRDHRKRRRSQEPGVSPLEEDSSYERERTSDELGRSPDWYHHHRHHREDTYESRHSHHRDRRRHGDRHRTKRSESRDYRD

SEQ ID NO: 68699 - protein, 127 aa, Zea mays
  Clone ID: UC-ZMFLMO17027C06_FLI.pep
THPATWARHPTSLRTSVSADIPQEHSANSNTSASSRLPKICKAAGWKEPSFDFEEQGPPHNRVFTCKVTVHLDELVNTIMECFSDPKPKKKAARENAAQGALWCLERSGYVKSSSDVPDLCGHQPFC

SEQ ID NO: 68700 - protein, 108 aa, Zea mays
  Clone ID: UC-ZMFLMO17245A03_FLI.pep
RLVATALSCIQLFPLFMVLCNTLLPQAAQASSYERYPTSRIPNHQLCTCTSSKSSVITAQQQKVHCPLSTPCSESPCHHPDVGLPKRLHTETKVHTNITTKACRPRTR

SEQ ID NO: 68701 - protein, 151 aa, Zea mays
  Clone ID: UC-ZMFLB73010F05_FLI.pep
AGSYDKQNPIECLERHLKMVALDGYDGMGPHVKFAQFFVRNAQLLELMKFRIFRNYHCEPGKTKAWIEDQQRQLQVRSMTSRPVKFKFVHDSRYNQDVYCGEDISDLSEHIHDDPFDQWFESEKEAPRHAEGKEDAIVWNSSQRLDSFDQS

SEQ ID NO: 68702 - protein, 299 aa, Zea mays
  Clone ID: UC-ZMFLMO17044A08_FLI.pep
KVKWTSVEKPRAGERTLKWEAEIKSPDDDGFDRKWKWEAKGGSSAASARKLKWGAAVKGKGCLEPWSQAYTWEEDFTASDSDKEEEERAADKNKAKKITMNKNEKKEVKAVKKEKKCPFATVKIEEISEDNDAGCVAIKKAFAKGNGKGKRKELSPQDAALLIQMTYRAHLAHRSQVLRCLRDLAVAKAKLKELRSLFYNISYRHRIAHDHEERQRFSEKIIVLLITVDALEGPDYMVRTAKKSMLEELEAMLEVVDPQPPGKQRSLSRRKFDLPEGGAIPDEKTAAVNKAIRIIEEGK

SEQ ID NO: 68703 - protein, 302 aa, Zea mays
  Clone ID: UC-ZMFLB73010A05_FLI.pep
ALAHHARFLVFDHMENRSLKECLHDPLRTPLDWRTRLQVAIDVAAALEYLYYHCDPPVFHVSVNSGTVLMDANFVAKLSDVGVVSHDVRLATTDSFQGLSIRSPTLPTPHDVAALTYLLAALFARLCLCCACRPGRAEAGGPGVPVRRAGAGAGDGAVPGRRRRARALGAGPRLRRLRAPDGGRRPRRRLRRPRAPRPRRRRQALHQGQGRQGRGRWRRHHSADRQVPPGEAGADRMPGQVRMMMMTVMVRLRCVRGRSAYHHRLCSSLTACLYHQMYKSAWLFFCGCPESVGVDQSIEEPK

SEQ ID NO: 68704 - protein, 446 aa, Zea mays
  Clone ID: UC-ZMFLMO17044D02_FLI.pep
SSPLLSSPLAGASPDCQSASAMAAEEEQGFRPLDEASLLAYIKATPALASRLGGGGSLDSIEIKEVGDGNLNFVYIVQSEAGAIVVKQALPYVRCVGDSWPMTRERAYFEASTLREHGRLCPEHTPEVYHFDRTLSLMGMRYIEPPHIILRKGLVAGVEYPLLADHMSDYMAKTLFFTSLLYNNTTDHKNGVAKYSANVEMCRLTEQVVFSDPYRVSKFNRWTSPYLDKDAEAVREDDELKLEVAGLKSMFIERAQALIHGDLHTGSIMVTEGSTQVIDPEFGFYGPMGFDIGAFLGNLILAYYAQNGHADQANDRKAYKKWILKTIEESWNLFQKKFVELWNKHKESNGEAYLPDIYNKPKLLSVVQKKYMTNLFHDSLGFGSAKMIRRIVGIAHVEDLESIKDASKRAECERAALNCAKTILKGRHQFETIEQVVEHIQSFDQD

SEQ ID NO: 68705 - protein, 288 aa, Zea mays
  Clone ID: UC-ZMFLB73013A04_FLI.pep
ELVLVARLQHKNLVRLIGVCLEEDEKLLVYEYMPNRSLDTILFDSQKSKELDWWKRLEIVSGVARGLQYLHEESQLKIVHRDLKPSNVLLDSAYTPKISDFGLAKLFHMDQSQGATSHIAGTYGYMAPEYAMHGQYSVKSDVFSFGVLILEMVTGRKNSNSDQSVDLLSLVWEHWSSGTIQELLDPFLMSHRAPPDQMAKLVNIGLLCVQDSPADRPLMSSVNVMLSSDTISLQAPSRPTFCIQETEDHSRPYSDAYKRALKLQSSTDRAAMSRTRLRSRSLNQDKHA

SEQ ID NO: 68706 - protein, 211 aa, Zea mays
  Clone ID: UC-ZMFLMO17030E02_FLI.pep
CLMPSEPIWSLESYSHTASYKAQLVDPLWPNIFHIWPSVTLPVQTFRAFAALLRCFLLVDRLSGAHKVLLECARREPCGVAFRDELRQRVQQHAVRWRLTEDDPGDAHGLPVDEAAVEDAGVAAVAEDLQGVPHVDDDGARLVARRHPAGAVEHLQNRHAVVEDEGQGADVRVGLHADGQLRLRAPWVVVDLELQEEVVVSYCPGGGGGER

SEQ ID NO: 68707 - protein, 131 aa, Zea mays
  Clone ID: UC-ZMFLMO17039H07_FLI.pep
LFGVAFNSVVNTKKGNTRTKPLPLSKRLRLEAQRVLKERVQDIADKKGIKLRFCNLRECESHIWSLDSPCEKTRAEIGWPQGVPFVHPHDLPNKAKLGFLEAYEPGWTASQQEMEEAASVIFDVLPALDMF

SEQ ID NO: 68708 - protein, 110 aa, Zea mays
  Clone ID: UC-ZMFLB73238B01_FLI.pep
THKRDETTTCYNAAKEAKFGLGQTHMSKRIQFILCLLFCWRLPPSTSNEPDALLLPLLLRDPEEPALLGSPALSEIPPSPCITATVLELDAWSAEGAPAMRAPSTAGSLF

SEQ ID NO: 68709 - protein, 417 aa, Zea mays
  Clone ID: UC-ZMFLB73150G04_FLI.pep
STLESFPTMASQGSSVFAALEQAPEDPILGVTVGYNKDPSPVKVNLGVGAYRTEEGKPLVLNVVRRAEQMLINNPSRVKEYLPITGLAEFNKLSAKLIFGADSPAIQENRVATVQCLSGTGSLRVGGEFLARHYHERTIYIPQPTWGNHPKVFTLSGLNVRSYRYYDPATCSLHFEGLLEDLGSAPSGSIVLLHACAHNPTGVDPTIEQWEQIRQLMRSKSLLPFFDSAYQGFASGSLDKDAQSVRMFVADGGELLMAQSYAKNMGLYGERVGALSIVCKSADVAVRVESQLKLVIRPMYSNPPLHGASIVATILRDSEMFNEWTLELKAMADRIINMRQQLFNALKSRGTPGDWSHIIKQIGMFTFTGLNSEQVAFMRQEYHIYMTSDGRISMAGLSMRTVPHLADAIHAAVTQLK

SEQ ID NO: 68710 - protein, 156 aa, Zea mays
  Clone ID: UC-ZMFLB73164C03_FLI.pep
WHQVFLLEILGEGLQEGEQHVPGALPRVAHRRAKLSIVPGQEILPATVTAPQSALMREPHHLDEHLALTKWVSATRRPARSGWAALLACRPLPLCRCRRVAWPSDSCVETRSSGGGGGSLCEWLWSASAPPWRWWSSGGGTTQGNGRREPFFHLGK

SEQ ID NO: 68711 - protein, 316 aa, Zea mays
  Clone ID: UC-ZMFLMO17281C07_FLI.pep
PIPTAMALSIYTPTSSSLVPPSIQEVRLTSRPPKPATFSLRRPHLAARAAAGNAPTSPVREVVTELDAVAGFSEIVPDTVVFDDFERFAPTAATVSSSLLLGITGLPDTKFKSAIDTALADGECNALEKAEDRMSCYLTKALANVGAELAHQVPGRVSTEIDARLAYDTQGIIHRVHELLNLYNQHDVSTDRLLFKIPATWQGIEASRLLESEGIQTHLTFVYSFAQAAAAAQAGASVVQMFVGRLRDWARHHSGDPEIDEALKNGEDAGLSLAKKVYAYIHRNGYKTKLMAAAIRNKQDVFSLLGIDYIIAPIPM

SEQ ID NO: 68712 - protein, 396 aa, Zea mays
  Clone ID: UC-ZMFLB73188G11_FLI.pep
AEAAGGGPLLPEELIIWEILTRLPAKPLLRCRAVCLSWCRRLTSDAKFLLAHHRRQPSLPLLTEGDRSTEERRIDALDYRTGERRPIARTTGRTAANGDDLNVLASCEGLLILLANGGLQICNPATRQRAPLTLLHGAYCISALYPHIPSRSYRVLCCFERAEDGHAVYHVHTVGSRELRCVGEPPAPWASGDMVMAMPMMVYLHPHVVADSRIYWQPVKLPVGNGKVNNMLVFDTMTESFQQLLSPVEGPFLELFQMNSGALGLYHCRSGKVDLWVLQDHGSWSWSMNHRIKLDVMFFSLLPVLDPEGDVLVLSKRGETGILWQHLHHISGVNGSLLALYQWSAYLKLSRHRLKESLVHHDFFSMEGNEGGVDEKPLFDGLSTVALLRDDNSEPH

SEQ ID NO: 68713 - protein, 200 aa, Zea mays
  Clone ID: UC-ZMFLB73193E09_FLI.pep
WSGQQLTGVAGSPAYLAPEVLLGNYSQKVDVWAAGVLLHVLLMGTLPFQGKSVEAIFDAIKTAELDFHSSQWASVSLLARDLIGRMLNREVSSRPDAEDVLRHPWVLFYTDCPQKAEFSNLWGTNKTAAPMIHQEIVRFGYCESSSSKSSSDNSEERDECGIVDALATAITQVRISEPKRSRLFSLPNGLLPPSRNSLRT

SEQ ID NO: 68714 - protein, 165 aa, Zea mays
  Clone ID: UC-ZMFLB73189D11_FLI.pep
YLYYPGTQPTLIWPTRLKLELIWHTLAHEHACSDNAYNWTRLFFSCVFSISSFTHRTANKLVQATNLLQLLWSQEEPIRDAAELVHVVYLVRGSHSAEVGHVGDGADRKAAVDQAVVDEHVGHAEQRNPQARAEAEAGHDAAVEEAVGEEEDGDRCITLPKFFLS

SEQ ID NO: 68715 - protein, 81 aa, Zea mays
  Clone ID: UC-ZMFLMO17271E11_FLI.pep
LVFPLVGNTLCQTGGLNKQQAILAGGKSTIIGPREYVICSIIRHDSTAEHLIMQLECLLQLTITDACIYQHVISNNIWRHI

SEQ ID NO: 68716 - protein, 442 aa, Zea mays
  Clone ID: UC-ZMFLB73190H01_FLI.pep
KLLSLQKDISSKEQSLLSELENIFQEHMEQEERINRAHFMLNKIEKEKTLEVENLEREVVSLAAQVSSTHEERESATLNAIQEVSVLRADNAKLEANLQDVSEQLRCYESQLEDLRKESKSKIKGLVDSLNASKQSEEMLTSDAEHMKKLMEAAKSNEDALRKTSNELELKLKSSDYVKQQMLEEISGLKLQVQKIMNLQDEVSKLQSSLDEAKFEKGKLEEFVRSVTEECQELKAQKAMLTDKVSYMQETLRNGEEENRNRIAMHAKLMRLESDLTALEASHVHEAELKNELSRIKRSNSEYQRKIQSLGQENEDLTRRVQIMEKGFERMSHAKENLGKQEIGGDNQEAIQSTIQLLEIKLAEALEENKIYRAQQKSSMSEGQPAGGDGKEGNTDRILQLEGELRDMKERLLNMSLQYAEVEAQRERLVMELKAIKKGRWF

SEQ ID NO: 68717 - protein, 318 aa, Zea mays
  Clone ID: UC-ZMFLB73192D05_FLI.pep
RCASQPAVMQAAVGHRGANLGSPSLSRFRYGFRLPGRSRLFSEGVAAASLRVGSLPQPRTHGSGGFAHLGAMGGEAPRLPHALRRMLIDHQKMACPNLLKAAVLSTMTLLSVPLEASAEMCQPPSSFANMPIFIVVALIGAAVGGLLARQRKAELKRLNNQLRQINAALRRQAQIESFAPGLTYAPVGRTNETDVIVDPRKQQLVTNLRNGKNYMRNQDLDKAIVEFRTALELAESIGDRFEEKKAARGLGASLQRLGKYREAMRQYSKVLELSKETGEDSGCTEAYGAIADCYTELGDLERAAKVYDKYISRLQPGE

SEQ ID NO: 68718 - protein, 554 aa, Zea mays subsp. mexicana
  Clone ID: UC-ZMROTEOSINTE061H06_FLI.pep
DVLVTPRTDFPELRLATPGTRWLRARAAGKQQVREFELVRGRAHTGKKSWIVSFDGVNNLDEARQIVGSAVLVKARDRPEIEDDEFYSLDLVGMRVIVKDTGKLVGTVGQVFNFGGGDLLQVIMGSSEGTAVDPDSENQDPISSREHVWIPFAEDIVPDVDMASREMRITPPKGLLELNSRSDKRSKKERRAMEWKDRKRFQRRVIAGKKVLSEMDQVHVLEGLVSGDKVQKASLAEQIGSIDFQLFRHAVHCVSKQIESSSMNLLANSSLSRKKVIKIPYKTLINLGDKAEHAFSSEFKNGLDILLKSKAAIVLVRNGSDSDTEFLSLLNSFSELMKVVENKVSPPLIVIAPAGHVESVRKCLVENDYFGFDTQKVWVLEELELPVVSICSEGSRKKVLMKSPWEIIKKPTGSGAIFSLLLSNKILETLNEMGVQYTQICSSSNRPIIGHPLLFGAVASRGADVGIQVSKTGETLDDFDVILSIDQLNKMCRDVTQIRFSARPEQNVHVEHVDGQWVAVQPEVANSHRLHAEVTSVLDSCAPDKLCVMEIVEQ

SEQ ID NO: 68719 - protein, 117 aa, Zea mays
  Clone ID: UC-ZMFLMO17288E05_FLI.pep
RVPYGKQAPYNVTVTLLVPGNYQGDRRIVVSGVYHQPGKQRMMLPTVPVRTTGTVVVEMIDKNGLYFSDEFSLTFHMHYYKLLKWLLLLPMLGMFGVLVILRPQEGAPLPSFSRNID

SEQ ID NO: 68720 - protein, 137 aa, Zea mays
  Clone ID: UC-ZMFLB73200G02_FLI.pep
WKIQLCRRWCIPTCLKRCGTQIHSSNPMYRQQLQDMLNNMGATPDQWDNRMLDHLKNFDLSSPEVRQQFAQVGMTPEEVVSKIMANPDVAVAFQNPKIQTAIMDCSQNPLNIVKYQNDKEVMDVFMKISQIFPQING

SEQ ID NO: 68721 - protein, 358 aa, Zea mays
  Clone ID: UC-ZMFLMO17273D01_FLI.pep
KKIATELKNVVSFASYMLEQKLLEAWCADKTAEALRCQKLLEDEEEAAQKRQAELMERKRMKKLRQKEQRLKNLKDEDATVQSPEIMDDATCSTAIQSVNSIYDPDCFEQEESQYLQFPALITLETDNDFNVDLPVEDISCDLGPEMDKGVVSRQQVVSRHHLGRTEKLAESSILSGSVVTSKHSALARPSNYKDPNVCSAPSRNKTCELKLRSEIEEQCQKHELDVDERGMGPSKNSRVLIGSIIVAIEDGSEHLLDLGSKNDPVPPNLKTKKHASVKVVQQVTHEGNRNEGVPDSDNRSSLSVTTDEISYSTCCDADLAVDEHLQCTTFSSEEATAFLSQRWKEAIAADHVKLVVS

SEQ ID NO: 68722 - protein, 371 aa, Zea mays
  Clone ID: UC-ZMROB73028H11_FLI.pep
AQKTQQGSMNKLASCFLQHGAPHTQIFKSYHVQRSPSLQLLENRSVSMTRHRAADRAARGTIVDVAVDSGTSFDFESYLSAKARAVHDALDLTLQGLRCPEVLSESMRYSVLAGGKRLRPVLAIAACELVGGTAAAAVPVACAVEMIHTASLIHDDMPCMDDDALRRGRPSNHVAFGEPTALLAGDALLALAFEHVARGSAGAGVPADRALRAVVELGSVAGVGGIAAGQVVDMASEGAPSGSVSLGALEYIHVHKTARLVEAAAVSGAVVGGGGDGEVERVRRYAHFLGLLGQVVDDVLDVTGTSEQLGKTAGKDVAAGKATYPRLMGLKGARAYMGELLAKAEAELDGLDAARTAPLRHLARFMAHRQH

SEQ ID NO: 68723 - protein, 313 aa, Zea mays
  Clone ID: UC-ZMFLMO17287G05_FLI.pep
PARQSESAVSPVYPSLHRCLDPRRKIPFPPFLSRRRFGATMAAEGEAKNPSGGGEGGNPQHQQAVQAAPPEPPTAQGGAVQEAGAHVTEQEPEGEKANRDGEGGAGEKDDGACRDLVLVEDPEVLAVEDPEEAAATAALQEEMKALVASVPDGAGAAFTAMQLQELEQQSRVYQYMAARVPVPTHLVFPVWKSVTGASSEGAQKYPTLLGLATLCLDFGKNPEPEPGRCRRTDGKKWRCWRNTIPNEKYCERHMHRGRKRPVQVVEEAEPDSASGSKSAPGKATEGAKKVDDKSPGSKKLAVAAAAAAAVQST

SEQ ID NO: 68724 - protein, 475 aa, Zea mays
  Clone ID: UC-ZMROB73011G09_FLI.pep
GDRVGVKYNSINEAEEHKGGHGIPKVSMIPLIFLIFYEVSGGPFGIEDSVKAAGPLLAILGFLLFALIWSVPEALITAEMGTMFPENGGYVVWVSSALGPFWGFQQGWAKWLSGVIDNALYPVLFLDYVKSSVPALGGGLPRTLAVLILTVALTYMNYRGLTIVGWVAVFLGVFSLLPFFVMGLIAIPQIEPSRWLEMDLGSVDWGLYLNTLFWNLNYWDSISTLAGEVENPKRTLPRALSYALVLVVGGYLYPLITCTAAVPIVREHWSDGYFSDIARILGGIWLHSWIQAAAALSNMGNFLTEMSSDSYQLLGMAERGMLPDFFAKRSHYGTPLIGILFSAFGVILLSWMSFQEIIAAENYLYCFGMILEFIAFIKLRVYHPNASRPYKIPLGTIGAILMIIPPGLLIIVVMALASYKVMVVSILAMVFGFVLQPCLVYVEKKRWLRFSISADLPDLPDVQEIAEDDAVPLVV

SEQ ID NO: 68725 - protein, 205 aa, Zea mays
  Clone ID: UC-ZMROB73045B08_FLI.pep
GSGVGVWARGLEFGGSIREDSVATSPDRQIRLSGRFGAKPPSSLLQKAAAFASLLRQCTCCVRRSWPRPSDHIYPARKRGTLHLFFGPFGDRPRQDLINLWPLFPSELLRFVFFSAEDMAAANGAAGAVLFSEEDLREVSGVRWGEDFVEVTCGCTSHRYGDAVGRLRVFASGDLEINCECTPGCREGPSQAQPPLPSLCFSLRS

SEQ ID NO: 68726 - protein, 192 aa, Zea mays subsp. mexicana
  Clone ID: UC-ZMROTEOSINTE034B07_FLI.pep
PTCRCASQSTSTTPTRRSACTTMRSSRRCSTATSSSRRGPSCTPSTRCPRETRPCRGPSPPGAPSRRTRRGGGSPARCRRGASACGWSSAPSCSSRRRCGTARITTSRWSATSLCKGMGRSVSRTRTPSARSTSSVIALLLELVQADPFQLTLISRLYLLCAFSLHLADVCDCCGAIICNTRVSLQENIFSS

SEQ ID NO: 68727 - protein, 340 aa, Glycine max
  Clone ID: 700843266_FLI.pep
NIAKIRRHVRQSKCLQDKMTAKESAIWLGVLSREEALIRQPSSDNGTSGITGVPPGVPVENKQAATSSASNYDVDGTDDGIGSVSSKENRRNHFMVTEPSDNLRRGRKPVQDTDQSEKQPRPKKPRRANDKPPAQADNEILHVEPRSKGININQTEAQVVGVQIHGNEQSNETDSAARPLERGLEVPAQLPVPEVDQYSYLHTNNLVSSESMYMSGKPMHYPELQNPDMHHETTYNLYNPAAGYEPGQDGQQLHSANNEAVRLENDAVSLQGVHMKGDGINGGDLQYFGKDAFQNELDRPMDHSFFGSPLSMSLDFGALGSPFHLDDFVCEDEMIQYFGA

SEQ ID NO: 68728 - protein, 187 aa, Zea mays
  Clone ID: UC-ZMFLB73100B02_FLI.pep
GLGFVKAEGVVNSMTRHGDRRELLKGPLYYACAITLTTIVFWRTSPISIAVICNLCAGDGVADIAGRRFGHVKLPHNPEKSYAGSIAMFLAGFIASVLFMCYFNIFGFVEKSWTMVAAFGVISLAAAVVESLPISTRLDDNLTVSVASVLVGALVFYSIGARNLCCMSSEVRRSIPATVGMVFAGSS

SEQ ID NO: 68729 - protein, 198 aa, Zea mays
  Clone ID: UC-ZMFLMO17035C03_FLI.pep
SFRSSVAASPPRPISRHPSSHSVSRAYSVSSTPHSPNPFRSHTNLPGVIHASRSTADLANMSSPHPRISHLSSSTHSLVGSHLSPPISIRYPLPHSRHESPSPHVSSPYISNSGYGSSSYYYLGGSSQHGSYLRRCGESGPSLSTMVPRSSQQQFQSEANVAAGASSAQSSRQSYLRRCGDSDASLSDMASAQSLPGC

SEQ ID NO: 68730 - protein, 82 aa, Zea mays
  Clone ID: UC-ZMFLB73114B03_FLI.pep
VYFHTVQGGSRIKIKATFIRWASYHSALPGRKHSYSIIPCTLDRNANRDDGTVYQLSMATPGSWKGSSSWLSCCLSIHFLKE

SEQ ID NO: 68731 - protein, 758 aa, Zea mays
  Clone ID: UC-ZMFLMO17015A04_FLI.pep
LPPARACSSWLLIYLSCSDPRSNKVVGGGIAVAAVGFRLRYQPPPSPFPAGASATGELDRRRAAMPKMFGFSRRRMKLGRLKGHLHDHFHGPRSPSRTTKRSSHPNAEDPLATSVSGRADDLAWRCSSDTFDLNGRDFESSENWAVLSTEGDKPAPRFDHAAAMVGSKMVVFGGDSGQSLLDDTKILSLDKLTWDSVAPKVRPPLNGRSLKLRPCRGHCLVSWGKNVILVGGKSDQPYDKISVWTFNTESELWSYMEAKGDIPVSRSGHTVIRAGPVLILFGGEDAKGKKLHDLHMFDLKSLTWLPLNYKGAGPSPRSNHVAALYDDRVLLIFGGQSKSKTLNDIHALDFETMVWSRVKTHGHHPSPRAGCCGALCGTKWYIAGGGSKKKRHPETWVFDVLESRWSVCVVPPSSSITTKKGFSMVPLYYRDKIVLVAFGGNKKEPSDKVEVLVVLQNEHCFSWRSAPEVEPLLYDESPPGSRELADHLSSCAPPYPTSSAARSGLAATAENSCGRKPLPDSLLRTSNLGGSSLRRQFRQEEECSSLAQKLQKPIDDDRYKDAADECPEHQPPSATNPKPRNDARRSSPEVVVDAKARRLLGRSSSDMNNHQDARVAALVRRNVALEEQLSAALASKDEAEKNLSLVIDSKDGLEKRLAEKDREVEALREKATGLELAQEEANSLSNTVHADNVRLEREVAFLKAVMDETQKELHSTRGVLAGERARAFQLQVEVFHLKQRLQTMEGRSPAAPRKPQNT

SEQ ID NO: 68732 - protein, 416 aa, Zea mays
  Clone ID: UC-ZMFLB73025H09_FLI.pep
VGNRLESRPISASPSFSSSLVAYKGSAKTFNLVEMERATLGFDESRIIGEGGFGRVYEGILEDGERVAIKVLKRDDQQGTREFLAEVEMLSRLHHRNLVKLIGICTEGHSRCLVYELVPNGSVESHLHGSDKGAAQFDWNARLKIALGAARALAYLHEDSSPRVIHRDFKSSNILLEHDFTPKVSDFGLARTALGEGNEHISTRVMGTFGYLAPEYAMTGHLLVKSDVYSYGVVLLELLTGRKPVDMLRPPGQENLVAWAGSLLTSRDGLESIIDHSLGRSIPFDSIAKVAAIASMCVQPEVDQRPFMGEVVQALKLVCNEGGEFNESTFSQDLHIQDVEVMSRASTDVDVDPTLSAELFTSSARYDAIDAPGSFRRYSSSGPLRVGRTGLNKERGLSTGSSSEHVGLQRFRIDGE

SEQ ID NO: 68733 - protein, 200 aa, Zea mays
  Clone ID: UC-ZMFLMO17297G03_FLI.pep
AYAWVLLLRQLHGGRHAHQGLPQPGEQGGGVPQEPADAALLQPVERGRLGDAGRARQDGLVPRPLLRLLPRVQGRRLRRRRGRPDPLRRHRRHRGHRRPRLRRRRRGLVQPGAGPHPAAADALGAAQVHDLQLLHRPQALPAGPPRRVLHAVAPGYSSPVQQWRARACVCMWSALLLPLRRSVSITGSRQDERHRNMVDK

SEQ ID NO: 68734 - protein, 76 aa, Zea mays subsp. mexicana
  Clone ID: UC-ZMROTEOSINTE082D09_FLI.pep
SPPPASPLGSGECSCTSPSFRLHFHKASSPSCLPRSTTAILKYLAQRLYSGCSSRFRSRYSTTFFLEFRFLGRQSR

SEQ ID NO: 68735 - protein, 87 aa, Zea mays
  Clone ID: UC-ZMFLMO17288E01_FLI.pep
NTFIYIVGVPFSKREVHCLLYSPFLAIQQPAAYLYTKMFFISSVLFQPQWSMAFAPIRQTLNHLYPPLYDSERTGPVSADHGPSGRR

SEQ ID NO: 68736 - protein, 102 aa, Zea mays
  Clone ID: UC-ZMFLMO17287F10_FLI.pep
KKEPILRSTYTRLKKKKEGGVPGNQHTELSTYSATSTERRLPALLWHPRDITQPYSQIHSNAAHIYLRLNHWRNATNNNNLHQTCCSDSTTAPTVRQTYLVS

SEQ ID NO: 68737 - protein, 263 aa, Zea mays
  Clone ID: UC-ZMFLMO17282D05_FLI.pep
DMPSNGQSKPLFQSQEATILQPKNEATWVYHGRPGDGKVGTSNKSRPSTSIGFINKNHQSVNAATFAMNLNGQKIVSDHAKSAGTTAMPVQVNIPNRGLDAPRNMFSAFPAAVRENHSIPPAPMAQSWISFGATTENKPTIVSPTSLDNNCGWKMPFANVQPSDDTKINAVPQLFRHPVQVARENSVQSKGLVIFPQLVQPDFARSQGQPQWQGLVPHMQQKPGKDVLRPDLNIGFPSPRSPPARQSSGINLEAQQPDLALQL

SEQ ID NO: 68738 - protein, 391 aa, Zea mays
  Clone ID: UC-ZMFLMO17273D07_FLI.pep
PPLHSHTRTLRPPAAYPRRPPPIAMPPFAAATAAAFLFPAVAIPCRVFPQRRARSLAVRAVASPPAFAVKPAPLPSKTGKWEWKFENKPVNIYYEEHEQEVAENMKNILMIPTISDVSTVEEWRVVAKDIVGRKGELGYRVTIVDWPGLGYSDRPSLNYNADVMESFLVELMNSPNSPVANADDELIIVGGGHAATIAVRAAGKDLIKPSAVAAVAPTWAGPLPIVFGRGSDMETRYGLLRGTLRAPALGWMMYNVLVSNEKSIQSQYKSHVYANPDNVTPAIIESRYELTKRKGARFVPAAFLTGLLDPVQSREEFLQLFAKLDGDVPVLVVSTVNAPKRSKAEMEALRGSKGVTKFVEVAGALLPQEEYPLAVAEELYSFLQESFAARR

SEQ ID NO: 68739 - protein, 344 aa, Zea mays
  Clone ID: UC-ZMFLMO17010E07_FLI.pep
HCVTSTCDQRIPRYFDPGETLLETCFNCSEEGHVAANCPMGKRKKPCFVCGLFGHNAKQCNQGQDCFICKKGGHMAKDCPDKHKRNDHQSTFCIKCGETGHDMFGCANDYPSDDIEQIRCYACNQKGHLCCSDFFDNSLEQVSCYNCAQSGHSGLGCAKQRREASAVTTPTLCFKCGEEGHFARGCTKNAKSDGPKGWSSPHSQRKGRWKNDGKSPSHIRRKEKWKKDSSARSAPHDACTTSKSNSPSFEERMGASNHKSKWRGGWTGDDDLPSKKYKPNGWGSPATPKRSYTNHQYLSGGGDYFTPQSSRRHNHGTASPGARKHRFSSSIFAASNTHVRFKRS

SEQ ID NO: 68740 - protein, 454 aa, Zea mays
  Clone ID: UC-ZMFLB73177H05_FLI.pep
AHRHQFTSQSRSRGGRGAEEREASRSWGLGGCRAVRLSPPLHPPATSGGQGKHLRPPFPNPGWMERDFLAAIGKEQQHPRKEKAGGGAEESAYFGAAAVPAMDWSFASKPCAAPALMSFRSAAREEPSFPQFSALDGTKNTAPRMLTHQRSFGPDSTQYAALHRAQNGARVVPVSSPFSQSNPMFRVQSSPSLPNSTAFKQPPFAISNAVASSTVGSYGGTRDAVRPRTAQLTIFYAGSVNVFNNVSAEKAQELMFLASRGSSAPVACKPEAPPTLAPAKVTAPEVLLPAKQMLFQKPQHLSPPPSSVPGILQSAALPRSASSSSNLDSPAPKSSVPLAVPPVSQAPPATLIATTTAAAIMPRAVPQARKASLARFLEKRKERVTTAAPYPSAKSPLESSDTFGSGSASANANDKSSCTDIALSSNHEESLCLGGQPRSIISFSEESPSTKLQI

SEQ ID NO: 68741 - protein, 217 aa, Zea mays
  Clone ID: UC-ZMFLB73184F10_FLI.pep
EFSACLQVSEDASVGSYIIVKNEGQHDIDINVKEPSSNTDNDKKSLHLIKGAFGQMNITYTTSDAGNITLSDGKVDCIIHVGQPVERKSVYDLQQQFQQLTAYAMRLNPAYGASFFVFTVVLVAVGCACCKFAKRKGNDGVPYQQLEMGGQAPNSSGVDNTASTTDGWEDGWDDDWDDEEAPAGPVDKKPTGSVSANGLSLRSQTNSKDGWDVDWDD

SEQ ID NO: 68742 - protein, 200 aa, Zea mays
  Clone ID: UC-ZMFLB73210F11_FLI.pep
RTRPASYHNYDSIMAGTSVMFITSTAETGKVPERVMRGDLDKGQTNYRLEDQHVIVQPPQGRLPWGIPAEGSVPMNRVQSQAKQHLENMDAKQDHKKLLPDPKKSPLDKFMDTSLPSRNMDMRSQRLDFDDVSECEIPWEDLVIGERIGLGSYGEIYCADWNGTEVAVKKFLDQDFYGDALDEFRSEVGELLSVSILEFS

SEQ ID NO: 68743 - protein, 233 aa, Zea mays; identical to SEQ ID NO: 46565
  Clone ID: UC-ZMFLB73213D03_FLI.pep

SEQ ID NO: 68744 - protein, 477 aa, Oryza sativa nipponbare
  Clone ID: JC-OSROLIB3475020C05_FLI.pep
AARVEFGYERDFEGRYQVGRLLGHGQFGYTFAATDRASGDRVAVKRIDKAKMVRPVAVEDVKREVKILKELKGHENIVHFYNAFEDDSYVYIVMELCEGGELLDRILAKKNSRYSEKDAAVVVRQMLKVAAECHLHGLVHRDMKPENFLFKSTKEDSPLKATDFGLSDFIKPGKKFHDIVGSAYYVAPEVLKRRSGPESDVWSIGVITYILLCGRRPFWNKTEDGIFREVLRNKPDFRKKPWPGISSGAKDFVKKLLVKNPRARLTAAQALSHPWVREGGEASEIPVDISVLSNMRQFVKYSRFKQFALRALASTLKEEELADLKDQFDAIDVDKSGSISIEEMRHALAKDLPWRLKGPRVLEIIQAIDSNTDGLVDFEEFVAATLHIHQMAELDSERWGLRCQAAFSKFDLDGDGYITPDELRMHTGLKGSIEPLLEEADIDKDGRISLSEFRKLLRTASMSNLPSPRGPPNPQPL

SEQ ID NO: 68745 - protein, 290 aa, Oryza sativa nipponbare
  Clone ID: LIB3598-021-G1_FLI.pep
HGLIGVRTPAASSELVDRAGLLLAVDVAVVMLLLLAVIGGVVGAGDALLHLLHLLLRLLLHLLVPLVRLLPRRLRRLPRGVLRRLRLLPRRVLRRAGLPLRRLLGLPRLLAGRLRLLPRRVLRRPGLLRRGVLRRACLLPRRVLRRPGLLRRGVLRRAGPLPRAVLRRPGLLRGGVGGLPERLLRLAGLVPGGVGGLPESLLRLAGLVLGGVGGLPESLLRLAGLVLGGVVPLAGLLLGRLFDLGLALLRLLVHLGAPLAGRLGGLLGLVLGLLRSPGRLAGGALRRLLR

SEQ ID NO: 68746 - protein, 226 aa, Oryza sativa nipponbare
  Clone ID: LIB3598-054-G3_FLI.pep
HGLIGVRTPAASSELVDRAGLLLAVDVAVVMLLLLAVIGGVVGAGDALLHLLHLLLRLLLHLLVPLVRLLPRRLRRLPRGVLRRLRLLPRRVLRRAGLPLRRLLGLPRLLAGRLRLLPRRVLRRPGLLRRGVLRRACLLPRRVLRRPGLLRRGVLRRAGPLPRAVLRRPGLLRGGVGGLPERLLRLAGLVPGGVGGLPESLLRLAGLVLGGVGGLPESLLRLAGLV

SEQ ID NO: 68747 - protein, 220 aa, Oryza sativa nipponbare
  Clone ID: LIB3598-036-C6_FLI.pep
HGLIGVRTPAASSELVDRAGLLLAVDVAVVMLLLLAVIGGVVGAGDALLHLLHLLLRLLLHLLVPLVRLLPRRLRRLPRGVLRRLRLLPRRVLRRAGLPLRRLLGLPRLLAGRLRLLPRRVLRRPGLLRRGVLRRACLLPRRVLRRPGLLRRGVLRRAGPLPRAVLRRPGLLRGGVGGLPERLLRLAGLVPGGVGGLPESLLRLAGLVLGGVGGLPESLL

SEQ ID NO: 68748 - protein, 273 aa, Zea mays
  Clone ID: LIB3354-074-G1_FLI.pep
ERKKNKTSFEHAETENDLDTEYKHHPTPAGSPHSSSSDRYLSASARRCFPLPSTAVTSGPATLSFTSSSLSLAVSAVSRTFSFTLSYPSPAFSLAASTVSHAASLADAVFSVAFPLAASLDSCAFLPALSAFSHAASLAASAFSFAAAVVSHAASLAAAAFSAAASVVWLSVSCALPAASLALSYPCPAFSRAFSSTLALPFFDRSCASAPLSLAASAASLVFCLPYSALLDASPAAPFTVSLAWSLACPALFDAPAAASPAVSLAYPAFFPI

SEQ ID NO: 68749 - protein, 265 aa, Zea mays
  Clone ID: LIB3354-077-D6_FLI.pep
KNKTSFEHAETENDLDTEYKHHPTPAGSPHSSSSDRYLSASARRCFPLPSTAVTSGPATLSFTSSSLSLAVSAVSRAFSFTLSYPSPAFSLAASTVSHAASLADAVFSVAFPLAASLDSCAFLPALSAFSHAASLAASAFSFAAAVVSHAASLAAAAFSAAASVVWLSVSCALPAASLALSYPCPAFSRAFSSTLALPFFDRSCASAPLSLAASAASLVFCLPYSALLDASPAAPFTVSLAWSLACPALFDAPAAASPAVSLAYP

SEQ ID NO: 68750 - protein, 274 aa, Zea mays
  Clone ID: 700243546_FLI.pep
GTPSKVKMLWRAVRSMDVIMHSSSFLLPKLYQPVNKPVKNYALVVLNQHLPRFMPRLWDHANLRICADGGANHIFDEMYQITNDEDKKSTRNKYVPEIIEGDMDSIRPEVKLFYSSQGSKISDKSHNQETTDLHKCISRIHHCTPDDEKPNLCVLVTGALGGRFDHEAANINVLYLFSDMRIVLLSDDCLIRLLPRTHRHELYIESSVEGPHCGLFPVGAPSTSTTTTGLKWNLSESKMRFGSMISTSNIVQSEKVTVESDADLLWTISLRNLT

SEQ ID NO: 68751 - protein, 230 aa, Zea mays
  Clone ID: 700164668_FLI.pep
TRCPCGWRTGGPWSPRRGWYRSRPLCFSLVLDHTYTPGVPPAGHHDHVADVKLDEVHDLVGLQIDLDGVVGLDERVGVADGTAVVGVQVGDALLAKLNGPHLAELELGILIPDWVKTEAALGVIKQPVVLHCLRDGNDIHEPSRVGLVSLDLAINKYMALHQDRNDLTVVQSILEPVPDDEDQRKALPGLVRSRRWLGSKSSAKLVEHPMLGRIEPLQVLLQSPSHGCKD

SEQ ID NO: 68752 - protein, 139 aa, Zea mays
  Clone ID: UC-ZMFLB73186C03_FLI.pep
SCNPWRRRRRIALPGRQNLAPELSSAPRPPLASRSRSAVSVAGRRGDMASTCFRAAARVASAAGRSAAATRSAPSAARAAAAAHRASSFSRMPVELGCCAGLSLLPLHSAVAAARLTSRLSTASSCRALSQEMGLSVRR

SEQ ID NO: 68753 - protein, 316 aa, Zea mays
  Clone ID: UC-ZMFLB73223H04_FLI.pep
LLSKLASRPPRVIQCKVVGGGGGGVTYCGDGPAGCLDCARSCMWILLPLCSLLRVLLVLQGCDASVLLDSSAGNQAEKDAAPNASLRGFEVIDSAKTRLEQACFGVVSCADVLAFAARDALALVGGDAYQVPAGRRDGNVSSAQEAGANLPPPTASASQLTQAFGAKGLSQAEMVALSGAHTVGAARCSSFAPRLYSYGPSGAGQDPSMDPAYLAALAQQCPPQGTGAADPPLPMDPVTPTAFDTNYYANLVARRGLLASDQALLADPATAAQVLAYTNSPATFQTDFVAAMIKMGAIQVLTGTAGTVRTNCRVAS

SEQ ID NO: 68754 - protein, 244 aa, Zea mays
  Clone ID: UC-ZMFLB73226A12_FLI.pep
SQQGLELGKGSQWVWGSTRGGADSVSWRKVRQDDQGSSTGQHGYSIRTFTGHSASVMSLDFHPNKDDLICSCDGDNEIRFWSIKHGNAVRIFKGGSTQLRFQPRYGGLLATASDNVVSILDVERQACVRRFESHTKGVDSVCWDPTGEYVVSVSEDTVKVWSLNDESFVNELSCGGRKFSSCTFHPTYPSLLIIGCYQSLELWDMSENRSMTVAAHDSLVSALASSSSGLVASSGHDKYVKLWR

SEQ ID NO: 68755 - protein, 137 aa, Zea mays; identical to SEQ ID NO: 37029
  Clone ID: UC-ZMFLB73064D06_FLI.pep

SEQ ID NO: 68756 - protein, 240 aa, Zea mays
  Clone ID: UC-ZMFLB73226H12_FLI.pep
KEQQHIKSYWWHNLTEGLERARRQLWHEQEEVAGEQHRECSTGGRRRGGDAASGGRLQRAGVGRRRRVVLGWSGSGALVAAGAEDGGVFGARGNMQELSAVGDVGAGGAAGVGEREREGGVDLDAQVGVVLVLDEHAQALGALPQHLAQAAAAVGRRRAGLPLHVLQARRQAHQLVRALRLVRAHVAARHGRHGDGRGRGQRQHRSPPRHRRRACVMCALARASSLRCGQRFKCGCVTCE

SEQ ID NO: 68757 - protein, 177 aa, Zea mays
  Clone ID: UC-ZMFLB73100H06_FLI.pep
LNTNQSPRRPGSQRAPTPAHHRTGRRRRSLAAGAELLQHGGHGGPLRGRLGGAEQRDAGELGGLGAREPPAQARVHEVVQPPAAAAALLEVGRRHGAPPRQHLQHHHAERVHVALLVRGPPRRRVLGSQVPHGRAVLERREHHVVGQQPVQARAGEARRVEMVKQDLAAEMLWCASL

SEQ ID NO: 68758 - protein, 436 aa, Zea mays
  Clone ID: UC-ZMFLB73153B01_FLI.pep
LLMGQGPASTLWFYFKTKYQGREEKLKMVMMELGMMFDLLYTKANVLQRRIGVLFLCASQALMVVALVLFMIRREEGAHNNKVNVAITYTLFSGAIFVETCCVAAAIASPWTRAHLKESSCLHGLSDSLFEAVHLCKSTANNMAQFNLLDHCISVNSKPRVFSKALSAIGLDKQWYVHHMDKQCYWWIINRVLEHLATLPDEFSGLATVHFTINAPTEHPVWFNQLSTSFEQVLYGLHLYTDLHLSRHFNNCSTGSVVQPPPPEIMRLKEECETLSNYMMYLMVVHPSMLPVNTVAAGDLVQQLIGWVTNHPGHGATTTKLAILRGYSRTFYILGIDEPGQHRSFYYLHHLLTQIKEMWVRLLMYAAGKCSGEVHARQLGEGRELITFVWLLMLHHGLGDMAAEFKLLRSNDPNVAERGAWIVSPPGNYQEPTCAF

SEQ ID NO: 68759 - protein, 257 aa, Zea mays
  Clone ID: UC-ZMROMO17017H03_FLI.pep
EEFLRVVTCAYVVQGYGLTETCAGSIVSIPNEHSMLGTVGPPVQHIDVRLESVPEMGYDALSSVPHGEICIRGSVLFSGYYKREDLEQEVMIDGWFHTGDIGEWQPDGSLKVIDRKKNIFKLSQGEYVAVENLENVYGVLQDIDSIWVYGNSFESSLVAVANPNQQALERWAEQNGVTGSFAELCEHPRAREHILAELTKIAKDKKLKGFEVIKAVHLDPLPFDIERDLITPTYKKKRPQMLKHYQGVIDALYKGMK

SEQ ID NO: 68760 - protein, 450 aa, Zea mays
  Clone ID: UC-ZMFLB73156G12_FLI.pep
HNYLVLDVDDIPRVVQEAFFLASSGRPGPVLVDIPKDIQQQMAVPVWDKPMSLPGYIARLPKPPATELLEQVLRLVGESRRPVLYVGGGCAASGEELRRFVELTGIPVTTTLMGLGNFPSDDPLSLRMLGMHGTVYANYAVDKADLLLALGVRFDDRVTGKIEAFASRAKIVHVDIDPAEIGKNKQPHVSICADVKLALQGMNALLEGSTSKKSFDFGSWNDELDQQKREFPLGYKTSNEEIQPQYAIQVLDELTKGEAIIGTGVGQHQMWAAQYYTYKRPRQWLSSAGLGAMGFGLPAAAGASVANPGVTVVDIDGDGSFLMNVQELAMIRIENLPVKVFVLNNQHLGMVVQWEDRFYKANRAHTYLGNPENESEIYPDFVTIAKGFNIPAVRVTKKNEVRAAIKKMLETPGPYLLDIIVPHQEHVLPMIPSGGAFKDMILDGDGRTVY

SEQ ID NO: 68761 - protein, 97 aa, Zea mays
  Clone ID: UC-ZMFLB73018A05_FLI.pep
RRVTEFPKLSPACPPNQLSTPFLLARLMDHHTRTFPRVVAHRHTLLFHVRQHLNCISVMGYDKSISTWSRYYSAADSHRRPGHNTSMSLSCTQLKLI

SEQ ID NO: 68762 - protein, 52 aa, Zea mays
  Clone ID: UC-ZMFLMO17127B08_FLI.pep
RIYAAIQLENKMSWNNNKKKEKMIRFSLRDTCINRCSMEGAQQTSHRSYQAS

SEQ ID NO: 68763 - protein, 259 aa, Zea mays
  Clone ID: UC-ZMFLMO17193B03_FLI.pep
SSLKAMWDVIHPKSGSNVGTVRKPRPPVLAAAVSAWTFLLTTVGSWRINTDSWKEPIAFLSTLLEADDRAVRMAAGEALVLCFELNLLDVSSCEDGDVNTGGTGGSKNKLFLDMQALKAKISGLASNLSAEAGGKGADKKNLTDQRDLFQRILDFVKYGDCPEESIKIAGKRDVLRVSSWSELIQLNFLKRFLGKGFLKHVQENGLLQDIFDIKVDKTETLSSTDKKIFRSEEEKERALRLNKERRLAQVRKNAVMLDE

SEQ ID NO: 68764 - protein, 192 aa, Zea mays
  Clone ID: UC-ZMROB73079F07_FLI.pep
RPRATSRSWPSCSAPRAWTPGTWRCCRPATPSARRTASPSRTASTTSRAWTTPATPTRSWTARTWRASAPSAPAWTTTPPWWRWTPAASAPSTWATTPTWPSAGASSTPTPSCSPTLPPAPTCSATPRAPTGTSSSPTSPRPWSRWAPSACSPAARARSGRSATSSTNLLYGLLRSHVFLFFIFSFTALLID

SEQ ID NO: 68765 - protein, 162 aa, Zea mays
  Clone ID: UC-ZMROB73080A08_FLI.pep
KQLNELYSSLRSLLPDADQTKKLSIPTTVSRVLKYIPELQKQVDNLERRKKELTNANCKPGVLKTTKAVTPIVSATCLNDTEIMVQVSLHSDVAATALPLSKCIKVLENEGLHLVSSSTYSSAFENKTFYSLHLQRSQRTMKEECPAFCEQLEKIVRKKAGA

SEQ ID NO: 68766 - protein, 211 aa, Zea mays
  Clone ID: UC-ZMROMO17027F08_FLI.pep
DAESTVHEIKRKGGDLRYCQKCCHYKPPRAHHCRVCKRCVLKMDHHCIWINNCVGHENYKIFLVFVLYAVVASFYALILIVGSVLHSVPKDEQPGSDSSRTSIIICGVILSPLALALAVLLGWHIYLILQNKTTIEYHEGVRAMWLAEKGGDLYHHPYDLGVYENLISVLGPNIFCWLCPVLNTVGNGLRYRTSYDIPVSTPPKKIAAHSQ

SEQ ID NO: 68767 - protein, 138 aa, Zea mays
  Clone ID: UC-ZMROMO17031D06_FLI.pep
VAARSSLGRRRGHGFKSGRLRLELLLDVHLHVVAEHEARVVVVADPCGGDRRSDGGQARWVVEGGDGAPVAVAGRQDAVPCALVPAIAQHLDLVAGVDDDGVLEGLDVDPAAVRKLRLQAAEAVILEQKDEAPGVGVR

SEQ ID NO: 68768 - protein, 105 aa, Zea mays
  Clone ID: UC-ZMROMO17068F04_FLI.pep
ATRRWGRCAGCRAATGSTTTASTPSAWSTARGRSSATCRSTERIGAPILRSLLRMNEGAIIIRIYSNNSARGLPGIPTSRHIPTRGWVESRRSTRPPVSLVYFHG

SEQ ID NO: 68769 - protein, 231 aa, Zea mays
  Clone ID: UC-ZMROMO17080E04_FLI.pep
FHPFVYHSKRFYTVLLWRRVLAFLVASQFLRIMTFYSTQLPGPNYHCREGSKLATLPPPNNALEVLLINFPRGVLFGCGDLIFSSHMIFTLVFVRTYHKYGSNRLIKLLSWLMAIIQSLLIIASRKHYTVDVVVAWYTVNLVVFFVDKKLPEMPDRTNGLSLLPVSTKDKDGRMKEELHKLEKDGRMMDEFHKLLNGNTVDATDWRQRVQMNGKHGEDTNHTVSDATPTGT

SEQ ID NO: 68770 - protein, 127 aa, Zea mays
  Clone ID: UC-ZMROMO17112A12_FLI.pep
RGPVHVQLRRPLPEMVPRAAVVAEAEREPAGGAGGVRRRPRRRQPRDTDYVNKAGERHALHLTRTCVCIYSDVRVYIYIDWYLFSEVRPYGEEEQANQPCRIRGPYLYTRHRTLHSRHSNGYTARGR

SEQ ID NO: 68771 - protein, 177 aa, Zea mays
  Clone ID: UC-ZMROMO17113D12_FLI.pep
NPENLLRNTVLGGSSNHYQSQFGRHSSDMEFDDPAILAVGKGLMPGIGDSGLEMKNTPAFQAQLQPASSDPRFHLHIQPNVQSHQNMRFADHMQDGLNHMNDNRFLGQNHGPLSPYVQIPQQPRNSQVTNGHWDGWSDSRQGNSTPMSDMSRILYPSEVNKLHMLGSNDIYNRAFGM

SEQ ID NO: 68772 - protein, 191 aa, Zea mays
  Clone ID: UC-ZMROMO17114D10_FLI.pep
NLNVIMKPLRASMLQVSLQRALGGIDKLHCRNGVVGNSTLGSLLHKKRIIVVDDNIVNLKVAAGALKKYGAEVTCADSGKEAITLLKPPHNFDACFMDIQMPEMDGFEATKRIRVMERDLNEQIECGEAPPECVGVRQWRTPILAMTADVIQATHEQCLKSEMDGYVSKPFEGEQLYREVARFFLNQDQVQ

SEQ ID NO: 68773 - protein, 249 aa, Zea mays subsp. mexicana
  Clone ID: UC-ZMROTEOSINTE014D11_FLI.pep
VEMNQVPVSLPIRTLPSGAPGMTSRVQTGRAYYPVVGSSSSSSVGAVPTIQGSSGAAMFANGGYAPSSVHAGTVPIFPNPAPATSSGSRAMLHQMVIQSHPPATSAATSSTSMRTVQPSLPARTAAASRHARHVSAGLANNGRYRRARSSYYRLHPLMVEAERFMMDHLVFYESRAAAADPHRDMRLDIDNMSYEDLLALGEAMGNVNTDLADEKISECVKEVVCCSSDHTQMDQDDGSCAICLEDYRD

SEQ ID NO: 68774 - protein, 506 aa, Zea mays subsp. mexicana
  Clone ID: UC-ZMROTEOSINTE096G06_FLI.pep
ARKDKSNNGSPWLKFSYSQAAILDLAFQDSFGRVGEKNKEALKMSKHITKLFPNKVTIESPEDETELSQWKQLLGRDIEILKAKANFLKIQSFLTRHGMECTDLESVVCVKDRNLTSECVDKIVGYALSYQLKDHPIQTPGKDARVVLSGVSLKYGIDLLESIQSGPKKKSTKKSLKDVVTENEFEKRLLLDVIPPDEIGVTFEDIGALENVKETLQELVMLPLQRPELFSKGQLMKPCKGILLFGPPGTGKTMLAKAVATEAGANFINISMSSIASKWFGEGEKYVKAVFSLASKISPSVIFVDEVDGMLGRRENPGEHEAMRKMKNEFMVNWDGLRTKDKERVLVLAATNRPFDLDEAVVRRLPRRLMVNLPDAPNRKKILSVILAKEDLADDVDLEALANLTDGYSGSDLKNLCITAAHRPIREILEREKKERTLAEAENRPAPPQCCSGDVRSLKFSDFKHAHEQVCASISSDSKNMNELVQWNDLYGEGGSRHKTPLSYFM

SEQ ID NO: 68775 - protein, 478 aa, Zea mays subsp. mexicana
  Clone ID: UC-ZMROTEOSINTE098G01_FLI.pep
VYRSLPLGQDRRRNRYWQFSASSSSYDPGSGRVFFESRDGYWRVIDSSEAFEALVSSLDTRGIRESHLHSMLQSIEPTFREAVERKKCVSLEHTTGWTDNGSNESPNCNNEFGSPCSTLSGVASDNLMAYSDTFKIEIGHNEAEKSSISKRASVFLKWMWRECYCHQSTYTMKYGKKRCPELIQSCDHCYQIYLAEEQHCSSCHKSFKPIHNFLEHLSQCEDNQRTNPSWKTQIVGLSVPVGLRLLRLLLATIEASVPAEALLPFWTDLYRKSWGVKLYSASSAEEVLQMLSVLESAIKRDYLSSNFETTTELLNSNTQDATQNSVGGSGSATILPWVPDTTAAVALRLLDLDTSISYKLHSKLVSNKEQEAGDFMKLPLRYPSINKNKQEIEQFIPIGFDQQDGTLLTNSNGRRGRGRGGRGGRGSRGGSRGGSSRGGGGRVPRGIGSSSRIQFRDDNSVPYGRAPRKNVRGGRTRG

SEQ ID NO: 68776 - protein, 392 aa, Zea mays subsp. mexicana
  Clone ID: UC-ZMROTEOSINTE102H09_FLI.pep
STQNIKSLETALASQSFLQLGLLTGLPMVMELGLEKGFRAALSDFILMQLQLASVFFTFSLGTKAHYYGRTILHGGAKYRPTGRKFVVFHASFTENYQLYSRSHFVKGFELIFLLIVYHIFRRSYVSNVVHVMITYSTWFMAVAWLFTPFLFNPAGFAWQKIVDDWADWNRWMKNQGGIGVQPEKSWESWWNSENAHLRYSVLSSRILEVLLSLRFFIYQYGLVYHLNISQDNKNFLVYLLSWVVIIAIIGFVKLVNCASRRLSTKHQLVFRLIKLLTFLSVVTSLVLLYCLCRLSIMDLIICCLAFIPTGWGLLLIVQVLRPKIEYYAVWEPIQVIAHAYDYGMGSLLFFPIAVLAWMPVISAIQTRVLFNRAFSRQLQIQPFIAGKTKRR

SEQ ID NO: 68777 - protein, 105 aa, Zea mays
  Clone ID: UC-ZMROB73050G03_FLI.pep
QAQITMHYYSLPHHTGYSCFSVSARSNAGSVLYLAWNCTLPCWNVHKNKHDTFMIDRWMDRSINSNGGRMPAAACRRGTCCAGSCRRRTWPCSLPWAPRRTSCCS

SEQ ID NO: 68778 - protein, 492 aa, Zea mays
  Clone ID: UC-ZMFLMO17012A04_FLI.pep
GGVHPKTIMTRLCPLHLLLIAAAAASASGADEAHVSVAVAEKGLAFAKDVLISEAVRSLTPLRLPGVEKAVRVPFLGGIRVAASNITLFHLDVGDNSTIFPGDSGLLVVTSGITANISMHWSYCYDSWLFPIEITDSGTASILVQGMEVGITMVIKNKNGSLALSVSQCGCYVKDLVISLDGGASWFYQGFINAFEDHIKAAVEKAVPENIIEGAGKLDSFLQGLPRTISLDDVAAFNLTFINDPHYGNSSIEFDINGLITSAVAETANLQKHPQLSLACGGASKMLLLSLDEDVFNSALEVHFKAGSMHWVVDKVPDQSLLNTANWKFIIPRLYWNYPNDDMLLNISMASSPVIRVTSEKIEATINGDMIIDVVDNKEIVPVACISVIVSASGVVDASGNKVYGRVGLDNFSLALKWSKIGNFHMSLIQGVIRVLLNTVCMPYLNSRLGNGLILPMVHGFTLQDVYVLTSAEQLTLCSDVTFNASSLASLL

SEQ ID NO: 68779 - protein, 110 aa, Zea mays
  Clone ID: UC-ZMFLMO17215H08_FLI.pep
QLRAPVDLSCHGRPHPVHLQGRRAVQEGGRAGLPRRPLLRRALLADVLLPSPGRRRLRPVPAGDVERPVVIPDDYFDGQLRCSRRGATTLSDEVPVAPPAPGLPGPVTRS

SEQ ID NO: 68780 - protein, 292 aa, Zea mays
  Clone ID: UC-ZMFLB73246B08_FLI.pep
TVVASAAEQPDEDYESDTGLDSLDLPEVPKAAIRPPSDAPLTPDICPHVQGSQSLPHEFSDPGNLEENPTAGGAFNVIQMKSLEHLVYAPSDQSNIPDLPNEKKQFIPFASPPPVLSPSVGKAETVPSPSLSPPVKPTEPEPEILTKKIDEVTTPPVLPSDYIFTKQPEQVRTISPSESGANIDLDDVLSAAQTAAESAERAASAARAAANLAQLRISDLKKNSKVYSNYGDSVQKESHHQTEATQEPVFDHQDSFTNDTQDYVSSHVPQRSSSLEDDPYFSYPNLFSAPKP

SEQ ID NO: 68781 - protein, 156 aa, Zea mays
  Clone ID: LIB3067-044-B8_FLI.pep
FTSIEVLCTSCRCTTFFNQRHALFDGFFYVLFLHRLLGYTIGFMHRLPHSFIVLTIGLLVLFFVLRTLVVHRPLFMLPTLTGLSSIAASTPSTSGPSISIFCPGVQEVDPFIAICSNIISSLSRFSGGPYFNFLHSACPKASWSLNSSPSVSSSTD

SEQ ID NO: 68782 - protein, 305 aa, Zea mays; identical to SEQ ID NO: 40578
  Clone ID: 700351755_FLI.pep

SEQ ID NO: 68783 - protein, 407 aa, Zea mays
  Clone ID: 700352054_FLI.pep
SSPRDGAAGVPGRAERMEAALEAARAKDTKERLAGVERLHEALDAAARRGLTAAEVTALVDTCMDLTRDANFRIAQGGLQALSVAAVVAGDHFKIHLNALVPAAVERLGDDKQPVHDAARQLLITLMEVSSPTIIVERAGSYAWTHKSWRVRDEFVRTVASAVGLFASTEISLQRVLLSPVLQLMNDSNQSVRDAAISCIEEMYKHMGSQFHEELQRHNLPSYMLKEINSRLDKIEPKVRSSDTTMQYKAVESRGNAGMEPVGSGTPSGSVNDMENEESGSKGKRPLGRDSTKASRKKAMSSSSQSTNYLSRIHDIQIARLKQSEEKSELKQQNIEFMKEVELKKLEFQSKKIEMQQTKLMMEDRIRKDEELNKMYAMDMDALPEELRAVYIARRKGLIDYFIKNPV

SEQ ID NO: 68784 - protein, 183 aa, Zea mays
  Clone ID: 700356858_FLI.pep
NFTFEQSAMVKGSADYVAINHYTTYYASNFVNATETNYRNDWNAKISYERDGVPIGKRAYSDWLYVVPWGLYKALIWTKEKFNSPVMLIGENGIDQPGNETLPFALYDKFRIDYFEKYLYELQCAIRDGANVFGYFAWSLLDNFEWRLGFTSKFGIVYVDRNTFVRYPKDSARWFRKVIKNEN

SEQ ID NO: 68785 - protein, 236 aa, Zea mays
  Clone ID: 700454401_FLI.pep
CAASRSTSTPRSLALSAQFPRPPPRPPRRPPRSPIASCAFSPSISRGGAARSSASPGRHSSARSPTRSSSSRPPTASRISTRAPPSARSTSRRSGSTSCRHRPTRSGTCSRARPGTASSTSTRAWAARSSSRRSCMAWSSLSPSLSRGTSRNGLPRRMARCGFRRCEPSFIPLARSSLCASAIPFYVTDLMKNNSLMGKTCHWLTFVLLNVECNGCCNVESRCNYRSSMFHGLKFC

SEQ ID NO: 68786 - protein, 103 aa, Glycine max
  Clone ID: 700562893_FLI.pep
GNQEVVSVFGVDRDNMSNFKAGYGHFSTNVKGVFAAGDCRRGQSLVVWAISEGRQAAAQVDNYLVKEDKDHRNQDGLVKRQQGLYKKQHGSSKHTVMTYRWLL

SEQ ID NO: 68787 - protein, 203 aa, Zea mays; identical to SEQ ID NO: 37879
  Clone ID: 700576010_FLI.pep

SEQ ID NO: 68788 - protein, 158 aa, Zea mays
  Clone ID: 700578953_FLI.pep
PRACGVRRLPSMAGEAKKLFFASEVTLHASRKDCWVVIGGKVYDVTKFLEDHPGGEDVLLHASASGDATEAFEEVGHSTSAVSMMDSYLIGSIKDYVRPSASKATDPWSADVLPNSRTMQGNKVTPNPNTFLDFLLPLFVLGLAFAAWYYLTFISKNH

SEQ ID NO: 68789 - protein, 450 aa, Zea mays
  Clone ID: 700342573_FLI.pep
RLVARRHSVRLPRPHLFLAVPLPPLFADKHAATPHSIHPSTRRFSLCFGEGAARSGLVPLVRQGPGRCAHSTGRRWAFQASSTVSRVEEMSTTECADLGEEFWLPEDFLDDDFFSEEEKAAVAARSESDEEDSLAGLSRRLAGLLGDGGERKAPAAKAEVTVGSPQSTLCGLPKSGQESPSGGASKGTSPPSSPLEQRPADPWDLLYEAAGQVARMRAANSVPVPAANGFHGQSGFAQPPRKPSPPPIAPPSSAKVPAGGHYYDPFARLVSQRQMQAAQFHLLKQQQLLKLQRERQQLAAAAAWSARQGACAKPVGCVRGDALLGLNPAACLPPQKPQQHHHHAPAAPASGMRAVFLTPSGPKRERNGTGVFLPRPAGAPAEPKKKTGCSTVLVPARVVQALNLNLDDLGAQPRYPGGFVLDHEALISRSNAMLASQKRRAASQALCHSS

SEQ ID NO: 68790 - protein, 141 aa, Zea mays
  Clone ID: UC-ZMFLMO17018C01_FLI.pep
LPPTHESQRASMATHRHCLPLLLVAAALALAAVPARAALGGGRGPLLGGWNPIPDVSDSHIQELGGWALGQAKHQKLAADGLRFRRVVRGEQQVVSGMNYRLYVDAADPAGRTVPYVAVVYEQVWTRTRQLASFNPVPRAP

SEQ ID NO: 68791 - protein, 235 aa, Zea mays
  Clone ID: UC-ZMFLB73066F01_FLI.pep
LGTYETATVDVIGDGFRARDITFENSAGAGAHQAVAFRSDSDRSVLENVEFRGHQDTLYAHTMRQFYRRCHIVGTVDFIFGNAAAVFEECVIKTVPRAEGAQKRARNVVAASGRIDPGQTTGFVFVNCTVDGNKGFVELFRRKPDSYRLYLGRPWKEYARTLYVSCYLGTVVRPEGWLPWRGDFALSTLYYGEFDSRGPGANHTARVEWSSQTPEQYVKHFSTENFIQGHQWIAY

SEQ ID NO: 68792 - protein, 653 aa, Zea mays; identical to SEQ ID NO: 43648
  Clone ID: UC-ZMFLB73274D05_FLI.pep

SEQ ID NO: 68793 - protein, 435 aa, Zea mays
  Clone ID: UC-ZMFLMO17092F08_FLI.pep
ICQVRLFLSEDSPSQAGLRPQDNLQAKGSWLMHAAGPSSDDSLPPGFESLQPTSDLKIDMSQIALIRWRCPPQILYNPDWCVAAGEESEEVALQNERMFGALEAIYPRPSNIPPNPLVTPDVKDSQYDDSRTQLVPLLPVEEDDASDQFEEPPVGLPSSYHHSDKYDDAISRVPQASDALFTTAQQQPNGSINTTRSGVPAEADVVAAASAAYTAIMQSNQMGNMIDQDLLIKILSDPAQIQRLMKEYGALKHEQSTNSSVASMVQGSPPQMTASVPVSVPDRSNAFHNINPKLPPPPVPNRLPPASVTMNAPASSSQAISFPSGPTRGLNYYQNLIHQHGGERQEPLQQHGMQFAMHHQPLASQASAADVVSSGAMPARDTKQRPTKPCAYFNSARGCRNGANCTFLHDVSAARKEQSKGSKRIKLDSRIAGRY

SEQ ID NO: 68794 - protein, 153 aa, Zea mays
  Clone ID: UC-ZMFLB73149E06_FLI.pep
AMSRLLLRHRSFLLPGARSDASHPFTAASSSSRSSYTSRFSPLAYHASAAATAAGAQSEGAAAESTPAAGDQPSSTPPPAARGRWGLLKFGALAAVAGAIGGVGYVTYAYSLNEVEEKTREFRKNPRLLIPEDASTFEKYKAMVYSTAMKGAN

SEQ ID NO: 68795 - protein, 526 aa, Zea mays
  Clone ID: UC-ZMFLB73175H01_FLI.pep
GNNNLKSEKVVKSYADIVKKNTFVEVGTRDVDVEHAGSGDESSGGFDELDCQYTPTEREDYALSDRVVQVQQQYPDKQAEVLSFDRVLQGRITFPGQQWHSDFYANTTQTEDNDAYSCEYAQEVKYAILDGSSNLPETLDSEVDKLSLGHSDLLVQLLDSESCTEAKLIDAVKQLSGRIEVMEKKQAWSNKEVKHLQGMNERLLKRIVELKGTVMTLNSKIDPLTLDDSLNQFVEQCLGSEDVIYLVGGFDGFSSLPSLDSFSPSLDILTPLKPMAVGKSYSSTVALEGKIFVLGGGDGACWFDTVDCYDRSRDDWSTCPSLTCDKGSLAGVSVNGRIYAFGGGDGTKCFSDVEMFDPVHGKWIKNQPMLEKRFALAGVALNGAIYAVGGFNGVQYLSCAERLDPREPNWKMLPKMSAGRGCHTLTVLNEKIFSIGGYDTRAKAMVSTVEVYEPRMPSWVMVEPMNYTRGYHSSAVLGGSIFTFGGVKGEADTILDVVEHYKEGCGWMTTGLKSIGRRCYCSAIVL

SEQ ID NO: 68796 - protein, 324 aa, Zea mays
  Clone ID: UC-ZMFLB73175H06_FLI.pep
ARLLDESDVSHVGSEDEGLEEDFVIIANQAEEEEEDEDGDMEEKQEWNGVFSDVEEEEFDFEEDEPKPRVRRLLDEQFDLLALEEYGDSDDDDMGVKGGEYELPNEAIDELKLFQNQNVCVDEEYRTPADFVRQKLDSSMADEVDESARVIKKCAEYAEIYLNETAEEEVVVLVSESSDESEVWDCETIVSTFSNLDNHPGTIETPGISRARFPRVFPGETTTTNGIIKLHGKEKLPVEYLPQRRRNGEKEKKVKPVEASVTDKFKKGAEKETKEEKKARKAAVKEEKREARKAKKELKGLYKSETQKAQKVAAVTGPSSIRLM

SEQ ID NO: 68797 - protein, 340 aa, Zea mays subsp. mexicana
  Clone ID: UC-ZMROTEOSINTE016F09_FLI.pep
ATALPWVPDTTAAVALRLLDLDASISYTLHPKLGSNKEQESGDFMKLPPRYPSMNKGKQEIEQFRPIGFDQQDGALLPNSNGRRGRGRGGRGGSRGGRSRGRGGRVPRGIGSSSRIQFRDDNSMLYGRAPRKNARGGRGRGRGRGRGLRTVRPRQPSELSARSIPKANLLGSFSMLSKTNHTGTTHSPESSGAEEWAFERREYVKDDENNLVSQSDESEENVEPMNEEYGGHISGYPRDNSESRPVQMMGDGSDDNDEDAEGDEGEEDGEDYEAEDPAGDEDDDVEMDGDDDVEVDEDDDIEMDGDDDIEDDDDDDGGDGAANGDEDGGGTSSYSSEYSE

SEQ ID NO: 68798 - protein, 255 aa, Zea mays
  Clone ID: UC-ZMFLMO17253F03_FLI.pep
VSKLVEVAIIDFHGDQELPGEKVYHINMTSNSGINPLVINLDQEGGGPNLRAIELAMLFAKTLRLGSNQQGKLLDAFKHCYFRRGISQESPQSWLKVPPNFSDLEALLEEMAEEDKEAEKLRLKLSTMFEYGIFNKTQPPYERLTRWNLAKLPPQLQAIAGDALASQLMSHHRLLGESTLRTVLFIDEAKELGHSKALDRIAADGRKYGLGLWVASQSSRHISKDVLTNTFTKLILPVDSSELPLTARTFRFSEE

SEQ ID NO: 68799 - protein, 264 aa, Zea mays
  Clone ID: UC-ZMFLMO17027E09_FLI.pep
LCLLPLITVHSHVAAVDSDDLPVDPAGGVGAQEPHHGRHVRRLGEPPHGALARGGGHALLRLARVEHGRGHGARRHGVDRDPRPAQLLGQHLCHGLHGRLAGSVRAVPGPQRPHVGGREGDDAARAAARQPPRRLPAAQERAARVHAEREVPLLGRRVRDPRVRRVLHPRRGHQHVQLRPERRLRRVEQPRHLRRVRHVRCHRHGARVAVACRRGVVEGRHELVRGGRVADEADHDAGAQGRQVRGHRRADAPGASCHDGHPAG

SEQ ID NO: 68800 - protein, 174 aa, Zea mays
  Clone ID: UC-ZMFLMO17198G12_FLI.pep
PLQHACGARGLQTSPPRHNHHTTSGKHGILQLIAEVGPAKQRHAMADALQRRVPPAMRQEAADSRVREHFLPRRPLHNLAPRMASQEIREHGRELDRLVSPLGLWLLMNYYIYYIYIHMKFPTEKIIIKMNRARTDLIFFASYTSTAFLTPPRSMFLGMRMSVSKCWISELMNG

SEQ ID NO: 68801 - protein, 446 aa, Zea mays
  Clone ID: UC-ZMFLMO17265H01_FLI.pep
IIGPMNILLELKHLKPFSIPARLVICKGLLIVIALILLRAIVSPFLAIDSSEKKEFYESTAPDLLPRIRRDKFLEVPQIIWGLNNQKIAFARACLTARFLNRSLLMPSLSASLFYKEVDLLQPINFDKVFDFNKFNARCHGFVRLAQYSEVSNRTEPFKLQKGTGRRWTADRDLDQLQQSIGSNADDSEVIEIVGKNPFLWPDHWPVKDYAKIFDCLVLVPEIETEVVNVISKIREAGQRARHEAGSSHSKQRRDSSTNPPVPYVAVHMRIEKDWMIHCKKWEQRSKSHEICSSKEEIIHKVSQITDLHRPVVVYLAVADSLLEDDSITSGWRVGMVAYEKKKLGVTDVYDRQPYLIKSAIDFEVCSRADVFVGNSFSTFSNLVVLSRTERLYNLGKASSCGENIGLSSYAYNVMGGDGGPQRWMTDMSDGSLQRLSYGTNNVSCH

SEQ ID NO: 68802 - protein, 971 aa, Zea mays
  Clone ID: UC-ZMROB73078F10_FLI.pep
LNTVLQIHFGVLGVDKDPCLDEWSKAMDVPTPPNRAGCNSNIGSPMQSFDDPFGVAAMTSFDGYSELCSPSVADHIFSLLNDPSAAQQMVAMWSSLGSSPRASAVREDMSFDTFPGPVDGTSSLAQRFNSAAASSPTGVDRGLKESDGLVLPSNGSQQGSSIIPRSVGNALADRMLMALSLFRKSLSDGVLAQVWMPVEHNGRVVLSTSEQPYLLDQDLAGYREVSRNFLFSVKEEPGLHLGLPGRVFISGVPEWTSSVIYYSKPEYLRMEHALLHEIQGSLAMPVYDPSKGSCCAVLELVTNKEKPNFDAEMDIVCDALQAVNLQTTTDRSNQKVYSENQKSAFTEILDVLRAICHAHMLPLALTWVPTSNGIANGFCVGKNIGIDPQPGKAALRIHESACYVNDAKMQGFLHACADRHLEKGQGIAGRALKSNLPFFSPDIREYSIEDYPLAHHARKFGLHAAVAIRLRSTYTSYDDYILEFFLPVNCKGCGEQQMLLNNLSSTMQRICKSLRTVSEAEIENVSATAAMFEKTSGTCLPTGNSESSSHDDQPITESALQDLSLGDKQGDREPDKPQRSSMRVADKKRSASEKNFSLDVLRKYFSGSLRDAAMSLGVCPTTLKRICRQHGISRWPSRKINKVNRSLKKIEKVIKSVHGVDRSLQYDPATGSLVPATSLPEKMPFSACDTLPTSSLGRAVEETCSPKSEQDFSSPDGWQRETSQFHVSGIPKRGGDEVRTLANNNKGRRNYVSGIANITQHSNSEGTHGPSYPNPIGAVNSLHTGETGNIDSLTSLHPSMDGIEGQTTVRNSPFVQQADVTMVDGHDTKEQTLPSTSGMTDSSSGSASSEPTFKGNPGRALKDRSSPALTVKATYNGDTVRFKFVPARGWYHLLEEIAKRFKLTAGAFQLKYKDDEDEWVILANDADLQECMDVLDSISSRNMKLQVRDLSCHVGSSGSSSSCLQVEAHSS

SEQ ID NO: 68803 - protein, 713 aa, Zea mays
  Clone ID: UC-ZMFLMO17164H10_FLI.pep
ITRSVSHHDPPAGPPLANQRLSLLLRLRALAGMDAAELPLVYHIGLVLAALWAAAAVGFRGSLLYLLAFLYLYMVNARCAVRLRKRIQHEEMKSAYQRRLLSDAESARWLNHAIDKMWPVCMEKIVSKLLRPIIPWFLDKFKPWTVSKASIQELYMGRNPPIFTSMRVLPETSDDDHLVLELGLNFLSAEDMSAVLAMQLHKSVGLGMTAKMHLTSMHVEGKILVGVKFVRSWPFLGRVRLCFVEPPYFQMAVKPLINHGLDVTEFPGISGWLDKLMDTAFGQTLVEPNMIVINVEKFASTPSENNWFSIEERPPIAYVKLEILEGTDMKPSDINGLADPYVKGHLGPFKFQTQIQRKTLSPKWFEEFKIPITSWEATNELIMEVRDKDPMFDDSLGQCTISLHDLRGGQRHDKWISLNNVKKGRIHLAVTIDDISEDQNTSSLDQSLKQADTELPVSTSVCSEVDASEPPEEKKVLMDEVEHINIDGQEQPGGLYVHRPGTGVPRTWESRKGRARNPDTQIHQEVDKQKEVPTPKGSGQGGLFNVGSFFRWNSRKGSSRNLDASPPATPGSQSVTELDPKLPQTPRPNLKELGEKRTSIKIVVDEEASPADKVGGAENSGEDVAKVIEKNAGEPGRSLTSTLSRKICRRRADDRLSDIPEKIEARGSKPVSEGPILVRGEPMITVDHPTTEHSDGGGTEQDAVGAKVATQTS

SEQ ID NO: 68804 - protein, 223 aa, Zea mays
  Clone ID: UC-ZMFLMO17193G07_FLI.pep
VDHNRNMVFDRTRDNCQILTKEVPNLKLTGPSRAVLLVDPVTIEADLKVKGRTESEDKHLSFLAVPFLITIPLESCLRTRDFTSKLSTLRFGLAIVVLSVEATISVRVRGGSWPDGLRAQFAAHTVSIGREEVVLLDSGDDKLPVSDDGTITLGRRVASVEVSGELNVSVKAWQGGEVFTHRERGFKPKEAGWSYGTLDVGFCQMDVSVAWSLLSSYGENEAL

SEQ ID NO: 68805 - protein, 499 aa, Zea mays
  Clone ID: UC-ZMFLMO17199E09_FLI.pep
LNSAVTTMTPASFAHHHQQQSPPAAQQHFVGIPLQVQAPPQSGYNLWTPAMAGGAADMSPQGQAQTPGAAGAAGVSAVLSLSSREAPPVTVAAVAACTDEGKYLGVSATPQGQMVMSSKYLKAAQELLDEVVSVSKGVEDAKTAAAAATKSLAAVKKKEDSEGASGGGTDDGAGAKSGGGAAPEMSTAERQEMQMKKSKLLNMLDEVEQRYRQYHGQMQAVSSSFEAAAGAGSARTYTALALRTISRQFRCLRDAIASQVRAASRALGEDADAAVAGGRTVGSRLRYIDHQLRQQRALQQLGMMQGGAWRPQRGLPERSVSILRAWLFEHFLHPYPKDSDKIMLAKQTGLTRSQVSNWFINARVRLWKPMVEEMYLEETKDQDAGGGGNDEGKSGGGGSKSSDTVDGVMPRADVMSKSAVRMGGGGAGAESASTNKGIHGSSLLELGGGDHQQSHAGFYDDDEDDGDDVMGRRLKKARGNEPAPAFHHVHDIATLHAQA

SEQ ID NO: 68806 - protein, 575 aa, Zea mays
  Clone ID: UC-ZMFLMO17202G01_FLI.pep
SDTPHLQLNKMASNGNGNLKSDIQQVESTASDNVQGATGVNTLATQGVSRHEKPWSGFRDFWNRLGTGPKLKKLGPSTSFKFQQIALQRDEFSRSIHSDNHVSHEHFQFIRKINWEQLWVMARNWIKEPMNMALFVWIACVAVSGAILFLVMTGMLNRVLPSKSKRDTWFEVNNQILNALFTLMCLYQHPQRIYNFVLLCRWEQQDILRLRKIYCKNGTYKPNEWMHMMVVVILLNLNCFAQYALCGLNVGYRRSERPAIGVGLTISVAIGAAAFAGLYNIISPLGKDYDTEHADTDQEAQIHATSTESGRPTSRLQSFERRYSFIQSDERRFVERRPQWVGGLMDFWDQISIAYLSLFCSCCVFGWNMQRLGFGNMYVHIATFLLFCLAPFFIFVLAAGNVDNGSVQVALVLTGLFLCFFGLLYGGFWRIQMRKRFNLPENSFCCHNPDASDCFHWLFCCSCSLAQEVRTADYYDITEDRSHAGQVVGESHHIMSPLQREDGLPLFKSSPSSPYRSGNASPSIFILESPSPSAPRRSSGSSPQGGGSPTMGHRAMKAPVPSVLQRESGPDHAQG

SEQ ID NO: 68807 - protein, 251 aa, Zea mays
  Clone ID: UC-ZMFLMO17212F05_FLI.pep
RRTRRGGPGSTIWPASTTTASPRGRSAPAAAAGGGGRCSPARPRGRCCPAPATAGGACRRRPCPARRPPPRRARTSGSWRRPSGARRPARGSWRRRRCRRAGKKSAAASGRRTGHARSQSCCRRRRPRHCHRRMDWSTISRTDRGRGSSARRRCCSSTSISAAGSSPGSSISRNTPTAPDQESKTLHDALSVRWSRSRQQLSGDTECHERCNAVDGAESLSTQREGQPKPQRCTQTQLQARGEKQNGTSRT

SEQ ID NO: 68808 - protein, 436 aa, Zea mays
  Clone ID: UC-ZMFLMO17217F08_FLI.pep
SGSPQCARQPSSSGRFQIPAASSIYCSARHSGCPKNFAHPRFPPALVRALVWFPCQPGHSTSQPPRAARAGTRGLGFGCKFGNTMAGAAGESSGERQGTLERRMLRSRYHAVKNIISDERDEMSRADSDRFTAIIQQVDCLHELVQRPREQIADAEALLGITNTLVTSVRSHSSEGISPSDFITALLKKFGQQGNHDDESVSLRWGDLGLSVSHIFRPVPGCCTMLGPMNTEVKQRKVVAVGRKRTARPTENTCPEELAESSEEVKTDTDRNVLVMFDILRRKKSAKLENLVLNRLSFAQTVENVFALSFLVKDGRVEITVDDSGHIVRPRNAPAASAIASGEVSYSHFVFRFDFKDWKLMKEVVTEGEELLPHRTSQSNLCNEENDQPNLEARAQITPIRKLTRNRGLVLQDHVVEETPEENQASKRRRLFRNQD

SEQ ID NO: 68809 - protein, 425 aa, Zea mays
  Clone ID: UC-ZMFLMO17257H06_FLI.pep
AFPKLFLFSCSANQRKPFPDSGGDMVLEATMICIDNSEWMRNGDYAPSRFQAQADAVNLICGAKTQSNPENTVGVMTMAGKGVRVLVTPTSDLGKILACMHGLEVGAEANLAAAIQVAQLALKHRQNKRQQQRIIAFIGSPVKYDKKILETIGKKLKKNNVALDIVDFGESDDEKPEKLEALIAAVNSSDSSHIVHVPPGENALSDVLLSTPIFTGEEGGSGFAASAAAAVATGASGFEFGVDPNVDPELALALRLSMEEERARQEAIAKKAAEDTSNTENINASSSNSDSVMAEAELASNAAAGDKQEQPKDDDDLLQQALAMSMEGGASGSAAVTDSAMAEAGAVDPDLALALQMSVQDANMSSDADMSKVFEDRTFVSSILNSLPGVDPNDPSVKDLLASLHSQGEQEKKEDKSDKTEDEKN

SEQ ID NO: 68810 - protein, 292 aa, Zea mays
  Clone ID: UC-ZMFLMO17266B10_FLI.pep
STTTEAMFIISPNGKFKRNIKSWMRGALLGSGSFGMVYEGISDEGAFFAVKEVSLLDQGSNAQQSIVALEQEIALLSQFEHENIVQYYGTDKEESKLYIFIELVTQGSLSSLYQKYKLRESQVSAYTRQILNGLVYLHERNVVHRDIKCANILVHANGSVKLADFGLAKEMSKINMLRSCKGSVYWMAPEVINPKKMYGPSADIWSLGCTVLEMLTRQIPFPNVEWTNAFFMIGRGEQPTIPNYLSKEAQDFIGQCVRVDPESRPSASQLLEHPFVNRPLRASFESSSPPAI

SEQ ID NO: 68811 - protein, 421 aa, Zea mays
  Clone ID: UC-ZMFLMO17187C06_FLI.pep
SPKFPAPVLASWRRKMSFRSIVRDVRDSIGSLSRRSFEVTAAAAAGGLSGRTAAQHRRGRSQSTVHELRDTGVVVQQDESRWASLPPELLRDVVRRLEASESAWPNRKHVVSCAAVCRAWREMCREIVLSPEVCGKLTFPVSLKQPGPRDGMIQCFIKRDKSKSTYRLYLCLSTAVLMENGKFLLSAKRSRRTTCTQYIISMDADNISRSSSTYIGKLRSNFLGTKFVVSDTQPPPYRYSGAAPPPPRAAGRRASRRFDSRKVSPKVPTPAGAGGGSYSIAQVTYELNVLSTRGPRRMHCVMRSIPASAVEPGGTVPGQPERILPRALLEEQEEEEDSSSFRRTGTGTTSFSKSSASIMDRSVDFGGSSSSSFRDFSSARFSDIVDGGGGGDGEQDRERPLVLRNKAPRWHEQLQCWCLNL

SEQ ID NO: 68812 - protein, 152 aa, Zea mays
  Clone ID: UC-ZMFLMO17190D01_FLI.pep
PITDVVVEPRLAVAAAQLSLACHSASELSGLGARFRSGFLTRPLHAGRCGFCSSSSCCSSACTRSCGRWLWCLWRSRWCGGGTTMPVWSASTRDPTSMAFFRMDAADSVHPPPPPPPAATWSRAGSPTSTPSASPNEGISSGKLSRADRPRR

SEQ ID NO: 68813 - protein, 208 aa, Zea mays
  Clone ID: UC-ZMFLMO17203D12_FLI.pep
ASSRQPTAFEPDKNSWGWNWLERWMAVRPWESRFLGTYGTDGIFVVNETRQPDRSATKTPYRKPVKKHDSTLQSNMLNQKVFPSNSEGGGSSTNRSSGLVSTKSRLKVLPREGSEEASSHPSVIVRSTSNPKERISSINSKERTGDLDFQVHKRSSLPGIGPEAGKHLTKKGMVNRSLKATKDSQILGSRHHLASSIDPVPTRVELET

SEQ ID NO: 68814 - protein, 429 aa, Zea mays
  Clone ID: UC-ZMFLMO17210F12_FLI.pep
AKRLEGKASTSHRPTKSQSEATATDRRSKKRNETKMMMMMGERAHAPPWQRSPAASGVTDADDASPYALLAALQHYLPSNEVAAYDEDDEEAALAAATAAVDAYACDEFRMYEFKVRRCSRGRNHDWTACPYAHPGEKARRRDPRRYHYSGAACPDFRKGGCKRGDACEFAHGVFECWLHPSRYRTQPCKDGTGCRRRVCFFAHTPDQLRVPPPRQSSPRGAAAAASPLAESYDGSPLRRQAFESYLTKSGIVSSPPPTSTLVSPPRSPPSESPPMSPDAAAALRRGSWPGVGSPVNEVLASMRQLRLGGGSPRSAPSGGSFLGGGYPFGSPKSPAGLYSLPSTPTRPSPVTVTTASGATVLTVERLNLGLIGDEEPVMERVESGRALREKVFERLSKEAAVPSDTAASANVEGAAPAPDVGWVSDLIN

SEQ ID NO: 68815 - protein, 187 aa, Zea mays
  Clone ID: UC-ZMFLMO17217G09_FLI.pep
VFFWPLVWLLLSENSLFYLIKLIMSGDIDSTFKRLREWYPQVIKDEQSVICFLLRSQRFIEYIRAEQLEVAVKYGRANLASFFTHKAFEGLLKDSVALLAYEKPTESCLGYLMDSSQREFVADAVNAAVLSTNPTVKDPESCLYSCLEKLLKQLTVCSFERRAFNNYQGDAFLLHKEVQNYERSRRS

SEQ ID NO: 68816 - protein, 689 aa, Zea mays
  Clone ID: UC-ZMFLB73126C09_FLI.pep
FVNLLAMGMSAASHLCASSSLRALTVLFVLAAFVSDVEGRHRRHVCPPYFSCGGLSNISYPFRRQGDPSGCGVQSYELVCTDTDATIRIGSGTYKVLSINSTYSYFWVVDADLDIQSSCPLPRWDYPARWINRNSHRWRIEFSHYYLYSSFYTVSRWAIFVNCSQPIENNDICNNIYDDDVYGPVSCLSNSSFIYLLVTDNWDVISAGDLEPSCGYLAKTPLGGPGMTVPSNTSYPDVVKFMRNGFALGFPFSIRSYPTIRECLAENMRTFHKEPRNSTGIRQQILDILTFETLWFCVIEQLGSTNNGVKSVLIDIIQQIPYVLSSLKSAHVICRFVLMPLAVFVFLAYKYWKTQITIDAVEKFLRMQNMLVPMRYAYTNIIAITGHFRDKLGQGGYGTVYKGVLLPGEIHVAVKMLGNSNCNGEEFISEVATIGKIHHVNVVRLIGFCSEENIRALIYEFMPRGSLDKYIFSSEKTFSWDKLNEIALGIARGLNYLHHGCDMQIVHFDIKPHNILLDSNFVPKVADFGLAKLFPRDDSFVPLSAMRGTIGYIAPEMVSRSFGIISSKSDVYSFGMLLLEMTGGRRNADPHAGSSSQAYYPSLVYRQLSQGDANRISEGVDMHELEKKLCIIGLWCIQMKPQDRPTMSEVIEMLEAGVDGIQMPPRPYFCDEEGDSSYSTISELDTIEE

SEQ ID NO: 68817 - protein, 173 aa, Zea mays
  Clone ID: UC-ZMFLB73084C09_FLI.pep
NKGCTYHPGKSTWVNLTSQDTKRHDLANACVVVTGGRGLRSAENFKLLEQLAEKFGAAAGATRAAVEAGYVPNDLQSCRRRLQQLESQLMEANRIKEEGNTGSIRWKENILDQENELQNIKQENDDLQTKESAASEKIKELSSQLTNAKYGMINSNTKEIMRRGALKRTMNLL

SEQ ID NO: 68818 - protein, 387 aa, Zea mays
  Clone ID: UC-ZMFLB73083H03_FLI.pep
EEAGDGDSIQSLALGALDNSFLVGGAGIQVVKNFRHGLHGKGASVKISGGRGGSGSAYSTPKKALLMRGETNMLLMSPGEALHSNGVHHVDVETGKVVAEWRFEKDGADITMRDIANDSKGAQLEPSGSTFLGLDDNRLCRWDMRDARGRVQTIGSSSDSPVLNWSQGHQFSRGTNFQCFASTGDGSIVVGSVDGKIRLYSKSSMRMAKTAFPGLGSPITHVDVTYDGKWILGTTDTYLILICTIFKDKDGKEKTGFSGRMGNRIAAPRLLKLTPLDSVLAGTDNKFHGGQFSWVTENGKQEKHLVATVGKFSVIWNFQQVKDSNHECYRDQQGLKSCYCYKVVLKDESIVDSRFMHEKFATSDSPEAPLVVATPMKVSSFSIANRR

SEQ ID NO: 68819 - protein, 436 aa, Zea mays
  Clone ID: UC-ZMFLB73086H10_FLI.pep
SLSGHTAPTDDNSRQQLGQPATAAHSRLTTNRLVHLLDLGARAAAAGRGVLVHAASAAHVFTRALVHLGDDGVAEALQLLHLVLELVRLGELVGVQPADGRVDGVLDLLLVIGRQLGRNLLVLDRVAHVVGVVLQRVLGLHLLLVLLILRLVLLSVLNHLLDLLLGETALVVGDCDLVLLPRCLVLGRHVQDAVGVDVKAHGDLWHTTGCRGDAGELELAQQVVVACPGPLTLVDLDQDTGLVVRVGGEYLLLLGGDGGVPRDQHCHNSSSSLQTQGQRGDVQQKQVLHLLIALTAQDGSLDSSTIGDSLIGVDVLAQLLAVEEVLEQLLHPGDPSGATNKYNVMDGALVHLGIPQALLNRLHALPEQVHVELLKPGTGDGGVEVDALIQRVNLNRGLGSGRQSPLRPLTSGPQPPESPGVASDILLVLPLELLDE

SEQ ID NO: 68820 - protein, 336 aa, Zea mays
  Clone ID: UC-ZMFLB73073D04_FLI.pep
PNPKSIFHGAGDLATGETGRGVRAGARRHGAAVADVLRRELPQPAGHRAGRDGRRRAAGAADGGLHPPPLLPRLLRPGVRRVRAPRRLADADGGEERGAQRQLPARLRGHRLHQVPGGGRLPRHRLLRRHPRPRRARRRQPAERSDVGGAAGSPGHAHGEPVGGEQQPAVAVVERGGAGVGVRVQGAGLAGPGGAVGRAHDRRGAVRHLPFPRVQRHQHQRRVRGEAEADLPGAGRGQRRQPGAAGRHELRQVRQRLLPQPRGPVRPAPLRPGALRRRWRRRRLHHGAVRAQRRRLLAGLRHGRPQDGQHRPAHRLQRRDPRQLPEAQLDRRLRIP

SEQ ID NO: 68821 - protein, 211 aa, Zea mays
  Clone ID: UC-ZMFLB73273G02_FLI.pep
LITTMGKRKRSSCQRDNHNDSLASKIMRTRIPDLPEVVDAPMLPTKFLCLKHLTVRLSSGTTITQAFDYFSLVSFLDASPSLETFILNVSGKGMIHESISAHPQLRHTPEHHHGHLRSVKICGFSSEKSLFELTRYILENAVSLKFLTLDTFYGDRCGQGKCTSCLPTPDVFMDVSKAISGIKTYIENKVPSTVKLTVLEPCSRCHVRRVI

SEQ ID NO: 68822 - protein, 566 aa, Zea mays
  Clone ID: UC-ZMFLMO17018F09_FLI.pep
PSPTPATPPVPATPSPAALLRPRREAFEHGLLPIPKLIFPEGTLAQTLAQLKEKLAASAPDGRVRAAALAEALQIPQEQAALALATLAAVLPAEDPALGDGAVDGSAADIRDMLLFLYIQSYKRLVPRSAHKDSPVVADVWPSTSAFDGYLSALSPIQLVRSNSRRFMPSQADEEIHQLSYLQKHMANILTLLADSVEGDGDDSLVLTMETFEHLGFLVQFSEGTSLSQAATLFACSDPDMPDVPVPAAQVLDWMSQKIAFSLEYSAERSAAKESNQQTMSDLDVTMAEANTSHPRNSTPSANPAYYRNVTFVEGFSKTSVVKHASDVKGNSIKVLNCHDSVIYILAPLKYATVYGCSDATVVLGAVGKVVKVEHCERVHIIAAAKRICIANCRECIFYIGVNHQPLVLGDNHKLQVAPFNTCYPQLHEHMIQVAVDPSVNKWDQPFVLGVVDPHDSLSHPAGVSDVKAESATCLDPDLFTNFLIPSWFGDERQGTTNCNPFPLPEIYGTSQSKKRSALEDIQKMIRELQLDENRKRELATALHVQFKDWLYASGNIRQLYCLQSD

SEQ ID NO: 68823 - protein, 234 aa, Zea mays
  Clone ID: UC-ZMFLMO17242A02_FLI.pep
IIVAVATLPLVCLVHPAIGLGLLLLSHAFHAHSNLCSFLAASFRSITQKKDLYKSKMGDGSVLLSKSKSDGLQQLLPMDDSPTASKSFTDSQLELFDYRHGVMILHLLSTLMFVPSLVAWLQRIGMGQNFPWFIDSAICVGVILHGLFGSQPNVSCCIFFKLPGRRGREIGLSFLYLVGGYYSFVSSMALAPYRALYAMATIGYICFISRILERRNMVRGDINSRRTRKHSHRH

SEQ ID NO: 68824 - protein, 344 aa, Zea mays
  Clone ID: UC-ZMFLB73063A07_FLI.pep
FPSRHFFSPWLLPHAQQAKRREQGQPWRGTLPASPGERLGQGAFFPNATPAPSNARHLLWSELEQRARRHPWRGTSAPSPPAAMALFPVLQRPSSLPFSVHGEQELFPPMASSFPAHGATPLLSFFFHLTVLSWLPAAMAWTPFFFLAQQQAPPWQAPRQASPMAPAAGISSPSPWRPENSSRLPLLLPPASSSSTSLPWHFPLRAALSPLSSTSGRSHLAAAPCPFFFHPADSLYCPRRGRYFSHGRAGPLQRASPFPSAAQLLHGETPLFLQPRHLPLLPRCQRCARATCSANCPSGVLRSEQHVGMPAGCLLFCAAPSSSSFAPVRPRRLLLDFRIDVIFL

SEQ ID NO: 68825 - protein, 336 aa, Zea mays
  Clone ID: UC-ZMFLB73082C06_FLI.pep
LSADLIRVIIDTAGATTSIGEDIKFPPTSSLRSVCLKDLYSALCFVPLVASSPELRSLKILRCSGAWDLPLEVITARAPGLVELHLEKLQVGDRGLAALSACANLEVLFLVKTPECTDSGIISVAEKCHRLRKLHVDGWRTNRIGDFGLMAVARGCPNLQELVLIGVNPTVLSLRMLGEHCRTLERLALCGCETVGDAEIICLAERWAALKKLCIKGCPVSDRGMEALNGGCPSLVKVKLKRCRGVSYECIENLKVTRGGSFSISLDIVLEHDARSASENGAQENGQAQITALTDQMAGMDLPVNAAGAQSSTHTITRMRSVVSALRRRFGNPPPP

SEQ ID NO: 68826 - protein, 698 aa, Zea mays
  Clone ID: UC-ZMFLB73200B10_FLI.pep
KSPNPRDLSVSSDLPIRLLGFSFEKETLKKNSGRGEETMAAQVAAVVVPNGSPGAVPAVVSPGAVGVGLGVAQPLPTTSLYVGDLEGSVSDSQLYELFSQAGQVVSVRVCRDVTSRRSLGYAYVNFNNPLDAARALEVLNFAPLNNKPIRVMYSNRDPSSRRSGSANIFIKNLDKMIDNKSLHETFSSFGTILSCKVAMDEGGQSKGFGFVQYEKEEAAQNAIKSLNGMLINDKPVFVGPFLRKQERDHSFDKTKFNNVFVKNLSESTTKEDLLKIFGEYGNITSAVVMIGMDGKSRCFGFINFENPDAASRAVQELNGKKINDKEWYVGRAQKKSEREMELKRRFEQILKDAADKYQGLNLYLKNLDDSIGDDQLRELFSNFGKITSCKVMRDQNGLSKGSGFVAFSTREEASQALTEMNGKMISGKPLYVAFAQRKEDRKAMLQAQFSQMRPAVPMTPTLAPRLPMYPPMAPQQLFYGQAPPAMIPPQPGFGFQQQLVPGMRPGGPHMPNYFVPVVQHQQGQQGPRPGIRRGAGAQGQQPVPPFQQQIVPRGRMYRYPTGRNMPEAPAMPGVAGGMMQAYDMGGFPVRDAALSPAAQIGTLTSALANANPEQQRTILGENLYPLVEQLEPNQAAKVTGMLLEMDQTEVLHLLESPDALKSKVAEAMDVLHNVAHQQNANTPTSQLAALSLTEGIIS

SEQ ID NO: 68827 - protein, 300 aa, Zea mays
  Clone ID: UC-ZMFLB73196E06_FLI.pep
QPTPRFPVVPAMGNTSFCPPAAMLPMYPPSPQGQFSNPANQDALGLLPCFPDASPAMLRHFSPYPVSYVPRSPLPVTVHNVHERRHDHTETVELPDAVVFSQCTTLDSFRTSECGGPPLKVQEPTKNRKEGCIGSPEKELDTLAVSSSTAQASSQKLEANEGKQTVQAGLKQTHEQQLMSSSSCVSSSVVAQSSHYASSIQHDESIHRRNPPHTSSPALPDVWSSRSQALPRFGSPSWVFQQRPWLAAPVTVRTAVPVCSARPNVVNSTTGIRPAAQSHDGERDLNSAAAASSGFNKLQI

SEQ ID NO: 68828 - protein, 354 aa, Zea mays
  Clone ID: UC-ZMFLMO17223F12_FLI.pep
DTPSVPESYTTVTESKFQVPVEVLFNLLLSDGAFGFLDDFHKNCGDKEFSCSKWRTDEQGGLVRDVSFLHPIKIYLGAKFGTCQEVQKLRLYKNRRLVIQTSQSIGDAPYGDHFTVEGIWDVEQDSLDENCCYLRIYINVAFSKKTIFRGKIEQSTKDECREVFSLWIKLGHDLLKQECDRSKGTSSTTDSGAQSGAITNEENTGEVAVPMVSISQDVSGARSLIPPFQDPQQRTGRDSSIGSTSQELWGSLTSHMRSSQLGPVLAVALVAIIVLLQVTIIVLLTRSPQVQMAPHGISTGSFGYSKESMEWAQKRLSLLREEMQVAEAHMERMRHEFAWLRSYLEGLERLRRRT

SEQ ID NO: 68829 - protein, 238 aa, Zea mays
  Clone ID: UC-ZMFLMO17226F06_FLI.pep
VSLSGAILYVPLFLSMLFLLPIYGITFCFIFCINYSLDVYNCQILFSNTMGKNIWLILSLCTTMITACSQEQMQEMASNAMVTQNRTPDKTWRVKPGSVHDGDTFRAVADVTNEEIKVRIACIDAPEIKQAGGIESRDYLRGMLTDNREIILMGAEKDQYGRSVVEVFAMTDTPGLEVGVNGEMVLAGMAHYYEGHKRSCPENAEQYEFLEQEAISNKAGVWANGDAERPWDWRRRNK

SEQ ID NO: 68830 - protein, 178 aa, Zea mays
  Clone ID: UC-ZMFLMO17202B07_FLI.pep
HYGLQSVEINELKQKVSELMEIKAQLEDRNQKLLEESTYAKGLASAAGVELKALSEEVTKLMNQNEKLATELSSLRSPTPAPRRFNNGPRGTRRESMSRREPASRRDTNASHEREKALEALLMEKEQKEAELQRKVEESKQKEAFLESELANMWVLVAKLKKSQGYDHEDLEAKHDGS

SEQ ID NO: 68831 - protein, 217 aa, Zea mays
  Clone ID: UC-ZMFLMO17231F11_FLI.pep
SRATTASHGLKIHFLEGNAPTGDKFFFEHPFTFDQKVNLFFQKPDSKTKSNLDYIEQTLLPMLQQTPQEITNLLRGLNGEYIASGPAGAPSRGRPDVLPTGRNFYAVDIRAIPTETAWDIGRRAAETLIERYTQDHGEYPQTLAISIWGTSTMRTGGDDIAQVLALLGVQPVWDSPSRRIVDFEILPTTVLKRPRVDVTIRISGFFRDSFPNLVEFL

SEQ ID NO: 68832 - protein, 228 aa, Zea mays
  Clone ID: UC-ZMFLMO17241C04_FLI.pep
RIGDHPSISVQEKKCRGQEQINVPHPPLISEQFPVCTTRGVPIICVGTINPPSGKKHTPVDRIGHVVNSGGASAEPGLLISATRWFRTSRSRQTPARTAVAAAPPPLPLRSRALRRRGSASLASPCPPPAAASAAPAAAHAGRPRPAATTAAPSSRRSRRPWRRGRPATRSGSRRPAPCPWRSRNGRKVALVTSSARRFCCCCCCCNRDAWAACAFALVNQVVDWWFD

SEQ ID NO: 68833 - protein, 269 aa, Zea mays
  Clone ID: UC-ZMFLB73119C10_FLI.pep
SPASPGSPMTTSGAPKRPSFKRSSPGKKSRLRNRRVAAGGREGEAEAAGTSALARALLPASVALDAVPPVGRALPRHFFEVDALDLAPRLLGKLLRRDEVVLRITEVEAYRPNDSACHGRFGITARTAPVFGPGGHAYVYLCYGLHMMLNVVADIEGVGAAVLIRSCSPVSGLETIQRRRGQQTEKPILLTGPGKVGQALGLSTDWSNHPLYAPGGLEVLDGPEPESVLVGPRVGIEYASPEHVAAPWRFAIAGTPWISAPKNTLRPRY

SEQ ID NO: 68834 - protein, 491 aa, Glycine max
  Clone ID: 700833022_FLI.pep
LPKHNNVSWRGNSGMQDGKSSDHSAAIKDLVGGYYDAGDAIKFNFPASFSITMLSWSVIEYSAKYEAAGELDHVKEIIKWGTDYFLKSFNSTADTITTLAAQVGLGDTSGGDSPNDHYCWMRPEDMDYDRPVTECHSCSDLAAEMAAALASASIVFKDNKAYSKKLVHGATTLFKFSRDQRGRYSAGSSEASIFYNSTSYWDEYVWGGAWMYFATGNSSYLKLATAPGLAKHAGAFWGGPDYGVLSWDNKLAGAQVLLSRLRLFLSPGYPYEEILKTFHNQTSIIMCSYLPVFTSFNRTKGGLIQLNHGRPQPLQYVVNAAFLAALYSDYLDAADTPGWYCGPNFFSTDVLRNFAKTQIDYILGNNPRKMSYVVGFGNHYPKHVHHRGASIPKNKIKYSCKGGWKWRDTSKPNPNTIVGAMVAGPDKHDGFHDVRTNYNYTEPTLAGNAGLVAALVALSGDKSTSIDKNTIFSAVPPMFPTPPPPPAPWKP

SEQ ID NO: 68835 - protein, 293 aa, Zea mays
  Clone ID: UC-ZMFLMO17318G02_FLI.pep
KLKITSHIAAVGADDLAVDPLGGVGAQEADHRRDVTGLAEPLHRVCLHGVSHHGLALALEEHVRGRCPRRDAVGRDAGAPELLGHRPHQRLHRRLGRRVGPEPRREAPHHGRRHGDDAPAAAAAEAVGRLPEAQERAAQVHGEHAVEGLGGGGGHGGVRVVQHPGAGHQDVRAAEGLVRRVEERPSAGLVRDVRPHGHRARERRRQRARLVGARRVAQHQARAEGGQVRGDGAADAPRRARHDRHAPRQRLGAAAARRSRRGLGGGGDVTGVRHRTASGCCGFLGPLARAGAS

SEQ ID NO: 68836 - protein, 371 aa, Zea mays; identical to SEQ ID NO: 68140
  Clone ID: UC-ZMFLB73238F07_FLI.pep

SEQ ID NO: 68837 - protein, 411 aa, Zea mays
  Clone ID: UC-ZMFLB73022G03_FLI.pep
EAVGCFSNLNNSKIDHAKPLVISHNGASGDYPDCTDQAYEKAVADGADVIDCPVQVTKDGILICMSSVDLMDVTTVGKSSFTSQVTTINDLKAGPGVFTFNLTWDDISKNLQPMISNPMSTYKLYRNPRNKNAGNFMRLSDFLTFAKGKDLSGIMITVEHAAFMAEKLGFGVVDAVVKALDDSGYSKQTAQNVMIQSTNSSVLKKFKQETKYSLVYMIEEGVRDAAPSSLADIKKFANAVSVSTTSVLPQTHYYLTNQTNKLVTSLQSAGLQVYVYVLMNEFASQPNDFFADATSQINAYVQGAKVDGIITDFPGTAHRYKLNSCTSMGNSAPLFMQPPQPGSLLLTMAPDVQPPAAAPMPLLTDADVAEPALPPVSNTTTAASPSHAALRMRTDVSILIALLMLCASLLI

SEQ ID NO: 68838 - protein, 344 aa, Zea mays; identical to SEQ ID NO: 52656
  Clone ID: UC-ZMFLMO17331E08_FLI.pep

SEQ ID NO: 68839 - protein, 440 aa, Zea mays
  Clone ID: UC-ZMFLMO17339C08_FLI.pep
SIVSYGERSEEEARRMYAEWMAAHGRTYNAVGEEERRFEVFRDNLRYVDAHNAAADAGVHSFRLGLNRFADLTNDEYRATYLGVRSRPQRERRLGDRYLAGDNEDLPESVDWRAKGAVAEIKDQGSCGSCWAFSTIAAVEGINQIVTGDMISLSEQELVDCDTSYNQGCNGGLMDYAFEFIINNGGIDTEEDYPYKGTDGRCDVNRKNAKVVTIDSYEDVPANSEKSLQKAVANQPISVAIEAGGRAFQLYNSGIFTGTCGTALDHGVTAVGYGTENGKDYWIVKNSWGSSWGESGYVRMERNIKASSGKCGIAVEPSYPLKKGANPPNPGPTPPSPTPPPTVCDNYYSCPDSTTCCCIYEYGKYCFAWGCCPLEGATCCDDHYSCCPHDYPVCNVKQGTCLMGKDSPLSLSVKATKRTLAKPHWAFSGNTAADGMKSSA

SEQ ID NO: 68840 - protein, 178 aa, Zea mays; identical to SEQ ID NO: 57698
  Clone ID: UC-ZMFLMO17340H04_FLI.pep

SEQ ID NO: 68841 - protein, 295 aa, Zea mays
  Clone ID: UC-ZMFLMO17360A09_FLI.pep
MKKSGIWSIQNREIVDWKDLHEMITAACYTPDGQSALIGSHKGSCHIYDTSDNMLLQKKQIDLQNKKKKSSQKKITGFQFLPGSTSKVLITSADSRIRVVDGLNLVHKYKGFRNTNSQISASLAANGSYVISASEDSHVYIWRIDDNLEQGRSKGNVTVTNSYEYFHCQDVTVAVALPSNGSPVVSRANSAKHDERDSVSEHSALHAAPEKPQDSSDFQPQSGYTISTGSNDSGDRATWPEELMTPTKQSPRSSASLPSGADQAPGRSAWGTVIVTAGRGGQIRTFQNFGFPARV

SEQ ID NO: 68842 - protein, 318 aa, Zea mays
  Clone ID: UC-ZMFLMO17399B08_FLI.pep
EFWGRFQLPDDIEEDQAQWTRVKRHFRKCADKIIKDAMYNARIAAVNYYYKKIKGQKMSKALGANEIYLTEEQYLESVVDWLSKDMEAWRWLAKRWASPEWIAESNKHRANRGTEGPGHRYGADGHLGTARRMEAESGVAPSFMEVYVRGHRGPDPANPDVLCSEAAREKMNAYGEEMTQRHGPDFDWMHSDLDASALYHSGGGRKHGRFAFGTGVVEYNRTIGQGKASSSGGSSRSSRSAREAQLEEETRAAQEQARAAQEQARAAQEQVGQLTQYMTSYFQEMTTRLGPDMNLPAFRPPQAQEWGQWPGQAPASQP

SEQ ID NO: 68843 - protein, 298 aa, Zea mays
  Clone ID: UC-ZMFLMO17426A07_FLI.pep
QLMKMKKISVWNYDDAQPVNSFHNHKLSDRGLSKLLLINELDECLLLAASSDGNVRIWKNFACKGGQKLVTAFSSVQGHRAAGRSIVIDWQQQSCYLYASGDMSSILVWDLDKEQLLNTIPSSADSAISALSASQVRSGYFAAGFADGSVRIYDVCSPDRPVYVARPHAPRTEKVVGIGFQPGFDPYEIVSASQAGDIQFLDVRMAAEPYLTIEAHRGSLTALAVHRHAPVVASSAKQMIKVFSLEGEQLRIIRYLPSFMGQRTGSVNCLSFHPYKSLLAAGAGHNALVSIYAEENYK

SEQ ID NO: 68844 - protein, 254 aa, Glycine max
  Clone ID: 700554233_FLI.pep
LYTLNSTVLNSHVFFLPEFQLPDGCQVKVLRSMRPLRLEDVVIGQYKSHTRGGVTYPAYVDDKTVPSGSLTPTFAAAALFIDNARWDGVPFLMKAGKALHNKRAEIRVQFRHVPGNLYNRNFGTDLDRATNELVIRVQPDEAIYLKINNKVPGLGMKLDRSNLNLHYAARYSKEIPDAYERLLLDAIEGERRLFIRSDELDAAWSLFTPVLKELEEKKIIPEYYPYGSRGPVGAHYLAARHNVRWGDLGTDVDH

SEQ ID NO: 68845 - protein, 428 aa, Glycine max
  Clone ID: 700559642_FLI.pep
HTHCGYRNLIAASRRMGSLGAILKHPDDFYPLLKLKMAARNAEKQIPPEPHWAFCYTMLHKVSRSFALVIQQLGTELRNAVCIFYLVLRALDTVEDDTSIETDVKVPILIAFHRHIYDRDWHFSCGTKEYKVLMDQFHHVSTAFLELGKNYQEAIEDITKRMGAGMAKFICKEVETIDDYDEYCHYVAGLVGLGLSKLFHASGSEDLAPDDLSNSMGLFLQKTNIIRDYLEDINEIPKSRMFWPRQIWSEYVNKLEDLKYEENSVKAVQCLNDMVTNALMHAEDCLKYMAALRDPPIFRFCAIPQIMAIGTLALCYNNIEVFRGVVKMRRGLTAKVIDRTKTMADVYGAFFDFASMLEPKVDKNDPNATKTLSRLEAIQKTCRESGLLSKRKSYIVNDESGYGSTMIVILVIMVSIIFAYLSANHHNS

SEQ ID NO: 68846 - protein, 97 aa, Zea mays
  Clone ID: UC-ZMFLB73273G10_FLI.pep
KKNCSRIDSHIYKQKLQSKWLNPKRIIIQKNLEYRRQEAEPRAKHICPGTKRKQISHLWHIGPQLFSASELASIRIDLVKSIQNQHKHIIDRTTKQA

SEQ ID NO: 68847 - protein, 548 aa, Zea mays
  Clone ID: UC-ZMFLB73119B07_FLI.pep
INVCGEGGEYETLTLDCPLFRNARIILDDSEVILHSADSIASVGILHPRAFHLEQKPDSSDRIGDGSAVQESSSCVYEVDEVTTHDDVGEKQALSPAVDAYTNVDLCISKTGNNLRSMSCWIQDPSRASEGLKADLIAVLSRIENQLKEEGLGWVNVLYVHLYISSMKEFGLANEVYVSLITEKKCYLGVPSRSTIELPLVQAGLGKAYVEVLVSNEVVKRVLHVQSISCWAPSCIGPYSQATLYEDILYMAGQLGLDPPTMKLCLGGPRAELELALQNSEAVANAFSCSIYISAIHFLVYCSAQLTSSEKEEIEQTLKSSYITRLDRSKGGSYPTVLYVFASDLPKGARVEVKPILYVPSTDDWVAAEETETGVPLPAPSKTWTDCTAPYSALRDSCCQVHTTGGRICSAVVSITDDIASKICSAAGQLHHGEENLKIMARFCAFQIAKTLADNRFSWDSVTMLRLYYSVDLAVAADAVSGAFSEALAELAQDNPSMRTDVPFYNVVPVAGAGRSACANDIMACELLASNVSSAKSIPAEPFAVTPA

SEQ ID NO: 68848 - protein, 371 aa, Zea mays
  Clone ID: UC-ZMFLB73192F01_FLI.pep
RKWSKSSSGRLSAQICRLDQISIRFFIHLKHIGTNGGKQLHTCTADDKISPSKRPRNLLMENSAFGTNSELSRLQFCVDIEILEKEYILTEAQYMLSTLKSSFDFSESQSIESLMDILINEKLYDIAFTIVLKFWKESEIKKQLDRVFSVIAQQCCSNRSDNKSSKQVPLLPSSENDAWEINNRSIAVTQQLQGSNHWETLELYLDKYKDLHPRLPVIVAETLLYTDPEIELPLWLVQMFKANKAGNKISWGMSGKEADPAALFRLYINYGRHAEATNLLVEYLESFASSRPVDVLHRKKMSAVWFPYTAVERLWCQLGEMQRAGHSVDQCDRLKKLLHGALMSHLQQVVVDSDDVLSSVGDGQGMEDQSS

SEQ ID NO: 68849 - protein, 218 aa, Zea mays
  Clone ID: UC-ZMFLMO17242G04_FLI.pep
SRPPVLDPSSLPRLPVPLPAMELGPSSDSCAAPGCFSPACRGCAVPVCAAHCSASIPLCSPWSSLLPGVSCRTRCIPARSSLCTAQIQPSRAEFGLCLSLCLSSVLPAMAHTLVASARARPARVPGRRVLSSLAPCVRFFSLSSPRCRTLKPSARCSRPLPCLRILLPARTLLSLTRVCSSSPSRRSSLPSSFSALPLVQHRLLLLVDVTLPSFDAAP

SEQ ID NO: 68850 - protein, 205 aa, Zea mays
  Clone ID: 700217944_FLI.pep
RRGEHYFEANYVLVYTLARQYLLEEALGHLKQPTAAGALLPAALLLPSHQLLGALHDVAEAEALRRLAAFLRGRRRHRRRLLGRLRRRWLGRRVVACCRRRLLLLGGVSRARAELLQVPLGLLDVLPGRLVVELTVRGRRVQELGRRAGDLLLVDVLHALPLEHRHGGPRHQLAAGEQVAAGAAVALGHWIGSDPSLLVPQIRSI

SEQ ID NO: 68851 - protein, 232 aa, Zea mays; identical to SEQ ID NO: 48242
  Clone ID: 700342626_FLI.pep

SEQ ID NO: 68852 - protein, 306 aa, Zea mays
  Clone ID: 700348175_FLI.pep
TERTGTNQHKTQQAAAAAGMGHRATDTGPHHHYHPTHTLFSPRHSQPAPDTSTRQSLLATYRATYETHTHTERDASNNRSVLNSKIPCHTAMYARERLPRHARTPIPWALAAAAACARPHSLAFSGSSGAATSSASAAGSWGPAGAGASGSSAASSSGAAASASATGSAAAGSSAPAGGAAAASSSAAASCSAAGVSSGPAGAAASASAAGSAAAGSSAPAGAAASGSAAACCSAAGSSSGSAGAAASASASASASAGADSSGTTAGGGVSTTGASSAATTVGVWTSAVAIGGDEKADGYTKEWRG

SEQ ID NO: 68853 - protein, 239 aa, Zea mays
  Clone ID: 701161012_FLI.pep
LSKIRLLERENWSWAYGKPEPFSLASLMFRSRSTLSTSRAIRSRSFTAASTSSASGTTRSLTPCAVSLAASQVLRAACFAMSPMACAVSATFPAPSLVISTTFSPYDAVPSTARSLASPALSMARPAASPVRSLAAFAAPCARSAASCPASLARSFTCPALSAASRAASRVSFFARSVARDAVSAASSATPFAWSLARSAMPDAWSATRPALSCALLFVSPAILLACSLASPVASFASS

SEQ ID NO: 68854 - protein, 110 aa, Zea mays
  Clone ID: LIB3245-148-G7_FLI.pep
EEGAAAAGGDQARAPRHGRLPRLRRAGRRHRQGAAQQLGHPPERPAPHYHLRHVRRVLLSPPLLRPVHRPERVLGLINYDLYEPGDGSTRRAWSRFVMSGRERMTRSILC

SEQ ID NO: 68855 - protein, 204 aa, Zea mays
  Clone ID: LIB143-002-C4_FLI.pep
TCRGGHDHGHNHHDHDHGLQRAHVHRVRYGHEKACVLRKQQRRRRHLQLALPPSPCGPRSGCSHNPGEMSRGSLQEDIHLEVGSHPAEGTHIVVGMRRVEEDTPLGEVGMLLVAVGSPAEGIPAGGTHGHRQRRASSLRRAPCRSRHACLSLLPLLPQVTERRADDANSGAQKKNRYAADLGGDVPVGGGCWFGRSPSARLAAI

SEQ ID NO: 68856 - protein, 60 aa, Zea mays
  Clone ID: LIB3059-054-C11_FLI.pep
FYFSKLRDIEILCQRPELEHLPMTKAVRKILYAADAKDSPLPEANDIITKSPSLFSNETE

SEQ ID NO: 68857 - protein, 167 aa, Zea mays
  Clone ID: LIB189-028-H2_FLI.pep
FPSAASTSAPSRVSASSHRGQRHSRAATVRCSSTSPNVSQGAPAPAPPKPQIELEFVGPKPGADGSFPVDRAEAASGEKLLRDVMNENKIELYAAYGKVMNCGGGGSCGTCIVEIIDGKELLNERTNTENRYLKKKPDSWRLACQTIVGNKENSGKVVVQRLPQWKR

SEQ ID NO: 68858 - protein, 197 aa, Zea mays
  Clone ID: LIB3062-002-C11_FLI.pep
GKSYWMQKLLHFMPCLRPTLPRDKELQNDNPPDWLPAPSHLGSPYASTLFEIMFGCLYVGVTTCMSGCKISHFNVINLHPPIRLKLSCLKLSYLADQDGGSLRIDAQPSNQADISFTICHIGLHSIRIYRTLVDELETPWILTIVRPLDHVTLNKQNLRVSEWCVPCYLETLQQLRIESAVELYMLKNVVFQLWLSF

SEQ ID NO: 68859 - protein, 521 aa, Zea mays
  Clone ID: LIB3066-012-D11_FLI.pep
STAAAFCSVRKMFLESFRVESPRVKYGDGEIQSEYRYDTTEVVPPGNGGGAGWVVRPKSVTYNFKTSTNVPKLGVMLVGWGGNNGTTLTAGVIANREGISWETKEKVHKANYFGSLTQASTIRVGSHNGEEVYAPFKSLVPMVDPNSIVFGGWDISKLNMADAMARAKVLDFHLQKQLRPYMESMLPLPGIFNPDFVAANQGARADNVIKGTKKEQVEQIKKDIKEFKEKNKVDKVVVLWTANTERYSNVVAGLNDTMDKLLASLDKNEAEISPSTLYAIACVLEGVPFVNGSPQNTFVPGLMELAIKKNSVIGGDDFKSGQTKMKSVLVDFLVGAGIKPTSIASYNHLGNNDGMNLSAPQVFRSKEISKSSVVDDMVASNPILYKPGEHPDHVIVIKYIPYVGDSKRAMDEYTSEIFMGGKNTIALHNTCEDSLLAAPIILDLVLLAELSTRIQLKAEGQDKFHSFHPVATILSYLSKAPLVPPGTPVVNALAKQRAMLENILRACIGLAPENNMMLEHK

SEQ ID NO: 68860 - protein, 434 aa, Zea mays
  Clone ID: LIB3066-031-H3_FLI.pep
RATTTTEPNRKEDRYQLTAAPAPHAAAAAAHPPPDRHASCASCGMLLRITYAQPTPSAAAQLRLPGPRLRRRRVAASAADGAGNSSSPLHCDPSPHAYLLVLGPDVEPSGSRSLSTSPITEKGKLRSWVGPSGQYYRELPCPSCRGRGYTPCKECGIDRSSLDCPMCNGKGIQTCLQCSGECVIWQESVDEQPWEKVRSSSPLKVKEDDEVDKLEININNPKRSKRTYASTSPEVAKKISRSLRSLNAQTGLFTKHMKIIHQDPELRAQRVAAIKRTKGSDVARKRASEIQKAFFSDPENRLKRSIAMKGVKFYCSKCGQEGHRSFYSPTVREGSTRVRFRCRLCGREGHNSRTCGKPKSEKEHKQRPHHCSRCGEKGHNRRNCPTCTDLGSDASGYVVNKVNGSNSAVYQCSICLEKGHNRRTCPKRKATLLK

SEQ ID NO: 68861 - protein, 146 aa, Zea mays
  Clone ID: LIB3066-032-A5_FLI.pep
FYCVCVCLTFSRCTFPFSSLSQTQSGFHRVTRTAPLIGRRKKAHKRRALDAVLVVATAAPLLPASPAVVYPYTDGAAGAPAEAVAARSPRQRVLMLAPLLAAFAVVFLLLLSRPCARDMRLFLASLCQQLVLSLLGFLAGLRLLSA

SEQ ID NO: 68862 - protein, 144 aa, Zea mays
  Clone ID: LIB3066-040-C10_FLI.pep
NRETSALRQADRRRTTAPTREKDGDDQEDPHRRAPRSRRLGHRSAGLHRGRRRRRPSRLRVVGVRRSPRWRRRRRRRHRHRRGALRQRRRARPRRRARRAPLLPPRLLPALSGRTDGRAHGIGMHGLLNIYACMDDVTCNAVPI

SEQ ID NO: 68863 - protein, 416 aa, Zea mays
  Clone ID: LIB3062-032-H2_FLI.pep
QTTPCLQAPATAMSALGTLSGGAAGVSGLIRLRRRVAPALAAPSHHAAGTLNCAALPDAAPLVWGRQLRPSLLLPATLLPSSSQGARRHTPRRPAAAAGEAKSVGFLEKYPALVTGFFFFMWYFLNVIFNILNKKIYNYFPYPYFVSLIHLVVGVVYCLISWSVGLPKRAPINGTLLKLLFPVALCHGIGHITSNVSFAAVAVSFAHTIKALEPFFSAAATQFILGQQVPFSLWLSLAPVVIGVSMASLTELSFNWTGFINAMISNISFTYRSIYSKKAMTDMDSTNVYAYISIIALIVCIPPAVIFEGPRLMQHGFSDAIAKVGLTKFVSDLFLVGLFYHLYNQIATNTLERVAPLTHAVGNVLKRVFVIGFSIVVFGNKISTQTGIGTSIAIAGVAMYSYIKAKIEEEKRKKSA

SEQ ID NO: 68864 - protein, 308 aa, Zea mays
  Clone ID: LIB3066-043-B7_FLI.pep
ATKYLAVPMDIDLFPDIDLDALLASFSGDPAAVSGLIIPSPPPPAPATAHDAEAGSPESVTSRTNPLGEVALSEIERLLMQEGEAELGGEVDGISVDQFFDALYDGEEAKGEREAGASADVDSGRDDVLEVVTPEAGTVEVDGDDPISKKKMRQMRNRDSAMKSRERKKSYIKDLETKSKHLEAECRRLSYALQCYAAENMALRQSLLKDRPLGAPTATQESAVLTETLPLVSLLWLVSIVCLFLMPVLPNRSPAAPSSGGRDLVMAAGKTSSETPEILELILHGRRCKSTRAKIKLCILPFHAGAAC

SEQ ID NO: 68865 - protein, 454 aa, Zea mays
  Clone ID: LIB3067-007-G2_FLI.pep
HRPSTPVSHSPISQRPSNRHAHAPMEDSATNGHGVVTAVPASWNFEPNETLLGLPALSVRGVLTRVMAGMLPDGGRAVVRLGSGDPTAFPCFRTAPEAVDAVASAVQSGQYNSYSTSVGLEPARRSIAQYLSCDLPYKLSPDDVYLTSGCTQAIEILCSALARPGANILLPRPGFMFYEARAIFNGMEARYFNLLPGNGWEVDIDGVQALADKNTVAMVIVNPGNPCGNVYSYEHLAKVAETARKLGIFVIADEVYAHLTFGERKFVPMGVFGAVAPVLTLGSISKRWMVPGWRLGWIVTNDPNGVFQRTKVVHSIKSYLDISSDPATFVQGAIPKLVENTKEEFFEKTIEILKRCVDICCEKLKGINAITCPSKPEGSMFVMVKLDLSCLEGIKDDMDFCCRLAKEELVVVLPGCAVGYKDWLRITFAIDPSSLEEGLDRLKSFCLRYRKPTK

SEQ ID NO: 68866 - protein, 110 aa, Zea mays
  Clone ID: LIB3088-033-D8_FLI.pep
VVMVCPVLLAIALKKVDLKSEEHGGAVPTTMLVVAAVTLVAGICPYLVCCLSKRFFNYNGSSSGSPHAATMLLAPLSSTCLVALACWIVHLILDSWAFPAVGALAEQSPT

SEQ ID NO: 68867 - protein, 352 aa, Zea mays
  Clone ID: LIB3137-027-B7_FLI.pep
DDVPPGPAAFSRREGWGTSAAAAAATTNSRKTMPRSRGNEPPLRTSQRAPLHLKTTACSEANGAHHRPVADRSSPRVSPRSPLPEKKRAAGTRVAELEGKLGKVQEELKKLREQLASAEAAKKDAQVALEEAKKRVGTKGSPASTTTTTPLSPPSPGVEIAKKTEELKLPQPAAEEESSINAPATDVFEVVRAESGDKENQSAAEDCEVVSCGGGKAALDVAENEETEEEETKKMIGEDSSAAVESDGADKENPDVVELKAKLAEKDTEIAALTAENAALKKQAEEAAEAAKKAEEGPASRAAKAEHELKEGAAREARVGEQLRASEAAREALDGELRRLRVQTEQWRKAAE

SEQ ID NO: 68868 - protein, 128 aa, Zea mays
  Clone ID: LIB3150-077-C3_FLI.pep
IGETLEQREAGTTMDVVAAQTKAIAEKISDWTNIVLAYEPVWAIGTGKVATPAQAQEVHDGLRKWLHSNVSPAVAELTRIIYGGSVNGANCKELAAQPDVDGFLVGGASLKPEFVDIIKSATVKSSSA

SEQ ID NO: 68869 - protein, 232 aa, Zea mays
  Clone ID: LIB3150-097-B6_FLI.pep
APIRSCASYHFDPMAPTSKLSTGIKRASRSHAYHRRGLWAIKAKNGGAFPKADKAAAAVEPKFYPADDVKPRVPSTRKPKPTKLRSSITPGTVLILLAGRFMGKRVVFLKQLKSGLLLVSGPFKINGVPIRRVNQTYVIATSTKVDISGVDVAKFDDKYFAREKKQKVKKTEGELFETEKEASKSLPDFKKDDQKAVDSALIKAIEAVPELKTYLGARFSLRDGDKPHEMVF

SEQ ID NO: 68870 - protein, 358 aa, Zea mays
  Clone ID: LIB148-051-G4_FLI.pep
DYRRLLAQLSSAGLFERVGPTPKVQLVLMAVLFYAALYLVLACASAWAHLLAGGLIGFVWIQSGWMGHDSGHHRITGHPVLDRVVQVLSGNCLTGLSIAWWKCNHNTHHIACNSLDHDPDLQHMPLFAVSPKLFGNIWSYFYQRTLAFDAASKFFISYQHWTFYPVMCIARINLLAQSALFVLTEKRVPQRLLEIAGVATFWAWYPLLVASLPNWWERVAFVLFSFTICGIQHVQFCLNHFSSDVYVGPPKGNDWFEKQTAGTLDILCSPWMDWFHGGLQFQIEHHLFPRLPRCHLRKVAPAVRDLCKKHGLTYSAATFWGANVLTWKTLRAAALQARTATSGGAPKNLVWEAVNTHG

SEQ ID NO: 68871 - protein, 237 aa, Zea mays
  Clone ID: LIB148-052-F6_FLI.pep
LTRTNQDWKITANDCKCSMDGWMDEPCVCVRVFYKLRIPYSAAWSWLRGCGSRRRRMFASLSADQVVPSGSDEGQATEPKPSGSLFRLSNLGRIVCLGRRDFAPVAQLTRRRSDPDGVIGVGGVGVGHDPVDGRRLLLAVVPEAGRAGHRRQRGGPLLRRLLGLRRHLAPSPPAPGRRLRRLLRRRRRRRQTRGGRLAVPPHPRPRPPPPPGPGPVGGRRRAPHCGCGQRGGGAGRR

SEQ ID NO: 68872 - protein, 211 aa, Zea mays
  Clone ID: LIB148-036-A6_FLI.pep
PPPVTADGELPFGHDAVTFSFLVACVAATVALASSMCSACDRKPKAATNADPAGTASSISGGSGSQEAGAEEAAVEEEVVRLSPELAMHGAIEPVALPSSTSRRRLSINVSKKLSLNIPDKLRLSRREHKDHHHHKVESEDTLWKKGIILGEKCRIPGEREAECADPDDDDIAAASFRRSSYSRPVSRSSSFAMHQPQHDAPGPALHASDT

SEQ ID NO: 68873 - protein, 432 aa, Zea mays
  Clone ID: LIB148-066-A5_FLI.pep
WPSTPSFPPSAQLYCRSSPLILVFFHLSNMKVNTKIKLEPVMAPSSSLPRSASELPDPPSPFSSNTAHHPVSVPTTPRLSLSCSSFGHMVTPPTDTPPITPTKKQDDKPKPTPEAATAANYASLWSPKRLMQRAARAFRRSRSRARVRTVKDLAEERASVLAASNKVSDEAAAATAVPPAGASAKTSSSNDARDGAMGSVQDEPRQQRHDDYHPEIVPEKIIHEDALPVVAAEKETAAAAAVSKEEEVESPKKGAALSPVPETIVIATAATSKEEEEEEVESPKKEAALSPAPEPIAAAAAATSKEEEEVVESPKQEAALSPAPAPEAIVAVAAVEDVVADKFVTVVKEAIKKQEAEEDEKEEAMRRFQGSRVRTALEARAESEQPRRREVARSNDVIEEARTKLLEKRRSKVKALVGAFETVIDTKKDSDD

SEQ ID NO: 68874 - protein, 252 aa, Zea mays; identical to SEQ ID NO: 46122
  Clone ID: LIB3067-008-G4_FLI.pep

SEQ ID NO: 68875 - protein, 125 aa, Zea mays
  Clone ID: UC-ZMFLB73067E04_FLI.pep
NSPGYGPLRSQPSPAMATATRRLLPALLRTLAPAGARGLSTEKAVGAAAVVGSHTAKWMQDTSKKSPMELINEVPPIKVDGRIAVCDGASEGVGLGHPIEYICLDLEAPNVCKYCGLRYVQVHHH

SEQ ID NO: 68876 - protein, 331 aa, Zea mays
  Clone ID: UC-ZMFLMO17322D02_FLI.pep
GFSDSRELGDGGFGTVYKGKLQDGRVVAVKRLYKNNYKRVEQFKNEVDILSRLLHQNLVILYGCTSRSSRDLMLVYEFIPNGTVADHLHGSRASERDLTWPLRVNIAIETAEALAYLHAVEIIHRDVKTNNILLDNSFHVKVADFGLSRLCPPEVTHVSTVPQGTPGYVDPVYHQCYKLTEKSDVYSFGVVLVELISSKPAVDMSRTHSDINLANMALNRIQNHEVDQLVDPELGYEADDGTKKSIDLVMELAFQCLQLERDSRPSMKEVVVALNCIKNGDSPENKMDRSSSSPKEDAHLLTNSIQYSPDSVIHRFHSQSTTHSAASNASG

SEQ ID NO: 68877 - protein, 479 aa, Zea mays
  Clone ID: UC-ZMFLMO17363G04_FLI.pep
KVQQPWNKGLVLLSNSGGVHASRSLDSGMVSSRRNSGIILREGSVRDWSEFNNPSPSPKLLYSQSYVAMRGLLASVISLDFFLLSSKLKSVCAAMTSQRHGRSQERSKSKGLTCRRVAVHLLFFFMVGIFIGFMPLFSVDVYKKIVSENERLPFHDGVIEAEMMGTKVKELETVVVEKEVELIDEPQVQESPPVPAMLDDEADFAESSPALPAIEESDIPVKKLLIIVTITSVRPQQAYYLNRLAHVLKAVQAPLLWLVVEWPEQSYETAEILRSSGVMYRHLICRKNTTSVRKIAVCQRNNAIYHVKRHHLDGIMHFADEERSYSADVFEEMQKIRRFGSWPVAIHVGTKYRAVLEGPICKGNRVMGWHTVQTVQKKSSTRRFPIGFSAFAFNSTMLWDPQRWNRPPMDSVMVHSGGRGGLQESRFIEKLVKNERQVEGLPDNCSRVMVWNFNLEPPRVNYPTGWALYKNLEPDMPVT

SEQ ID NO: 68878 - protein, 100 aa, Zea mays
  Clone ID: UC-ZMFLMO17321E06_FLI.pep
SSDPMAALQWTRKNQSLTRRWARKNQSLTRKNSNKTKEIKKRTAATMDPEEPVSHPPNHIILQTKSSDPMAALQNPATRMISGENSRQICFELRSPSLLT

SEQ ID NO: 68879 - protein, 405 aa, Zea mays
  Clone ID: UC-ZMFLMO17323E04_FLI.pep
DAAARRRPGARGVPRPRRRAPRGPERPRRCWGGGVHVHRVDPAPAGGVPALPGGVPGGGGRGAPPPRRGHSPRRREAGGRVRRPRRQGPRRLQRGARRRRPSAPLGAPRGHRGVRAAGARRRPDPRGPAPSRAEGALGPLRAPHRRRRSRRRHGARRRARLDPRVPPQPLLRPRAGVAVPRRLLLLVVLVALRALPLALVERVPHLVRGAPATGHRGRPGRAARQRGLLEPRRAGVRHGLPAPPRRLGARRRRPLPGPCRRAPGAPPAGRAAARRVPLGAAAPRAPGTPRRGGEAQGPPQFVRPAQGNPRAGEVRAEARGGHRCRAGPTHRRAGGRGAGGCSPTRRRLLRHEGRAGPAGETGPRGLPPHRAQPNGGSRFTDAQCRLSSINMIIIILPLDFPMWRC

SEQ ID NO: 68880 - protein, 354 aa, Zea mays
  Clone ID: UC-ZMFLMO17322B05_FLI.pep
AGLKGRFLFSVAGVGDDLYVVGGRSGGSDASKVKTHKGVLVFSPPTGSWRKAAPMRSPRSRPVLGVFEMSASCSILHTRVEKNVRRGKSRLGGASAVYEDPHRLSLRRLRIRDMLDEDTDSTERASYHHGRSAGHEEGKEGQPRLAIVAVGGRGRWDEPLVSGEIYDPVDDKWVEIAGFPTDVGLACSGVVCGRTFYVYCESDTLVAYHLDKGSWAVIQTLRSPPRLRDYAPTLVCCASRLFMLCVSWCDRHEPVSRREKVVRKLFELDLGSLQWTDASAHPDAPMDPHAAFAVGQDRIYAVEMFRIFGKVLDFVTACRVSDAEQKWSRVGRENAATEADSMSCRLKSMAVLHL

SEQ ID NO: 68881 - protein, 293 aa, Zea mays
  Clone ID: UC-ZMFLMO17365D08_FLI.pep
LELISWKTVTEIGDDKKILKKVLKEGEGYERPNEGAVVEVKIIGKLQDGAVFTKKGHDEEPFKFKTDEEEVIAGLDRAVLNMKKGEVALVTIPPEYAFGSTESKQDLAVVPPNSTVIYEVELISFVKDKESWDLNNEEKIEAAGKKKEEGNALFKSGKYARASKRYEKAAKYIEYDTSFSEDEKKQSKQLKISCNLNNAACKLKLKDYKEAAKLCTKVLELDSQNVKALYRRVQAYIQLADLELAEADIKKALEIDPDNRDVKLEYKILKEKIKEYNKKDAKFYSNMFAKMTK

SEQ ID NO: 68882 - protein, 244 aa, Zea mays
  Clone ID: 700094360_FLI.pep
LLMMASANCSDLIGGADRVGDTDEQLLWDCAAPSVPPTQIWDFNLGRSRHHDEKSALEVGYGSNHGGFMIKSYSDMLKEISSGTTKDLEDIYESRYCSTAEDIMSSNICQLSSKNVSTGSNKRKVRSCAASTMDGPTTSGNHNHVPASASGPGAALTREISFGDQTVSAPAAETERPAAVRIDSETLAQNRDSAMQRYREKKKNRRYEKHIRYESRKLRADTRKRVKGRFVKSTEALNAARYNG

SEQ ID NO: 68883 - protein, 191 aa, Zea mays
  Clone ID: 700089425_FLI.pep
LKNNMADISPNGRFIAAAAFTADVKVWEIVYSKDGSVKEVNKVMQLKGHKSAVTCLCFAPNSEQIITASKDGSIRVWNINVRYHLDEDPKTLRVMPIPLHDSKGSVCQYDHMTVSPDGKILAVTSGSTLQWLLVETGAVLDTADKAHEGDITGIAWAPRTIPNGGVHVFILATAGVDKKVKLWTAPDVGST

SEQ ID NO: 68884 - protein, 254 aa, Zea mays
  Clone ID: 700094182_FLI.pep
PTSLAARTGHVHATVTASYVPGYVRHTHTHTQRDASNRSVLNSKIPCHTAMYARERLPRHARTPIPWGLGPGRRRCVRTASLAGLLGLLRSSSLRLGGRLLGTSRSRSRSLRLVRGELLGSSSLCLGDRLGRGGLLGTSRRSSSSLLLGGCLLLDRRSLLGTSRSSSLRLGGRFGRDGLLGTSRSRGLRLGGCLLLGRGKLLGISRSSSLGLGLGLGGGRLLGHDGRRRGLHHGRFLGRHDGRGLDLGSGHWWR

SEQ ID NO: 68885 - protein, 107 aa, Zea mays
  Clone ID: 700155468_FLI.pep
QFPRSVFQFSALIIYTLAPFRMGFSTTLYQTSTSKLVIPFRLAILSDIIRHYGKNVVNYNLYKRMTCKGTVTLDLYLPRTALNQHGACSVYVYKKDNLTNMFYTTCI

SEQ ID NO: 68886 - protein, 174 aa, Zea mays
  Clone ID: 700154121_FLI.pep
DPGRVGPDGRRVLPVSAGLPGAAAGPVGAGPRGAHVPVPQPGAHQLGAPAHPRRGLRVGAARVHGPRRHRLRGARVRAPQRQPRRQPVRGHLAAGGAHGEVPEAHLRLLISNSSPQVISTSTRNTKKQETVGSRLQQYSLISHIVPAHFSVPACPLWAGRIPFVPNYLRAPAIV

SEQ ID NO: 68887 - protein, 174 aa, Zea mays
  Clone ID: 700161739_FLI.pep
TVGASARDATGTPRAHAETSISRPAVRRRSARTAHGLTRWPSRPPQRPARPSRAPQRPAQPPRAPQQQQQPRAQRLPVLLLSRQRALPLPPSPLQPPPAPAPAPPPLPSLPPLASLPPPPRGPPRAQRRQLARSPPGQLAPPPWPRRRGQPPRARRRAEPGSPPPALPRSPRRS

SEQ ID NO: 68888 - protein, 332 aa, Zea mays
  Clone ID: LIB3150-117-D12_FLI.pep
GRRARARARPPPAMVGVALAPAVSRVPCRPGASFHASRPSSSARLPARPRARARARAPPERLVVVARYSSSYEVEGEEEEEDEEGLGGGGGWGRRDRGPDPDYDPALDIERIESSTVRLLDEQKRMVGVVSVSEAVQIADDNDLILAILSMDGDPPVLRLFEERDYKKHRYEQQKKKKIQQKRSVAKRMGLKELKMGYNIDIHDYSVRLKAAKKFLKAGDKVKIIVNLKGRENLYKKEAIELLRRFQNDVGELATEESKNFAERNIYLVLVPNKIAIQKEQDELNKKGAVREEKDQSDSDEPEENDQPDSDVPLTELLEESMEPEAEVSANV

SEQ ID NO: 68889 - protein, 134 aa, Zea mays
  Clone ID: 700208735_FLI.pep
LVRSKRRRGSGSFQGKGEEGQERERERERERERALARSFTTTAPIDPQGRQDVQRAVGPGDVLLGARAEAPRGEGLPLRLHLHCAVLLLLLRDLRVLPRLPLLLLQLAGASSGGRSRRSRWRSPPSLLPTYQST

SEQ ID NO: 68890 - protein, 44 aa, Zea mays
  Clone ID: 700210455_FLI.pep
FTPFTFFSVASITLDTFLFYKVTNSSKKHILIFSIVAQNYICKV

SEQ ID NO: 68891 - protein, 142 aa, Zea mays
  Clone ID: 700213407_FLI.pep
IEKTININKNLVLTLQWHSCLISALSLPHRGLPLVAPSGIGGCQERLLPRPNQLAPHDHRDAEQDRDTKAITLVAMSTDLRRLRRSWPPAQSTPSAGLYPSAPPLGSRRLVEKYWPERRRHCPPRRRAPDHRCRSTPPRCER

SEQ ID NO: 68892 - protein, 252 aa, Zea mays
  Clone ID: 700217778_FLI.pep
RPTAIRAEAEVRPPLPVSAAESEPPDAGAVEAEGQGPVELRAPTLFSTDDNPTPLQTATSLLLTGAISVFLFRALRRRARRAKELRVRSSGLKKPNNLTEEALERLRLMSASPIETEKATSPIQALLGGIAAGVIALILYKFSTTVEAALNRQTISDSFSVRQITITIRTIVTGLCYLATSVFGINAVGLVLYSLQLTLQSIMDDDSSSSTGKISEQSNTLASSDSSTSSRESDSSDMQVTDKSKNSAEKQS

SEQ ID NO: 68893 - protein, 171 aa, Zea mays
  Clone ID: UC-ZMFLMO17010C02_FLI.pep
TKMTGMEYLLSEVMEPHLFVIRKQKRESPEKSSPMLAYYILDGSIYQAPQLCNVFASRISRAMHHISKAFTIACSKLEKIGNVETEPDAVASESKTQKEAIDLKELKRIDHILSSLKRKIGAAPPPPPYPEGYVPPSAEQEKAPDDVAASEAPPQLDPIIDQGPSKRPRFQ

SEQ ID NO: 68894 - protein, 112 aa, Zea mays
  Clone ID: 700240236_FLI.pep
LPLTHQELDHILHMYTEEAHLNKTKYMNSKKHSWKCSQVLFLLLLLRLLSRSSGLDSDSDSELDPELELSEPDSDPLESDSDDSGFCCCIIRRGMFFKYSLRLSVIPPRPMD

SEQ ID NO: 68895 - protein, 227 aa, Zea mays
  Clone ID: 700242465_FLI.pep
SSCWHSCWWLPSPWLESGTSSRWFSIPLIVCRSIFCMSCVLRPILRSFLLIWRSTRELLLHETLEIWRFSFPNFLDWLDTSFSFLFFFLFEKLNVLLDTFTSCLQLSQFLWCWSFLPLAIQPANPLDWNGGRVLVCALELHPAPLLHCAVDLLNAGEVAVAGLVDAHLRPRLEHAEQPRQQPLRHRSFRIFPAPASLEMVALSPICRLRLAGTGRHFRLRSRRPAAS

SEQ ID NO: 68896 - protein, 52 aa, Zea mays
  Clone ID: 700346164_FLI.pep
HQNTLGSSRQTNLNHFMIEKYREYTVEVFSSRGTAIVAKNGVTNKDSFGDWE

SEQ ID NO: 68897 - protein, 127 aa, Zea mays
  Clone ID: 700422623_FLI.pep
KPKKAAALPLPEMMQQEIIPPLKDALEAEDDVSQVQLAFQNNTLEGSFIKNDVPYYFWAFFPKGDLTGPKGFALSSYSNEVSTIEPFLIDEKRITAKYVVFWVYKRLAGQGILPVWKEEEGEEEAAK

SEQ ID NO: 68898 - protein, 152 aa, Zea mays
  Clone ID: 700214542_FLI.pep
ASSLRTVNVEFIYSINMFYHDEQFQIDRSSSQPKQIKSTTNYKPIIHHWWAGGTGWTGLKSLVLLAAAAEALQAVLAGLVAAEAAAEHEGAGIEEALLLVALLDVLHGRQLPVVVALWRRLIHRRCLFSLFPTETSEHCSVLTEDGWQLVIR

SEQ ID NO: 68899 - protein, 98 aa, Zea mays
  Clone ID: 700429803_FLI.pep
LRCGSWPWRWPRGWIQGRWFRRRCGWWLWRRQGWWFWRRCRWWLRRWRRFGWWHRWWTLEVAGARRAHVECVHAMKLKSDTWSVWYGMDIARVTLHHH

SEQ ID NO: 68900 - protein, 180 aa, Zea mays; identical to SEQ ID NO: 62945
  Clone ID: LIB3066-012-D3_FLI.pep

SEQ ID NO: 68901 - protein, 200 aa, Zea mays
  Clone ID: 700552868_FLI.pep
LRSLFFSDPDSNSPSLLRLAHPRRRGSLLLHRRGGLLLRRRGGLRRPTERTGPRTNGSPAPGRSSARGLPVVDGSPLPGALVYPRRRGLLLHWRRGLILRKHGGLPVLSRQADAAASSPGGWISSAPRAGAGRRAGLLQAGGSSPARRPTGRTDPVDLQLLRASAAPRPELRADGSAAQRLRCLCCSVSPADPCLCCSAS

SEQ ID NO: 68902 - protein, 241 aa, Zea mays
  Clone ID: 700582736_FLI.pep
RISEDESMADANIEHSMVMVDETVEAKVVPLEESTENNAATIGVVEETAEGETKEEAPDEKGKIENNEDADKLAGETRAGEITVEAPDEKTEIKADADTPAGETKECEITVEAPDEKIANKGIVEPIIREITEDQTAAGEPDEEATTTEETVEDVKVLDDKSTADGKPVENATVATNEDSTTVENTLKDAMVAPPGTNTTNAEETALGATVKALDEDALAVEKTIEDTSVEASDVQAGRCK

SEQ ID NO: 68903 - protein, 212 aa, Zea mays
  Clone ID: 700620774_FLI.pep
PRSTHLRSRSATAVFAGQLDRRTMASQQQTRKQQATKGHQETDQGQAMNLEEIGKYRAEAQQRSADAIRAAEDRFHKANNQQARGAGARGTVTVAQAPVATVVPYQESVKQAETESHGRGSHGSEAQQWLADAAADARERCNKALGTSPAAHATAGAAPHQQTKNEREGGQVHGHLTRQDEMGKHGSEAQKNSTAEAARAAVEKHDKGRETG

SEQ ID NO: 68904 - protein, 99 aa, Zea mays subsp. mexicana
  Clone ID: UC-ZMROTEOSINTE119D03_FLI.pep
AANITTPLTWLYSFIRKVIQYRHHFRQGKVVHSKTTHLLHFPSIYRHGQLDTDRSIAIERVLEKIESIIQIYFLLQSTAQRVQRRLIESVRSNEAVMIP

SEQ ID NO: 68905 - protein, 214 aa, Zea mays
  Clone ID: LIB148-049-F3_FLI.pep
RPSRRQGPQWRVGVLSRWIGHEPKLRLTGGWPGQARWPGGCGLLPRPRLGARRRLAAPSLGLGQARATPSPGSPARRSWWLRSGLLRHGQARVPPASSLSWWARPAPAAQEGAAAPACTAVVQPWRRGHAASAPRRASMAQYGRAARRLVCSAGQRPSAGVRPRPGAGRADGPHPACGSLWRGPAQSGLGQHERAAASTAQTRDTASVRDPAMA

SEQ ID NO: 68906 - protein, 79 aa, Zea mays
  Clone ID: 700196812_FLI.pep
VKCGKLGSEPNRPLQHQLTPVANSSAVPREDERVGAGGRPIELRANRRQKNQSKPHSPTRAPTRWVLLESVNCTHILWA

SEQ ID NO: 68907 - protein, 40 aa, Zea mays
  Clone ID: 700208431_FLI.pep
LSKIFSMEPLPEMELWSCSIPNWVWNQTLPYRKQINILER

SEQ ID NO: 68908 - protein, 240 aa, Zea mays
  Clone ID: UC-ZMFLMO17007E11_FLI.pep
PRRGLVPDPRGLPHRLLRRLHPAHRARLRPPRGARRAPRQRQPARPHPAAADRRRPRALRRRHGGRRAHGGPPPPRRARVLRVRLRRRRAHVRVLAHPAVLPRGGGRGVHVHRPARLLPARVPQGDEDHEHGAVPQHPVAGILRQLRARRRRAQGHGRPPPLDRQRPQQGPPRQLLLAARRRLPRQPTSLPRRRPLVQVQGGPPRRRRQRQRRRDGRRAHAPLIHPCSIDRRGTRRTTLN

SEQ ID NO: 68909 - protein, 301 aa, Zea mays
  Clone ID: UC-ZMFLMO17009F04_FLI.pep
RVGAPSAPAPVPTLPAMAGQPPPSGGSEDDFLEHFFAFPSAASAGAAGGHAGAGVGGDHPFPLALSLDAAAEAKPDRDPVQLAGLFPPVFAGAGGVHQPHLRGPPPPQMFQAQPKPGEGGMAPQPPAPRPKVRARRGQATDPHSIAERLRRERIAERMRALQELVPNTNKTDRAAMLDEILDYVKFLRLQVKVLSMSRLGGAGAVAQLVADIPLSVKGEAGDGGGAQQQQQHVWEKWSTDGTEKQVAKLMEEDIGAAMQFLQSKALCMMPVSLAMAIYDTQHPLDGHGHGHSLKPEPNASS

SEQ ID NO: 68910 - protein, 351 aa, Zea mays
  Clone ID: UC-ZMFLB73070G12_FLI.pep
TAEDHTHSPPVSAWVVVETYMHASLASYAAAAMPALDLRPEIAHAHQPVMSPSRHGWDGNGAAAVSSPMPKRLDGKVAIVTGGARGIGEAIVRLFVKHGARVVIADIDEAAGDALASALGARASFVRCDVSVEEDVRRAVDFALSRHGGRLDAYCSNAGVLGRQTRAARSVLSLDAGEFDRVLRVNALGAALGMKHAALAMAPRRAGSIVSVASVAGVLGGLGPHAYTASKHAVVGLTKNAACELGAHGVRVNCVSPFGVATPMLINAWRQGHHGAGAGLDDLDVTVPSDEEVGKMEEVVRELATLKGPTLRPMDIAEAVLFLASDESRYISGHNLVVDGGVTTSRNLIGL

SEQ ID NO: 68911 - protein, 302 aa, Zea mays
  Clone ID: UC-ZMFLB73086H09_FLI.pep
EAPRPPGADAHRARPLGPAAGEGVAAGVAGDRQRQRQLPLRAAPGGAIPAGRPPDVHRRRQHALRRAARVAREAGVAGRAQPPEQLAAGRGAGVRPGHGVAAVAGARVQQPLRPGAGPERADEPAGGGPLQQLAWPGVPAPGAEGGQRRAQRQPLRQRGPRRGGRLALPPGAPGRVEEPVRRPAPAGAARAPVHRVPQRRRKPLHGPARRQHVLRREPPVRGRVVEPPDGDAPVVPEDAPVVLQLQAGDGPGGVQLPVRRRRQHAAPGPVLPEPGAGRGHRARAGAGRRQGQGQGRSRGRRR

SEQ ID NO: 68912 - protein, 599 aa, Zea mays
  Clone ID: UC-ZMFLB73274E08_FLI.pep
TVEIQGDAESLERCLDQFTAVEWLDGDNKYKCDGCNDYVKARKHLSVQQAPNILTITLKRFQTGRFGKLNKRVTFPMELDLTPYMSCTDGSDLYDLYAVVVHLDMLNASFFGHYICYIKGYQGRWYKIDDCKVMVVDEEEVHAQGAYMLLYSRRTARPRSLLTVDESVKQQQQCKSLLSNGQSHMILADTTLNCESSLKIPEDMLQQDCESNNESLHEMGIKDQESDMDLRTSIEDDKFISNGNLRLPGSLVSHVLEDTRAPDSVLEGSVQLGPPLEGGPTTMSSVQFGNCTSEASSEHSFAEQCEVPASCIDSVDYMDVDTEAGAEVERCDEQRPVLNDSVGRPNNNTATPTANGVPGEPKPSFSSGFFDKPSRKRSSFTEEASAGSPRKLNGYCNGHISSLEQEVLCNSGSEKCNGDAPVTSSNGKFCAANVDMQSIDDSLHEDKRDVPSVSHGFEPRPYKLQSDSNNNCGRTCNGKPKACQGDMSFLPRGFLGRPSSRGISVKADDSLPFSTDASSSFGNGNSKSSNNSSSMGGLSPGFLTRHRRESTVIGTSSDIPMDKKSNGATVVPDHAEKKVSDCTTNGSSFQIRAASDHLD

SEQ ID NO: 68913 - protein, 205 aa, Zea mays
  Clone ID: UC-ZMFLB73173F11_FLI.pep
SLFSSWYSGFMWKKRMTPQHDAPQAIQFKVSDKGSGNVGSELPSHPGVVTGSILTATKKLGTAVPFDNAKVLIVSADSHEGFHGLIINKRLSWGVFKDLDSSMEPIKHAPLFYGGPVVVQGYHLVSLSRVSSEGYMQVIPGVYYGNIVATSRVVTRIKLGEQSVNGLWFFLGYSGWGYNQLFDELTEGAWLVSVKPIEHLDWPKS

SEQ ID NO: 68914 - protein, 309 aa, Zea mays
  Clone ID: UC-ZMFLB73149H11_FLI.pep
EFRRWQMNFCGVSRYEDAVRILKTLLSTVACDRRRGYWALRLSIDLEHMGRSNESLSTAEGGAIDPWVHAGSKFALQRRVLRLSKPPRRWKVPSYADYVKRNIREVSIEGRPLNCETGAKNVFYGYDGELCGVEQLALQYYADEGGGWQGTHSEGSIWMTIFGLLMWDVMFSDIHDVFQSKFQTDDFYKSRENIAESQLKRIRDGMAEEMLISSWELHQGTSCQGVNWARYSLTDLRAVVACVGGHRLASLLRHLAVDYRSWSSGMPDLLLWRFLDERGGGEAKLVEVKGPRDQLSEQQRAWILDLTWK

SEQ ID NO: 68915 - protein, 181 aa, Zea mays
  Clone ID: UC-ZMFLMO17251F04_FLI.pep
RWRSPREIVYTRNATEAINLVAYSWGMNNLKAGDEIITTVMEHHSNLVPWQMVAAKTGAVLKFVQLDEQESFDLEHFKTLLSEKTKLVTVVHISNTLGCVNPAEEIAQLAHQAGAKVLVDACQSAPHYPLDVQLIDCDWLVASGHKMCAPTGIGFLYGKEEILEAMPPFFGGGEMIAEVFF

SEQ ID NO: 68916 - protein, 77 aa, Zea mays
  Clone ID: UC-ZMFLMO17201G12_FLI.pep
QEYEATVATLSQMEKRAVMTETMLEATKQYQTVASSYSFGYILLPLSKHLYHLRAIIGSLLLQPRHDYFSCVPLTIP

SEQ ID NO: 68917 - protein, 515 aa, Zea mays
  Clone ID: UC-ZMFLB73349G05_FLI.pep
GAAMDASLLLSVGLALVLIPLSLSLLNRLRVGRLPPGPRPWPVLGNLRQIKPVRCRCFQEWAERYGPIISVWFGSGLTVVVSTSELAKEVLKENDQQLADRPRNRSTQRFSRNGQDLIWADYGPHYIKVRKLCNLELFTPRRLEALRPIREDEVTAMVESVHRAATAPGNEGKPMVVRKHLSMVAFNNITRLAFGKRFMNANGDVDEQGREFKTIVNNGIKIGASLSVAEFIWYLRWLCPLNEELYKTHNERRDRLTMKIIDEHAKSLKESGAKQHFVDALFTLKQQYDLSEDTVIGLLWDMITAGMDTTVISVEWAMAELVRNPRVQKKLQEELDRVVGRDRVMLETDFQNLPYLQAVVKESLRLHPPTPLMLPHKASSNVKIGGYNIPKGANVMVNVWAVARDPKVWSNPLEYRPERFLEENIDIKGSDFRVLPFGAGRRVCPGAQLGINLVASMIGHLLHHFEWSLPEGTRPEDVNMMESPGLVTFMGTPLQAVVKPRLEKEELYNRVPVEM

SEQ ID NO: 68918 - protein, 519 aa, Zea mays
  Clone ID: UC-ZMFLB73069B11_FLI.pep
VTQLSSPKLPESRGSGSYSAGNTHTLTNNHHQPMHPRSPTPHPIQYQSCLPRIQHRQAELLSSAAGVEHAVVEGGDAVRGDALRDEPRPGLVRPRLHQDARGDVVQVGERHDVRGRAPAVVHLREAEARPVGHQQRAVVGRDLVRVDAGGAGLARRPPRELRGHPPLAVLDDPHHLRHRGARHLPRGRRHAHDVVAVAVEPGASARERAVQRGPRVHGEADVDEGVRLEPRRAGAAPPRLGDEHLERGAPPGARRVRRAVLRLVVPDVVGGDVHGEVRQPPGAGVGGREPPHQRRRRVRDRVAAPLRLHRHRAGAGASGAGAGQLPDRGHELRGARAVGDGVAEAEAHDEAAAREGGDLDEQDQRALVLGGRGGREEVVLGHHQRGLQVVHVLERARGLGLREPHAGVAAVHGLLRAGLRQDQAARQRVVVDQCAGEGALDGPGRAASGGGRPVGGRLEDVERLDQRHLRGVPVQPGEAERAGWRGLGRDHPARRQPLDGLGRRRHGWVGRSRGGDGVV

SEQ ID NO: 68919 - protein, 791 aa, Zea mays
  Clone ID: UC-ZMFLB73067A12_FLI.pep
EGSKGMGSPGCSEIVELVDEPKDARSCGLTHLRVRVKPVGQELGARSCSVEDDLDQLIRSINVRTSARASGQTSTDRRLIALGKSPVSSSEIVESVSLKQALRKMCISQASEMAAMKRLSKPTGVSTPSDSGAIKKLHGSVAVQTNEEQDDKSKAGKVSVKPEKSAGSSVGKPSEISKGQSKSSAKKNLRSASPTTGNVHKTRIQDVISNKSSEGVEGISVEVTLPKQRKGKSMKTSSPRAVPVGGSRLVRPMFRNKTSTKKKVKPEPAIVPASHKHCETKGPKSHTSKHQESLQDEPRTPAPTDKKAAVSSTTVDGADFGTKGCGVGVIHGSKVGELLRSKEKGECSQSSKSSIGDYSTSTSISEDSYGSFSANRSRPHMSKDVRWGAIRRMAIQQGSLGLKNFKLLKQLGCGDIGTVYLAELVGSDCMFALKVMDIEYLISRKKMLRAQTEREILQMLDHPFLPTLYSHFTTDNLSCLVMEFCPGGDLHVLRQKQPTKTFSEAAARFYVAEVLLALEYLHMLGVIYRDLKPENILVREDGHIMLSDFDLSLRCSVSPMLVRTSSVDRDEPSRPSGPCAQSCIDPLCIQPSWSNSSCFTPSLVSSTPSRTRRTRAEPLKKPSLPQLVVEPTEARSNSFVGTHEYLAPEIIRGDGHGSSVDWWTLGIFLYELLYGKTPFRGPDNDETLSNVISQGLKFPDSPALSFHARDLIRGLLVKEPEYRLGSSRGAAEIKRHPFFEGLNWALIRWTSPPETPKNIDTAATLAGTRKKKEGKCLEFRLNGDDIEFELF

SEQ ID NO: 68920 - protein, 425 aa, Zea mays
  Clone ID: UC-ZMFLMO17242G07_FLI.pep
QMSSSSNGHYPANGAKILHRKEKNKEKVQLDKNSATWVCQKDRHYVEKLETELMNCYQEIDYLQDQLNIRSVEANFMGEHIHSLELKLTELEKFPERVRAMDNELIRSDSQCWLLMEEVRCKEEELQKAASQIEKLESTALDSQCEIESLKLDLTNLEQRLFDAERFSQHAGEHKAQFDKLLGEHELQLHEAQKTIHQLVWENKQLKELLPVRAPKQSPPGSGWKVNKTLENGVHAECESGDVILENMAKRNEESELLIEQLKEELREQKLKAKEDAEDLTQEMAELRYQITGMLEEEYKRRSCIEQAAIKHIQELETQVSKEKTKLSGALKRLQESHELARTQAMEIKKLKAALERLNSVTNLGTVCKSCSCGFSAMLVELSNCSIEGPSGSARSLNSNHIDEKSQNQALIEWRPREASDDEGG

SEQ ID NO: 68921 - protein, 642 aa, Zea mays
  Clone ID: UC-ZMFLB73201B08_FLI.pep
NFRGLTDGSMKDQIIGLLLEVLSRCSWLGCTKLCSCPIVITSYLRVLDLMLDVARTGKSRHTEVIQALLLELTSQCLSNTASTQYAFHDPTRIELKQQATESFLSCVGLSKKTDETNDDDVQLQILGEPTLEMPRVDYSLHEVHKEILSCLTDPSYDVRITVLKRILWLTKSIRHGYADNILHQWAGVNLQPALMERLFVEEHPKCLYYNLKIIFSWNMEFPFNNGEDSSTLLSLWDRLVHLNSTMSHAKTREIVLCCMGMCMKLFTKQSRGGISMDCLKTSEISASFVRINEGDGLSDAMLRLNLFVTLVKNQSEPSESMNARRAAAEAIVASGLLEEASYVASSVSNMYSPSEFDEDHTKEKCMEDSVFEFVSLYTCKILDLWFVCIQLLEDEDAYLRQKLAKDIQKIIAKGSANTFCDDSTPLQVDRVIELSLDYLTSLFGLWLKYVEFLLRIVLGTGNALNSRGDLVRQIFDKEIDNHHEEKLLICQICCSNIQKLLNSKCQMEAGAETKLFLQNWREIFLKQLTSLTGGYIEKEGKNDWIGGIGNHKDVFISVYAVLLGLYALTQSGSLDQLEDHCAVYLQEFANLERSITPFLKNPLISNLYALVKLSHERFISSDKPEDQVGDSGSSFDPYFLIR

SEQ ID NO: 68922 - protein, 603 aa, Zea mays
  Clone ID: UC-ZMFLB73028C10_FLI.pep
VKATSHDDEPAEERHIREILHLTSGSRAHVAAAVAGCSRRLSRTRDYVVALKSLMLVHRLLADGDPSFHRELLHATRRGTRLLNLSDFRDEAHSGSWDHSAFVRTYALYLDQRLEFFLHERKQGSNAGSSSSTNGPSPRDRDRWGSPDPYGRRSPSYSSPPGYGGYDDYRERNGGNNDDKRPPTPVRDMKPEQVLARMHHLQQLLDRFLACRPTGGAKHSRMVLVALYQIVRESFQLYADICEVLAVLLDRFFDMEYAECVKAFEAYASAAKQIDELCAFYAWCKDTGVARSSEYPEVQRVTDKLLETLEEFMRDRAKRPKSPSPEPEPEPVKEEPEPDMNSIKALPAPEDYKEPEPEKVEEEVKPEPPLQPQGDLVDLREDTVSADEQGNRLALALFQGPPAAGGSNGSWEAFPSNGGNEVTSAWQNPAAEPGKADWELALVETASNLSNQKPAMSGGMDPLLLNGMYDQGVVRQHVGAQVTTGSASSVALPAPGQKTQMLALPAPDGSMQTVGGDPFAASLAVPPPSYVQMADLEKKQQLLTQEQIMWQQYQRDGMQGQSSLNRLDRAPNPAMPYGMPMAYNTNPMPMAYTGNTGYYYPTY

SEQ ID NO: 68923 - protein, 887 aa, Zea mays
  Clone ID: UC-ZMFLB73242A06_FLI.pep
HSPRSPSRSAAHRSPAPQRLAGMKSMWKQSGGLVCADAGPLSPLGGRSRRRTRLTLYAVAFAFAAFTAYVAFASPPSAGAGASWFGGVYASTAPYRSQISSLFSSILPADSPAPSPEPLRVTFGGSGGGGGQVTRDASTVQVGSAAESISSAKAGSSKQLGTGGGAPIGNAGARSVPPAVHLPGTGIGGGAAPTNSSASGVGAPNDAVDLNKRSDGGVSTEGGSGSPASSSAVHGTAAEVRENSVNGSNKQSGNGSGALSNAATGHGSTVRAEAKVASDVSTNSSAGSGSLGKVDLSTGSSNNLAGSGSVVSGSGSDAGNRSTVKPHPGDAVGAGSRGSSGNGTGTMVDLNKGSDAQPGNRNGDASHQSDVSSGFEKSKGAKVVTTDAQPDSGSGDASHKSPGSSSPAKSIAGDGEVEGSKRNVSVVPTVNQTGSPASVGQKDVGSPRNNNTVGASPPVKNPEQTWSQVAPGGSSGTVNNPKGNAAAQGSAGSSENHSAQVNSSKSGNNSKGSRSSITQDGGSGGNKKGDWYKEMASCDMFSGNWVRDDSYPLYPEGSCPHIDEPFDCYLNGRRDLAYQKLRWQPSGCSIPRLNPTDMLERLRGKRLVFVGDSLNRNMWESLVCILRNSVKDKRKVFEASGRREFKTEGSYSFLFTDYNCSVEFFRSPFLVQEWEMQVSSGKKKETLRLDLVEQSSLKYKDADFIIFNTGHWWTHEKTALGKDYYQEGNHVYNELNVMDAFHKALLTWSKWIDANVNPRKTLVLFRGYSASHFSGGQWNSGGGCDKESKPITNDQYLSTYPPKMSILEDVIHKMKTPVVYLNITRMADYRKDAHPSIYRKQNLTDEERRSPERFQDCSHWCLPGVPDSWNELVYAQLLIKQHQMRQQ

SEQ ID NO: 68924 - protein, 363 aa, Zea mays
  Clone ID: UC-ZMFLB73257D01_FLI.pep
LIPSLLFSYLVSPGLEAVKRNVRDDAVADEHERHDAGVDPVVVEPDGLDGRELGDGAERAVAAVVVPSAVGELDAEQEAVAVEAVVEPPEPGDEGRDVLHVVPAGDEEDHGDDGGQRGSLLDVHEHGADGEPEALRHQHAVEHDGEREQEGPRARVQPAHPVEDEHERRGQAQLHGQVGGGARRHVGGQAVHPRGPLLEQHGPLQREREHGVVEREEAPEDGEEEDERRPVLQVRRRRAPPQQPRQRRHAQHLEHAQLVERLVTPLLEPALHQHRELRPPPRRPLRRRLRRAPRRRLLPAGRRLPGADVQLHRRRNVPLVRRGQPAAHLLVLALAAAGQQRRHPVAARRLRRDTCTHSASAQC

SEQ ID NO: 68925 - protein, 326 aa, Zea mays
  Clone ID: UC-ZMFLB73068B09_FLI.pep
ATVTVSQAGLSQYHHRNKGSEMAMQAARRLASLKLQRPLLLPSQAESPSISIPTAAAAAAFLHSHATSFGYKQVREEDKSKLVGNVFSSVASSYDLMNDLMSVGLHRLWKDRLISKLNPFSGMKHLDVAGGTGDVAFRVLERVKSVGHRAMQGTLTETEEGTHIYVCDINPNMLNVGKKRAAERGYSEEHCLSWIQGDAEALSFEDGSMDGYTIAFGIRNVTHIEKALSEAYRVLKQGGRFLCLELSHVDVPIFKEIYDVYSFSMVPAIGELVAGDRQSYQYLVESIRRFPNQEKFAQMIQEAGFQRVEYENLVGGVVAIHSGLKL

SEQ ID NO: 68926 - protein, 492 aa, Glycine max; identical to SEQ ID NO: 40766
  Clone ID: 700568583_FLI.pep

SEQ ID NO: 68927 - protein, 916 aa, Zea mays
  Clone ID: UC-ZMFLB73177B10_FLI.pep
KIGMREKRESKEANSAEMVEENRKTKHNDSSVVKHSKLPPVCLRVDPLPRKKPGNGSSRSPSPPRKDTDNTKKDVDEAQSQILEPKQSSTSKDITVSEVKEKSPYEMKKEVGFRNETVEAASVEHLQEEEAPTSKDGQKVQAASTTVGDQENAALNSIEEDHVQENAGAGSLNGCDKRKNEDGTVIESETAKDDARTYGVNLSESDAAVRIQSAYRGYDVRKWQPLDKLWKIKHVHEQMQVVRKQIQCLLDSCSKPTQKEQVAIGETIMNLLLKLDAIQGLHPSVREARKSVARELICLQEKLDTLCKAASGDLNHTDSNDDESEGTKNIIQTEAPTVITEASDRKRTIELGKVQEPCSVDSMEPCNTVPSGVSWEVRPDVDASEEKNEKQESCSTTVDEAHEQVASSMDMISDEAFTADNQEHGIGESNVTSVEQVTEEEKPASEDEVKEPPLVNSTALLYDTTSSGDSSGLKQYTASTDQNLYAESNTGSSPASTEDIDISTLAVESEVAAENDGPINSQVHETVALENVEMKDDVSSAENEHNRSSSPVIHLEDPLVSLKDVEQHGPTPTKDFVVPNTEDQQEARDISLQVQAVDSMKDCGEVPDGTIEASTNDDELELGTSADVEKNDQPTLLEPRSESVSVPELSVLDESDDKMQCGVSGKDEEAHVEEKTVTIAVDKVTGGSANFEDPLCEASRKEPDIEKSHPSLGEEEDDTIGGTVFPGSGSCELSCPQDGGIAVYEGPEMVSPESQTDARKENIHSDVAETDECTKTQKAALAGTEGENSAEDSGVPVSEMDKCNEMPKDAPTLTAAGANPAEDEASLKDLSVQTENKASSASPAPDDPKASDEKTLAEENQKLKELLQKLLASGNDQMGVITDLSEKVKVLERRLARKKRPKVRVHKPSRHASCVH

SEQ ID NO: 68928 - protein, 178 aa, Zea mays
  Clone ID: UC-ZMFLMO17230E08_FLI.pep
LFCCDHRLELSPLFSFSEPPHKVTWRLTPFRSSQCSQCCFPNFGQPSDFGNIHSFIGAIKAIAGEAGTRLPVPGFPGFVLTAAVESLAIGGKFKGQNFSLMTADASDTLPGLPVPKSNIAVVAGGGQQLTIGMPGDRTQDSGMLQGAKASNLLLDLPDKDSVVIASAGEVLPIGAPGK

SEQ ID NO: 68929 - protein, 345 aa, Zea mays
  Clone ID: UC-ZMFLMO17241C08_FLI.pep
AISCYVPPSLWVPLTRRTELSRIFYVHRFNQKVRRYSSSISRYISAAKTKLSEKTWSNVLFFCVVALFGAINVCIAVHFLCGGNGAEEAYTYQGQHSQFTMITMTYEARLWNLKVFIEHYSRCESVREIVVVWNKGNPPSSDAFDSTVPVRIRVEETNSLNNRFRVDPLIKTRAVLELDDDIMMTCTDLEKGFRVWREHPERMVGFYPRMIDGNPMQYRNERYARGKNGYNLILTGAAFMDKEFAFKTYWSEKAREGRDYVHKNFNCEDLLMNFLYANASSTTRTVEYVHPAWAIDTSKLSSVAISRDTQKHYDIRTDCLAKFSSIYGPLPQKWEFGMREDRWDK

SEQ ID NO: 68930 - protein, 439 aa, Zea mays
  Clone ID: UC-ZMFLB73397C09_FLI.pep
RRPVRLRRRRHRHRRTMETTEPSRGTKRPLTATAGDDDDAGLERKPRFPKGKKAKYRDVGAEGGPSGNAVDLDSMLNPELAAERRARQRHVQLKEGDDAKGGAAEVKGFEVRYNDSVNFVDDGIRIEPFNLEREREEGYFDENGNFVEYARGNEIKDAWLDSVEVDPTYAAKVQNKGKEKVDEFEDLSSDDIGRLKRQIANLLEPGETIMQALKRLKGTSTDKRGKMAEGTKRIFDELTEAAMKLMENGDYNVYSDDRETFEREAAGYERLARARLGLPEVDGVSEDQKYNQTPSSALEIDQPSSVLEMELGPSTANVYTATAAINDDDSNLDMFGDDDNDDTKHSSDANTVGSGLKPGTSDVKKADNGSVDSDYVYDPSSGYYYSSSTGYYYDPNSGYYGSASTGTWYSYDEQTGTYKEIQDEQTGTVKEELGDAIKE

SEQ ID NO: 68931 - protein, 731 aa, Zea mays
  Clone ID: UC-ZMFLMO17026G12_FLI.pep
ADRTRLVSPAASNWSSAGREGSFSRPVDLRCCALVVVKITIRLLDRAILPFAASPHTSRSKEPKFPARPAGAGGTGIRALPCFYQQLHWPLRFCRRAVHRWGQGSMMRGHTWLALLVVVVLALADAAAGRFVVEKNSIQVTSPDELKGKYECAIGNFGVPQYGGTLHGLVEYPKSNRKACQSFDISFKPKQAGGRPTFVLVDRGECFFTTKAWNAQNAGAAAVLVVDDKSEPLITMDNPEEGKEHLENITIPSVLITKKLGESLKKSAENGDMLSVLLDWRESLPHPDERVEYEFWTNSNDECGPKCDMQMDFVKSFRGTAQILEKKGYTQFTPHYITWYCPEAFVDSKQCKSQCINHGRYCAPDPEQDFSQGYDGRNVVVQNLHQICVFKIANETGKPWLWWDYVHDFALRCPMKDKKYNHDCASDVIKSLGLDIEKINKCVGDPEANEENVILKAEQDAQIGHGKRGDVTILPTLVINNRQYRGKLDKVAVLKAICSGFEETTEPAVCLSEEVQTNECLENNGGCWLDKANNVTACKDTFRGRVCECPIVRGVKFVGDGYIHCEASGIGRCEINNGGCWQESKDGKTISACSNEVSEGCKCPVGFKGDGEKSCEDIDECKEKLYCQCKGCSCKNTWGSYECSCGDDNMLYMREHDTCISKEGTATTVGWSFLWVIFFGLVFAGVGAYAVYKYRLRSYMDSEIRAIMAQYMPLDNQEGANQHQVVHANDI

SEQ ID NO: 68932 - protein, 706 aa, Zea mays
  Clone ID: UC-ZMFLMO17092A06_FLI.pep
IPEMVQHVCQSQFWFNMVEAMRDQHSIERLTEELLRQLASQHISDEEAYWILWTLFNQSFKRLTVMRTMFVDKFLLWKTFPLCCLRWILHYAVFECPPNSTTEILMQRTPNFFGILQSLVSIWSKKEFIQSYSVEQQAYITAAIGLCLEKLTKKELETTKDVLNSILQGVSCRLESPIDLLRKMASAVALTFSKVVDPKNPLYLDDNCCEYVDWDFGVLSPKEFKAPLDAVETKTKPKTRENKKKAGEKKTKAIKRDIPDVRAKIVEINSIDHDQMPDTATNGQFEEEECDEEDMNMDAYSDSSLEPYDLSDDDTDLQKKISHLSDLAAALRKPDDPDGVENALNYAEKLVRASPDELRYNSGDLVRALVHVRCSDVAMEGEEDSAEEKRQKALVSLLVTCPFESLDVLTKLLYSSSVDIGQRILIIDVMTEAAQELAETKTVKTEQRRGNLITDTSPSWLVPSNIGPPGAGPWREVSEPGTLLSWSHRYEREVPSKSGQLKSGKSRKWGLGKAKDLQVEWSKNRFPLYAAAFMLPVMQGYDKRSHGVDLLNRDFVVLGKLIYMLGVCMKSMAMHPEASALAPALLDMIRSRDVSRHAEAYVRRSALFAASCILISLHPSYVASSLIEGNQDISTGLEWIRTWALQIAEADPDTECSSMAMTCLRLHSEMALQTSRALESANHSKTGRAIPSKLDSIILPFGNMMW

SEQ ID NO: 68933 - protein, 1044 aa, Zea mays
  Clone ID: UC-ZMFLB73047E02_FLI.pep
GETLAPQRRCMESQRYNYGSGAGTGGKIRRYPPSRAVAASPYARPATAPTHAPGTATAAVSHEGGWLSRIIAAGTSRFLPSLFSFSTSQPQQAAPAPSPTRDQLPVVEPPSPLPPPLVDDRPECEENGGVAANNLCTENPQSCTKEEEENMLRNSDDHGGTALEELLKQRTFTRSEFEYLANLLWSKTIGANSLKLEDGNVRKMIVYDKENASEYSNLPLNFSTTTFSADDQVATPAEIAKAYMGLKSSKGSPLRLRLHDPSSMPITSMEVSMSQKAKPPTIPLAQGSRLHTSKTSDCLESNYTTPNGVICKMSSSPYFKSGVSSKELFGSVSSHYQTSNSVHTFGRQVLKRKSTVSNEFVSAGPIRRIHQRYNRTSPLLETQLGYRRYPVGYGSKLEGSEQLARTQKRRCLDKVGDASLGSVEDKTNVNYPGQVPEKSAEMATKILKQLDTLVPSQKENTSETKQKHESAIYFEEDVSRQKKVQAERDLLEPSPSEVPDGIASNKSISQITLNKEKPPAFSSRGNAPNLVLSDEIGRSKMSTPGNGFTFPAPTVNNAYSQGPPTPTLTSPILTVEKQPSVFCSASVTSAQSDPRISKSVLGGPVTQKLESKLNGDNQRVPSKNSGQVASFTSNPVFKVDGPGHASNSVLSAVQSYNTSTGSVSFQSAGSSTISTNLTSNITQSCSTGGSFTFSNTRFGSLSATSNMFAAKSLALSCTASPGASLGFPPVHTASSPAAHRKSEAANSSISFSSMQQFGIAGSSTVQDKSKAVDSSTPFGFPQKFDTVSSASEDMSKADSPEPTFFSGNHNVQSENCSSLFTQSPGNNLSSKSSENLNSGSSHSFADSPVGSATMCSSPSNSNSLFSWAAGSGARTAPPSSPATSSSFAFSSSPAFSAQPVFASKLTTPASLSYGSPNTGPATSPFSSMPSAVFSFTSATPSIPNPSPTTPIFGDPTVQMNGGNIVIDRNGSPSPATSPFGLPSSSPSTPTFSTPATQFASSTSGSPGVFEIGKYSQASSGGFSMGPSGGNDKSNRRIVRVKRRK

SEQ ID NO: 68934 - protein, 206 aa, Zea mays
  Clone ID: UC-ZMFLB73192E07_FLI.pep
GKLLHQQEVVLDTPSFDKDTLIDRDHAWQFSGEISFELKDPACIYVILKKPDDLNALSADITRWLSEVENSKISKLDAMFDLANFAVKGCQRTDGCSGSQHTPCIQKKIIQYFSKNYSTSDSGQCTQPQRGSPFLQADIKVFLKSNSFAKFTPRAVARIMHGISSPAFPSATWSKNHFWGRYLEVDFPVVMEAAKAELVKLVGKGE

SEQ ID NO: 68935 - protein, 130 aa, Zea mays
  Clone ID: UC-ZMFLB73197F11_FLI.pep
RRIRGEEARCGELRQAEKSRGRESGGGDGSVGLLPWPRTSWLKNDLEPLGSRRVGITPSVGFLLWLPSPPAPLPWAAIRSTSATTSCGRRCDARGRGADGGWSCRAWRGGDGGVSRMGAGTAAAGLEYHE

SEQ ID NO: 68936 - protein, 147 aa, Zea mays
  Clone ID: UC-ZMFLB73198A04_FLI.pep
YPISIAPFPILPADPLSLTAPSPMAVGPPRHGRRSSFLHRHGSASLQQSGDRALPFPRHAGAMSSPSPANLASHQEGVSLSAAPMATISPSCACPGSSSSTPAPLNLPSLPLSLSQIYCMFLYFIVVIVLTLGGVEAMQMVVSVLRN

SEQ ID NO: 68937 - protein, 559 aa, Zea mays
  Clone ID: UC-ZMFLMO17058D11_FLI.pep
YISECHFFYAMCFFPASSNFHSWIQLIGPYALGVLPKANFFAELVQSMEDNPVKPVDSTANSRPASAMAHSRSSYKIKESGIAQSRVRGSHLTPASTDKTKKDRSSTIPRRPDSSLKSSVQSTTLMRRMKLVDSPSTNTKNVERNVGQRDISLASRAVMANNSATAKKSNLTESALVKDIYTTSQAVSAPIVVPRDILEDKTVSNVRRGTGETAAVPDDFRIPVHRRKPSLSGSAADSDSSSRSVFTEPDVCSEGLSSLKFSFGLTPYHKKEEFGDVDNEGIAQIAEKMERTVSLDHSQQLNDDKSFESPCSTTETAKVKYVRGVAVPLGKTKSLVERWEKRETSSTDYSPQTGSCGDRASRNDNHPFHLAEPSTTFEKDLSTVDEAMAPVNLVRNHDEFLNAVKLRLTKLEMMRHVFEQSGIKGAIAAVAKLPDNAVQADVVSALKGKLDLFNLEFFSNFLPVLAGLLCSKTERHAMVSLEMLLDLIKIFGPVIHSALSANLGVGVDIQAEQRLQRCSRCFNHLQKIQQSLNPLILRGGQTAQLAQELSLSLQDLVVI

SEQ ID NO: 68938 - protein, 547 aa, Glycine max
  Clone ID: 700906442_FLI.pep
EQNQKRRLNHKGIQFHFSSSSSSLSFMAPSKLNSSGNTSMPCSQAENGFVNSFSLFPEKVVQELLQSPVQGSDDHLIEFSEALRTVAKALRLVAEGKASAQAEAAEWKRKYELERDRNLKFEHAEKSCIEHQAEHEDVRTNNPAKQPVLCNEANGQSEKCCSRNGICSHEVLRDGTPGSDSKMVKKASFKLSWFSKGDQSDQYKHDIVSFERGNITTAERSSKQISLKWESCPQTVLILTKPNSVSVQILCAEMIRWLSQQKNLHIYVEPHVRVELLTESSHFNFVETWNDDKELLRLHTKVDLVVTLGGDGTVLWAASMFKGPVPPIVPFSLGSLGFMTPFYSEQYKECLESILKGPISITLRHRLQCHVIRDAAKNEYETEEPILVLNEVTIDRGISSFLTNLECYCDNSFVTCVQGDGLILSTTSGSTAYSLAAGGSMVHPQVPGILFTPICPHSLSFRPLIFPEHVTLRVQVPFNSRSPAWASFDGKDRKQLAPGDALVCSMAPWPVPTACLDDSTNDFLRSIHEGLHWNLRKTQSFDGPRET

SEQ ID NO: 68939 - protein, 768 aa, Zea mays
  Clone ID: UC-ZMFLMO17333G02_FLI.pep
AHQHYPFPSSPTPSSLPLVQSTPIGREAEKDREGARASQAVPSRAAMSGGAPLLALLLLAAAAMIAPSPANAAVSYDHRAVVINGQRRILISGSIHYPRSTPEMWPGLLQKAKDGGLDVVQTYVFWNGHEPVRGQYYFGDRYDLVRFVKLAKQAGLYVHLRIGPYVCAEWNFGGFPVWLKYVPGISFRTDNGPFKAAMQAFVEKIVSMMKSEGLFEWQGGPIILAQVENEYGPMESVMGAGAKPYANWAAKMAVATGAGVPWVMCKQDDAPDPVINTCNGFYCDYFSPNSNSKPTMWTEAWTGWFTAFGGAVPHRPVEDMAFAVARFIQKGGSFVNYYMYHGGTNFDRTSGGPFIATSYDYDAPIDEYGLLRQPKWGHLRDLHKAIKQAEPALVSGDPTIQSLGNYEKAYVFKSSGGACAAFLSNYHTSAAARVVFNGRRYDLPAWSISVLPDCKAAVFNTATVSEPSAPARMSPAGGFSWQSYSEATNSLDGRAFTKDGLVEQLSMTWDKSDYLWYTTYVNINSNEQFLKSGQWPQLTIYSAGHSLQVFVNGQSYGAVYGGYDSPKLTYSGYVKMWQGSNKISILSAAVGLPNQGTHYETWNVGVLGPVTLSGLNEGKRDLSDQKWTYQIGLHGESLGVQSVAGSSSVEWGSAAGKQPLTWHKAYFSAPSGDAPVALDMGSMGKGQAWVNGRHIGRYWSYKASSSGCGGCSYAGTYSETKCQTGCGDVSQRYYHVPRSWLNPSGNLLVMLEEFGGDLSGVKLVTRTA

SEQ ID NO: 68940 - protein, 493 aa, Zea mays
  Clone ID: UC-ZMFLMO17426E10_FLI.pep
GAARVSRELHYRASSVLLPSMHSLVRRGNGYGYGYGGYGSSNPHMNYHRQNTESVTTVVTEMNRMAVDDKPCYGGGVQKQACKVEAFQEHDEAYKGAVAVQQKHSSFKEDKEEVRGAAAAVRSWHDELYKEEEEEKRVVDTEYGARYGGVAAVKKPGYNYKQHEAYGETEGAGYGYGAGGVKKQAGYSYAQEACGESYGGAHHGGAGAVAQTYAYDQQQAYKHKNAAGAGAGYGAPYGGGAVQQHDGHKDVYRHGAAAGGKVKKNGYQYQEAYGGTDAGGYGAHYGGGGGAVQQYGYGGATTDGKVKKGGHQYYGGSGAGGYDSHYGGGGGGAVQQYGGYHKDAYGYGGGATAGGKAKKSGYQYEEAYAGTGAGGYGAHYGGGAAVAQKQGYRQGIYESESESESESESDESDCEEAFLPHGGRTPQGGVQHSYGYGGGAYKHGAGNLGGLRRYQSYESREDLGGGRRYETYQSTVQYTGSPTKNRHVLRYGA

SEQ ID NO: 68941 - protein, 736 aa, Zea mays
  Clone ID: UC-ZMFLB73306F06_FLI.pep
AEVMDGRRRGGGAMAWLLLLLASLCTGACGLNADGVLLMSFKNTVTADPLGALAGWSYSDAAPCAWNGVICNGFPQDDTAPAAANVTSASADGNGTATVARNATGATAAAGLGASLAAATVSRVISLVLPNAQLSGTLPPDLGRVEHLRHLDLSGNGLSGSLPPTLLNATELRVLSLAGNALSGELPDAAAAYARGLQQLNLSGNALAGRLPAALCRLPSLLALGLASNHLAGELPVGGLGTLELVDLSDNDFNGSLPSDFGGTALRLLNVSSNKLAGAVPTELAAVVPANATVDLSRNNFTGAIPQAGPFAAQPAAAYEGNPNLCGPPLKQACSIPSSLSKPPNATDSPPAFAAIPKNPARAPPQAQGQPPSEQDKLRPASIVAIVVGDIAGVGLLFMLFMYAYHVRKKRRQRREQDPTPPLHLQQKSARGFDGGVVKTLDIAGGKEEKASTSTGCCIGRRNDSSDSSEYSASSDGESSDEEGLKKRGSFIGRSTPQEHGSKKHNLPQQQQQAPPAPATLVTVDGDGELEMETLLKASAYILGATGSSIVYKAVLGDGTALAVRRIGESGGAEKLKDFEAQVRAVARFRHPNILRLRGFYWGADEKLLIHDYAPNGSLANIAFSRRFGSSSPLHLSLEARLRIARGVARGLAYIHEKKGVHGNLKPSNILLGGDMEPWIGDLGLDRLASGEAAPHYRAGASARLFGSKRSMHSTSSLPDLSQMPGPGASPCGSAS

SEQ ID NO: 68942 - protein, 281 aa, Zea mays
  Clone ID: UC-ZMFLB73264F09_FLI.pep
RFNHTLHCHGVQQDALLHAACCFLGSAAPAGHGRGLHRQLLLRKQLRWQQQGRGQHQLRPRRPRRLGLLHRGLRHVHRRQGQQQHHLRPRAMPRRRLRQRLRVLPCRRRQAAPQHLQLQFRREDMVRLLLHAVRERQLLRAGGHGRGRDPGERAGHGQPEGVREGGGEGDGQGDGAGVGGGQRGARAGQGAVHAVRVHLRAGAVHAGPRAADLRAVPVHGAVQVRRLLRRAAGLPDQLQQLQGALRDLPLLLPARRKGRRPRHHRHDEEHQDRRASLISLK

SEQ ID NO: 68943 - protein, 522 aa, Zea mays
  Clone ID: UC-ZMFLMO17011C10_FLI.pep
LKQLINNIVSKYGTTDTELLKKKLKEMRILDNVDLPASISQLFVKPKDKKESPAKSKQKLLVKSLETIVEVEEKTELEEEAEVLSEIEEEKLESEEVEAEEESSEDELDPFVKSDPKLPRVVRMANLCVVGGHSVNGVAEIHSEIVKQDVFNSFYEMWPTKFQNKTNGVTPRRWIRFCNPALSALISKWIGSDDWVLNTDKLAELKKFADNEDLHSEWRAAKKANKMKVVSLIREKTGYIVSPDAMFDVQVKRIHEYKRQLLNILGIVYRYKKMKEMSTEERAKSFVPRVCIFGGKAFATYIQAKRIVKFITDVAATVNHDSDIGDLLKVVFVPDYNVSVAEALIPASELSQHISTAGMEASGTSNMKFAMNGCILIGTLDGANVEIREEVGEENFFLFGAEAHEIAGLRKERAEGKFVPDPRFEEVKEFVRSGVFGTYSYDELMGSLEGNEGYGRADYFLVGKDFPSYIECQEKVDEAYRDQKLWTRMSILNTAGSSKFSSDRTIHEYAKDIWDISPAILP

SEQ ID NO: 68944 - protein, 213 aa, Glycine max
  Clone ID: 700737424_FLI.pep
TADKRQQDMAEKSKELLQFEHKGTPLSSLESTLLVCDNKKESDTQTRRLPPHGTPLTAPHPPSQLLGKVKDFLGVMSEANKRLELDAKDNPENYDIEELTGNESEVIEMDLMLGVADLHTPEAVAAAESAISTCQPVIPLAADGSETDSEESSTDDDCGDDDIESSDDYHDDGNNSEKPSSLVQKSISSKDNIQEKQKGNVHSKKRPRIVELS

SEQ ID NO: 68945 - protein, 169 aa, Glycine max
  Clone ID: 700898106_FLI.pep
SYPIQISHTRGEGHISGALITLDLILNINNATHILVSSFRFPASMTFSSNLDGSAVGGGADLVGDGDSAFAGERGGVVGFEAGDLAGGRLEAVARRLAVGGGLGGGIEALHSVAASRRRRSSVLEVTDAIDQAIRHLPARDSCMCHGCTHHNHAEHCSQKCNLEASHGN

SEQ ID NO: 68946 - protein, 164 aa, Glycine max
  Clone ID: 700898383_FLI.pep
RYRGKNMAEEHRCQAPRFCANNCGFFGSPATQNMCSKCYRDFQLKEQQSSNAKMVLNQSLVPSPPPAVISQPSSSSSAAVDPSSAVVDDAPREAEEVKAPQQNRCMTCRRRVGLTGFKCRCGMMLCGTHRYPEQHACEFDFKGMGREQIAKANPVVKGEKLDKI

SEQ ID NO: 68947 - protein, 154 aa, Glycine max
  Clone ID: 700901113_FLI.pep
GPASERAFGLYNPDQSMIYDAGLSKQQETSSPVPTVAPTTPDVSKSPSTPKPTVSSPTKTNNSATWCVPKGGVADAQLQANLDYACGQGIDCTAIQQGGACFEPNTLVNHAAYAMNLLYQTAGRNPLTCDFSQTAMLSTNNPSYKSCLYAGGNA

SEQ ID NO: 68948 - protein, 100 aa, Zea mays
  Clone ID: UC-ZMFLMO17340D01_FLI.pep
EDDIVGETNDVQKLKEELKYERQRTKDAREDLEKDRRAAEAAMNEVTTKNKILEGENGRLLMQVEHLKENMKMKRMGIIQILESRDHEFWNANLEAPVPV

SEQ ID NO: 68949 - protein, 222 aa, Zea mays; identical to SEQ ID NO: 38679
  Clone ID: UC-ZMFLMO17428E02_FLI.pep

SEQ ID NO: 68950 - protein, 323 aa, Zea mays
  Clone ID: UC-ZMROB73001C09_FLI.pep
FRQQPTESGSHPMLHQTTLIPPSVSAASSSPFLHAATTAPAPGGGSCTPAFLRGASAMPSYAHHRSSPLDDGRMDALKCNNSVLPEETTADAAGAFVEKDGFSVEDLLDLEEFAEPDKDVAEREDDDAPPAAAAAAERSKADSQPSSVVKYDLPPLLPPPPEMVDLPSHDVEELEWVSRIMDDSLSELQPQAQPKPAAAVVASSAARPPLAQQRRPFAHDGTYRAVAAAPPQAGPQRTPTICALSTEAMIPVKAKRSKRSRGPGWSRPGASFLPDSASSSSTTTTSSCSSSGSISPFLRLDSSPFGGGLELGEGLFSYGHLLP

SEQ ID NO: 68951 - protein, 261 aa, Zea mays
  Clone ID: UC-ZMROB73015F10_FLI.pep
LASSPSGLSSPPRTNRQKEGRMASSQCCDNPPALNPACGEGKVVDSFGGLKAYVVGPEDSKAAVVLVADVFGFEAPIMRKIADKVASSGYFVVVPDLFHGDPYAPENVEKPFPVWIKSHTPEKGFEETKQVIGALKEKGVSAVGAAGYCWGAKVVVELAKAHEIQAAVLLHPSFVTVDDIKEVKCAISILGAEIDKMSPPELIKQFEQVLSLNSGVGHFVKIFPGVAHGWSVRYNHDDAAAVKSAEEAFADMLDWFNKNLK

SEQ ID NO: 68952 - protein, 412 aa, Zea mays
  Clone ID: UC-ZMROB73017F10_FLI.pep
RFFLCVCRSGEAMAAPRKGTATPLGTVFSPEETKRAVARVAESVAGRRAELARLQGFAADNAALVSLVNRLPDELSHDIMVPFGGAAFFPGRLIHTNELLVLLGEGYYAERSAKQTTNILHRRGQELEAQVEAMKATIADLEAEAKFFEFTATEASEGLVEIREEYDEDLETNSSRSEASVATVVMSDKDREHARIMARLDELEREEKDAGSACEDDNDGDDDDGDAGTSDDGEENKESGNALSDVNEDYSSGFGASFSGSGGNDRSHGNIKSALKKPGGDEMLIGISHKPSSHTSHLAFPGQTSATNSDVRVHTKAVTFEDDKYVVSSSKSPPLLLDSIQSDPVLKNSSDPALSRDRKIISSGRKAFTGSIIEHDDNVSTIEPSVASSLAKPGTCASSRPVSRFKMQKGGR

SEQ ID NO: 68953 - protein, 146 aa, Zea mays
  Clone ID: UC-ZMROB73020B07_FLI.pep
GFAAAAAMPRRSSGRSAPRPAPRAAPVRNPPQPARQAPPPAPVRDGGGSMFGGIGSTIAQGMAFGTGSAMAHRAVDAVLGPRTIQHETVASEAAAAAPAPPVMNADACSIHSKAFQDCLNNYGSEISKCQFYLDMLNECRRGGVSA

SEQ ID NO: 68954 - protein, 96 aa, Zea mays
  Clone ID: UC-ZMFLMO17176G11_FLI.pep
KNDLIEAKLVHEQLCVMLEQSERELLGHNNQYLPKIVSVFAEILCAGKDLATEQTASRMVNLLRQLQATLPPSVLASTWSSLQPQQQLALQSVLSS

SEQ ID NO: 68955 - protein, 104 aa, Zea mays
  Clone ID: LIB3069-044-F2_FLI.pep
KLIPSSFEGCPSFALHIIQFRYEVGAVGECAGEDAVEEAVPHHGIVPQPDPDEGEDGGVDEREKQHIRRLPFMLRGAPHRRRIVESGGGRRHGPAGEDEIGTEE

SEQ ID NO: 68956 - protein, 79 aa, Zea mays
  Clone ID: LIB3075-027-D1_FLI.pep
TMCHIQTGRWYMLDLQQTYANWKQITNTNRKNTTILSSSCKETNEPPLNLNHQCPSQYSHCGNPSTKLLHRHHTNSIYA

SEQ ID NO: 68957 - protein, 90 aa, Zea mays
  Clone ID: UC-ZMFLB73228F07_FLI.pep
GLQAGEHAAGALRRRRRVQGGGEGRVPDPGVAYAPAHRHLGVARRRRRRSVIREGWLGLLDADQGTRTSPGMAHPPSSSPARVKLDVIER

SEQ ID NO: 68958 - protein, 240 aa, Zea mays
  Clone ID: 700471759_FLI.pep
SLSLSLSLSLSLSLSLSLSRPPALRRIQHVRHGAPAPRRRRPGAPGRLHRRAVGAGVGGRRVRRRPGPSGRRRRDSARRRAGVPRRYDGGRVHGVPGRGRRGRGRRRRHGHGRQQAPGAAGRLRLHRLRRAAPGQRALLAARRVLLQLPARRRGQPLLPRLQRHHPVQGLIDACMVSHSILRQQGKSVAASFIHACVWCLIFFFGVFNCRPSIIVVQWRCVCAVASILFRMNLKVIIIII

SEQ ID NO: 68959 - protein, 231 aa, Zea mays
  Clone ID: LIB3137-011-H10_FLI.pep
TVSTGAQVAQKATEVTADTARKVAEYAKEKAEQGKERAARAADEVEEPGSGATAQAKEPASQTADNKARDITGQHKDTTGDMARKAADTAVQAKDKVRDTAVSMVQKAGDTAVRAKDTAWDAAGGMAQRSRDTGAQAGDKAEDVTWRAEQEAGELKERASGTVKTGGGASTTKAKGGGDENTTVVGDVLEAVGATVVGLAKHTKGIVAGEEELVPVGGEKGKSPEEKTKLA

SEQ ID NO: 68960 - protein, 217 aa, Zea mays
  Clone ID: LIB3180-016-D8_FLI.pep
LSSRRLHLLPPVLQPPEAASSATETPPQQEGSPPRIALATASRLPCCFLRRGCFWPRPRSSPPSSSAPLPDDDAAGDADGPGCLRRLSASPPPPPPLGRLSPPAYMQPPGTTDDGSLPGLAAVDRPIDRSINHSADRQPRLVAQSRAGDGTTAGCGRRRRWFLRGLEGEVGMEAEADAMATRATHRIRSRLRSCGYYWTRRAACSCSRLGTGAAPVL

SEQ ID NO: 68961 - protein, 575 aa, Zea mays
  Clone ID: UC-ZMFLMO17259F03_FLI.pep
PHLATVLSLPPGPHSAPLPSPPNPQIPEARGGNSSPDRSADPLPSAPQSAAAAMFNKIIKRGNRKGARGDNAEAAARPAAPSSSSGSGGGGAGAAAPVTVNHASRATAPSPSSPTSPHVAPSALATNPAGAASPPLLEPLPLLRDVAAADRPGLFLRKLRIVAALFDLSDSLKHPREKEAKRQALLELVDYVQAPAQAAGANAPTRLPDHVQEALVAAISANIFRPLPPALHESAAAIDPGAAPDEEEEPYLDPSWPHLQLVYELLLRYVVSPDTDTKVAKRYVDHAFVLRLLDLFDSEDPREREYLKTVLHRIYGKFMVHRPFIRKAINNVFYRFIFETQRHNGIGELLEILGSIINGFALPMKEEHKLFLARALIPLHKPKSVAIYHQQLSYCIVQFVEKDYKLADTVIRGLLKYWPVTNCQKEVLFLGELEEVLEATQPAEFQRCMVPLFKQIGRCLNSSHFQVAERALFLWNNDHIVSLIAQNRVVIFPIIFEALERNIQSHWNQAVHGLTANVRKMFLDMDSELFEECQQQYMEKQAKAKEIQEQRESAWRQLEAVVAAKAAGDDMVLVN

SEQ ID NO: 68962 - protein, 335 aa, Zea mays
  Clone ID: UC-ZMFLB73300C06_FLI.pep
DARVSLGLVSPEDKGFPNIHVRRIHRALDSDDVELVRMLLKEGKTNLDDAYALHYAVEHCDSKITTELLDLALADVNHRNPRGYTVLHIAAMRREPKIIVSLLTKGARPSDLTFDDRKAVQISKRLTKHGDYFGPTEDGKPSPKDRLCIEVLEQAERRDPQLGEASVSLAIEGDSARGRLLYLENRVALARILFPMEARVAMDIAQVDGTLEFTLVSSVNLPAEIQRTVDLNDTPFTMKEEHLARMRALSKTVEVGKRFFPRCSKVLDTIMDDEAEMASLGRDTSAEKKRRFHDLQDLVQKAFSEDKEENDRSAARSPSSSSTTTTSIGAVRPRR

SEQ ID NO: 68963 - protein, 456 aa, Zea mays
  Clone ID: LIB3150-112-C5_FLI.pep
IKKTDKSRLHVEDTMDIDNSNASKSTEEDFLSDKVEKLKELSKLPDIYERLTRSLAPNIWELDDVKRGLLCQLFGGNPLKLPSGASFRGDINILLVGDPGTSKSQLLQYMHKLSPRGIYTSGRGSSAVGLTAYVTKDPETGETVLESGALVLSDKGVCCVDEFDKMSDNARSMLHEVMEQQTVSIAKAGIIASLNARTSVLACANPTESRYNPRLSVIDNIHLAPTLLSRFDLIYLILDKADEQTDRRLAKHIVSLHFENPNLEELEVLDLQTLVSYISYARKYIQPQLSDEAAEELTRGYVEMRKRGNSPGSRKKVITATARQIESLIRLSEALARMRFSEVVEVRDVVEAFRLLEVAMQQSATDHATGTIDMDLIMTGISASERQRRENLVAATRNLIAEKMQLGGPSMRMIELLEELRKQSSMEIHMHELRGALGTLMTEGAVVIHGDNVRRV

SEQ ID NO: 68964 - protein, 418 aa, Zea mays
  Clone ID: LIB3150-103-F10_FLI.pep
GGEVPGFRGGVWEMPPVKKSKKGKRKSKDGKLKIVRARGAPPALPPELRALDTEWWYAFLNKQVELEHAVPPDEGEAFRHFFRTSRKTFDYICSIVREDLISRPPSGLINIEGRLLSVEKQVAIAMRRLASGDSQVSVGTAFGVGQSTVSQVTWRFIESMEDRARYHLAWPSQERLEQIKAVLEDAYGLPNCCGGVDATHVIMTLPAVESSADWCDHAKNYSMFLQGIVDDQMRFIDIVTGWPGSMTFSRLMKCSGFFKLCEAGERLNGSVKVSAEGAEIREYIAGDSCYPLLPWLMTPFEGKHLPAPLQNFNARQKAARLLGTNALARLKGSWRILHKVMWRPDKNKLPSIILVCCLLHNILIDCHDELLPSVQLPEHHDTGYNRENCEQVDPNGKVMRENITAHLQHCEASKFLCN

SEQ ID NO: 68965 - protein, 602 aa, Zea mays
  Clone ID: UC-ZMFLMO17399D03_FLI.pep
MQAKLPNSFYVMDFYVEGHLRSVLWADSRSRAAYQYFSDAVWIDTACLRNKYHVPLVSFLGVNHHGQLVLLGCGLLSDESTESFLWLFKSWLTCMKGQPPNAIVTDECVAIKAAVREVFPKTRHRISDWHVVRSISEKIGDLPEYEAMRTNLVTVIYDSLNDNEFEARWKNWIDRFSLQDNEWITFLYENRHLWAPAFLRDTFSAGLCTVSQRESPSTFFEDAVSSETTLVTFLASYMTLLDNKYKMEQQDDFDSLNSSRLLISKYQMEEQLSRLYTLNMFMKFQDELKATMHCQVQLDGSASSFIVIGLTEAGSEMLNKKYEVVHCMATNRMECNCGLFQFHGIVCRHALSVLKWQQVYDIPPCYVLNRWRADFKQLHYLDNPSKDLATSNHVERYDYISLQFLRLVEIGMVSDEKYRHAVRLLKDMKETLLDDNLCRDLEQKLTPAERAIVNGDNHTQPGSSEGGAAKKRRGRPPKKNKEINMDSMVNPYGNKDPLLVSSDVTQKDTFHSASTTSNLGTHVRTHGIVDLMEEVNPSELSFDSRYGVQSGHSHHFGNNQLNTGNTLRFGQSTSAAEQSRVQWVFHNGMYQDDQVTYGRRTS

SEQ ID NO: 68966 - protein, 357 aa, Zea mays
  Clone ID: 700051430_FLI.pep
VPIGSNHQAELPECRPFGGRTEEDESVKWIRNSVVPMPGTDASSLVLEPVHCKAGCDCLDEGSINCVKKHVMEARENLKDSVGADAFRELGFYDMGEEVASRWSEEEERLFQQVVSSNRASLRRNFWDELPLAFPSKSSKELVSYYFNVFMLRKRAEQNRFDPANIDSDDDEWQAGGDFEFPITGRTDEYMPIESLTDQDDVACNPFPLEGDLYGDSDDEDELDNSSGGDRHNGVQRAGMLSEGHPEMSFIDHDQQTLKLDADAQDDSCTSFEAHQVGCDGGAHTDIGNHYRSDDGLCGGAEHGFFGDHCDTKEWGFGFSTGWERHDFLSTNNVIEEVFGKGSSEDGSDTGTGQDLI

SEQ ID NO: 68967 - protein, 584 aa, Zea mays
  Clone ID: 700077449_FLI.pep
SSAPHRLCWIQNLLEPLHCAVRAILLLPSIQISTPLAGPDLRSCRGPGVRAAAKESVAMGSAILNSIAPEEPKVVVPEYGETADIQDKEVSMEQLCSISTYDQWTPLSVSGQLPKPRYKHGAVVIQQKMYVFGGNHNGRYLGDIQVLDFKTLSWSKLEAKSQAEPSESAGAVPFSACAGHSVIQWGNKILCLAGHTREPAESLSVKEFDPQTCTWSTLRTYGRSPSSRGGQSVTLVGDTLVVFGGEGHGRSLLNDLHILDLETMTWDEFETTGTPPSPRSEHAAACFAERYLLIFGGGSHSTCFSDLHLLDTQTMEWSRPKQQGVTPESRAGHAGVTIGEYWFITGGGNSRKGVSDTLVLNLSTYEWSVLTNLEARAPPVSEGSSLVMHTINGENFLVSFGGYSGRYSNQAYALKASLKPSVPSQQINESDTNGFSPLSVAENSSRKVIFEIEELKDEKPGNRADNSKTLGQVVMVEQNEIEDRLNQEHLQSLRLKQELTGLENRNAELTEELHLVQDQLSIEQTRASKFENEISDIQQRLQKMDTLEKEIESLRYELDSTVSEEESSSGNELHRSRGFWRWNG

SEQ ID NO: 68968 - protein, 306 aa, Zea mays; identical to SEQ ID NO: 68852
  Clone ID: 700093406_FLI.pep

SEQ ID NO: 68969 - protein, 238 aa, Zea mays
  Clone ID: UC-ZMFLMO17018D03_FLI.pep
SSLFCFVDMKEPKIAAEIAKELRKFHQVDIPGSKEPQLWNDIFKFLKKAAALKFEDNMKQKRYEKISFREIQDEVQELKDLLDILRAPVVYAHNDLLSGNLMLNDLEGKLYFIDFEYGSYSYRGYDIANHFNEYAGFDCDYNLYPDKDAQYHFFRNYLHTDRPSEVDAQDMEVLYVETNTFRLASHIYWALWALIQAKVSPIDFDYLGYFFLRYGEYKKQRESCFSLAQSFLSELKNG

SEQ ID NO: 68970 - protein, 425 aa, Zea mays
  Clone ID: 700152154_FLI.pep
LVDAPISACFLDSPIRLFSLSLRLLCLFAMAIRITVSYSGYVAQNLAASLGHRFSSASASGSRLLHDGAWRPFCIFTSTRQPEKHRSSGSDRHDGGDYNHPKPQAIAAGAHSLLLTRACLSSKSPPPSLAVGLLSVLAQRTGPTPGTTGSAASLSGSSPISLGFNPTSFLPFLQTARWLPCSDLATSSSSAPSSPPRSLAPSAPPKKALIGAATGSTGIATSSGAGAAMSRSNWLSRWVSSCSDDAKTAFAAVTVPLLYGSSLAEPKSIPSKSMYPTFDVGDRILAEKVSYIFRDPEISDIVIFRAPPGLQVYGYSSGDVFIKRVVAKGGDYVEVRDGKLFVNGVVQDEDFVLEPHNYEMEPVLVPEGYVFVLGDNRNNSFDSHNWGPLPVRNIVGRSILRYWPPSKINDTIYEPDVSRLAVPSS

SEQ ID NO: 68971 - protein, 198 aa, Zea mays
  Clone ID: 700162819_FLI.pep
LYTGPPYYMVSGKQVDGYKSYRSQPHPWPMHEHPKISCLSIQDQRRRWTTYLVFFSLPHPHPYIYLVNQPCVHVRGASSMLHSLQDKLQFLLSMVEQFSADPAMLLQAQIWVCVLCVAPGSQEHDSPYGVLGGRATAVGATARFTGRRCGGGGAVGAPEFLTEGLLDLVSPGALPGRQLRGFHGRQKKILSYSTETVV

SEQ ID NO: 68972 - protein, 229 aa, Zea mays
  Clone ID: LIB3150-080-B11_FLI.pep
HPLRGAGRELEMPRDRDEPAAVRVYTVCDESRYLIVRNVPSLGCGDDLASLFGTYGPVEECTPMDAEDSEPYTDVFFVKFSQVNNARFAKRKLDESVFLGNRLQVTYAPQFENPQDTKEKLEVRRKEVLGRIKSSAGRPEGSSPAQGSSSGNHHQMNSNKREYMKTIHASIEDPRFSHVPSDKDYFPSESMNATVKLVRGKLDKIQSGGDNSSTSAASRKPGVDKRRRI

SEQ ID NO: 68973 - protein, 268 aa, Zea mays; identical to SEQ ID NO: 54373
  Clone ID: UC-ZMFLB73169G03_FLI.pep

SEQ ID NO: 68974 - protein, 576 aa, Zea mays
  Clone ID: UC-ZMFLMO17245G04_FLI.pep
GSSGRMDLNLYLGPPRAPRPRRSDLGSDLALSTPMPSSPSSSAASVDAPPPPPESMHPPYTHSRADLSPPPLPLEVYFPYNPEDSPVPDAHMSYMQPPELLIPGPRNMPPPDSLISGLREGIRELRYAFHPPPPPPPPPPLVRANELLGWEERPSSSTASSSFFPDTAARCGLLLEQTGSRWLRTRRFRSDLPPLSSEARPSGQDATEPVPQHEPAADANELNKVAPNGLELGAPENSSEERSKTATAFECNICFEMASEPVVTSCGHLFCWSCLYQWLNVYSSHKECPVCKGEVTEANITPIYGRGNSDAEKTVEDWKSPGPTIPPRPHGHRLESFWQQFHHIRPISRRLGEAHGILSSWRRLLDQQILGSVSRLEGPSESATQEINDIRQHDHLSGLALASRMRARRFQIEALSRPDGSSTSPPDNGLTGNNPSEILTGNNALLERLAGSNSRRLELLERLAFGIANTAGAMSDDFRRIASPNQYRGSASSSNLQNNEPAVDGARIAGAPSADQASNSSTVAVIQGDGGISESAGEPSNAGSSGSLRRRGRSNASGSLDVDGGSLQQNKRHRMN

SEQ ID NO: 68975 - protein, 123 aa, Zea mays
  Clone ID: 700201151_FLI.pep
INKIYSFLSFFYLSPFSSKMIELTTKISENGGNAYRAQKTFYVANSLFFSLFTVIVYILSKESHAATLEAASALDHWKELHLTLSIHTWYYFASLRSSVDVPTHANQRWRLVRSSGTAPPREK

SEQ ID NO: 68976 - protein, 163 aa, Zea mays
  Clone ID: 700172527_FLI.pep
KFRLHTLLYQGGIKYILLSDFSICTSKHKAHQVAVPPAYTTRVTRRGIGIYVGARAAMQLDQSVYMPTRRSVGRGGSWSGSRCTGRCSGRSRSGVRRRDPRGSRTTGSGASRRGCQPRACTPRPRSRSCAARRPAASGRRAAGTPPRSRSRRSRSRFRSRSRS

SEQ ID NO: 68977 - protein, 206 aa, Zea mays
  Clone ID: 700205612_FLI.pep
VVTCRLLLEFAIVPLNQRVASTNPDSHRIHTFHVRAGACCSCAAGWAPELGPAGAGAPAHDDLLFLLLELVGLLVGLVLEAAPAAAAAVTMVTAGAVRVRLLLAVGLLVGFLVSLVAVVVRVVSSVHGIVVEAAAVGRWGLITPVHLLERRLLVDNVVLLHGAAGMAGFLGDLGGDVLAGVGAVVVRGGVRLAVAIAGAPEHRCSR

SEQ ID NO: 68978 - protein, 96 aa, Zea mays
  Clone ID: 700211805_FLI.pep
ATKNGFEISVWYRSMVDSTSAACGREIEAASYRYSLYRYRCIHQPWPRHFCPGGHCLFSVIRVGLFCHYEQAFPPKSFTCVGDATLKSSSPGMGEK

SEQ ID NO: 68979 - protein, 114 aa, Zea mays
  Clone ID: 700264101_FLI.pep
RATAQTAADKARETASTHDTDREQGQGLLGALGNVTGAIKEKLTLGQGQHVDVRLGGEDERAAKERAAEKAASVYFEEKDRLMQQRAAERVDQCVEKCVEGCAGSSCVHRQGKM

SEQ ID NO: 68980 - protein, 324 aa, Zea mays
  Clone ID: 700223048_FLI.pep
NVHPDEQMEVVTADEVLEDTGITVEEKQKSTITVDRDAVDDPFFKTDDVHADEQMEASTTDEVPELTEADYEVVEEKQRSTYTMNGGIEDDHFKTHVAHADEKKEVVATDVPEVTGTAGEIEEKTSVTMDGDVVFDHADGQKEVIVTEVPDEVTVTGDEGVERKAAVITEAIPDHGTAPSIAHTMNGCVKETHFGDGNEQKKVITADIISIPQDDCVRKENASSIDVAESLSSNKSSGCKNSSENNTAEPMAELKEKGVKATKKPVDLFALSLGKLKAKIKDRLNAEKKKEAKRLALARVDENVCRSIPRKGAGQQRNLNLQQH

SEQ ID NO: 68981 - protein, 823 aa, Zea mays
  Clone ID: UC-ZMFLB73206A12_FLI.pep
PPLPRSGQGGGSSAGMGAMSASISSVNWLVEDDILLKNAVEAGASLESLARGAVCFSRKFTLHEIQDRWNSLLYDPDISTQAASRMAEYENELSTSDPAKAHKLFNSKAKDFSFQKRKIDSVKNLYYAMRKRVRNDPRNSGDLGFLVPCSCTAIGSECICGGLPNNIEPELNSVSRYGQVGSRYTIGHSYSEMNEHAFHTKHTESMTRDGDGTSNVVYGYSDVGQLYEHHAYTANNHGNREGNNLSLKSITNFQDSMQFQQLDNNQCGNGVVDSKALVIPNHFSGSVQEPMPLQMIGQPEGSEAPGGAILSLQRSDRLALADDKDVKSEDRDPLTFEAHLDGGISGLDHATEFMDFPYFTNSEDLDILNSENLLNSPSEGIQEDLDDTALVVHGVRSTMQNLVHADEANMSCDQIDLGDVKNNVDASGIILFPTSLVVPCPGLYVECKLNTEDTEIPCNDDVSTPTEYPLECCTSTFGQKSENTIYSVSPAISPPSIAEQPNPSTSEQKEDSVAHDEGGVLGAKPSEGALTVGGLLPGNIDTNDANTCMLALPSFSTAGFGEGSPCSLGPHESFDNSHGLTLQNSVQAPDQMQHNSLDGKPELGDKAALQNCMPSNALPDLDIQNTIANAPTPAQAEECPDYEKDVPNYYDLEALILDQDLIPWDQDSDFMHPEVTGFPHPESRKALIRLEQGARSCMNRAIMSHGAFAVIYGLHLRCYIKDPEVTLGRETEDIKVDIDLGKEGRANKISRRQAVIKMDESGYFHIKNTGKCPIFVNSKEIPSCKRINLSSDSLIEIKDMRFIFHVNQEAVRQYIDRDLKPER

SEQ ID NO: 68982 - protein, 607 aa, Glycine max
  Clone ID: 700725047_FLI.pep
TSPNRPKIWTENWPGWFKTFGGRDPHRPAEDVAFSVARFFQKGGSVHNYYMYHGGTNFGRTAGGPFITTSYDYDAPVDEYGLPRLPKWGHLKELHRAIKLCEHVLLNGKSVNISLGPSVEADVYTDSSGACAAFISNVDDKNDKTVEFRNASYHLPAWSVSILPDCKNVVFNTAKVTSQTNVVAMIPESLQQSDKGVNSLKWDIVKEKPGIWGKADFVKSGFVDLINTTKDTTDYLWHTTSIFVSENEEFLKKGSKPVLLIESTGHALHAFVNQEYQGTGTGNGTHSPFSFKNPISLRAGKNEIALLCLTVGLQTAGPFYDFIGAGLTSVKIKGLKNGTIDLSSYAWTYKIGVQGEYLRLYQGNGLNKVNWTSTSEPQKMQPLTWYKAIVDAPPGDEPVGLDMLHMGKGLAWLNGEEIGRYWPRKSEFKSEDCVKECDYRGKFNPDKCDTGCGEPTQRWYHVPRSWFKPSGNILVLFEEKGGDPEKIKFVRRKVSGACALVPEDYPSVGLLSQGEDKIQNNKNVPFAHLTCPSNTRISAVKFASFGTPSGSCGSYLKGDCHDPNSSTIVEKACLNKNDCVIKLTEENFKTNLCPGLSRKLAVEAVCS

SEQ ID NO: 68983 - protein, 182 aa, Zea mays
  Clone ID: UC-ZMFLB73031C10_FLI.pep
AQSQLVLLLMLMLPSVTMLVVLLRTDAVDAAGNTTAAIGKGFAIGSAALVSLALFGAFVSRAGVKVVDVLSPKVFIGLIVGAMLPYWFSAMTVKSVGSAALKMVEEVRRQFNTIPGLMEGTAKPDYATYWKISTDASIKEMIPPGALVMLTPLIVGTLFGVETLYGVLAGALVSGVQPSFSL

SEQ ID NO: 68984 - protein, 181 aa, Zea mays
  Clone ID: UC-ZMFLB73160B09_FLI.pep
QNEDKHLQELEISTASEKLIECRETIINLGKQLKALASPKDAILFDQVLQTAVRSERKPRSQSLSEMLSMEDGGFYYSGSPKTKEIICTEPSASGEGNRPADDEGDGGSAAACSSSHPMPVAPHLKQACRVNRTCKGEADVKVVRLAVVPRKQKGNGNLLKRILTGRRKEAMAKPQVVLSS

SEQ ID NO: 68985 - protein, 222 aa, Zea mays
  Clone ID: UC-ZMFLB73194F06_FLI.pep
QRGSINSTNSNSLRREVPSSAQASASTRTKTGLSPSLSRPFSSGNSMTQAHSTTFAPTRSISLTAAQSVPPVAIRSSTTRARSLACTAPTCISILSVPYSREYSSEITSPGNFFGFLKGTNLAPMARAIGGPKMNPLASTPATTVIPWSLYRSTKRSMVSRNALGSSSSVVMSWNMIPGLGKSGMTRMEEAIPAKRASADAIATTACPRLPPVTRTPSGAAT

SEQ ID NO: 68986 - protein, 791 aa, Zea mays
  Clone ID: UC-ZMFLB73195H03_FLI.pep
VTVEELERTKMCLVQHEEDTRTLTQSLQSKHELLVHMESEIKCLRDDLMRTDENLLREKRLKEELESALASLTSQIGEKDQILLSFDEHKTEFIHLKGQLLDMGKTHSLMQDSLSQSEQIQRDLNCKNHSLQSQLSILENQLGAVVETMFSSEIEASYMRSQVREAVVQLNMLRNELEKLQLKSKDANESLRAHMSTEAELADRNSTLEAAIHSLETNLSSVIQEKEGLEELMKGHDEASNQVSNKSRDIAVNNSDRVLKDQDEILQLRVLQADLEEQVDNLKSAKDETEILNMILRSKLEEQHTVMSLLLQNQRHELINSIEENKDLTQKLAEQSLKAEEFKNLSIHLRELKEKAEAGRKEKEGSLHTMQDSLRIAFIKEQYESKVQELKGQVFVSKKYAEEMLLKLQSALDDVETGKKNEIALAKRIEELSMKVSEMEVEMLDLSADKRELSNAYDSMMTELECTKLNLDCCNEEKQKIEVSLEECSEERNRIRVELDLIKKLLENMALTDNNTSHDSSESCTPGTTSIRHVLGDGKAEPASKATPNTTKIDSGLQEHEIQSRSSSSNLSQGAEDVVKFDNNEESKNLENCDEEMESPTKNNLNSNNSIKDISQEHKKLANGFNLFQKELERLKDENLSPLLPLDVNLTDPSLSGLERTLSQLDMANEHLQSIFPSFKELPGSGNALERLLALELELAEALQAKKKTNILFQSSFLKQHNDEAAIFQSFRDINEVIQDTIELKRRQMAVENELKEMQGRYSELSVQFAEVEGERQKLEMNLKNRTPWRS

SEQ ID NO: 68987 - protein, 200 aa, Zea mays
  Clone ID: UC-ZMFLB73202G10_FLI.pep
CAPTLAASPTATTSSRSATAPARTAEGSRPPRPPPSPRCPRSRLLSPPPSAPSARTTCPSPPRRGSSPAPTSITPSASSPGSGCTTPAPSAASASPPPTTPTRPHRRSRTRRPRGSPSASAPPHAAASASAAMRHWRLISRRRPRSSHRLLPGMELVDLPIAARLCHLSGLRTPNRIQSCRRHARGVAFLIEPEVPIIRR

SEQ ID NO: 68988 - protein, 103 aa, Zea mays
  Clone ID: UC-ZMFLB73213C11_FLI.pep
QCLPMGWRENVDRIEPSRKSTDFFEPSRKSTDQRKKSRSTRDKTRNTEHRYSNVEKVDKLKISFDQFEKSRRSVDIFERPKRNIEQLDCGRKSVDRLDRIWAS

SEQ ID NO: 68989 - protein, 295 aa, Zea mays
  Clone ID: UC-ZMFLB73224D05_FLI.pep
GNFYEAQQMYKSTSARYIAAQKYSEALDILQSGALVQLKHGQVTCGGELAVLFVDTLITGELPYSEQIFDRIRKMYEAFPRVTVPHFLGDDYDDEGHQLSEAISAAKVRAESCSSFMKAAIRWSAEFGTSRNGSSELHVMLAEYIYSESPETDMTKVSSHFVRGNDPKKFASMLVNFMGKCYPGEDDTAIARGVLMYLSQGNLRDANLLMDEMNEQLKSANSEFPKTDLIQFIKYLLPTLERDAYPLFRTLRQKYKTSTDRDAVFQELLDEIAAKFYNIQRQNPLEGLFSEMFKI

SEQ ID NO: 68990 - protein, 60 aa, Zea mays
  Clone ID: UC-ZMFLB73068F11_FLI.pep
CTGPNGSQAFSVCQFYKQGWLHPQDHDVIARGSVHRMPCNGNLLDLCCAGHLARNTTPHS

SEQ ID NO: 68991 - protein, 120 aa, Zea mays
  Clone ID: UC-ZMFLB73137H11_FLI.pep
YGTFQDGNSGRRTRQSSRKPAGNFPSPPAKVATEQILPVRLHRLAYLQHAVRVRHLCLQLTTDILYAVERRRFGWGTIAKCQPIQVRRSKFQADLKENIDCASSSSSSFATIQSNFRPFP

SEQ ID NO: 68992 - protein, 86 aa, Zea mays
  Clone ID: UC-ZMFLB73011G07_FLI.pep
KIAYREQNQVINDSCNDNNISYLQNQGRSNLKSFRYVAMNTQNLHGELCYFREREFYISHTTLICKVKPPLHRTHKYPLLSDSAGM

SEQ ID NO: 68993 - protein, 511 aa, Zea mays
  Clone ID: UC-ZMROB73006B09_FLI.pep
ALVPLLLAHLLLCVHGATVTSVATPPPLPVLPVPSYAQLRWQLSEMALFLHFGPNTFTDSEWGTGHADPSVFAPSALDAGQWARIAAQGGFGRVVLTAKHHDGFCLWPSALTEYSVAASPWQGGAGDVVAELAAAARAEGLGLGLYLSPWDRHEPVYGDTIAYNEHYLGQMTELLTRYGDVEEVWLDGAKGDAKKMDYMFDAWFSLIHQLQERVVIFSDAGPDTRWVGDEAGVAGYTCWSPFNKSSVTIGHTTAEYSSSGDPFGQDWVPAECDVSIRPGWFWHASEKPKNVTTLLDIYYKSVGRNCLLILNVPPNSSGLIADEDIQVLQEFTEIRRAIFSQNFAANATVTANSVRGEQDNLQFAPSKVLEDGIYSYWAPQEGQTCWEMLFDLGQSTSFNLLQLQEPIQLGQRVIEFHVAILVDELWQTIVEGTTIGYKRLLLFPVTESRYLKLTIDSARADPLISFFGVFMDPFSSIHSLQNHVKPPRTNSNEVTMLRMAHASVNKSIDAM

SEQ ID NO: 68994 - protein, 469 aa, Zea mays
  Clone ID: UC-ZMFLB73227B01_FLI.pep
PTLTTARRATVFSRTRCLSSTPASPTYEQGQHEEEPSLVVVGGGAAGVYASIRAKTLAPHLNVAVVEKGRFLSKVKISGGGRCNVTNGHHLEPMGLARNYPRGNKELRGSFFTAHGPQDTMRWFTDHGVKLKTEDDGRVFPVTDNSASVVDCLLNEARRLGVSLQAGKTVSSASVAQDGKFVLKVEKRTADLVDYINANYILVATGSSQHGYSIAAQLGHSIIAPVPSLFTFKIADKRLADLAGVTFPIVKAKLKLDGVQKSVPELTQTGPMLVTHWGLSGPVVLRLSAWGARELHQCNYQGNLMVDFVPDIHIEDVKRVLFHYKDQHAKHKVSNTFPTEFGLVKRFWRFLLEQESLNGDTHWASMPNNHLNAVAFRLKQWTFEVVGKGQFKDEFVTAGGVPITEISLGTMESKKQPNLFFAGEVLNVDGVTGGFNFQNAWTGGYIAGTSIGTLASTSNLPEQQSCFQL

SEQ ID NO: 68995 - protein, 406 aa, Zea mays
  Clone ID: UC-ZMROB73028H05_FLI.pep
ADTDSPTVPRRHTSYSSTPSRSQRGHTSDDESDGLSYADSVFGEIESNISFGDEGGESDTSLDRHTMVGREIGIQLDNESYMNTDTDIDPMNAGVYQWDSDDPEDDEDEESEESGLDEGDDTMQERRQQWHDIVPSGLNEQESEGAAWTWRTVGSQDINRTDLRVDMEGREIRRLFIGNPGDYVDARQFEMLLEQFADEDNNSRRGAPPAAASSIENLSSVVISKGYEINGGVTCPVCKDDMPITTVAKQLPCMHLYHSSCILPWLNSRNTCPVCRYELPTDDSEYERSKHAAVNEGGIHGVERTHPQEVVEETYEPEVDGGSNTGGDTMNETNTHEQHTAQQPNGAHGRHRWLFIAAAPVVSLVSLALVLCFTNPAGNVRRQLCRRSQTTTTAHVDTRRSWWSMF

SEQ ID NO: 68996 - protein, 495 aa, Zea mays
  Clone ID: UC-ZMFLB73224F02_FLI.pep
PPPPSSVWCRGLRWTLRPRLASARLKAMATERRRASVVVLGDIGRSPRMQYHSLSLANQASMEVDIVANGGSDPHLSLRENPSIHIHEMKTVQLTGISKISGALSLLLKAAVQFILLVWFLCFKIPRPDVFFVQNPPSVPTLAAVKLASWLRGAKFIVDWHNFGYTLLGLSHGRSHIIVKIYFWFEKYFGQMADGAFCVTKAMQHELAQNWGIRATVLYDQSPDFFHPASLMEKHGLFSRLGNSMCSAMGNADCISVEEVGEDMNTTAFTSKIDGQVFLKPNRPALVVSSTSWTPDEDFSILLEAALMYDRRVAAALGEDDSMDEGQLWIDIKNGKQFVYPRLLFIITGKGPDRKKYEDQIKRLKLRRVALRTMWLASEDYPLLLGSADLGVSLHTSSSGLDLPMKVVDMFGCGLPVCAASFSCIEELVKVNKNGLLFSTSSELADELMMLFKGFPEECNALKSLKEGAMKSASSSKWSTEWETNALPLVDQVIG

SEQ ID NO: 68997 - protein, 218 aa, Zea mays
  Clone ID: UC-ZMROB73054A08_FLI.pep
CTCASRFNNFCGEVPAAIFDKKIDALFINNNHFEFTLPASFTNSTASVIVLANLPRVSGCLPSSIGDMAGTLNELILLNSGISSCIPPEIGKLDKLTVLDLSFNSIAGALPDTIGGMRALEQLDVAHNRLTGEIPESICELPHLKNFTYSYNFFCGEPRRCLEVPRVDDRQNCIAGRPDQRPGEECVSFLHQPQVHCDAHGCIAPPPPAVHAPPPPVY

SEQ ID NO: 68998 - protein, 227 aa, Zea mays subsp. mexicana
  Clone ID: UC-ZMROTEOSINTE006D03_FLI.pep
VPCLACGRSSKDFADVHGLVMHAYNPPNADSLVDHLGLHKALCVLMGWDYTKVPENFKGYQSLPSDLVQASREDLIVWPPTVIIHNTSTGRKKDGRLEGLGNKEMDKKMTELGFSGGKSKSLYGKEGHMGLTLIKFANNSSGLKEAERLAEYLERQDRGRIGWSRAHASRSVDSDQNPLLVETDTRTAEKKRILYGYLAIASDLDELDSDSRKRASLQSRREFDPNE

SEQ ID NO: 68999 - protein, 237 aa, Zea mays subsp. mexicana
  Clone ID: UC-ZMROTEOSINTE002B06_FLI.pep
LGSKRKFLSQKEPKKQKIRTERAIGFTFTHSYYTCENAYSNFFLARDLAVGPRGKIALLVPHPPPADLAGVLVVAVRVVGVFGEERGGGFFVGVVAASLVAAGAVVVVRLDASSAVGYWTHRPAAVVLVLDLGAGEVRLDAAIDGRAADPAVVQQRVRRVHHRAPAAARAQPVLGLHLPLLERRRLCLRLRLRLRFLDVIGHGSPDNAHRRQRRRGAVGVALRRLLLSQLLGQRHHL

SEQ ID NO: 69000 - protein, 149 aa, Zea mays subsp. mexicana
  Clone ID: UC-ZMROTEOSINTE032D03_FLI.pep
KKNLHSSVSILVSISLCIRYRKQMFFSETRENIKPLKVSPFTGQTVSKYVNHFRIKYSSTQPWKGLSEQRARNGCSHGPTSLTTKQERSSLLLIPVEQLERLCHRRPVKTELHKLRDFRFKIASLWRVCSWSSWRRGLLWRIGSTLTCP

SEQ ID NO: 69001 - protein, 189 aa, Zea mays
  Clone ID: LIB3067-059-A11_FLI.pep
STQSSVNHPTNHGFEFQELPKPEVPHPVPELTKPEVPPHPTAVPKLPKPEVPHPVPELRKPELTPHPAAVPELPKPEVPHPMPELPKPEVPPHPTAVPELPKPEVPHPVPELPKPELPPHPAVPELPKPEVPHQVAPELPKPELPPHPTVPKLPHPEVPEVPNHELPPLPKAELPPKPEGHYPEPEAKP

SEQ ID NO: 69002 - protein, 416 aa, Zea mays
  Clone ID: UC-ZMROB73064G02_FLI.pep
VKVKPGQKYVAFQFPLVGHIYRSSHCKPGTFGLKATTTGIYTIPSNPPSTSPPDKKRKNAAKRNFERKKHTHTQNYPVHSFSSPYPLSRALLGHLDHSAALPVRGGLGVIGLSGVRYGDVDPDDVMVRRPFGGDDRVGSGHELVGAVGRRHDVVHPRAVLARPLHVLPFGHDHHRLAFSREVLGVDVLLRLEVLHHLHLGRRLADLLVVLDDVGPSVGGVVGAVERVEAAGEDVRAVAAGAHDGVHLLHPPPLVQVVQVRAVEVHLAGVRHLDRHAQHVPEVRLVGDAVRLPALDGPAGEHGVAVLGRPALGEHVAHAQALGQLRQRPHPALLLGAHVLQPDDVGAGLAQHLLHAPPPRPRLLLLLLLLPLAVAADAAPQPGPLQGDLVVLDVDGHARPARRPRQARRRLRLQDAL

SEQ ID NO: 69003 - protein, 102 aa, Zea mays
  Clone ID: UC-ZMFLMO17171A07_FLI.pep
AAGRWLTPLAFSSFKPLLHLGQLKMSRASIKIIPECYRLVMDLDSNFFKRKDARGSMLLAYSVSTASRSKLFLWMLQATLLDACYFALHFVAEDKVASELGS

SEQ ID NO: 69004 - protein, 152 aa, Zea mays
  Clone ID: UC-ZMFLB73170H07_FLI.pep
LAYKCVEVAYLKAAYYKHPTASKDRQVLQAVVQTAPGESPSSSASDIDNLNNNGLSKASSSKDANSPQVAGNHLLLAARNQPHLMRLLAYTNDVNSAFEATRKSHMAIASAAGNHENGVDGLPSVKTVLDFNFRSVNDLLRLVRISMESISC

SEQ ID NO: 69005 - protein, 110 aa, Zea mays
  Clone ID: UC-ZMFLB73161F02_FLI.pep
DTSMLQKPLSSSPCSVYSIHWVPPAPTDYGHSAECASSTSSTYGRSPQLLTGHRTQGSGWLSLQRVDGGRCPVSRKRRWRHLPVTLKSSSCPLAAHLAGTLFAIWPVTAK

SEQ ID NO: 69006 - protein, 185 aa, Zea mays
  Clone ID: UC-ZMFLMO17091B02_FLI.pep
FSLPWRAPPSLAAVPLCWSELQLAAPVAEASSLRAHQLPMSRSIRLNRSSPAVHACRCAAALVRISPKLLPWLTGVWPAPIRVRSYRHRRVVAGDSFACASNSRVESFSCSPARPLGSLGLNPHRVVDLVGYHRSSSRRVCSSIYVTLLYRRRTRHPLFDPHLTSSLQTRSRRRFVCRQEIPSVG

SEQ ID NO: 69007 - protein, 536 aa, Zea mays
  Clone ID: UC-ZMFLB73015H10_FLI.pep
SASWPRTPSWISLLRGHTFYSSFARIFKRLIQQCGMPVISSLQSTLEEFLISKERPRQCVAAEAMAGMLHSDIIGNLECENNWLMAQLHKIMLAPSVESAPEWAACIRYAVTGKERAGTRAPVLRQKVLECLCTPLPHSMATSVLAKRYSFLSVALIEISPPKMSPAEKQYHVKILDELLDSMNHSSAQVREAIGIAMCVTTSNMRLSGLFGTGCSPQGLHGDVSMIEQTGNKYWSERLTDGANELAVSIQNSTQSKQLESTSDSAEDSMDDREQADAKRMETIFHFMIASLKSGRSSVLLDTIIRLVYPILSLQETSNKDLSLLAKSAFELLKWRILHRPFLETAITSILPLVSDPNWRTRSALLSYLRTFTYRHTFILSGSEKSQIWQTIEKLLVDNQVEVREHAAGVLASLMKGIDEDLSKDFRERSYAQAQHIFVARRRNLKFSVGTIHGAVLALTASVLSVPYDMPSWLPSNVSLLARFIREPPPIRSTVTKAVAEFKRTHADTWSIQKDAFTEDELEVLRDTSSSSSYFA

SEQ ID NO: 69008 - protein, 314 aa, Zea mays
  Clone ID: UC-ZMFLMO17089F02_FLI.pep
GAPPNPFDFSTMMNLLNDPSIKEMAEQIAKDPAFTEMAEQLQKTVVSPRQQQQQQQARQQQQQLDPQKYVATMQQLMQNPQFVAMAERLGSALMQDPAMSAMLGGLTNPAHKEQLEARVARMKEDPTLKPILDEIESGGPAAMMKYWNDPEALQKFGRAMGVGVGPSGEAGGAEHAEAEDDAGEEGEYEDESIVHHTASVGDVEGLKKALEEGADKDEEDSEGRRGLHFACGYGELQCAQALLEAGAAVDAVDKNKNTALHYAAGYGRKDCVALLLESGAAVTLQNLDGKTPIDVAKLNNQDDVLKLLEKHAFV

SEQ ID NO: 69009 - protein, 706 aa, Zea mays
  Clone ID: UC-ZMFLMO17089E10_FLI.pep
SAPSPLHSTPLSLSLPLLTRRRLQMPALHPHRRSFPIPLLLLLSLFASSPLFFSPSPAATAVGDCPLDFSWANFTLAAAACSDPTQRAACCRYINAFVAISIARYANATGRLGVPPAFAEICLSSVSETFKLRGIPTDADVFCGLGPKIRVSYQCAGRDTVLEMMQSPNFNDVIGSCRGPLSLDITCKTCLNYGIVYLHRLIGSDDNVGLSVCRNAVFVTLATQGGILSYEDIVTCFFGVQGITTFPGPASVTSTPASSPNVTVDSPAPRIKSLPQKQHQHYRITVIPGIGIGVILFAVLLQIVLAVLIRRKSRELKNAEFPARNPDNTFHYNQSWRCPEGQSPMFQRFSYKETMKATDNFSTVIGKGGFGTVFKAQFNDGSIAAVKRMDKVSKQAEEEFCREMELLARLHHRHLVTLKGFCIEKKERFLVYEYMANGSLKDHLHSSGRKPLSWQTRLQIATDVANALEYLHFFCNPPLCHRDIKSSNILLDEHFVAKVADFGLAHASRTGAISFEAVNTDIRGTPGYMDPEYVVTQELTEKSDIYSYGVLLLELVTGRRAIQDRTNLVEWAQSHLSSGAVSPELVDPRIRGAVDVDHLHVVVGIVQWCTHREGRQRPSVRQVLRMLSERLDPGNGSFGEGMEDAEGGFYPRSSRCGGAHHRNELVPYGGGDMRSLHSSSSTTRSSYCSRSMLLESGQTQSPPETQ

SEQ ID NO: 69010 - protein, 154 aa, Zea mays
  Clone ID: UC-ZMFLB73003F06_FLI.pep
LCPATFPALTRIHNIWYHESGILSMTSAADDVRTWREELARARADLEQARSAILQLVIYSRQRWSLTADQRRQRDCRRLCMGSWRDVQCGSGLPSSGYDTWLPGAASSTASSGLPSSGCGTWLPDVASSTTSGNTVAGYGPPFPGAATCIGIAR

SEQ ID NO: 69011 - protein, 351 aa, Zea mays
  Clone ID: UC-ZMFLB73003F12_FLI.pep
VPMPILHMDMPPCHYIDYPEGPVHPVSPGYHSVSTENLQHERWIGTSYLRGRHPMGNLRHADTFEYRWEAPTPFRRYRSVTPPNHAISAYGPEASSPTEAYLSAPMKSRSHHSLINGWHASPVSSTDSDERICSLISVYGQQAQLQKQTCQSAKLGKNPQFGISLHGSESEAHPTRVSPSDSTEQPPSPCFRIHPPTTVENLLHCRVSACGPEASLPLHLAVTSSTSRSTVVASQVKKKMQVPIFYAEAVIGPTGERIEYIRRTSRSSILISNSEGTMYIEITGSAATDVLTAEQLIKNFMAEAAAASPGHSYDFIPSYLPAPRSAQADIFASPETSEVSSLPERRLQMIY

SEQ ID NO: 69012 - protein, 605 aa, Zea mays
  Clone ID: UC-ZMFLB73003G07_FLI.pep
HNDVRAAASCRQFATLWLLHASSRRGQEVEKGRMKSGERPKQMRGVRQESRRFRLLVIVAGFFLVSLTFVVISKPDSILSSLNGKLPVDQAPTSILIQQKVNSPPATALETSTDALRGDPRVVDDEADPRPQGFKGEEEESRVLSEPDATSGMTELTPDKDGSGRKSNEEVLGGGGDGEGKSKEDRGHGPEKHKVTLPTVSNYTIHDTEDTQNAKQDDTSNDQQGSKPLCDFSNFRANVCEMRGDVRVHPNAASIMFMEPGHSQRDELWKIKPYPRKGDEFCLSHITELTVKSSKVAPECSKYHDVPAVIFSLTGYTGNLFHDFTDVMVPLFTTASEFNGEVQFLITDMALWWTIKYHTVLEKLSKYPVIDFSKDGEVHCFKHVIVGLHAYMEFTIDSSKAPHNYSMVDFNRFMRGAYSLGRDSVTVLGEYPKVKPRLLIIKRHRTRMFLNLDEIIAMAEELGFEVVIDEANVSSDISKFAALVNTVDVMMGVHGAGLTNCVFLPQNATLIQIVPWGGLEWVSRTDFGNPAELMGLHYKQYSIGVHESSLTEQYPSDHEIFKNPISFHKKGFDFIRQTFMDKQNVKLDCKRFRPILLEALDNLNA

SEQ ID NO: 69013 - protein, 311 aa, Zea mays
  Clone ID: UC-ZMFLMO17084A02_FLI.pep
VCRYGTMRDNVINLRAVLPNGDVVKTGSRARKSAAGYDLARLIIGSEGTLGVITEVTLRLQKLPSHSVVAMCNFKTIKDAADVAIATMLSGIQVSRVELLDEVQIKAINMANGKNLPEVPTLMFEFIGTEAYALEQTLLVQKIATEHHGSDFVFVEEPDAKAELWKIRKEALWAGFAMKPDHEAMITDVCVPLSRLAECISTSKRLLDASPLTCLVIAHAGDGNFHTIILFDPSQEDQRKEAERLNHFMVHTALSMEGTCTGEHGVGTGKMKYLEKELGIESLRTMKRIKAALDPNNIMNPGKLIPPHVCI

SEQ ID NO: 69014 - protein, 119 aa, Zea mays
  Clone ID: UC-ZMFLB73173E11_FLI.pep
LNIGLMNNDSNDKGIVDYEVSGEGLREAIKGGDVKGVKKLLTQGVDSNYCDKQGFTLLHLAALFNQTEIALILMDHGANVESKNGQGETPLDCAPAMLQYKMRQRVEELAASASKGPLG

SEQ ID NO: 69015 - protein, 79 aa, Zea mays subsp. mexicana
  Clone ID: UC-ZMROTEOSINTE066C12_FLI.pep
VARATAGGSLSRHIVPPAFHGFIHFPVYLCICSFCDNNFHVLAIIYMGYTLVLSWNVWKFSFVALVFIFSNLVILEQSL

SEQ ID NO: 69016 - protein, 359 aa, Zea mays
  Clone ID: UC-ZMFLMO17016C09_FLI.pep
LMAMAAAQLEAEEELRLELEAVAAVYGDDVRVLRDLPPHLFVHVRPRTADDTSQQFVELFLGIKASSQYPKEPPHIYAVESKGLDENRQIYLITSIQNKANELSNCPMLVTLCEEAGEILSNMNHPAGDCPLCLYPLMGEDKVDSELPFMKLMSCYHCFHSDCIMRWWEWLQHGDTNPKEPNTGDKHYNVNQPRGFCPVCRKVFDEKDIEHVRDLLGDNTSRLASLTVDLGEDEKELLHSEAEQNRRKRIESLVNLQQELNGLIEPKKDLAIQPGMYVSVPPSTPDTAEEENADPSQGTATSTSETEQRGQASNASSNKPKNPGHRRRNRANASRRQPHGQGQPARQQWQRKEAGTSHQ

SEQ ID NO: 69017 - protein, 403 aa, Zea mays
  Clone ID: UC-ZMFLB73346B10_FLI.pep
ESVTTGGGEGRIEDRRSRKEGNREQLNPLAMALLMEPGAEPLTESEQADLAGIAAIKESAAREYKEQGNQFVRMGRRHYAAAVSCYTKAIAQMEPLSSLDASAAADASVLFANRAHVNILLGNHRRALDDAEQAIRLSPSSVKAYYRAVKAALALDLLTDAASFCRKGLEQDPPNEEFKKLLSEVDSKLREQDRQRAKVAQAIAKAKDLAAAMGKRGVKLGKAAYQELTGVKKPVLDEQGVLHWPVLLLYPEVMSSDFIEDFPDTDTFSPHLDVMFSETSPPLPWDDNHVYTRDSIELYYQGGFGKPLSRSEVLRYLLEGNVDSKALPDSLLDGEDEEHDSTKCTTVTSTDSSSKWIKVKEGKTLQEVLQDKGYIVPAIPVFFVVSRKSTFYKDFKAGNWSLP

SEQ ID NO: 69018 - protein, 123 aa, Zea mays
  Clone ID: UC-ZMFLB73401E02_FLI.pep
FYAYESLKQSLLKSAPDSAKLNSGQTLLCGGFAGSTAALCTTPFDVIKTRVQLQALNPVCKYDGVVHALKEIFRHEGLCGLYRGLTPRLAMYMSQGAIFFTSYEFLSTLMFPEPEQEVHARSV

SEQ ID NO: 69019 - protein, 395 aa, Zea mays
  Clone ID: UC-ZMFLMO17215H05_FLI.pep
LPPSLHSQVSTGTIDENNSSFNFGDSAIGSMKRKTAVVAGNHHILHGFAGSSSSVHVPQNPVYGPWNASSQSNCLPSSAASNLPEYHNSNGWPFLEESSANASNSFTSVDACPELVPHGNNLYPACHIIQCNTWVPQTASHGIPQWGYGNVMVNPPGTVDMPNGNIQDYQAGHSSIHGPLPHFCQIPLRSMQVPQIQVPHQQFIGNNVVHGLNPSAAGLPLDPRMLAFPFNDEHTFGHQVHPPLINQANNGALRILPYQNATVMDHSRIYEAGHVIDEHRDMRLDVDNMTYEELVALQEQIGDVNTGLTESYIQENLRSTFHVPGAASISDHFCELSLENDACIICQEEYEARELIGALECGHKYHEDCIKQWLMVKNVCPICKTTALSSDRRNG

SEQ ID NO: 69020 - protein, 157 aa, Zea mays
  Clone ID: UC-ZMFLB73013B03_FLI.pep
ASQQGVKTTIPQICARSKRLLKKCSLAKVSSFLPTAVPLLQNTVKQKSFIGSSHLGSHAVLEYQFLPEQPSDAYERGSQLRFYDALAEVLNSRVDSFSIGSHFTHVVEQAPSYTFHSQSSGSSCLSNIIASMAQIQILLLAWLKSTVKNWHPSSCQI

SEQ ID NO: 69021 - protein, 184 aa, Zea mays; identical to SEQ ID NO: 65078
  Clone ID: UC-ZMFLMO17065B01_FLI.pep

SEQ ID NO: 69022 - protein, 139 aa, Zea mays
  Clone ID: UC-ZMFLMO17068B05_FLI.pep
TLMTQAKSTPGRREMGRARSPEPLDFFIWTVEDVGLWLEEINLGGYRQVFQENSVNGEYLESLSMFTTEQILRFIRRCHMKWGDFITLCKELRRIKVACLKGEQEVRRPWWAPACLSVVFVRAAKQNRKSRVVSLKLEP

SEQ ID NO: 69023 - protein, 231 aa, Zea mays
  Clone ID: UC-ZMFLMO17068F12_FLI.pep
SLDRILDESFSKQNGEHSRSSLSSMVSFSGASATEPVVLGSVTSENYVEDLTGVRDRPVATLNSGEELQKVCDLLYEFKDEMLGASAAKCINKSSPSLEALLAESSDSEAQISDLEGTDSGAGIGSGRLFSTLSSSDDDDASAADEPLVDVADLTTPPERYTSVPSDEPLVDIADLTNPSGIDASSVNEPPADVVDLLHTSNEPLVSLDGLPNHPEMCFGGSSGEHIDSLI

SEQ ID NO: 69024 - protein, 390 aa, Zea mays
  Clone ID: UC-ZMFLMO17070E06_FLI.pep
VAVSPTEERATQTRRIPTCPGQPTSPNHSTNHEPETLATPMSDDATAAAPSSPSTSPSPSSASSSGASPSPSSPRTKRRRTDRYALGFEFAPRLAPYELPEEPLPDKHKRSWPNWTERSTLALLDAWGDSFVRAGRSIIRADEWLEVARLVCAAVGRPAGYFSDAQCRNRVDTLRKKFKKERERARRAARRSGPSPSKWVYYDKMVAILCPTPPPLPTLPPPARPPPLPLQLLPLVAKRRRDRQPARRFQWGMKAPERLLGGAGDVVGPRVSGSGAKLGELGPQKNSAVQGKRNGFMALTESIQKFEEAFARMESSKRQHMVKVEQMRRDLQRDLDAKWREILEKAQAEIGRLSNEDGDEHDVDEDGDVGDGKRLEGGDEQNNGAMDASP

SEQ ID NO: 69025 - protein, 317 aa, Zea mays
  Clone ID: UC-ZMFLMO17072C08_FLI.pep
CGARGVRRRCPGSRRLRRATRLSQRLRLGNLLEDGLSYKESFIVRCYEVGINKTATVETIANLLQEVGCNHAQSVGFSTDGFATTTTMRKLGLIWVTNRMHIEIYKYPAWGDVVEIETWCQEDGRIGTRRDWILKDLANGEVIGRATSKWVMMNQNTRRLQRVSDDVRDEVFMHCPKAPRLAFPEENNGSLKKIPNLSDPAEYSRLGLVPRRADLDMNQHVNNVTYIGWVLESIPQDIIDTHELQTITLDYRRECQQDDIVDSLTCIEEGEEKSMNGSASAAAPHKEERQQFLHCLRFAANGHEINRGRTVWRKLAR

SEQ ID NO: 69026 - protein, 125 aa, Zea mays
  Clone ID: UC-ZMFLMO17072F03_FLI.pep
LIVLLMSMRLVCCIVHLCHSARRKQHKGLLFLRDCDLVKRCGNRPFFTCMCKEFILQYNKIASVMFVVLQPGLREPSRSDQEVRAHVLQAVLSQQRQGHWFHQVPLKRPLCCCGELPTSKKWVLH

SEQ ID NO: 69027 - protein, 204 aa, Zea mays
  Clone ID: UC-ZMFLMO17075A07_FLI.pep
GGDPPPSSLALLTAMLPRRQSIFHLGEEGGAAAVHHRVSVVGAASSSMAMGGGRRARERERLVVGLQILVHHHHHGRHGHGHAHAANVVLKQMVRPRAAVAAAAGSRHGHGSHAFSCSFLKACYLCKRELSPDKDVYMYRGDQGFCSEECRWQQILVDEAREREAAAVMSNKELQRRAQARHHSPHRTPMPIRGRPPRKTLAVA

SEQ ID NO: 69028 - protein, 353 aa, Zea mays
  Clone ID: UC-ZMFLMO17075G09_FLI.pep
IAAPHRPSTAHRRPISKESAPKHFNVASPHRPSTVERHTSGRDMTSKYVGIATSYLPSAVKQRPITGEGAHKHADVVTLSCSTADRRPIRDVAPKHATLALPRRPSTAERHPIARDIAPKNGLSLRPSTAERRTIARNVEPKHAPAQRPSTAERRPVTRETVLKQANVANSCLPLTPDRRLTKKGDISTLECPSTGGRCPITSGTALWSRTMPYYSKGALVTEVTPQKTITPRVVRNSKLENLSYAKERVELQVDRKQKSSPFNLSSKKTLTSNVRDDQGLEMFKKPNKEGGVRAHAYKSNNATPSRTGNVKIKAPVPPPLPPHRPYCTEKKPNVNSSPVGGRKTKASAPHWH

SEQ ID NO: 69029 - protein, 87 aa, Zea mays
  Clone ID: UC-ZMFLMO17079B06_FLI.pep
EQSYHKEMKVPVGYSDHQFPRALCAELSKLIKNKHLQHTIVSRGVDADDHRDCRRPSRVVVGAYPFPNQAVTSAVSSVCDLILLVKE

SEQ ID NO: 69030 - protein, 129 aa, Zea mays
  Clone ID: UC-ZMFLMO17161F07_FLI.pep
GFGRTTFPDEFYMYSLADSPWTDTSATAGGMGGRVQSPVSLTPSPPPRPWQVGMTSSPVWPSPSRRVWRWRESDGRLHTPDVVAAAAEPVASVWHVVRRVGRCEHGGERREQSRIEESEGRTSRMAMLD

SEQ ID NO: 69031 - protein, 161 aa, Zea mays
  Clone ID: UC-ZMFLMO17077C01_FLI.pep
FSRGFGSAVPEMESGMSSARRRRFGLEASRGMLPLLALQVIIEYGHAGASRPPVTVALLAVNSLVYLRPGALGGVLPSLARVSFNPQLIIEEDVNCDNTQTVEQQQPSDDRQTVEHAPLQETDPGKETHVSEAKTLTADADGNLSSSQQTGEYNELLRQYY

SEQ ID NO: 69032 - protein, 275 aa, Zea mays
  Clone ID: UC-ZMROB73076G11_FLI.pep
DGAGVAGVGDDNVGGADDGDHGGGPHVIATQGLLLLAPAGGLVAAAAGRPAGGLLVQSREAPLHHGLPRRLFARTICLPVLVRDHLVHHVLAHGWWEQPWPSKTPKKCCLLVPGTKSGLTETVSSISRRRPQTEVTPYLGNRSGRAGLSESEPEPEPASGQVLDSVRASLCRLAARTSSATGASGSPATRNLLISNLRRLLSNAEEATATAAAAAAVAETEAAATAVAGVDLASSQQISAIGGESKRLPPRKARTGASGKAKGLSRLTLGYWREA

SEQ ID NO: 69033 - protein, 172 aa, Zea mays
  Clone ID: UC-ZMFLMO17066G11_FLI.pep
YISLTCYINCRRRKEVELRLIEEDTAKRVEQAIRKKVEESLNCDEIKREIQRRIEEGRKRIHEEVAIQMEKEKESALNEAKLKVEREKKERNELEKKLEEERKKAEEALRKEAMEQQQKELERYQELERLQKEREEAMKRKKMEEEQQRQNQMKLLGKNKSRPKLSFAFGMK

SEQ ID NO: 69034 - protein, 667 aa, Zea mays
  Clone ID: UC-ZMFLMO17067B07_FLI.pep
KKKSWSLLMRTVALRKKISSGRERIARRRANAGDATDKHTNEPRENSNASLQKHHGNRGKFADSSLYELSVMCVKQCHADNYNNVSQHSSQTKLNQSSNLTSFVLKAFLELLKSLASKHSRDFTIKLHGDFKKLSQPIMQLVWCFLLDPIQENGGSKKNMTQGKKNTECKKDQLYLALTCLKKFLEPSVSGEHSSDIIDFLISLAPPNIEDTMGTGDLDNNDTTMVEDRSTRNVHVILNILKTLYARLLTQSVLRESEAVIELILGISRKLQLERRHLVGKWATDLCRKKTMQSPRMAREMLKLAIHLTPAPDDMILVYEVSTELMNLMTSGDDGDSSDTFHIINCKTKSSLAALSLQMVESSLTELDWGFGKLKAMLTLGYDCANIDEDQPADEIMLRLALEKALYSRSTLVVQVLSSFAHMSPMDTQAEHFLKLTVKFYKLLTRMSKSQIAPKGYRQSIPSLKFQKLAEVTCKMLTAPLYDFVFQQNQQIPIKGNLAKIRRETKCIPDLIFQIEDYEKYLIQLSKLTKVNLLRHAKRSVARDFQIKDKSGGQQEDDHIPDNAAASDNEADKDAMGPNAPVESCADDAQKSYADENASCESGHDEDAGGPNTPAEADADEIIRSSIPYGSPVQESESDREEEELLARTKRAKTKQVVQDSDEDADE

SEQ ID NO: 69035 - protein, 314 aa, Zea mays
  Clone ID: UC-ZMFLMO17022B07_FLI.pep
SFSRPRLSPMRSPRGLLTASGYLAGRHAPSASVSTTGHNSLLARTFQILAQPESVRLQKHPAPNSGILELRLERPEVKNAINWDMMRMLRSAIEKIQADTTAKVVLVASSVPGAFSAGADLKERRLMSSSDVGGYARSLRSTFSSFEALPIPTIAVIEGAALGGGLELALACDLRICGENAELGLPETSLAIIPGAGGTQRLPRIIGRSRAKELIFTGLRCGAAEAVTMGLANYCVPAGEAYQKALDIACEITQKGPMGIRMAKKAINEGAEVADMSSALAIEEECYEQLLYTQDRVEALAAFAEKRKPVYTGK

SEQ ID NO: 69036 - protein, 139 aa, Zea mays
  Clone ID: UC-ZMFLMO17022F12_FLI.pep
LTVSLSLSLFRNNGYLKHEKSTHLTLLNSSVNTLNGCGVCMTFSLSLYGSSGCIGNLSRSQSLPDSKPKRSLRKKYQDSSTGNRRRWQSGLEAMEKNVSISVSLEGNISSIPNSIANDSKTSMENRVDTSFINHGTISF

SEQ ID NO: 69037 - protein, 708 aa, Zea mays
  Clone ID: UC-ZMFLMO17071F06_FLI.pep
VGYTRQPIEDETWFLAHEIDYPSDNEKATGHTRGNDRHDRPTKDEDDDQSFVEEDSYISGEQYFHGKNIAQIGTSEGPMVHGIPDNDMIAQYDGQLLDSEELNLMHSEPAWQGFVSQNSELGMLGNGKFLNDSERPHPDDLFVEDDQHGSVRSIGVGISSDAADIGSEVRESLIGGSSEGDIEYFNESSLSVSGKRHPHQDTEKKRVGAKGVKHDQIIYAADIQKGNLPPGATDVGFSFPPPLHSGKNHESDAKSLWSKKDEMYCINDPDDCQNGMVSDDMLATWRKKNSESSLRSSRDEITSDVVRSRNSSASYDETEDTSNARHHKLDDAQEEDTGTNLDDEEAAALQEQVRQIKAQEEEFETFNLKIVHRKNRTGFEEDKNFHVVLNSVIAGRYHVSEYLGSAAFSKAIQAHDLHTGMDVCVKIIKNNKDFFDQSLDEIKLLKYVNKHDPADKYHLLRLYDYFYYREHLLIVCELLKANLYEFQKFNRESGGEVYFTMPRLQSIAIQCLEALQFLHGLGLIHCDLKPENILVKSYSRCEIKVIDLGSSCFETDHLCSYVQSRSYRAPEVILGLPYDKKIDVWSLGCILAELCTGNVLFQNDSPATLLARVMGIIGSIEQAMLAHGRDTYKYFTKNHMLYERNQESNRLEYLIPKKTSLRHRLPMADQGFIEFVAYLLEVNPKKRPSASEALKHPWLSFPYEPISS

SEQ ID NO: 69038 - protein, 766 aa, Zea mays
  Clone ID: UC-ZMFLMO17074D02_FLI.pep
ENVKLLLTGQNHHFGNPFLSWSSSLCYGDIHPDALLNKEKHIKKDEKAYHVNLLNYHSNMVETLKSWRKRWLSCGDTENLFRDNPSNQMQGVMQLKATNSGMPMKVAQRIDVSKFMSYIKVSRTQLNHIKRLKQSGDGIQTKHVSRVIGGLDKSHVKPYGALLEDEQRRLREHWLEMSCNDLPAAFEVLRERKVLMEKSIKLLGLELQQKNVSVLRKADQLTDIMKGLGQPGASENDGTPVFQNDQVECSPQSILQGGHVQSTSLHHQDDEQSVYHIHRMNVEDHDLMVVRGIDITSQSEKNSDVPDQSRNGISCVDKGIYCCANNPDKQSDVLMDIKLCKGGLVVYNPDCKNTQLEDLDGVSYKGPSVHACDQDQDLESIGHAVVNHNCHNSPNISSEMSHPTTNAVIDQETENVMKPSCSSSQLPKSSGEQMHVEDFLYLNDQAAKFEKVSGQLAGPLGPPENMMYNDSGDLQIKQTYLSSGQHFSSVYLNNGILSHQQPQLATPAFALDNPASFIEPFSNLQSNRQPETEKDIGAVFYPFRHATNIKHSASLHCLVNKGLAQSASFPRLLQERHQLIDQSDSDLYAQPHEDYCTDVSCPTKVNLHISEQHSYTAFASMDHRYNWFPEGCQSHNNNDNLLGLQSGNFLPQALPSGSSTDGALFSTASQYNQPSVHMGHGGSNRSQLIEPRNQFGPPQNFLSKSQDTNPMFPDMYGFTQNIASGTSSQVAPIGSLDCSHWTNFIQQNSGMPSDFTNRPSRGPWTR

SEQ ID NO: 69039 - protein, 841 aa, Zea mays
  Clone ID: UC-ZMFLMO17070C03_FLI.pep
EERKVILLVHDTKPPFLDGRVVFTKQAEPVMPLKDPTSDMAIIARKGSSLVREIREKQSMNKSRQRFWELAGSKLGNILGVEKTAEQVDADTAVVGDQGEINFKEEAKFSQHLKDKAEAVSDFAKSKSLSQQRQYLPIFTVRDDLLQVVRENQVVVVVGETGSGKTTQLTQYLHEDGYTTTGVVGCTQPRRVAAMSVAKRVSEEMETDLGDKVGYAIRFEDVTGPNTIIKNILWACLQYMTDGVLLRETLKDADLDKYRVVVMDEAHERSLNTDVLFGILKKVVARRRDFKLIVTSATLNADKFSKFFGGVPVFHIPGRTFPVNIMFSKTPCEDYVEAAVKQAMTIHITSGLGDILIFMTGQEEIEATCYALAERMEQLISSSTKTIPKLEILPIYSQLPADLQAKIFQKAEEGARKCIVATNIAETSLTVDGIFYVIDTGYGKMKVYNPRMGMDALQVFPVSRAAADQRAGRAGRTGPGTCYRLFTESAYQNEMLPNPVPEIQRTNLGNVVLLLKSLRVENLLDFDFMDPPPQENILNSMYQLWVLGALNNVGGLTEIGWKMVEFPLDPTLAKMLLMGEQLECLDEVLTIVSMLSVPSVFFRPKDRAEESDAAREKFFVPESDHLTLLNVYLQWKSNQYRGDWCNDHFLHVKGLRKAREVRSQLLDILKTLKIPLTSCHMEWDVVRKAICSAYFHNSARLKGIGEYVNCRNGMPCHLHPSSALYGLGYTPDYVVYHELVLTTKEYMQCVTAVDPQWLAEMGPMFFSVKETDTSLLDHKKRQKEEKTAMEEEMEKLRRQQAEAARMEKEKEREKRAKQQQQVAMPGLKKGATYLRPKRMGL

SEQ ID NO: 69040 - protein, 135 aa, Zea mays
  Clone ID: UC-ZMFLMO17164B02_FLI.pep
NIEGEIAMKYGPLTYVSSMEDTTGASNAVQIWRHRVWRHTVTHHAMPRTKTPMETAMPKAEKMKGDICTTGERPLSGWGEKHVWGRWGRLLRPRLYTAPSQVSACCATTSAELLPCLRKLLHAAKGLSPSVKLSP

SEQ ID NO: 69041 - protein, 395 aa, Zea mays
  Clone ID: UC-ZMFLB73192C09_FLI.pep
TLVVFYAVNQKKRAQRLVSINNPFASWGSLGEDIGAAPQLKSAKFFSLEELKLCTNDFREINAIGAGGYGTVYRGKLPDGQLVAIKRSKEGSMQGGLEFKTEIELLSRVHHNNLVGLVGFCFEKGEKMLVYEFIPNGTLSEALYGMKGIQLDWSRRLKIALDSAKGLAYLHDHANPPIIHRDVKSTNILLNEKMTAKVSDFGLSLLVTDSEEGQLCTNVKGTLGYLDPEYYMTQQLTAKSDVYSFGVVLLELIVGKPPIHNNKYIVREVKMALDEDDGTHYGLKDVMDPVLQKIGGLFGFPRFLKLALQCVEEVATARPSMNSIVREIEAIMLDNGLTPGSMSTSSSFSIESRTMKVGPKHPYSSSSMSTSTFDMDSRAFEYSGVFPSSHGSLKP

SEQ ID NO: 69042 - protein, 649 aa, Zea mays
  Clone ID: UC-ZMFLB73022G09_FLI.pep
PPQSRDGRSAMANSRKTNSSRNHGPSLLQLVERLQQHGPEHSEVDGDVLLHDGLGERLPPLLVERHGVAEHHVLPRVLVLEARLLRPDVVLQVAEPQPRRRPRVEVGGHPVHLAPRHDLHHHGLRRQEHLVRQPGAVHAHQHVGRVHLRRERRHVRAGLRRRHVEPQLVRRRRHLVQVQQPPGAGARDDQHPGPRPGLLPEGRGPVARQRQRAAQEPREVHHRQVARVPGRVRRQDQVPVAVQPQERARGEAVHGVVLVRGVEAHHVVPGQLPQHRRVLLHPPRLVVGHQQLHVAVQVRRRQEQRDQRVRHVVEEVVRVPGHGEHHRRRGVLPRALGRHRGRRHRLHRHLRHAGEKKVVLAGVRPDPLLAALVEPAAARRVHQVHRPLLRAHADVAGQLAHGRPGVREPLVHAVLVANHLAYSLPATTAIALAILRWLGGGLGRRILAVVLPGGQAGLVGARRHVLPREGSFRQAGLLGARRALTQIDGIRAVAAAAYRLLRRDGLRLRHGRLGRGRRRVLLHQRGRVGRASEDRGVDCEELGEGDVGEEREAAAGDEADAQLLGLDLGREPPHEARGQPPLAARQLGRPRVRRGRHVSAGEVEQGRAHPDPEEGEGEGERGGGSLMPKHLYVGRKKRGRAGGRRSAIN

SEQ ID NO: 69043 - protein, 151 aa, Zea mays
  Clone ID: UC-ZMFLB73043D03_FLI.pep
DVESPVLPQSPAATTPPSSSSRHYAGRRVASCLDARRPAGAPSWAAGLLHIIGARGAGGGLHSIPSLGCVAPNPIAWSSLLLPEVDGRLIVLVAAASAPEPQLERSPATSRRPARSLRRHAPPRLGARRRRYYHNIKGDAFTPESIASRTC

SEQ ID NO: 69044 - protein, 324 aa, Zea mays
  Clone ID: UC-ZMFLB73028F05_FLI.pep
ICYTKYCQTVVGGTVENDSGPVFDKTPIGSVSAPGLFLSELECARALRAYLCSRFIELDRNIIDFGEHRANCCDIQQSFADGACLDNVFMQCVIECVRDDWSKHIPPLNAHQLILDVNVGAILNFEEQEQHSKSPRPFDPSVLESYLLKTLPSFKQLDDYKSIMVPMLRSGHWTLYVVNLQIGRIHVLDSNPYGPEMGGTIWKNYHCIPMDLGDRKVSWAMLMMSRLNLAIQNARPRSALPAFLKYPIELMNNCPTMKLGSNDCGFFVMRYMQNYDYMVGAMNAVIDPDNSEDIRSLVLHYLIFHRLNRNSFVVSHLDRFKFSQ

SEQ ID NO: 69045 - protein, 287 aa, Zea mays
  Clone ID: 700439921_FLI.pep
VFQTLTAPAVVSQGAPQPPPGPSVACGCPLPAVRANPKLRLTGGRPVQAGAASCPDLGPARAGTGPPAAARRSASTPAVRGAGPGARPPGGSAGRRCRRADARSPGGGRVDPALEGAGARPPAAARAAPARGLSWRRRRGPLESSGRDGSTAHGHAARLGRGRPTLRRHRHAASAPTMRGAEGSAGERPFRRRGFGQGTPGGDSSKPSARARRPRPRRHGRSHSGPGGAGPMGGSGAARRAQASALGRAVRSASTRECIPAARGYGSTGAAHAQAHRPGNGNDNGFA

SEQ ID NO: 69046 - protein, 547 aa, Zea mays
  Clone ID: 700267637_FLI.pep
IGGTRDPATMGTGRRKGKRSAAVASVDDANEAMASAEALCVEHQDPPLASAEGTDEAKAANGEATAVVEPDEPRRDSSPERGDGDAARLKLLNGILIRTASEERERVAALEARLAELSADAAVLADGESAVLLAAFSAQLRAVEEEQAALLDRIAVAQESLERVQAEAASEAMASADAAARLQEAIVENGSLSEQLRAKADEADAAAERVAGLEAAVAGLESQISDLRAKRSEFESQLEAMRASAHAVQSEKDVLESSFNELKKENEAYKQEMEATLQDQLKDSEALQFRKVELEAKVGSLEAELSEAVARNHGLELEGHKLDVEMAATKADVEKLQASLAEMDQKQIAVAAEVARLQSEIDQVAIANEAAAGAHEAEKKMVEAELEMLKVNVDRVQAEKDGALVLVDAKDAEVGKLRDELKKLHSSMAELRALCDDLNGKSSFLHDEKVLVLKELEQEKAQAEKLKFKIQELESCNRDNVHEIGVLKAEVGGRDKQINDLNSELEQVQLAVADAERSGKNVVWTWLCPATTTVLAAASFVYAARSR

SEQ ID NO: 69047 - protein, 233 aa, Zea mays; identical to SEQ ID NO: 47999
  Clone ID: 700466822_FLI.pep

SEQ ID NO: 69048 - protein, 395 aa, Glycine max; identical to SEQ ID NO: 38715
  Clone ID: 700556924_FLI.pep

SEQ ID NO: 69049 - protein, 435 aa, Zea mays
  Clone ID: UC-ZMFLB73063A12_FLI.pep
AEVRKVLGLLVGQIQTKILEKRNQFRYFRILSQVAYLDDIVNSWAYTYQRTHVDTRTGTSRMKSSSAKECQRTKYAAGTNVQVAPVAIPAEVQDIPAQHTQDHEVVPGPTEVQGNPVKHTAEQPGSYSMDCDLDNHVNSVSSKDAVEHDHVHSALPDVHRGNTHADTVTNDGEPIGANNNGKVSRLTYGEDKFRPGIQRSENHTESMEGLSCLQRAGDSVGSPASINNTELPKNNVSSEAHIDDNELRRNDLVNDVESNSIDGKHDTMMNLSVPKISCLYKCCSPCFQSIYKMVHGIISNTLRPNLHCLTADDMHDILSSWCLNLLGSVRKLYSSHDEASCTEVFVRMSNKETHLEHCACQSDIYLSRECVCHLESNGDVETANTDCHPLSGQSLSFFFKDGVWMPLDLTAETKLHCSFRRFCVCSILGTVSMLS

SEQ ID NO: 69050 - protein, 343 aa, Glycine max; identical to SEQ ID NO: 54696
  Clone ID: 700873763_FLI.pep

SEQ ID NO: 69051 - protein, 567 aa, Zea mays
  Clone ID: UC-ZMFLB73084C06_FLI.pep
SGMEVFGCGDGVVDAEFAEVDPTGRYMRYNLILGRGAFKTVYKAFDEVEGIEVAWNQINVDEVMQCPDNLDRLYREVHLLKSLKHGNVMKFYYSWIDDQNKTINVITELFTSGSLRLYRQKHPHVNLKAIKNWARQILHGLDYLHSHQPPIIHRDLKCDNIFVNGNHGEVKIGDLGLATVMQTPRARSVIGTPEFMAPELYDESYDELVDIYSFGMCLLEIFTLEYPYSECTNPAQIFKKVSTGVKPAALAKISDPQVKQFIEKCLVPASERSSAKELLQDPFLCPDNAHDSAGTKFTSPAPNKTVDMVSLHMEVDTFGSSPTNSGKENGCVAPHTPVLEFTRTNKNTELKLKGEKLDNNSVSLVLRIADLSGHARNIHFLFYLDSDTALSVAAEMVEQLELADCDVTFIADFIDLLIVNLIPGWRPVNDAATNSYTQSESELAITSHNNLSKLVPDYALIDGMMHPKDVNVSTGFLDSVSSATNIGGSPCSEGSVISVQRAESFKSVSDYEPEDYGTMDCGGYKEGISKENCSHVVDDGSRLIFHTDQDHFSWSWPMASSASIIYS

SEQ ID NO: 69052 - protein, 407 aa, Zea mays; identical to SEQ ID NO: 40601
  Clone ID: UC-ZMFLB73086E11_FLI.pep

SEQ ID NO: 69053 - protein, 192 aa, Zea mays
  Clone ID: 700807059_FLI.pep
IISEMLRHVTIMHYFRCLHTFPLLSRRRQRVQPEHLDGEGVRRRRRIAAHDLLLPQLRRRARPAGERGRVRDVPRVGRLHAGRAHERDGAGQGDAGGPAAARVLEPGRGGQRRRAGPHAPDPRVAARRAGRRAPAVVGARGARGRHAPGLPRARGDRLAHPPGRRHGGPRRRVRHQLRRRRRRDAAGGAGPG

SEQ ID NO: 69054 - protein, 88 aa, Zea mays
  Clone ID: 701176522_FLI.pep
VVCDVCGDAAIGPEDHALEGAEVAVLCITKSGEVINYQAFTNSKGVYTVAETMPESDRWDSCLARPMSSFHLHCTRRGDAHSGVKFTY

SEQ ID NO: 69055 - protein, 255 aa, Zea mays
  Clone ID: 701182558_FLI.pep
EVRGTCSLSNTWKSMRNAWKDYFLQKNSLDYDKLYKGLEVLAEFEKLANSRVVDSGVLRGMNLEDIRKAGERLILQGGCKNFFQKIVKTRENLNLDVHILSYCWCAELIRSAFSSAGCLDGLNIHSNEFAFEDSVSTGEIDRKMQSPLDKVEKFKSISNINSTVPFLSVYIGDSVGDLLCLLEADIGIVIGSTTSLRRVGKQFGVSFVPLFPGLVEKQRQLAEEDASVFKARSGVLYTVSSWSEIHAFVLGSDFS

SEQ ID NO: 69056 - protein, 208 aa, Zea mays
  Clone ID: 701159048_FLI.pep
SILQREDPLGDPLPVFPRAAHRIEPQQHLHQRLPDGDPRPRVSAQRLRLARNLLADLRRLTLHLANSTHRLPRHEPAHRGLQQHRRRFRRRRPLPRHRRRWHPGRPAHRLRVGTDEADGNGDRPRRLDPGPRVHLHRLRRGFCGGREEPADAAGRIGVLVPVIGVGVVVRGGVVVVVGVVVEETARRHCCWCVELLLELLFELLVLDR

SEQ ID NO: 69057 - protein, 103 aa, Zea mays
  Clone ID: 701161896_FLI.pep
GHGHGRCRRTLPFRQHPRYAPVLLLRAGRSRSRGSRVPCAQAGAGGHRGAERLRLFVGSGSVAVATGRWVGEEARRVRSRPELLTADGGGSLVVEAFNDCLSS

SEQ ID NO: 69058 - protein, 455 aa, Zea mays; identical to SEQ ID NO: 40951
  Clone ID: 701184029_FLI.pep

SEQ ID NO: 69059 - protein, 169 aa, Glycine max; identical to SEQ ID NO: 47337
  Clone ID: JC-GMFL02220055D10_FLI.pep

SEQ ID NO: 69060 - protein, 100 aa, Glycine max
  Clone ID: JC-GMFL02220077D02_FLI.pep
IPKQFNVQILNSGHHQKRVLSSKASGEPPLLLAASIHCATRAAVKEARKQLLSWSNQDEEDSTFQLGVPATMPVVKELCGLDIVERYLKWKMGKDIMVLT

SEQ ID NO: 69061 - protein, 195 aa, Glycine max
  Clone ID: JC-GMFL02220085H07_FLI.pep
RWRVHVEAREGAKADIVGVDWEQLLRLEGREVQRQPHHHNQHRFAITRRNASSGSELTLQNNALSGALPSLANLSMLESVFLSSNNFTSAPDGCFQGLTSLQTLSMTDRINLAPWTIPVELNDNNNLVKLELGNANLIGTLPDVFDKFVSLQELRLSYNNLTGGLPKSFARSAIQDMWLNNQNGFGFSGTIEVWC

SEQ ID NO: 69062 - protein, 172 aa, Glycine max
  Clone ID: JC-GMFL02220088F02_FLI.pep
EFLLLLLLLLLSLPLSSSLMGSEVSKQVERRKAIHTEGKTLSDLRNSGEDYPGSDYHPSDRKKWMSELNPEKVVIKQIVWPGTHDSATNKIGIPCITRPFAQCQSLSIYQQLVLGTRVIDIRVQEDRKVCHGVLVTYSIDVVIKDLKKFLSETQSEIIILEVRTLRNNWGIT

SEQ ID NO: 69063 - protein, 394 aa, Glycine max; identical to SEQ ID NO: 50820
  Clone ID: JC-GMFL02220106H02_FLI.pep

SEQ ID NO: 69064 - protein, 102 aa, Glycine max
  Clone ID: UC-GMFLMINSOY008D01_FLI.pep
QRTYRPYNILHQLTRLLIEQRMLTNQPSDFFLFNGKPTTLIGLSFPMNLPQIMLLSQNHQLSAYAAIPAVILEHIPWPVVIQILFRQGQMAECQLLLKENIQ

SEQ ID NO: 69065 - protein, 291 aa, Glycine max
  Clone ID: UC-GMFLMINSOY010H05_FLI.pep
ILYELKEHSVGLNCGRWDYIFSYVKTFQTHPDRLLPDRVQVGMTQHFMKSYSDLLIRTCHRRGVHAMGGMAAQIPIKDDPVANEAALELVRKDKLREVKAGHDGTWAAHPGLIPSCMEVFNNNMGNAPNQIDTVKRDDAANLTEQDLLQIPTGTRTMEGLRLNTRVGIQYLAAWLSGSGCVPLYNLMEDAATAEISRVQNWQWLKYGVELDGDGLGEKVNKDLFHRVVEEEMARIEKEVGTEKFEKGMYKEACKIFTRQCTSLTLDDFLTLDAYNYIVVHHPKEGTVKASN

SEQ ID NO: 69066 - protein, 65 aa, Glycine max
  Clone ID: UC-GMFLMINSOY014E07_FLI.pep
LLYIQEILQTEKGILTKANSNKNNFHSFGIYRSNTRSKAASLVFIVLLYIVLGLVGNKIFINFNF

SEQ ID NO: 69067 - protein, 120 aa, Glycine max
  Clone ID: UC-GMFLMINSOY016D10_FLI.pep
VCHHMSNVQSTASMKLGSFIRNTCLLPKANAPKAEMESLLWLYHMLAPFCNAIYCERGLSRLRRVILLALLLNTSQFNVYNVLSLKFSYGVSATGFCNRISYTAHAGDEHKCACLYPDFF

SEQ ID NO: 69068 - protein, 148 aa, Glycine max
  Clone ID: UC-GMFLMINSOY022A05_FLI.pep
SNSFRIPLSQFPTSFQINMKKIVLKLEIHDDKTKKKAMRAVSGISGVETVSVDMNDLKMTIIGNVDAVIVVGKLRKCCDHADILSVGPAKEEKKEEPKKDEKKPEDKKDPKEEYAELLNAFYNQTRQQQYPPYYHRTVEEDPTSCVIC

SEQ ID NO: 69069 - protein, 250 aa, Zea mays
  Clone ID: UC-ZMFLMO17293E09_FLI.pep
LLALRLDLVWDGGVKRDGDRARWDAISALSGVRSLLRLQIWKGFVGSVATVYPSQSTCIISVRAMETLLISEERNHQLHHFSGRRKKALAASPQSTRSYHAGNCRAFHSGITVGILPSPPAQRVALTHSSPEPKTPKHQLHHGKKRSRAISINLSTSPPSRPELWAGPGFCNSPPPSSLPIPKFSLHQKRSVSLEFPPADRSDDEEVPVHAKSAPSSPTAGSGVTFFSGTDATIATENLRRILNLKIEDN

SEQ ID NO: 69070 - protein, 250 aa, Zea mays
  Clone ID: UC-ZMFLMO17216E01_FLI.pep
VLLLHAGAASAQGALARQDVAALHGLRASLGVRASDWPDRADPCTFWSGVVCRAGRVAELRLSGLRRTRAGARRAAFAVDQLPRLAALQAFNASGFPLPGRIPSWFGRGLPPSLAVVDLRSARVNGDLPADLGMSGNLTTLVLSGNNLSGPIPPSLLSIAGLRVLDLSANNLTGPLPNVSFSGSGGAGVLFNASGNALYGAVGDATGSLRKRFWVVDVSDNCFDQVLGTGFQNGTDGVVDLRMNCLSGAA

SEQ ID NO: 69071 - protein, 44 aa, Glycine max
  Clone ID: 700892949_FLI.pep
GGEYYEPGYFQSTGIIHQITAPYTPQHTHITSDLSSIISIFKLT

SEQ ID NO: 69072 - protein, 176 aa, Glycine max
  Clone ID: 700845715_FLI.pep
GIAMDGRNGSGSRRSGEAGGMGKAIIALVIGSLVYYHCAYRNSTLVSLFSDVFIVLLCSLAILGLLFRQMGIQVPVDPLEWQISQESANAIVAWLANTIGGAESVFRVAATGHDKRLFLKVILSLYLFSALGRLARGITVAYAGLCLFCLYIFAECSQSITFFGRTTETEEQDTII

SEQ ID NO: 69073 - protein, 610 aa, Glycine max
  Clone ID: UC-GMFLMINSOY027E07_FLI.pep
GFRFSRHSSILALRHRFAMAFPNKKLIDDPNDVVTEFIEGLVETYSGLQYLDGFPLVKVVLRADVSAATYDKVAIVPGGGSGHEPAHAGFVGEGMLTAAICGDIFSSPPVDSILAGIRAVTGPKGCLLIVKNYTGDRLNFGLAAEIAKSEGYKVETVIVGDDCALPPPRGIAGRRGLAGTILVHKVAGAAAAGGLSLADVAAEAKHASEIVGTMGVALTVCSIPGQVASDRLGPGKMELGLGIHGEPGAAVADIQPVNVVVSHVLQQILSTETNYVPITRGERVVLMVNGLGATPTMELMIIAGKTVPKLQLEHGLAVDRVYTGSFMTSLDMAGFSISIMKADPVILQRLDAPTKAPYWPVAADGNHPPAKIPVPIPASRSAKTDEPRSQPLQLNEQGQILEVAIEAAANAIINLKDNLNEWDGKVGDGDCGSTMYRGAKAILEDIKNYPLNDAAETVGEIGSSIGRSMGGTSGIIYTIFFKAAHSVLKASSHSGVTSKQWAEALAVSIAAVSKYGGASAGYRTLLDALIPASLVLEEKLNSGVDPCIAFVLSSEAALAGAQSTVDMQAQAGRSTYFSGEILSTVPDPGAMAAATWYRAAALAVKAKYQS

SEQ ID NO: 69074 - protein, 319 aa, Glycine max
  Clone ID: UC-GMFLMINSOY028H12_FLI.pep
VKNAFYHPGCDGGPKCSSAQIDQAVEVAKKVDYVVLVMGLDQSEEREERDRVHLDLPGKQLELINGVAEASKKPVILVLLSGGPLDITSAKYNHKIGGILWAGYPGELGGIALAQIIFGDHNPGGRLPTTWYPKDYIKVPMTDMRMRADPSTGYPGRTYRFYKGPKVYEFGYGLSYSKYSYEFVSVTHDKLHFNQSSTHLMVENSETISYKLVSELDEQTCQSMSLSVTVRVQNHGSMVGKHPVLLFIRPKRQKSGSPVKQLVGFESVMLDAGEMAHVEFEVSPCEHLSRANEAGAMIIEEGSHMLLVDDLEHPIDIYV

SEQ ID NO: 69075 - protein, 180 aa, Glycine max
  Clone ID: UC-GMFLMINSOY029D06_FLI.pep
AHGLGKQFRVVVVDSRPKLRGKLLLRRLVEKGLSCTYIHINAVSYIMNEVTRVFLGASSVLSNGTVYSGVGTACVAMVAHAFHVPVLVCCEAYKFHERVQHDSICSNELGDPDVISTVQSREDVNHLEAWANTENLQLLNLIYDATPSDYVSMIITDYGMVPPTSVPVIVREYSREQVWI

SEQ ID NO: 69076 - protein, 248 aa, Glycine max
  Clone ID: UC-GMFLMINSOY030B04_FLI.pep
QIQEIKEAVELPLTHPELYEDIGIKPPKGVILYGEPGTGKTLLAKAVANSTSATFLRVVGSELIQKYLGDGPKLVRELFRVADDLSPSIVFIDEIDAVGTKRYDAHSGGEREIQRTMLELLNQLDGFDSRGDVKVILATNRIESLDPALLRPGRIDRKIEFPLPDIKTRRRIFQIHTSRMTLADDVNLEEFVMTKDEFSGADIKAICTEAGLLALRERRMKVTHADFKKAKDKVMFKKKEGVPEGLYM

SEQ ID NO: 69077 - protein, 160 aa, Glycine max
  Clone ID: UC-GMFLMINSOY045C07_FLI.pep
GSSIMSSGRNYLFAFRKFPEAMDVSLKAERRSGGIIATHYLSILINHELGKVPLNIITKNSPFPPTSRICTKEQSCPHSLMKDGEFRFEARADKIHNFIIAFWFLLTKLVTWKCQNLQANNYTCHTIDSAPYNWSWSSRCLNPKHIVNFLNIYNISGESS

SEQ ID NO: 69078 - protein, 279 aa, Glycine max
  Clone ID: UC-GMFLMINSOY109D02_FLI.pep
IKQFPVCTTTLKRICRQHGIKRWPSRKIKKVGHSLQKLQLVINSVQGASGAFQIGSFYSNFPDLASPNLSGTGFFSTLNQSDYPNSTSTQPDHGSLSPEGASKSPSSSCSQSSISSHSCSSMSELQQHRTANGAGNKVSTTVSEDSAGVVLKRISSEAELKSLSQDRAKLLPRSQSQETLGEHPKTQYQQPLLKTSSSKVDSHRVKVAYGDEKTRFRMPKSWGYEDLLQEIARRFNVSDMSKFDVKYLDDDCEWVLLTCDADLEECIDVCQSSESGTIK

SEQ ID NO: 69079 - protein, 88 aa, Glycine max
  Clone ID: UC-GMFLMINSOY115D11_FLI.pep
GEAEKNVSNTDGVNLYAQMIDDAEGLEKIENLQSHDNTEIYEKAVKILETYWMEEDDETMPPGDASQSGFNFGGTQPPAVPSGGFDFN

SEQ ID NO: 69080 - protein, 364 aa, Glycine max
  Clone ID: UC-GMFLMINSOY118B05_FLI.pep
ESSSNVNSECGMFHALSQCLSSSTASLSQARQAHALILRLNLFSDTQLTTSLLSFYANALSLSTPQLSLTLSSHLPHPTLFSFSSLIHAFARSHHFPHVLTTFSHLHPLRLIPDAFLLPSAIKSCASLRALDPGQQLHAFAAASGFLTDSIVASSLTHMYLKCDRILDARKLFDRMPDRDVVVWSAMIAGYSRLGLVEEAKELFGEMRSGGVEPNLVSWNGMLAGFGNNGFYDEAVGMFRMMLVQGFWPDGSTVSCVLPAVGCLEDVVVGAQVHGYVIKQGLGSDKFVVSAMLDMYGKCGCVKEMSRVFDEVEEMEIGSLNAFLTGLSRNGMVDTALEVFNKFKDQKMELNVVTWTSIIASCSQ

SEQ ID NO: 69081 - protein, 178 aa, Glycine max
  Clone ID: UC-GMFLMINSOY119G07_FLI.pep
EMAQEYFESAKGGLIVDVSCGSGLFSRKFAKSGAYSGVIALDFSENMLRQCYEFIKKDDTLSTTNIALVRADVSRLPFPSGSVDAVHAGAALHCWPSPSNAVAEITRVLKSGGVFVGSTFLRYSSLTPWFLRPFRERIPQGYGYLTEEEIKDLCTSCGLTNYSSKIQQAFIMFTAQKP

SEQ ID NO: 69082 - protein, 151 aa, Glycine max
  Clone ID: UC-GMFLMINSOY028C01_FLI.pep
IIPLCKELGIGIVPYSPLGRGFFGGKGVLETVSTVSSLITHPRFRAENLDKNKKLYGKIESLATKQQCTPSQLALAWVLHQGNDVVPIPGTTKVKNLDQNIGAVSLKLTESDLREISEAVPIDEVAGTRHYYGSANFSWTVANTPPKDPRV

SEQ ID NO: 69083 - protein, 191 aa, Glycine max
  Clone ID: UC-GMFLMINSOY032A06_FLI.pep
KEPLSWSTRMKIAVGAARGLEYLHCKADPPVIYRDLKSANILLDNEFNPKLSDFGLAKLGPVGDNTHVSTRVMGTYGYCAPEYAMSGKLTLKSDIYSFGVVLLELITGRRAIDTNRRPGEQNLVSWSRQFFSDRKKFVQMVDPLLHENFPVRCLHQAMAITAMCIQEQPKFRPLIGDIVVALEYLASHSNP

SEQ ID NO: 69084 - protein, 83 aa, Glycine max
  Clone ID: UC-GMFLMINSOY093E05_FLI.pep
THPSPVMGRSNNFGSVIMSGSAGNYMSQYYQQQHQQVHIDALSSLGFLSSSSSRNATFPQETALLSDYGLLQDVVSSHMLKED

SEQ ID NO: 69085 - protein, 215 aa, Glycine max
  Clone ID: UC-GMFLMINSOY104B02_FLI.pep
LNSSFVERRKKPTTLFLSFAISVSPIIHTMSAYRDEDPRLHGIKTKIRVVPNFPKPGIMFQDITTLLLDPRVFKDTIDLFVERYKGKNISVVAGIEARGFIFGSPIALAIGAKFVPLRKPKKLPGKVISQEYILEYGRDCLEMHVGAVEPGERALVVDDLIATGGTLCAAMDLLERVGAEVVECGCVIELPELKGRERLNGKPLHVLVECFECCE

SEQ ID NO: 69086 - protein, 168 aa, Glycine max
  Clone ID: UC-GMFLMINSOY104F05_FLI.pep
GVILLGDLNYRISLPEETTRLLVENEDWDYLLEYDQLTMELMRGNMLKEWHEGAITFAPTYKYCPNSDMYYGCCYQGKKAGKKRAPAWCDRIIWFGDGLKQMQYARCESRLSDHRPVNALFIAQVRVSATLKSFQSLFLSERFEQIKTHFGFPHNDEFVCKKQLSFRL

SEQ ID NO: 69087 - protein, 133 aa, Zea mays
  Clone ID: 700426285_FLI.pep
APFFVTRFREALFFYSALFDALDATTPRDSNQRMLIEENLFGRAALNVIACEGTDRVERPETYKQWQVRNQRAGLKQQPLNPDVVQVVRNKVKDCYHKDFVIDVDHRWLLQGWKGRILYAVSTWVANDAPSYI

SEQ ID NO: 69088 - protein, 130 aa, Zea mays
  Clone ID: LIB3594-037-B3_FLI.pep
TDALPGTKLLTDNAMLQGVLSRAPATDAAAAMKAKRAGASPGEEEEGDGRSARGKRQQLLGLGPATALASAAAAEEGPETRGLRLLSLLLRCAEAVAMDQLTEARELLPEIAELASPFGSSPERVAAYFG

SEQ ID NO: 69089 - protein, 128 aa, Zea mays
  Clone ID: 700105277_FLI.pep
GALKKYGAEVTCADSGKKAITQLKPPHSFDACFMDIQMPEMDGFEATKRIRVMERDLNEQIERGEAPPECAGLRQWRTPILAMTADVIQATHEQCLKSEMDGYVSKPFEGEQLYREVARFFQNQDQVQ

SEQ ID NO: 69090 - protein, 148 aa, Zea mays
  Clone ID: 700447445_FLI.pep
VIEEIQRSAEDSGDKRNLKMCLGMLKSMRNRCDQNFVAYRKGLGVVCNKKGGFGVDDFVVEFFGEVYPSWRWYEKQDGIKHIQNNIEDQAPEFYNIMLERPKGDRDGYDLVFVDAMRPTTRVESVTPATLTAKQSKILLRFRFQPCEC

SEQ ID NO: 69091 - protein, 100 aa, Zea mays
  Clone ID: LIB3279-217-H7_FLI.pep
VIDATRVGSIARLINHSCEPNCYSRAITILGDEHIIIFAKRDIDPWEELTYDYRFFSSDQRLPCFCGFPKCRGVVNDVEAEEQSAKIRVKRSELFEKSEK

SEQ ID NO: 69092 - protein, 229 aa, Glycine max
  Clone ID: UC-GMRONOIR006H08_FLI.pep
ASLSSVVLLLAALILSPQVLANYENPPVYKPPTEKPPVYKPPVEKPPVYKPPVENPPIYKPPVEKPPVYKPPVEKPPVYKPPVEKPPVYKPPVEKPPVYKPPVEKPPVYKPPVEKPPVYKPPVEKPPVYKPPVEKPPVYKPPVEKPPVYKPPVEKPPVYKPPVEKPPVYKPPVEKPPVYKPPVEKPPVYKPPVEKPPIYKPPVEKPPVYKPPYGKPPYPKYPPTDDTHF

SEQ ID NO: 69093 - protein, 104 aa, Glycine max
  Clone ID: UC-GMRONOIR037F11_FLI.pep
KGMEGDIKLLDGDDTHKKKESSLVKIKVLFFARARDLTGLSELPLEVSSGSTTHDCLKKLFVKFPSLEEIRGCMVLALNEEYTTESTIVKDTDELAIIPPISGG

SEQ ID NO: 69094 - protein, 344 aa, Glycine max
  Clone ID: UC-GMRONOIR040H10_FLI.pep
MADSVSVDMEAISPPPEEHIIRTRHGRVSVAVYGDQDKPALITYPDLALNYVSCFQGLLFCPEACSLLLHNFCIYHISPPGHELGAAAIDPDDPILSADDLADQIAEVLNYFGHSTVMCMGVTAGAYILTLFAMKYRHRVLGLVLVSPLCKAPSWTEWLYNKVMSNLLYFYGMCGVVKEILLKRYFSKEVRGSDYLSESDVVQACQRSLDERQSLNVWRFLEAINGRYDISEGLRKLQCRSLIFVGDMSPFHAEALHMTSKLDRRLSALVEVQACGSMVTEEQPHAMLIPMEYFLMGYGLYRPSKLSVSPRSPLSPSCISPELYSPESMGLKLKPIKTRISVEI

SEQ ID NO: 69095 - protein, 112 aa, Glycine max
  Clone ID: UC-GMRONOIR044H04_FLI.pep
SISFSFGLSLSFLQSLQTIKQWFCNLVKTLLRRFRWGFLLVGFITLAMAGLSWTLETSANYWFWHSFWHVTIYTSSFFFLCSKANIVDAEDSSSPSSGNYALTHQDSFPRGN

SEQ ID NO: 69096 - protein, 208 aa, Glycine max
  Clone ID: UC-GMRONOIR049A01_FLI.pep
AISPRLAGGCDSEGHILDSAELYNSETQTWETLPSMKKPRKMSSGVFMDGKFYVIGGIGGSDSKLLTCGEEYNLQTRTWTEIPNMSPGRSSRGPEMPATAEAPPLVAVVNDELYAADYADMEVKKYDKERNVWFTIGRLPERAVSMNGWGLAFRACGDKLIVIGGPRTHGEGFIELNSWVPSEGPPRWDLLARKRSGNFVYNCAVMGC

SEQ ID NO: 69097 - protein, 211 aa, Glycine max
  Clone ID: UC-GMRONOIR054H11_FLI.pep
SSSSFIFLPNGNNNTNLNLSFFFCFLCFYFRVLKFVISPVDRFRSRFRYRGKNMAEEHRCQAPRFCANNCGFFGSPATQNMCSKCYRDFQLKEQQSSNAKMVLNQSLVPSPPPAVISQPSSSSSAAVDPSSAVVDDAPREAEEVKAPQQNRCMTCRRRVGLTGFKCRCGMMLCGTHRYPEQHACEFDFKGMGREQIAKANPVVKGEKLDKI

SEQ ID NO: 69098 - protein, 138 aa, Glycine max
  Clone ID: UC-GMRONOIR065F10_FLI.pep
CCLVDRLNYLTVTRLDITFAVGVLSQFLKDPTDSQWNATIRILRYIKNAPGHGLLYEDKGNGKVVCYFDADWPGSPSDKSSTSGYSVFMGENLISWRSKKQKIVARFSAEAECRVMAAAASEITWLRQLLQQIKFGDV

SEQ ID NO: 69099 - protein, 285 aa, Glycine max
  Clone ID: UC-GMRONOIR068A03_FLI.pep
QDGIDAIEDVIYHIETYDVTTIRASTPMFLMSRKIKSLGVKWVISGEGSDEIFGGYLYFHKAPNKEEFHRETCRKIKALHQYDCLRANKSTFAWGLEARVPFLDKAFINAAMSIDPEWKMIKRDEGRIEKWILRRAFDDEEHPYLPKHILYRQKEQFSDGVGYSWIDGLKAHAAKHVTEKMMLNAGNIYPHNTPKTKEAYYYRMIFERFFPQNSARLTVPGGASVACSTAKAVEWDAAWSNNLDPSGRAALGVHISAYENQNNKGVEIEKIIPMDAAPLGVAIQG

SEQ ID NO: 69100 - protein, 153 aa, Glycine max
  Clone ID: UC-GMRONOIR068E09_FLI.pep
ELNIVEDSTLYSEIECCDLLRRIHEGNKSTGGLKFVTTCYGIIGFIKFLEPYYMLLITKRRKIGTICGHTIYAITKSEMVPIPHATVRSKMAYSKDENRSLVNFACNCNVSMVHLKRHVDSSIESYTLSIVLRCYELQFFNLSSLYCAVKTFC

SEQ ID NO: 69101 - protein, 342 aa, Glycine max
  Clone ID: UC-GMRONOIR073B09_FLI.pep
PQESLERKINLLENELSSFSEKEVGLETRIAQLQSENNSLLQKEATLVERTNQLLNEKAVLSLKGESLEQKIYLLESDLNSLVKKENSTKETISNLNGNIAVLQAQVEELEESRNNLFLENQQLREKVSSLQSTVQNHENSNTSSCSWDASVKDLASENEDLKSEIEAAFTLVEKLMAENAELVEKVTELCVELDHRSAEVGHSGVTESNGMTEFVKPTGVAIPLPESAEYASVSSPKLNSLEETSVKDNGNSNDAKHVVGVTSNSSLVSADDAGEIVQIPLDDNEIQDIELQDAKNVENDADAVPITDAPLIGAPFRLISFVANFVSGADLVNQSSSNTAR

SEQ ID NO: 69102 - protein, 233 aa, Glycine max
  Clone ID: UC-GMROPIC0001B08_FLI.pep
RARLCLRAAGELEKQKRKNEDKIMKEIQDKALTSMKELQNYKTTCEMHKGKGYYDAFKVQKESNDFQANVKRLVLAGVWDEVIEMLKRYELPDEFEGDKEWIKRGTEYRRLVEPLDIANYYRHLKNEDTGPYMIRARPKRYRYTQRWLEHAKRMPPAPITESTFWAEVEELYSWINSKKPLDDHVEQRVKQLQKDLKNWTDDEKVLAKDTFLKDPNFIRWKDILPQELKDTSS

SEQ ID NO: 69103 - protein, 330 aa, Zea mays
  Clone ID: UC-ZMFLB73015B06_FLI.pep
PEEAAAATATALSAMSRVRDRTEDFKEAVRVAALSHGYTEAQLAALMSSFIIRKPSPKSPFTNAAIKTLESIRELERFIVKHRRDYVDLHRITEQERDNIEHEIGVFVKACKEQIDILKNRIQEEEKNGSGKTWLGTRDGSSRLDLIAHQHGVVLILSERLHSVTAQFDRLRSMRFQDAINRAMPRKNQKRPEKKPAEPSKSSLVLKSDVSKIVDQEASTAPMRVQEQLLDDETKALQVELTSLLDAVQETETKMIEMSALNHLMSTHVLQQAQQIQYLYDQAVEATNNVERGNKELSQAIQRNSSSRTFLLLFFFVLTFSVLFLDWYNN

SEQ ID NO: 69104 - protein, 681 aa, Zea mays
  Clone ID: UC-ZMFLB73011E10_FLI.pep
APQSRSQASCAPGLGLTGEAELEDRRCSGDTKRSAAGATSAEMTDGHHFNNILLGGRGGTNPGQFKVHSGGLAWKRQGGGKTIEIDKADVTAVTWMKVPRAYQLGVRIKAGLFYRFIGFREQDVSNLTNFIQKNMGVTPDEKQLSVSGQNWGGIDIDGNMLTFMVGSKQAFEVSLPDVAQTQMQGKTDVLLELHVDDTTGANEKDSLMDLSFHVPTSNTQFVGDESRPPAHILWETILKFADVGSSEEPVVTFEGIAILTPRGRYSVELHLSFLRLQGQANDFKIQYSSIVRLFLLPKSNNPHTFVVITLDPPIRKGQTLYPHIVIQFETEAVVERDLALSKELLVEKYKDRLEESYKGLIHEVFTKVLRGLSGAKVTRPGSFRSCQDGYAVKSSLKAEDGLLYPLEKGFFFLPKPPTLILHEEIEFVEFERHGAGGASISSHYFDLLVKLKNDQEHLFRNIQRNEYHNLFNFINGKNIKIMNLGGDGQGASGVVTDVLRDTDDDAVDPHLERIKNQAGDEESDEEDEDFVADKDDSGSPTDDSGDEESDASDSGGEKEKSSKKEASSSKPVQKRKHKGRDDEGQEKKKPKKKKDPNAPKRAMTPFMYFSMAERGNMKSSNPDLPTTEIAKKLGEMWQKMSGEEKQPYIQQAQVDKKRYEKESAVYRGEATVDVDSGNESD

SEQ ID NO: 69105 - protein, 348 aa, Zea mays
  Clone ID: UC-ZMFLMO17019F09_FLI.pep
PPPSDPPNPELTNPKPSPRMEWTVPKRAASPPSPPLLWDWGGDHAGATGSGSSGDAPARRGGREREAKRARADDGEVRCQVEGCGLDLSRVKEYHRKHRVCEAHTKSPRVVVAGQERRFCQQCSRFHALSEFDQKKRSCRRRLSDHNARRRKPQPDAFAFASARLPSSSFDDRRQISFVWNKAPVSHPFTSPWDSSSELPHAKEIREVSTKVGTITGQVHLDKSYVSNAVPSLTHGKDEPWPMKGPDMSIAASKFDGAPDLQRALSLLSVGACGLPDPVHQTSCVIQFTSASENSGDLHLSHGANSGLASCGDGQHIASQPQAQLVRFTMDTSNSVYEPSFFSVNQIN

SEQ ID NO: 69106 - protein, 238 aa, Zea mays; identical to SEQ ID NO: 59121
  Clone ID: UC-ZMFLMO17019G09_FLI.pep

SEQ ID NO: 69107 - protein, 86 aa, Zea mays
  Clone ID: UC-ZMFLB73064H09_FLI.pep
QKHAATRLPHMLYHGLLAREATQDEEFEVMYGEDDDEDKDDEDDDDYDTKTKGATGGGRAAANDLLSASRSECCTLNIGMHWLWSN

SEQ ID NO: 69108 - protein, 205 aa, Zea mays
  Clone ID: UC-ZMFLB73131C09_FLI.pep
GAFPTPPVVVVVIGASVEDWCMSFNFPSVQTDGPVEHPADADRLGLFLGGTVVGQLLHPADLARQPAHVVLRAAPLARQPLEPRHPPRAHEVLHHVAVVRRRVHPGALRHRREVVEEAVVAAVRHSLAGHGDLGSHDGRERPHHSVGVGLEAPGDDPGVGDLVALLVAGDDPAELGETGVAVERGAPGGAGVGDEGGALLEGAVD

SEQ ID NO: 69109 - protein, 424 aa, Zea mays
  Clone ID: UC-ZMFLB73151F01_FLI.pep
EGFGSERSGAMAGGRGSSAARLALLLVVVVAAVAGGAVAGGKVVHVEEAHRRSMLANGLGSAPPMGWNSWNHFQCDGNGEVVIRETADALVSTGLAALGYRYVNIDDCWAEPQRDAKGNLVANTKTFPHGIKALADYVHGKGLKLGIYSDAGFQTCAKAQPGSLGHEELDAKTFAAWGVDYLKYDNCNNGDLKPLERYPEMSRALMKVGRPIYFSLCEWGDMHPATWGATYGNSWRTTNDIADTWDSMIATADQNEVWSEYARPGGWNDPDMLEVGNGGMTNSEYVVHFSLWAISKAPLIIGCDVRHMSRETYAILANKEVIAVNQDPLGVQGKKVRMEGSSEIWAAPLSEYRTAVLLLNRHAKDEATIAAHWDDIGLPAGTPVEARDLWLHETLDATFTDKMSFDVAPHSCRMLVLKPRIQIQ

SEQ ID NO: 69110 - protein, 503 aa, Zea mays
  Clone ID: UC-ZMFLB73148F08_FLI.pep
QNDYKRSPRYFEVGDNRSGKITPIQGFEDRRFSEPRKRDSGSPDFQKEADGSSPVVRPVRDILGDNAPQLRVGEPSKPATEPAKPTVVRPIDPPKPSVVRPIDPPKPNGTRAIDPPPLTKTISSASSIGSAEGTSEQTKVASAVSLIDFSADPEPESTAPPQPAPMTQQPPVNAVAPQPVLEQRKSAPSVSGGDWASFDAFGQQQTPQTSSSVNPLESALAQLSFSEAPSAPNVSAYPVSLDPTLKANDGGYSSVLDQSHSLFDAPFGISGNQASTVMSGQETSVQQSSIAAPTAGLPSQATANQQGTSGIQGAASSTDSKFSGRKELPADIFTALYPPSTPMMPGWQRAPHFGMGYAMQYPPGVFQGMQAYPQPTYQQPVYSQHAYSHPQPVKASNPFDLGNGPAPTQAHMPPSGPPGVLAGPAPQTLISNSSFGVPPQQPHQLYQSAAHPSHFMMQQVPNSMPMPEQQPNSMLVTQQGLGYLQPNTPPPSYGSVGGSNPFG

SEQ ID NO: 69111 - protein, 539 aa, Zea mays
  Clone ID: UC-ZMFLMO17013D09_FLI.pep
EGAERENVEGRDEAGIVEGKSLSNAQVDLNLTMAGGLPSNNSALPPMPGHLNYGGMGRDLVIGQPTGSELGGRAASIESRGPSSRKRNLEEGGSTADKPISRLQPADSIEGTVIDRDCDEVDDAAQDSGARSKRPRCFNLFDINRPSSSGAGPSRNLSFDLDIDVNRLDTSNAEVPSALRNPFPRDSMRASSVIAMDTVHGMEENSMESVEYHPCDVDDVNKPSSALRSGVMSDMLDPNYSNQAQQSSFVQPAAETESNAREIGGSSMNGGEEVLNAETTPAFARDQLSLGVSGGSVGMGASHEAEIHGTDVSEHKTGSVVGDADPIPELIETMGHTGESAPGPALMDEFVPEEVGREGPNGDSQDMASRLAVRADSGSKICGSTKADSVESGEKTSRENSAHPSLSCNARVFSGIDASKDEVTGIMLTNDDYDPGSGLGATNGGNDYETGLPDFDPIRHHNDYCPWVNGNVAAACCISTGSSTALSGWQLTVDAIETLQSLGQAQNQTMQSDSAASLYKDDHVRPSRKLLKSANHSKS

SEQ ID NO: 69112 - protein, 1144 aa, Zea mays
  Clone ID: UC-ZMFLMO17016A03_FLI.pep
PTPVPAIQIGSIQMPIHLHNQFNPSLPHMHPSTTPLYQFGQLRYVRPIAPSVRSLPSQATRPAHSSISAQHTLNQNVSSVLPELMDGGTNQNIPAQASSSTFINKSAAPTTKVPLGMDNSNSQYLNAPANNQMAGVDGFSSQVDREFAEGTTPSGRNQGLSLKRNYRPTSNNVESSQYGLEGRAMGDPKALGVVSDRRGRRYGYAVKDINMRSTGSIVEPSHKDSKGGFQRRARRNVRRTEFRVRENIEKNQNETSESFCHGEQDEITSSNGTRDIPARNTNRRELDMSKASRINGASDQSLSFRSTHNVPYERSHGGNKKSRTGAVPDGDTTSLQAGAVRVVKQQGIEVPVDADGFIEVRSKRQIMSVRREQREKENRSKIRMAKAPRKQHSISLQSSVGPSVNKRAAPSSGEVTKKVSSGSAITVEGRIVDYAESSIPLMGDTASMNLIGPPSTNAETHTNCFANQPIQIQASSDLVTSSPAKLVSGLSDGDNKGPSISTPFNMVSWDNSQINQQVMPLTQTQLEEAMGPAKFEQQAGPGFSLESNNALSPTVITEKVLPSSASPINSLLAGEKIQFGAVTSPTMLPPVSRTVSSGLGAPGSSRPDMKIDRGLPSDNSGPDKANSKELCPSTEDAEAEAEAAASAVAVAAISTDEGSPADATTASAPDKSFTSKDLSGLTSGGARTGQAGQSSTEEPLAVALPADLSVDTPSMSLWPPIASPQASGPMLSQFHGAQPSHFSCFDMNSMLGGHIFAFGPSDESAGSQGQHPQRSNALPSAPLGAWPQCHSGVDSFYRPPTGYAGPFITPGGIPGVQAPPHMVVYNHFAPVGQFGQMGLGFMGATYIPGDKQPDWKQSQGPPIVGVSQSDPNSQNMVSGQVNAPSVPAPVPHLRPTSIMPIPSPLTMFDIAPFQTSTDIQMQTCWPHMPVPPLHSVPLSVALKQHPVEGTATQQFVHNVPIDKSGTNNRFQESSASAGPSDGNKTFPNAAVSQYRDELGLVEQPASTSSSSQTVQPSFGQAGLISNEVPTSAKAMVRVTPSKVNPGIAAGAAGSTNAPQVTSIPSKTHQSSSSSSDPQYQHLVNNQDRRARATQKAGTGNEWQRRSGYQGRNQGSGSDRSSGTGRMKQIYVAKPSATSGHASSG

SEQ ID NO: 69113 - protein, 532 aa, Zea mays
  Clone ID: UC-ZMFLMO17006H12_FLI.pep
ESLVVGRIGVAPAAKCASGLAASTSRREPHRRAPAMSPPPPPPLLRNELSRRTAVLGLRLWVLVGIAVGAAFVLLLVLISLHLAAARRRRPRKGVAHAPAGAPPLSPSTIPPVSKEIQEVAVHVGSLRHYLETGHAFLKDGGDGDGDGESVAHGSQRVHIEAGKGQRMVAAASDALSAAVGPEVSHLGWGHWYTLRELEEATAAFAPEHVVGEGGYGIVYRGVLADGYQVAVKNLLNNRGQAEREFRVEVEAIGRVRHKNLVRLLGYCAEGAQRILVYEYVDNGNLEQWLHGDVGAVSPLTWDVRMNIVLGMAKGITYLHEGLEPKVVHRDIKSSNILLDRRWNPKVSDFGLAKLLGADSNYVTTRVMGTFGYVAPEYASTGMLNERSDVYSFGILIMEIISGRSPVDYARPAGEVNLVEWLKNKVTNRDYEAIVDPKLPEKPSSKALKKALLVALRCVDPDSQKRPKMGHVIHMLEVDDFPYREDRRTLRPGNGSPLEKARNPAAGSCDGSSCYGGDTTTASTPSRLVQDM

SEQ ID NO: 69114 - protein, 371 aa, Zea mays
  Clone ID: UC-ZMFLB73001B09_FLI.pep
LCAMNEGTIYGRYALALHWRERNQSVELGADLPDLALLAAGDHADAAHADHGVREVLPEVGPEEVAEQAGVGVDDVDRGRVVVERGVGADDGEAVADVAEDGGVEDVLAAAVQGQARVEVPRRAPGLELRQEARRDGRVRAPPAARQREVVEPVLEEEARRRAHRVRSGEEDEVLLVKAVGAELGAERVDAVVHVRQRVGVPQVGHLPVEPPRGHVERRPAGEGDGVSGSEHDDVGAGDDAGALRLELRLGALDDLQAAEALVLAVVHLGVVVVVAAALDEHRPVAAADEAVVELEPDERREDGGVGGPGLPDDGRHGGLGVRAGLGVEPHLELAVGDACAREQQQQQQAWQGQAGSVAASDTTPCGAGHL

SEQ ID NO: 69115 - protein, 234 aa, Zea mays
  Clone ID: UC-ZMROB73050E12_FLI.pep
TLYAVVHFYLAQFMERILQDTQPYAGSIATPVTGSRTIIGRQEAIDHRISGPAAAASSDVAAQHPLPVEAGLLQHSLRPHVRHVRHRLQPFQPRQVVEHRAHHHPDGGGGDAPAPLVVREGVAEVGPATALVGVRPHGHLPHGHVAEADGAEPRVAQHGVPDLRHGLLSGGAERPLQVPHHAVVRRPRHEGVRVRQAQRPERHHRRVVSSVPSLPVHVVAVGGRLHRRVMIDSG

SEQ ID NO: 69116 - protein, 144 aa, Zea mays
  Clone ID: UC-ZMFLB73366B02_FLI.pep
PALAALACCSVLCPLFLLLLFSHLGACFGINCDRDGGARRLQVAPSPGVRRLEPVGRHARHPVLSGRDLLLRRADDREGRRRGSLQGAPVPCHALQLQEGETKHNAAFNFFHQSPSKKSFLLPPALKISALFHAVLSFQISTSI

SEQ ID NO: 69117 - protein, 439 aa, Zea mays
  Clone ID: UC-ZMFLB73096E07_FLI.pep
AYSNLGVLAVVTWQVLFVSVPMMVLALRLQKYYLASAKELMRINGTTKSALANHLGESVAGSITIRAFEEEDRFFEKNSELVDKNAASYFYNFAATEWLIQRLETMSAAVLSFSAFIMALLPAGTFSSGFIGMALSYGLSLNNSFVFSIQNQCQLSNQIISVERVNQYMDIPSEAAEVIEENRPSPNWPQVGRVELRDLKIRYREDAPLVLHGITCTFEGGDKIGIVGRTGSGKTTLIGALFRLVEPTGGKIIIDSVDITTIGLHDLRSRLGIIPQDPTLFQGTIRYNLDPLEQFSDQQIWEVLDKCQLLEAVQEKEQGLDSLVVEDGSNWSMGQRQLFCLGRALLRRCRVLVLDEATASIDNATDAILQKTIRTEFRDCTVITVAHRIPTVMDCSMVLALSDGKLVEYDKPTKLMETEGSLFRDLVKEYWSYASNGNI

SEQ ID NO: 69118 - protein, 337 aa, Zea mays
  Clone ID: UC-ZMFLB73107D03_FLI.pep
LFALSPSAGYGGCFPEPAGRPPCVDSSSLHLVLPFAASFLTKMSQAKEVRYTARSITPPADRNGTSRSPPPKRRSPSRSPPPKSASRSPRPRSPKRRSTSRSPPRRRGRSRSRDRSRSRSPDDRNPGNNLYVTGLSTRVTEDDLEKFFSKEGKVKNCHVVLDPRTKESRGFAFVTMDTLEGARRSIKYLHRTVLEGRLVTVEKAKRTRERTPTPGKYCGRRGGSQRSPSPYRPRRRERSRSRERRRERSRSRDRRERSRSRDRRERSRSRERRRERSRSRDRRERSRSRDRRRERSRSRDRRRERSRSRDRRGSSPHGRRHRDRSRSPTSNGNHKAD

SEQ ID NO: 69119 - protein, 249 aa, Zea mays
  Clone ID: UC-ZMFLB73107G10_FLI.pep
KTKSDSTGRMHACRRRTVVLSVSLPQDGGVGDHAGDDVGVHVGSRPAVLEISLALLLGVAADADGRAAVRHAPFEGVDVGGLVAAREAALVALAVRGDVLPVPLPQLLDRLLDHLVATGLPHRLGAVVGVSAGAVPVTLDRLRVEGENDSGHLSDPLENVAGDPYLVAGRDPNGRPDLELPLSRHDFAVDAADVDAGVEAGFVVGVNHVAPKGLIGTGSTVVWSLPKKLNKKYTEQLITLQSPASSANI

SEQ ID NO: 69120 - protein, 343 aa, Zea mays
  Clone ID: UC-ZMFLB73091E02_FLI.pep
SPTPPLSLKRPRRRAMAATRSTTAVPELALPSGNARPVPVIGLGTAVMFQPPETTKDAVLAAIELGYRHFDTASLYGTEKPLGEGVAEAVRRGLIESREEVFVTSKLWCTQCHPDLVVPSLRQTLENLQMDYLDLYLIHMPVCQKPGPPVFPARREDARPFDFKGVWQAMEECQRLGLARAIGVSNFRTKHLDKMMPFATITPAVNQVEVNPVCQQLKLRGYCAEKGIHVQAFSPLGGQSWAAERNAVLESEVLAEIAKARGKTVAQVSLRWVFEQGVSFVVKTYKKERLKENLEIFDWELTDEDRVKISRIPQKKLSGFSFMFKPEGEFTSVDVSEINPIEE

SEQ ID NO: 69121 - protein, 138 aa, Zea mays
  Clone ID: UC-ZMFLB73096B12_FLI.pep
GTQCANIVEHFGFTHLSAGDLLRAEIKSGSENGTMIENMIKEGKIVPSEVTIKLLQEAMIKSENDKFLIDGFPRNEENRAAFENVTKISPAFVLFFDCSEEDMEKRLLGRNQVSFIFLCFLVTKFLFPIFLTVYAGKG

SEQ ID NO: 69122 - protein, 142 aa, Zea mays
  Clone ID: UC-ZMFLMO17023E05_FLI.pep
PSYLMEKVAPDETVKEEARQETVKKSPSPMKGKKVGLKVEPGKQRSPSVLKEVRATPPTPQRFLSPSPNRIKNVKPGGITAGSPLKKAPKEKGTPSKDLESKKDAVRQPFGVKDMNNTRACDAEGSSSSMFWFLKPCTFLVE

SEQ ID NO: 69123 - protein, 184 aa, Zea mays
  Clone ID: UC-ZMFLMO17024G04_FLI.pep
QAWMTFFRFLKISPEGKVPVYNSGDGKWIANSDVITQVIEEKYPAPSLATPPEYASVGSKIFPSFVKFLMSKDASDDGSEEALVRELQALEEHLKAHGRPYISGERVTAADLSLAPKLFHLVVALEHFKGWKVPESMSSVHAYTQAMFSRESFIKTKPTKEHLIAGWAAKVPKPPNLVVPCWLI

SEQ ID NO: 69124 - protein, 169 aa, Zea mays
  Clone ID: UC-ZMFLMO17036D10_FLI.pep
QAIHGMHGRASSGLLMAHARRRAGARCPQRGDPGHGRRPCHVIASAVRRRRRRGDGGLPQEHGVPAAAAAGVEARGAAGPGAVVPAARLTMRLDLQVRRAAPGSRGLVRRSVVVVVVVVFEVFVVVRERAHRARLRADRRVVAAAAPALLPRRLSPPMYGLPDPPRDQR

SEQ ID NO: 69125 - protein, 110 aa, Zea mays
  Clone ID: UC-ZMFLMO17066C04_FLI.pep
AEIEPATLMVEPKCEEGDGSSFVLPPSPPELMLEEQDDSGLIALGTGSCTEQQSLGVGEAEDQENPSTGTAQHGIMIVERTGEENSSCNGVYSSCPPSSVIVESSSDYLC

SEQ ID NO: 69126 - protein, 154 aa, Zea mays
  Clone ID: UC-ZMFLMO17070F06_FLI.pep
RTHASQNKRLPLQAALSALYYDELKLRSAATADVVLDTQSSAAGRASAQARAADAALARENEALRSELARMRAYLSGMERSKGGRSTPPSSPSRRAKKASFLGSVSRTMSRLNPFRSGGWMAKVTTSNAAGGGRQSKTMMQHVVTPKRRRASIS

SEQ ID NO: 69127 - protein, 221 aa, Zea mays
  Clone ID: UC-ZMFLB73074C06_FLI.pep
GRLQRHQLLLQLLHVVDRATHHRGLVAARGVAGRDEGAERGEVVVHEAPPVALHSNVRHTLALGLLGLLALLRRRRGARAGPLPLPPPLGPAGHGRRRRRCGSYRLRDAALEQIKVGDGAREGLPLAPVVVLLLLLLRLHHNARALEQRQEGHLRRRRCGVGAGRLLLLVCPLFHYRHRRHHHAIAGRGARKAHHQQADRERGAAATTLKILLVVESMSIS

SEQ ID NO: 69128 - protein, 97 aa, Zea mays
  Clone ID: UC-ZMFLMO17134E01_FLI.pep
LPLEHYKQCAALHFIFLPELMSLCFSYSWCIVVMRLRLGLRLKLRFNHRFTNFFPHFRRNVAINHFDGRCSSYGSYLRILGGELVLPVIQGAELHWR

SEQ ID NO: 69129 - protein, 381 aa, Zea mays
  Clone ID: UC-ZMFLMO17287B10_FLI.pep
KFSTTEAADAAISAASVAPGLGISLKSRPLNVMKAMDKESAHKKALEKAKTEVEDRRNLYLAKEGEILAGTPAAEGVSDADMNKRNWLARRKAEMLQSPKFHVSRTRLIIYNLPKTMTINDVKKLCREAVISRATKQNPVIRKVNILKNEKKGIQKHSRGVAFVDFQEHEHALVALRVLNNNPETFGSERRPIVEFALEDVEKVRLQKIRMERHRKSAVETAEVQQTPSGDQPASEGRNADNSRTFRKGNKRKSHSLPSKPSDSVEGLAKDPPVPGVRNAKTAKRARKSNVGTILPDRGLTDATPNTAQNQVASSELDQAAAPKKRKNRKDGQAEQKRGKVTKRTRKEPSGEGGVDKSLVEQYRFKFLQHGVSKTKTKTKR

SEQ ID NO: 69130 - protein, 210 aa, Zea mays
  Clone ID: UC-ZMFLMO17292E04_FLI.pep
EDAQDDTLENQVQDENVEDNHLLEDGHDLTRYDVNNEAGEHAHDNHLVKNAEILLNHIMVACISDNCHMNNEKMLLKQNVDEQQMENEQMLIDQVTSVQVLDSHHVHDEQLLVGHAADDHHQMEPNPMAFSLGVHDLDNYYLSSKQILLYNDAGGIHHLKDGQIILDEAADGQARVHNMGHGRTIPGIDLEDDYAQVSAIRNTGECLESA

SEQ ID NO: 69131 - protein, 107 aa, Zea mays
  Clone ID: UC-ZMROB73050D04_FLI.pep
LTLCIGFEYMLVIHLIRKRCVALPVRSMAAPTVCRLAWHDIHSSYLEPKATVRRVACSCFSRWEWRRALGFACLSYQRSLIPSSLVRRSDVGINDQRGSQHAQARRE

SEQ ID NO: 69132 - protein, 334 aa, Zea mays
  Clone ID: UC-ZMROB73055D02_FLI.pep
ALDHHFRWLLQYRISPFFCRWGDSMRILAYTCPWPADHPKANEYYSDPRLAAYAVPYAPILSCTDAAKNSLRREVEILKSKPHWSKAYFYLWDEPLNVEQYDMICNISNELRSYAPDVRILTTYYCGPSGSELAPSTFEAFAKVPNVLRPHTQIFCTSEWVLGTREDLVKDIVAELRPDLGEEWWTYVCMGPSDPQPNWHLGMRGTQHRAVMWRVWKEGGTGFLYWGSNCYEKAMIPSAEICFRRGLPPGDGVLFYPGEVFSSSHEPVASTRLERILSGMQDIEYLKLYSSRYGREEGLALIEKTGMYLGPDRYTLDHGPVDVMRGEVYRTCRS

SEQ ID NO: 69133 - protein, 219 aa, Zea mays
  Clone ID: UC-ZMROB73057E05_FLI.pep
DLQALHVVDVEQQRQAGGVGVRRQAKHIGGQPARRVVGRPHALRQSPELLQEALRLHAQVLGHEPQQARRHLRRLGRVPFDRVPEGGRPGGPEPQVPRLLGANHEVDHVRPIQLLGLGEDEGLAVALDAARYLRVHLLGFHRELEELHHVFLRVLDHLVRHPMVDKLRTSSACAVQCLINLVRTWRIMYGYVPERNPSADRQSRGLRAPLRTTAGQATC

SEQ ID NO: 69134 - protein, 341 aa, Zea mays
  Clone ID: UC-ZMROB73060E06_FLI.pep
TEPDLVCFLLPRLGGSWCLCVSVCVEMDPKFPPPPPLNKTEPTTATTTTTSTAQQQQQQLDPKDYQQQQQQPAQHLQIQIHQSQQDGGGGGKEQQQLQVVAQPGERRQQALAPKRSSNKDRHTKVDGRGRRIRMPALCAARIFQLTRELGHKSDGETVQWLLQQAEPAIVAATGTGTIPASALASVAPSLPSPTSGLARPHHHMWAPSAGFSSPSFLNSAAAGTGDAAGIMQRMGIPAGFELPGASAAGATLGAGGHIGFAPMFAGHAAAMPGLELGLSQDGHIGVLAAQSISQFYHQVGAAAGGGGQMHHAHGHHHHHHQQQEDGEDDREDGESDDESGQ

SEQ ID NO: 69135 - protein, 448 aa, Zea mays
  Clone ID: UC-ZMROB73060E11_FLI.pep
RVVWVTAAREAARSCSSCRAPGVCGAGAADMSCLCWFKRRSRKGRSSSSGKRGASSTATVSVSGPATATATTTTTASAESTSRSDDSGAVRPVSKSAGSSQSQRSISSLYEERGHGQLRVFDYDELQGATAEFGRAQKLGEGGFGSVYKGFIRAADGKGDRVPVAVKKLNQRGMQGHKQWLAEVQFLGVLEHPNLVKLLGYCAVDSERGAQRLLVYEFMPNKSLEDHLFRRANPPLPWNRRLQVILGAAEGLAYLHEGEVQVIYRDFKTSNILLDKDFRAKLSDFGLAREGPTGANTHVSTAVVGTQGYAAPEYMDTGHLTTKSDVWSFGVVLYEILTGRRSLDRNRPAAEQKLLEWVAQFPPDSRNFRMIMDPRLRGEYSVKAAREIAKLADSCLLKNAKERPTMSEVVEVLGRAVQAHAEPDSGAPGPGAKGKKTDAATPSRRRRD

SEQ ID NO: 69136 - protein, 216 aa, Zea mays
  Clone ID: UC-ZMROB73077A01_FLI.pep
ASFFAQDLIIAGTDSNANTLEWAVSELLKNPKILAKAMEELNHVIGPDRLVTESDLPRLPYIEAVLKETMRVHPAAPMLAPHVAREDTSVDGYDVLAGTVLFINVWAIGRDPGLWDAPEEFRPERFVESKIDVRGHDFQLLPFGSGRRMCPGINLALKVMALSLANLLHGFEWRLPDGVTAEELSMDEAFKLAVPRKFPLMVVAEPRLPARLYTGA

SEQ ID NO: 69137 - protein, 186 aa, Zea mays
  Clone ID: UC-ZMROB73078H04_FLI.pep
LSLFAAQLLRRLITVVSSFVIVTSMKEGGEKKNILSKTLQRCRTSLAQRRRPPPPAAPKRAASSPSLGVPPPPPVPAAGYFTVLVGPEKERFGVRARCANHPLFRALLDAAEAEYGFAGCDGPLELPCAVDDFMEVMWEMELGDPSASPGCGRFAAGSTRGYHHVHQLAGYQLVVSPPARFLVAGR

SEQ ID NO: 69138 - protein, 673 aa, Zea mays subsp. mexicana
  Clone ID: UC-ZMROTEOSINTE093B01_FLI.pep
MKQFAKSDTSVLKQHYEKKLTDLEQEKKALQKEIENLRHALTNISSSMDDNAQKVKENYLQKLNALESQVHELKKKQEAQQQLLRQKQRSDEAAKRLQEDIQRIKSQKVQLQQKIKQESEQFRSWKAAREKEVLQLKKEGRRNEYEMHKLLALNQRQKMVLQRKTEEAAAATKRLKELLEAKKSSRETYGSANGSGMQALIRAIEDELEVTVRAHELRSYYERQMQERAAISKEIAKLKEESKHKISDCPQAMSPSARSSRISALENMLCSSSSAMVSMASQLSEAEERERVFNGKGRWYNVRSLPEAKNIMNYLFQLASSARSQVLDKEVICNEKEHTITELKEKVVVLNGGIRQLETQVRDLRSQNTQLFTALNNAKKSARSNGTGFAQRKSVRSSQHFGYSKDNFNWVDDMDISDSEHSDELENMSDGSDSDWVQSTRKAKKHQRRVSSHSNPNLDCQNTQGNAEPEKPSDEKCILPKYISSDGCSCSKSSSCKTNKCECRGSGAQCGAGCGCKDSKCSNRDSSTIEKANQGAMLLQNAFSEKDSQDAKPRKPLINIGNNMVNQTAETKKPRKNWRKSTIQLVPGPLLPSEPVATEAAPRDRADIPLKLPRAMSSVTPVESNPPPLTDRNAAKPDESVSTGSKNSTGAAVTRAPSQLRKNATTEKENQLR

SEQ ID NO: 69139 - protein, 477 aa, Zea mays subsp. mexicana
  Clone ID: UC-ZMROTEOSINTE098H08_FLI.pep
RKLQPSKQVEAIHKGTSRQKVFVIFGGDTSERQVSLMSGTNVWLNLQGFDDLDVTPCLLAPAHGYFSSRDQDFSDSSREVWTLPYSLVLRHTTEEVHAACVEATEPERVEITKRLRDQVMNELGSALSKHDWFAGFDIAYEQPIKYSLQQWIDHVKETEAVVFIAVHGGIGEDGTIQTLLESAGVPYTGPGPIASRTCIDKVASSLAVDHLASYGIRIIPKDVRATEEVLKSSLVDIWNELKAKLETETVCVKPARDGCSTGVARLCCPKDLEVYTNALRRKFQHLPANCLSRAHGVIEMPVPSPESLIFEPFIETDEIIIANKLEDGSARHLVWKGENDWLEITVGVVGKRGEMHSLNPSITVKESGDILSLEEKFQGGTGINLTPPPATIMGEDALQRCKKSIETMANALGLEGFSRIDAFVNVRSGEVLLIEVNTVPGMTPSTVLIHQALAEEPPVYPHRFFRTLLDLVFARAK

SEQ ID NO: 69140 - protein, 704 aa, Zea mays
  Clone ID: UC-ZMFLMO17067D01_FLI.pep
AVPVCSSSADCGRTPITPRAPSPIPMEISAGVTTVTAVSILILLLLPQPAAPFSFTYNFTSPSDTPPPGIAFQGDAFYNKAIRLTRDERLGPITSSTGRAFYSHAVPLADPVSRRPASFVTAFAFSIAAPDPASASGDGLAFFLSPFPSVLPESSAGGLLGLFNSSSVRAGTLVAVEFDTHKNEWDPSGDHVGVDLGGIVSSATADWPTSMKDGRTAHARVEYDGVAKNLTVSLSYGSARPNTTGDVLLWYAVDLRDHLPDSVAVGFSAATGEAAELHQVLYWEFTSTVDPKEETVVLWVVLGLCALLLVLVGAGIVWFVRQWRKAGQFDDGDIEVDDVMGGEYDELADEFVVQCGPRRFRYAELAAATKNFAEERKLGQGGFGAVYRGFLKELGFEVAIKRVSKGSTQGRKEYAAEVRIISQLRHRHLVRLVGWCHEHRGDFLLVYELMPNGSVDHHLYGKGMLLTWPMRYDISLGLASAMLYLHEECPQCIVHRDVKPSNVMLDAAFNAKLGDFGLAKLVEHGSQPYTTVLAGTLGYLAPECVMTGKASRESDVYSFGVVALEIACGRRPAELNNEPSKARLVPWVWELYGKNALLEAADWRLKGQFDEKQMERLMIVGLWCAHPDYAHRPSIRQALNVLTFEAPLPVLPEKMPVPTYFPLPDLVASISVGGTSSAEDPDPGVSDYGSSGKVSSVRDRLLEP

SEQ ID NO: 69141 - protein, 157 aa, Zea mays
  Clone ID: UC-ZMFLMO17301G08_FLI.pep
SCRVGLRQMGSPDDKAEMMAGRGWLLGLAVVVAPSSPIAHRLSTCLLHSVSPHLYWFWLMLKTHSGSFVFLFRPRMEAFCSLIPPARHFLKPVIDSLADSNTRVSSFVRRGTNLGTVIMEELWDLLRTSLYLLVNAYRKNRPMLLSLTKGTILHPSS

SEQ ID NO: 69142 - protein, 368 aa, Zea mays
  Clone ID: UC-ZMFLMO17310D06_FLI.pep
RMEDNLPVNVREYQELAKKALPKMHYDYINGGAEDEYTLRENIAAYGRILLRPRVLIDVSKIDMSTSLLGYNMPSPIIVAPTGAHKLANPEGEVATARAAAACNTIMVLSFSSSCRIEEVASSCDAIRFYQLYVYKRRDVSATLVRRAESLGFRAIVLTVDTPVLGRREADIRNKMIAPPLSNLEGLMSLDDFDDAEGGSKLERFSRETLDPSLSWKDVEWLKSITSLPILLKGIVTAEDARKAVEAGAAGVIVSNHGARQLDYAPATISALEEVVKAVAGAVPVLVDGGVRRGTDVLKALALGAKAVMVGRPVFFGLAARGEAGARHVIEMLNKELELAMALCGCRSVAEVTRAHVQTEGDRIRALL

SEQ ID NO: 69143 - protein, 533 aa, Zea mays
  Clone ID: UC-ZMFLMO17152D09_FLI.pep
PLQMIGQPEGSEAPGGAILSGVQRSDRLALADDKDVKSEDRDPLTFEAHLDGGISGLDHATEFMDFPYFTNSEDLDILNSENLLNSPSEGIQEDLDDTALVVHGVRSTMQNLVHADEANMSCDQIDLGDVKNNVDASGIILFPTSLVVPCPGLYVECKLNTEDTEIPCNDDVSTPTEYPLECCTSTFGQKSENTIYSVSPAISPPSIAEQPNPSTSEQKEDSVAHDEGGVLGAKPSEGALTIGGLLPGNIDTNDANTCMLALPSFSTAGFGEGSPCSLGPHESFDNSHGLTLQNSVQAPDQMQHNSLDGKPELGDKAALQNCMPSNALPDLDIQNTIANAPTPAQAEECPDYEKDVPNYYDLEALILDQDLIPWDQDSDFMHPEVTGFPHPESRKALIRLEQGARSYMNRAIMSHGAFAVIYGLHLRCYIKDPEVTLGRETEDIKVDIDLGKEGRANKISRRQAVIKMDESGYFHIKNTGKCPIFVNSKEIPSCKRINLSSDSLIEIKDMRFIFHVNQEAVRQYIDRDLKPER

SEQ ID NO: 69144 - protein, 121 aa, Zea mays
  Clone ID: UC-ZMFLMO17158H04_FLI.pep
PTRSPSQIMMLHFCLCMYHAPSCKASLHCSHTHSFPMCFCIWILCIDTILSLHSSIYVTTCFTFTFTKGKCFTYNMAQERNTTLKNITSEVAEDMQALLERQASEMCLTFTSVPTATLESI

SEQ ID NO: 69145 - protein, 434 aa, Zea mays
  Clone ID: UC-ZMFLMO17155F04_FLI.pep
QHRDSRLLLDSFTEVGAFDHKYYIHGEERCRTYVDRMISASTINLHPVREGVSAIEFDRKGIYIASVTLSGCLTVHDFETLYCSKYGPPCSMPDESSNYVLHISNRIPLNAVRWNPGNQDEIACTSSQSDNVFLFDIGYVSSTPTEVLHKGKSKFSSLYSEYCKSLTDITFTSDDKSRIFASGLDGAVYMWDMRSSKTHCLELVASPEAQFNTVKLTVDNRTVFGATKNGTIHVWDLRGGRASAAFQSHNEVQQLMSVKLSTLLGKIASLKEQSNIVSSPILSIDFNPSCSYQLAFHLDDGWSGVLNVNNLNVTHLHCPPPAWLEGTDLVLQKQLRKPTWLLTSSIYAVGSSSYDGIYLLDFHPDTSSACHVDYKEETRVSGENQPAGNKFVPLSQRVLSCAAHPLSHTIIAGTQFSSLLMLSQKYKSIRNTEP

SEQ ID NO: 69146 - protein, 607 aa, Zea mays
  Clone ID: UC-ZMFLMO17004E01_FLI.pep
LITTYDIVRNNYKLIRGNSYNNSNDDDDEEGTLWNYVILDEGHLIKNNKTQRAQSLYEIPCAHRIVISGTPIQNNLKEMWTLFNFCCPDVLGDKQQFKIRYETAILRGNDKNATAREKHVGSNVAKELRERIKPYFLRRLKSEVVFDTGASEEKTLAKKNELIVWLKLTPCQRKLYEAFLNSELVHLALQPKASPLAAITILKKICDHPLLLTKKGAEGVLEGMGEMLNDQDIGMVEKMAMNLADMAHDDNALEVGQDVSCKLSFIMSLLRNLVGEGHHVLIFSQTRKMLNLIQEAIILEGYAFLRIDGTTKVSDRERIVKDFQEGCGAPVFLLTTQVGGLGLTLTKATRVIVVDPAWNPSTDNQSVDRAYRIGQTKNVIVYRLMTSATIEEKIYKLQVLKGALFRTATEQKEQTRYFSKSEIQELFSLPQQGFDVSLTHKQLQEEHGQQVVLDESLRKHIQFLEQQGIAGVSHHSLLFSKTATLPTLSENDALDSKPRGMPMMPQQYYKGSSSDYVANGASFALKPKDESFTVRNYIPSNRSAESPEEIKARINRLSQTLSNAVLLSKLPDGGEKIRRQINELDEKLTSAEKGLKEGGTEVISLDD

SEQ ID NO: 69147 - protein, 280 aa, Zea mays
  Clone ID: UC-ZMFLB73201H09_FLI.pep
VVAGTAALAGLVARRGCGGAATVRGMSFGGSSSLASGAKRPFEYGRTHVVRPKGTHKATIVWLHGLGDNGASWSQLLETLPLPNIKWICPTAPSRPVSVFGGFPSTAWFDVADLSEDAPDDIEGIDASAAHVANLLSTEPADIKLGVGGFSMGAATALYSATCFAHGKYGNGKPFPVNLSLAVGLSGWLPCARTLKNRIEASPECAQKASSIPLLLCHGKADDVVAYKHGERSAGALKANGFSNVLFKAYNSLGHYTVPEEMDEVCKWITANLGLGTKSS

SEQ ID NO: 69148 - protein, 289 aa, Zea mays
  Clone ID: UC-ZMFLB73215H03_FLI.pep
RLTPNENALQWQHRIGITGPPTRPANCHTEPIPLVLQAVIDHLVLWRLIPESRKPNSVVINFFDEDEHSQPYFKPPHLDNPICTLLLSETTMAFGRSLVTDSNGNYKGPLTLSLKQGSLLVMRGNSADMARHVVCPSSNRRVSITFARVRPSTPVDMSPLPSPTKAMTPWQPQPVTASQVPSPVSMTQKPPVSGAIIGYAPTPQAVLAPAAWGMAMRAPVMMVAAAPARPMVMASSGTGGGNISKRMGRSGTGVFLPWTVGPKRYNKHLPPRIQKRRFSAMMSPIEAQG

SEQ ID NO: 69149 - protein, 288 aa, Zea mays
  Clone ID: UC-ZMFLMO17259D10_FLI.pep
LALGFSPSVRAALLLQAADSCSSNPLYSPGRLASSFPAAPCSSAPPCCQLGRALAMLPALASRAHLPLCTRACVLRREPRRGASSSSPHGARPSSSLSCSCLASNFPTRRGLPPRACPSPLYPPWPELLPAPARLSLPWLPARPSISCGAPSGAPRPLCLLDARLLWRLAAASLCSPRPAGTSSARPWPPRRVPGSRSSVHSSARCSSLLARPCACPSTSSTRRASCSACVIRQRCPPLGLPAPRHDDRWTCRPLHADFPLRASVLSSSFIPIFLRHMPPHHDTCHRL

SEQ ID NO: 69150 - protein, 157 aa, Zea mays
  Clone ID: UC-ZMFLMO17126E05_FLI.pep
KTYRSHQHTRAKHWKPKFLSSEKKTIAILGDRSIDSEDPLEHVIDGTSSEEEDATQNHLSLVNKDENQQTMADLFQEVFNPTNMDGAMKSMTSTGAGNYGRMQQIMQMEKYWHVEFLRQYSREHSYSGGAVGSSWYNLYAFCFGLGSCLFVCNYTWI

SEQ ID NO: 69151 - protein, 323 aa, Zea mays
  Clone ID: UC-ZMFLMO17174E11_FLI.pep
QLTPSDFCTCRVVESVGEGVEGLAPGDHVVPIFTGECEKCVYCKSDKTNLCGTYRVDPLKSSMVYDDGTRFSVVDQASGQRRPVYHFLNTSTFTEYTVLDAACAVKINPEAPLQRMCLLSCGISTGVGAAWNTANVSARSTVAVFGLGAVGLAVAEGARLRGATRIIGVDVNPSKFTKGKEMGITDFIDPNDICDKPVHEVIREMTDGGVDYSFECTGINDVLREAFLSTHDGWGLTVVLGIHSTPKMVPLHPMELYGRRITGCVFGDFKGKSQLPDLVDKCVNGEVNINFDGFITHKMPFSDINKAFRLLEEGKSLRCLLSL

SEQ ID NO: 69152 - protein, 345 aa, Zea mays
  Clone ID: UC-ZMFLMO17184F07_FLI.pep
LHFSVAQLTYSSSVRVETGVEEGDTVSMHYDPMIAKLVVWGESRTAALVKLKKCLSTFQIAGLPTNVDFLQELASHSAFEKGLVDTHFIERYKDDLLSISTKSSKESHGVAELGAILAAACICKKEHITSKESLRANKSLSVWYNNPPFRMHHFARHPLDLELEENDGFSEKLLKLFITHKFDGSYFIETEDGTSGLDVKVDHKGDHDFRVDVSGLQTDVTLASYSKGNSKHIHVWHGNHHHHYRQTVRAEHAVEDSSQPSHASEGKSHPKGSVLAPMAGLVVKVLLEDGAQVDAGQPVMVMEAMKMEHVVKAPRAGYVSGLKVTAGQQVFDSSVLFTIKDSSAN

SEQ ID NO: 69153 - protein, 499 aa, Zea mays
  Clone ID: UC-ZMFLB73069A02_FLI.pep
EMKSCGGGGADGQQCPCDYCGEAAAALHCRADAARLCVACDRHVHAANALSRKHVRAPLCAGCAARPAAARVSLGADPAFLCADCCEGCAAASAARVSVEGFSGCPSAAELAASWGLDLRRAAVAVGDDGDGGDDDDPFLSVLDYSVLGVGVADTDLRDLYVPCDPPRVPVPDAGARPLRGEALCDQLAEMARRDEADTSHAHPHSDLSPRTPRRTSAASSGRLPSGKMAPPAALPVPAHPPPAAPQEVPLPYTSLLMMASANCSDLIGGGDRVGDTDEQLLWDCAAPSVPPTQIWDFNLGRSRHHDEKSALEVGYGSNHGGFMIKSYSDMLKDISSGTTKDLEDIYDSRYCSTAEDIMSSNICQLSSKNVSTGSNKRKVRSCAASTMDGPTTSGNHNHVPASASGPGAALTREISFGDQTVSAPAAETERPAAVRIDSETLAQNRDSAMQRYREKKKNRRYEKHIRYESRKLRADTRKRVKGRFVKSTEALNAARYNG

SEQ ID NO: 69154 - protein, 258 aa, Zea mays
  Clone ID: UC-ZMFLB73077D05_FLI.pep
TMSSRERKTNSHAPLALSLPTMTGATLNTHTPKAGEPYADLSDQYAVLVSYRCNYTESKPFFKQATSWRPSAASDLMISVSSELSLRNPSLGARVPQLPVQILTLEATNMTSENLTLTVLAPEASGSSSVVSLNSSPTTPNGSFDGVNESSKRSGLGKDGIGFRRLNSVLATPKEGDNGGNRMSNASGCTHLWLQSAVPLGCVPARSSTTVKLELLPLSDGIITLDTLQITAREKGLAYIPEHSLEIHATSGMSSGRS

SEQ ID NO: 69155 - protein, 72 aa, Zea mays
  Clone ID: UC-ZMFLB73079H02_FLI.pep
IKVTPEMAFLHPTLDIPNFAPPCQHFTELHILLYSSTPAIEHTQFHLPASIFRACLVLVQTALHGSPCNPRL

SEQ ID NO: 69156 - protein, 340 aa, Zea mays
  Clone ID: UC-ZMFLB73080C03_FLI.pep
DGVAPLARQGSVYSLTFDRSQSTLGGAAASCGGSRGIPKGFGSVNMDELLRSIWTAEETQAKASASIAGASAGMPPTPMQRQGSSLTLPRMLSTKTVDEAWRNLVRDEPPQGADGGGHQPPHRQSTLGEMTLEEFLVRAGAVKENPASAPPAPPPMVPPRPVPVAPKSSAFFGDLPGADDDAATAAVGFAPVGMVDLALIPPRAAGMGGSAMAVQTAVSQLDSVGKGYSDLSSLTEPQTFSFERMIRGRRHGGGVEKVVERRRRRMIKNRESAARSRARKQAYTMELEAEVQKLREQNQELERKQAEIMEMQNNEVSEMLKDPFGRKKRLCLRRTLTAPW

SEQ ID NO: 69157 - protein, 629 aa, Zea mays
  Clone ID: UC-ZMFLB73080D03_FLI.pep
LDLNSNQLKGSIPAELAKQSGKMNVGLVLGRPYVYLRNDELSSECHGKGSLLEFTSIRPEELSRMPSKKLCNFTRVYMGSTEYTFNKNGSMIFLDLSFNQLDSEIPKELGNMYYLMIMNLGHNLLSGVIPPELAGAKKLAVLDLSHNQLQGPIPNSFSTLSLSEINLSNNQLNGSIPELGSLFTFPRISYENNSGLCGFPLLPCGHNAGSSSSGDHRSHRTQASLAGSVAMGLLFSLFCIVGIVIIAIECKKRKQINEEASTSRDIYIDSRSHSGTMNSNWRLSGTNALSVNLAAFEKRLQKLTFNDLIVATNGFHNDSQIGSGGFGDVYKAQLKDGKVVAIKKLIHVSGQGDREFTAEMETIGRIKHRNLVPLLGYCKCGEERLLVYDYMRFGSLEDVLHDRKKIGIKLNWAARKKIAIGAARGLAYLHHNCIPHIIHRDMKSSNVLIDEQLEARVSDFGMARMMSVVDTHLSVSTLAGTPGYVPPEYYQSFRCTTKGDVYSYGVVLLELLTGKPPTDSTDFGEDNNLVGWVKQHSKSKLADLFDPVLLVEDPALELELLEHLKIACACLDDRPSKRPTMLKVMAMFKEMQASSAVDSKTSACTVAVDDACFGDVEMTTLKEDKEEKD

SEQ ID NO: 69158 - protein, 159 aa, Zea mays
  Clone ID: UC-ZMFLB73020D12_FLI.pep
QSICFSSNCLHFLSFVGLTCKTLCCSILTGLLSFMMDDALTTGSIKTSDAEKRRLAKASLAYNCESKNCPHFRKLFPEYVEKYNQQLQLENTAAEPVPQENPAPAPSPAAQQAPTVANRAQPLAEARRDKNQKKAVPFWMVLVMFSVFGAVMALPLMQL

SEQ ID NO: 69159 - protein, 145 aa, Zea mays
  Clone ID: UC-ZMFLB73020G03_FLI.pep
TLQRTCDRTSCICCVTAWKIEDKIISFTLDNVANNDSAIRGLRARFAARKGNAFISKYFHVCCCAHIINLVVNDGAAALASLIENLRLTVKYLKKSPSCMHKFVDICRSPAIQIGEGMRLDVSTRWGSTYKMLRTTIAYKEAIKT

SEQ ID NO: 69160 - protein, 244 aa, Zea mays
  Clone ID: UC-ZMFLB73020G06_FLI.pep
FDGHHERHNLALPWTMATPTTEQVHKSHLWFSWHATLKELVKGPLLLENTVVEEEDLKGAHHLTALAEGSVRAQGNAEGSVRVQGIEGSGLAQGIEGSGLAQGNAEGSGLVQGTAGRGLAQGTAGGSAHAQGTAEGSAHAQGTGGAVHPMAEGIEIGPGHPPAMGTIRQTRKRFYGLVVDCVNKGTCNTTYKLVRLRRLAWIFSSVAVFCCFIQVLYSVSFRIEMSDDDGCYCSGNRRHVLQNT

SEQ ID NO: 69161 - protein, 249 aa, Zea mays
  Clone ID: UC-ZMFLMO17295H04_FLI.pep
CLQVRCGTRGALDPPCNAVGYIDRRVLGINHMYQKPAWRRHRACTDDSPHEGPFREDAPAWCVAPFEPEGILSSLSAVLSTVVGVHYGHVLVHMKSHTDRLRQWVTMGVALLVLGIILHFSHAIPLNKQLYTFSYICVTAGAAGVVFSALYFLVDVVSLRYAFAPLRWVGMNAMLVYVMAAEGVFEGFLNGWYYESTNNTLVYWVRKHVFVKVWHSTRVGILLYVLFAQILFWALVSGVLHRARLYWKL

SEQ ID NO: 69162 - protein, 137 aa, Zea mays
  Clone ID: UC-ZMFLB73108B10_FLI.pep
LQSFVLSLRTAVSNTREAAESPPLAVDDKIFVAVPEELKHGKSNLLWALHNLARDASSSRIAIAHVHVPCSLYENAGDTLLQSFEDVESTFKGKPRRLRSLEDFTVDSGRSQTQNSDSSCPPNDGAASICCSGWIHL

SEQ ID NO: 69163 - protein, 197 aa, Zea mays
  Clone ID: UC-ZMFLMO17067A01_FLI.pep
KVYYHSGGLRLNPNLYESGKVCLSLLNTWWGKGCEKWGKSSSTMLQVLVSIQGLVLNDRPYFNEPGYKNSAETTGGERCSLAYNQTTFVRSCKTTLYSLRKPPMHFETLVLWHFHEHERAILDACRAYMSGTVVGSSAGTGSNRRYVHDKCFAEFHKSLTLYTEHLRAEFATNRRRVMELETEDEIVPSIAASMKSC

SEQ ID NO: 69164 - protein, 444 aa, Zea mays
  Clone ID: UC-ZMFLMO17075D04_FLI.pep
LANIYNEVGYSGLSSECFSQQLTGKHGGDIIAPQSHDQDPNKMLPVGDYFSQNSSMEFFSGYEDMHFDGDLLPPGSNDKVSSGILGTEKDSSVPVLDVPGRNKEESPAGTSGFIEQKDTSNVTNMLPDLNLYHLASTASTHSSHSVSIESLEDSVADARSNKNDLLPSLELVTKMIEDVELLEEKAKVAKRESSVAGTGILTKVEELREMLTHAKEANDMHAGEVFGEKAILTTEARELQSRLQRLSDERNKYLVIIEEIRQTLDQRLVAAQQEIAAAEKEKLEKEVAAQTLLNEQENMMNSIVEESRKLQKEAEENLKLKEFLVERSQIVDMLQGEMTGICEDVSLLKRVVDERLSLSKLQPSAMSSLSSSLHSSHHKSWTSSDRTTEANGSLDKHTLAEPASPARKDLNGDECTVQVSDGNDTGKGVLKRVDSKDGDGWELC

SEQ ID NO: 69165 - protein, 477 aa, Zea mays
  Clone ID: UC-ZMFLMO17129G02_FLI.pep
RYEWDMLTADLELVERIDGYYDVVYGTYEPKYLNWWKSKKDFVFSRQWFRGQDGAYTILQTPAGHNKRPPKHGYERTKINPSTWEIRTLYTSGSSSPKCVVTLMLEIAPSFWGRWKRRHSNFDKSIPFALLSQVAGIREYFAANPALTSELPSTVVKSKASETLIIQSEHEDSELGDEFYDALTRGESFEDGDSDDDDDATTPKARKVKLKNVSWAIAGLALKTTKALVETSELVTNSSPVTVDPSHFHGTLHRAKTQNDQNSWSAPGGEKFMIRGKTYLTDYHKVVGGDPLLELLAVDWFKVNERFDSVALHPKSLVQSEAAKKLPFILVINLQVPAKPNYNLVMYYAAERPVNKDSLLGRFIDGTDAYRDARFKLIPSIVEGYWMVKRAVGTKACLLGKAVTCNYLRQDNFLEIDVDIGSSSVARSIIGLVLGYVTSIVVDLAILIEAKEEKELPEYILGTVRLNRVNPDSAVSI

SEQ ID NO: 69166 - protein, 401 aa, Zea mays
  Clone ID: UC-ZMFLMO17295G02_FLI.pep
VPPHSLLRFLAARFLLPDPPLASRFMAMWRAAARQLVDRALGSRAAHTSTGSKKIVGVFYKAGEYADKNPNFVGCVEGALGIRGWLESQGHQYIVTDDKEGPNCELEKHIEDMHVLITTPFHPAYVTAERIKKAKNLELLLTAGIGSDHIDLPAAAAAGLTVAEVTGSNTVSVAEDELLRILILLRNFLPGYQQVVQGEWNVAGIAHRAYDLEGKTVGTVGAGRIGRLLLQRLKPFNCNLLYHDRLQIDPELEKEIGAKFEEDLDAMLPKCDVIVINTPLTEKTRGMFNKERIAKMKKGVIVVNNARGAIMDAQAVADACSSGHIAGYGGDVWFPQPAPKDHPWRYMPNHAMTPHISGTTIDAQLRYADGVRDMLNRYFKGEDFPVQNYIVKEGQLASQYQ

SEQ ID NO: 69167 - protein, 238 aa, Zea mays
  Clone ID: UC-ZMFLMO17307C10_FLI.pep
QITKPETPEEEEEKKKNKRKEKKVFCAAMVTSRGLELAELVLEHVLGAGSEEVVQGGGAVEGEAGVGGSGGGGGGGCEGDGDGADGVGVHAGEDVVEGAEARGELGGLGAEDGVLGVHGEEALRGEAERGGHVRVLAAQVRRLRGQLVEVALLAHPRPPRGLAVGQHPLRAALLHERAQLLLRARRGGQGRRCRREGARAPAPAGGSHSCKRQKRQSSSLLLDPWLAYLLEAHTTTPH

SEQ ID NO: 69168 - protein, 314 aa, Zea mays
  Clone ID: UC-ZMFLMO17069F04_FLI.pep
VVDSMVVERARGESQSTSGSLQSLCWGSSAFGGIVSAYFSGSLVDTYGVRFVFGVTAFLPLMTSAVAVLVNEHGIPSGEHNTFLSGSGFIESSKQHVRQLWTSVKQPNILLPTLFIFLWQATPQSDSAMFFFITNKLGFTPEFLGRVKLVTSFASLLGVGLYNYFLKEVALRKIFLVTTIIGSALGMTQVLLVTGLNRQLGISDEWFSIGDSLIITVLGQASFMPVLVLAAKLCPPGMEATLFATLMSISNAGSVTGGLVGAGLTRIFGVTRDTFGNLPLLIVVCNLSSLLPLPLLGLLPEGSGDTDNGETKNN

SEQ ID NO: 69169 - protein, 320 aa, Zea mays
  Clone ID: UC-ZMFLB73119A06_FLI.pep
TARSRPREMTATSAFESSPEMERFLCERLLNTEQPIAERFRALFSLRNLRGDAPRRALLQAARDPSNLLAHEAAFALGQMQDAEAIPALVAVLKDLSLHPIVRHEAAEALGAIGLEKSIPVLEESLTTDPAVEVQETCELALGRIEENKKVNGAESTTTSPFLSVDPALPSKHGLSVDQLRGLLLNEQESMYQRYAALFALRNDGGDAAVSAIVAALSVKSALLRHEVAYVLGQLQNKAASDALSTVLKDVCEHPMVRHEAAEALGSIADQESIALLEEFAKDPEPIVSQSCEVALSMLEYERSGKSFEFLFLQTPHVQS

SEQ ID NO: 69170 - protein, 215 aa, Zea mays
  Clone ID: UC-ZMROB73006B06_FLI.pep
TVHHPVKCNFHVQDHKTRNPQLTCNHSVFLLVGRGAEPLKQHGEEPGEIEPLLWVVFLHIPVCFFRLVSFSQSFRSSSSSSLNWNFSFSFRCCLLQSCGDSLNLLYGLLQHIRFCSLVSRGTLLLLDALRCLAFYGLLFRLRFFIFGSMSPQVESVSKALHLVLDLFHRFWVALLHLVHHCTYLLHHFWVALYLVHHCTESIHVLASLFFASLLD

SEQ ID NO: 69171 - protein, 538 aa, Zea mays
  Clone ID: UC-ZMROB73033D06_FLI.pep
RRVITPYDTEDTEPEAKSVRSARVAASRQPSSNCMAAVPASAPAAAEAAELVPTLSSLEPVYGAGAQLDESRLRFARLGDRFHAVYGARPALFARSPGRVNLIGEHIDYEGYSVLPMAIRQDMIVAIRRANGAQVRVANVDDKYPLCVYPADPDKEIDVKNHKWGHYFMCGYKGVYEYCRSKGIDLGKPVALDVVVDGTVPQGSGLSSSAAFVCSATIAIMGILDKNFPKKEVAQFTCLSERHIGTQSGGMDQAISIMAKPGFAELIDFNPIHATDVQLPSGGTFVIAHCLAESKKAETAATNYNNRVVECRLAAIVLAIKLGMDRKKAISSVTTLSDVEGLCVSFAGREGSSDPAVAVKKLLHEDPYTAGEIEKITGEGLTSVFQGSQTSLDVIKAAKHYKLFQRATHVYSEARRVYAFRDTVSSKLSEEGKLKKLGDLMNESHYSCSVLYECSCPELEELVKVCRDNGALGARLTGAGWGGCAVALVKEPIVPQFILKLKEMYYKSRIDRGVIKQGDVGLYVFASKPSSGAAILRL

SEQ ID NO: 69172 - protein, 478 aa, Zea mays
  Clone ID: UC-ZMROB73034D03_FLI.pep
NLETIVNCSWLGVGGLQGADEAQELALGRCWWCVRLPAAGLDGADGLPELALGVGTGRGDDHVLPDGARSAGGGAVGVEVVDGGGVLVEPAHLLQAVELPGLHQQAVSDPVLPRDELGGAHGVGAVEPGAVHEAAVPLERGGEALVRLQLGPDPDGPPGDDGPPDAPRHGEVGVADDPDHLDAVGPPRGLLGGVVARGLPVVLGDGAVVGHLVADAHAVALAVHGARHGDGLLHEGLPGQRAVQDDVPPLVQRRHQQRRRRVRRRLVDQLCRLEHVVVVAHGADGAVDDVRLLERVRLHHHGVGLRVGPERLLLQLLEHRALAGAHPAAHQQQHRAALRVRHGGHHVRALRRLAARRYDADRLHLLHQRREHPRHLQVTRHALETLLPCCFQDHVPELPFAAGVRGQGRGDEVGGMVPVERKISEDASVQLLYELDIKQALGGVVLGAGEEPVDVLHACLAAAEVVVRQPAELWALAH

SEQ ID NO: 69173 - protein, 262 aa, Zea mays
  Clone ID: UC-ZMROB73030B03_FLI.pep
TRRNDGSAPRAHHATTMPVVKKICPPPLHGEPATISAADFLGTSAAAARRFRSFSSSASRNSSLTMAWYRHSMLQKARSPRYMKTSFPSSARRHMSQHERNSATRNAAPPPPPARPDTGPPHRLVAHRPLHASSDTSSRAARRGMDTRGAAAAPAPGSGPSASSAARIPSPTPPTASRWRHPRGDARSSGLVGDGRPSCFHWGISSLRAMLLAFSTMPRCWKRKKRGGEEVRAGRAPVPVLRCPWLASCSSMRTRGGDQERL

SEQ ID NO: 69174 - protein, 530 aa, Zea mays
  Clone ID: UC-ZMROB73011C11_FLI.pep
LLLCCTAIASFHSKEEEVEAKMMQQMQQEQWNAAAAGLLRPTKSAPCSPIKPAAAAAMLRTHSDSFHVAHKVPVGDTPYVRAKRVQLVDKDPEKAIALFWSAINAGDRVDSALKDMAIVMKQQNRAEEAIEAIKSLRSRCSDQAQESLDNILLDLYKRCGRLDDQISLLKHKLQRIHQGHAFNGKRTKTARSQGRKFQVTLEQEATRLLGNLGWALMQKENYTEAEGAYRRALLIGPDNNKMCNLGICLMKQGRVLEAKDVLKQVRPAGVDGLRGADSHLKAYERAQEMLRDLETKLVGRPRADQLDTNWLYDALLLGSSSSIWQPQPCIDHLLPPPAPASIPALAPAPRDHFADENAGLSKKLAALQANMLNVDAQPFYSLRVPPLAAKPHNTLPQQKPHSTLPQQQQQKKKPAPVHDPLGNLKRTRSSNCMDKAGAVVDKAQSIDENSGRRKSLSAEDRWPELPDHSAFDEALVADILGPVFDDKPTAAGTNGHGKLPASCDTSPAAKEKISKRLRIFQDITKTVNNF

SEQ ID NO: 69175 - protein, 194 aa, Zea mays subsp. mexicana
  Clone ID: UC-ZMROTEOSINTE010B02_FLI.pep
DDMAQHAEAFGGVSDDEDVPPHLRALANAAQSGDVPALVAALDNHDGSIDVPVEDGDTLLHLACLYGHLPCVQLLLERGASLECQDEEGAIPLHDACAGGFTELVQYILNFAANKDGCVVRMLNTIDSEGDTPLHHAARGEHLDVVKLLLQAGASPKKENTYGQTPADMADQDTEVRTLLTAKQIEANTHMSDD

SEQ ID NO: 69176 - protein, 185 aa, Zea mays
  Clone ID: UC-ZMFLMO17057E09_FLI.pep
IGLLECGESPPTPSETLTDKDKRAEHPLQSPPKKSYSHTTKATRPARGPGSHGRRRRQVCAAAGRHREEVAGGRPRRPRRPRPPRRSQRGAGAHLARDCRRPRLAGRARPRRLLAPRGRPAHRRGGEVARRGHRGGGGQRVRGGGLHGSGRGRAHRPVQPVLLLARPSRRGGGDGGASGGPEGGA

SEQ ID NO: 69177 - protein, 240 aa, Zea mays
  Clone ID: UC-ZMFLMO17052G12_FLI.pep
SPRGCTCSRRPRSGTRAACAATMGPKARLTSYNVCWVGGCFDSDILAAFDAAVADGVDVVSLSVGGVVVPYYLDAIAIGAFGATEAGIVVSASAGNGGPGGLTVTNVAPWMATVGAGSMDRAFPANVRLGDGQVLDGVSVYGGPALESGKLYELVYAGASGGGASSASDGYSASMCLDGSLDPAAVRGKIVVCDRGVNSRAAKGDVVRRAGGVGMVLANGAFDGEGLVADCHVLPATAVG

SEQ ID NO: 69178 - protein, 474 aa, Zea mays
  Clone ID: UC-ZMROB73033H01_FLI.pep
RERPAQAKRNRGARRGRKGRRASRMREIISIHIGQAGIQVGNACWELYCLEHGIEPDGTMPSDTSVGVAHDAFNTFFSETGSGKHVPRAIFVDLEPTVIDEVRTGSYRQLFHPEQLISGKEDAANNFARGHYTVGKEIVDLCLDRVRKLADNCTGLQGFLVFNAVGGGTGSGLGSLLLERLSVDYGKKSKLGFTIYPSPQVSTAVVEPYNSVLSTHSLLEHTDVAVLLDNEAIYDICRRSLDIERPTYTNLNRLISQIISSLTTSLRFDGAINVDVTEFQTNLVPYPRIHFMLSSYAPVISAEKAYHEQLSVPEITNAVFEPSSMMAKCDPRHGKYMACCLMYRGDVVPKDVNAAVATIKTKRTVQFVDWCPTGFKCGINYQPPSVVPGGDLAKVQRAVCMISNNTAVAEVFSRIDHKFDLMYAKRAFVHWYVGEGMEEGEFSEAREDLAALEKDYEEVGAEGADDEGDEGDDY

SEQ ID NO: 69179 - protein, 557 aa, Zea mays
  Clone ID: UC-ZMROB73004H12_FLI.pep
LIHLAFCFLQRFRPSTRQILVHDLTLFRSQAATPKPKPYPPISSSQPAMMAAEPSPSVPSTAAEDMETLALDSSSSSAAATASASDPLLRPPTSPTAAASDDPFVIDDFLDEDDFTAPPPSVAGPPPAVLGDAASPVFPKITVSDPKKHAEPSGGGAAGVIPGSGSYFSYLITTRFAGGGGEVRVRRRFRDVVALADGLAAAHRGLFVPARPDKSVLEGQVLQRHNFVSQRCAALQRYLCRLAAHPIVGQSPGLRTFLTEPGAIPAFQSEAPRYWTTTVNAAAPMVQMKAGRDLFGMFKGLKQTMVNGMVATKPPPVEQETDTEFLAHKARFEDLQQQLTTTSQQAEALVKAQDGYRETTGHLGMTLIKLAKFEREQATCNSLRRRSGEIHNFANSVLKMSRSQIKLNSEIVKHLGSIHEYLEMMISVHHAFTDRSNALHYVQILSADLFSLHIRARRLESSSARDMGHEWSTYQKVEGLKETIRSAEAAKSDAVREYESIKENNKIEIKRFDKERRHDFIEMLKGFVITQVSYSDHFANMWTKVTEETEVYANRSS

SEQ ID NO: 69180 - protein, 124 aa, Zea mays
  Clone ID: LIB3078-013-G10_FLI.pep
ICNVRAPHNITEYMTHTHMLHKIQIQNTITPRRGLHRFSSTSLFIFALHTCMHKHAWLGHKHEHRYGYLHHPRMIETIETETSDEQQGNLVSSTPTSSSSTTTTTASTAATSAAAASSSSSSTS

SEQ ID NO: 69181 - protein, 153 aa, Zea mays
  Clone ID: LIB3076-015-C7_FLI.pep
SQKVSNIGRQLLNQHVVELLNVKQHTFVVAGHKVDGNTLPTKTTTTTNTMQVVLWLGGKIIVDDQGHLLNINTTSKQVSGDEHTGGARPELPHDDVSSVLVHVTMSGRNGVVPAPHLVSEPVHLAAGVDKDDTLGNGQGLIQVTQCVQLPVFP

SEQ ID NO: 69182 - protein, 179 aa, Glycine max
  Clone ID: UC-GMROPIC0001G04_FLI.pep
SVTRARKLPNDEITSCKLAISNRSRLEPPLPHEYFGNAVDVVSTAGFTAGELLEKDLGWAAWKVHVAVANQNDKAVRQKLKEWLKLPVVYQLGVHFDPCTVTMSSSPRFNMYGNEFGMGKAIAVLSGYANKNDGNVTAYQGYEGEGSIDLEICLSPDAVSALESDEEFMEAASVANFLH

SEQ ID NO: 69183 - protein, 91 aa, Glycine max
  Clone ID: UC-GMROPIC007G06_FLI.pep
LYYGEGMLCWTEEAGYHSSSVASQADISGGSGRDQAQVHRHLLQVWTWPLPDHSGETQVLWSLEGLNSCFPDNLCDENFCSKTRHFSGVFC

SEQ ID NO: 69184 - protein, 239 aa, Glycine max
  Clone ID: UC-GMROPIC011E01_FLI.pep
ANVTQVSYAVGTDTRIGPKFLNSSVGFGGSCFQKDILNLVYICECNGLPEVAEYWKQVIKINDYQKSRFVNRVVSSMFNTVATKKIAILGFAFKKDTGDTRETPAIDVCKGLLGDKARLSIYDPQVTEDQIQRDLWMNKFDWDHPIHLQPTSPTTEKKVSVVWDAYEATKDADGVCILTEWDEFKTLDYQKVYDNMRKPAFVFDGRNIVDVEKLRDIGFIVYSIGKPLDPWLKDMPAVA

SEQ ID NO: 69185 - protein, 96 aa, Glycine max
  Clone ID: UC-GMROPIC011G03_FLI.pep
FHPQGDGGGIILDYGNSTTHLTTGAGFGQPYPQKRAHGSFHGPQKQAQTNFPYSPHQQPHHQQPHHQQQLHHQQQLHHQQQPQRKRTNQLSQLKPQ

SEQ ID NO: 69186 - protein, 168 aa, Glycine max
  Clone ID: UC-GMROPIC020A07_FLI.pep
EGHNSWVSGVAFDSYWSSPNSNDNEETVRYRFGSVGQDTQLLLWDLEMDEIVVPLRRPSGGSPTYSAGSQSSQWDSVVPLGTLQPAPSMLDVLKISPLVTHRVHTEPLSGLIFTQESVLTACREGHIKIWIRPAAAESQSSNAETLLSTSLKEKPSILSKVGNSSHRQ

SEQ ID NO: 69187 - protein, 130 aa, Glycine max
  Clone ID: UC-GMROPIC020B03_FLI.pep
DHRPSREDERDRIESLGGYVDLCRGVWRIQGSLAVSRGIGDRHLKQWVTAEPETKVLRIEPEHDLLILASDGLWDKVGNQEAVDIARSFLVGNNKSQPLLQACKKLVDLSVSRGSLDDTSVMLIKLEHYI

SEQ ID NO: 69188 - protein, 358 aa, Glycine max
  Clone ID: UC-GMROPIC031G09_FLI.pep
TGSAVPSPRSSASTPNVMDMAAAMSLFPGSPSSISSMSPSPFAQPMSPSTSGISHSSNAWPQPNVPALHLPGSNIQTSRLRSSLSARDMPPEDLDVLQDFDGQQHLLNDLGCFSQPHPGGISVSRSGRSKTLTPSNLDELFSAEISSSPRYSDPAVASVFSPTHKSAIMNQFQQLQSSLSPINTSVSSPRNVEHPLFQASFGVSSPGRMSPRSMEPISPMSSRLSFAQREKQHQQLRSLSSRDLGANIPVSMVGSPVNSWSNWGSPHGNGKVDWSVNGNELGRLHRSSSFELGNNGEEPDLSWVQSLVKESPSEIKELGGSGPVAFADGPSSNPQVESVDHSVLGAWLEQMQLDQLVV

SEQ ID NO: 69189 - protein, 96 aa, Glycine max
  Clone ID: UC-GMROPIC036F07_FLI.pep
VLELLTGRKPVDHTLPRGQQSLVTWATPRLSEDKVRQCVDARLGGEYPPKAVAKMAAVAALCVQYEADFRPNMSIVVKALQPLLNARHGPAGETPN

SEQ ID NO: 69190 - protein, 404 aa, Glycine max
  Clone ID: UC-GMROPIC039D05_FLI.pep
IELRCSFLLLFVFISFTPPSSPPQRAMSSVETEMEPLTSGASNRIIPLLKALRASLIFVYTFFLSFLLFVLPRRRRLSPAAGPPSPKKHLRRRWLVREEEDTCRRRALAQDVGMGRDEGWYRWSTSIFYGVRNNALFCRSWFPVAGDVKGILIIIHGLNEHSGRYADFARQLTSCNFGVYAMDWIGHGGSDGLHGYVPSLDHVVVDTGAFLEKIRSENPGIPCFLFGHSTGGAVVLKAASHPHIEVMVEGIILTSPALRVKPAHPIVGAVAPIFSLVAPRFQFKGANKRGIPVSRDPAALLAKYSDPLVYTGPIRVRTGHEILRISSYLMRNFNSVTVPFFVLHGTADKVTDPLASQDLYDKAASKFKDIKLYDGFLHDLLFEPEREEIAQDIINWMEKRLFTI

SEQ ID NO: 69191 - protein, 146 aa, Glycine max
  Clone ID: UC-GMROPIC047D08_FLI.pep
TAERKKEKGQNIITLHELSMKYYLTMQIFMTEAVPIRCRATTASPGLQRPLCVADLRAASRMTSVDSASVALADPSPNIGIKPLYIKLCLAGVSSLHVQSNESVLNTGTTTDNIGTAGLYLATNLAVDPPRVSTTMSFALALFAVR

SEQ ID NO: 69192 - protein, 149 aa, Glycine max
  Clone ID: UC-GMROPIC050G10_FLI.pep
AIFELSYCTSRFQEVARLYAVCWFNITGQIKTRVLSPNTQYAAFLVFQMIDASGFHHHPAMLSVSNVGGSRTSKYVCLDPNLEDNDLDDRFRGLQRPNVRKDKWLEIEMGEFFNSGLEEDEIYMNVRETSDMWKHGFILEGIEVRPKHV

SEQ ID NO: 69193 - protein, 181 aa, Glycine max
  Clone ID: UC-GMROPIC061A01_FLI.pep
IKFMCSSGSTSAAPTRPCYLEQGHGLASLKHMDACHNRANNFVSRSMTMGYGTSYHRTSLRNNNNNNNNNVSVSSPRSARFYDARFEDQHHPHFLSACFLCKKSLGDNRDIFMYRGDTPFCSEECRQEQIEIDEAKEKNRNLSSSMKALRNKEQRNNNNKSTSPNKAQQDYSFRTGAVAAA

SEQ ID NO: 69194 - protein, 196 aa, Glycine max
  Clone ID: UC-GMROPIC088G01_FLI.pep
DDAYPLGPPLFMETPGKSSPLAQIEFPDFDEIVAPLALMDEETWPKSSGSQSDHKSSLSSNSPDILSVNQLLQSVLETARQVASFPISSTPVSYDQMKNQCEALVTGKQQKMSILHSFKHQQETGAIVLSSENEIKVSPLPIKTLEYSEGDLKLVHHEQFQAQYQVRLCSYDFGQQHSLKLPPASPFDKFLKAAGC

SEQ ID NO: 69195 - protein, 274 aa, Glycine max
  Clone ID: UC-GMROPIC098F09_FLI.pep
QDPYGIFNTEESIPRDIGPYKNLVIFTSSSMDPKFISSPSSIPLLRKLRILMSNLQTVDLKSLTNQQKLAFWINVCNACIMHGFIQYGVPSTPEKLLALMNKATLNVGGNIINAQAIEHFILRKRDISNVKEVQRKGEWEEKESFVRELYGLEFNDPNVTFALCCGTRSSPAVRIYTADGVTAELEKSKLDYLQASILATSTKRIGFPELLLRNMLDFSVDTDSLVEWVCSQLPTSGTLRKSMVDCFRSHSNVKPSTIVEKIPYDYEFQYLLTI

SEQ ID NO: 69196 - protein, 313 aa, Glycine max
  Clone ID: UC-GMROPIC101B05_FLI.pep
LKANLTELESRHSNNYTEEELHSVKKLSKKLPPIQEAPKSYTPYIKYTKLQFKVDTFFAVGSPLGVFLALRNIRIGIGRGQEYWEQENIREEMPACRQMFNIFHPYDPVAYRIEPLVCKEYISQRPVLIPYHRGGKRLHIGFQEFTEDLAVRTHAIKNYMKSARDKVITVCQSRKMENIEGESSEEEEQPSYGSFMMERLTGSMSGRIDHMLQDKTFEHPYLQAIGAHTNYWRDYDTALFILKHLYGEIPEDSDLLVGFTGDNSKSESTSVSWYEPRDTVEEDLPLTFSDKVMARSFSSKAKKVLQKHTAFNF

SEQ ID NO: 69197 - protein, 369 aa, Glycine max
  Clone ID: UC-GMROPIC111D07_FLI.pep
PNSLYTYHPPSNSIPFFFLIPLSNHNMQTLSPPTSNALNLKHVLRPRRVAPSRIFVKCAFASEPASYGVGSSRADWQSSCAILASKVVSQEQTSSADQNGGTADHIAAVNGHKAAVSDLQLVPIGNLAQANNKPLPPKPLTISDLSPAPMHGSKLRVAYQGVPGAYSEAAAGKAYPNCEAIPCDQFEVAFQAVELWIADRAVMPVENSLGGSIHRNYDLLLRHRLHIVGEVQLPVHHCLLALPGVRKEFLTRVISHPQALAQCEHTLTKLGLNVAREAVDDTAGAAEFVATNNLRDTAAIASARAAELYGPERDGGRNPRRSEQRHAVRDAGERAYHSAHGPSFQDEHCFRTRQGNFGALQSAFRVRVP

SEQ ID NO: 69198 - protein, 196 aa, Zea mays; identical to SEQ ID NO: 50652
  Clone ID: 700574469_FLI.pep

SEQ ID NO: 69199 - protein, 131 aa, Zea mays; identical to SEQ ID NO: 53429
  Clone ID: 700454682_FLI.pep

SEQ ID NO: 69200 - protein, 245 aa, Zea mays
  Clone ID: LIB189-032-B12_FLI.pep
RRRRRCGSSGTRRRRTPGSSRRARTTTGQNYSCCYCRCCWCWYTTSSASAGERSCWCGSGGRRSRAPAAGPPRGGAGSAGSWGRAPAGCPRAPAATRRRTPPSCTDPPRCSARKERVCVVSGGELGDKIAFSVPGTRAVVVGTSLRRKGGGPRMRSAPRGWTWTSCCWALRGRGAQSTGSASRQPPPPLPEADSTDSRLMDLEGILRAQDLGLAFGCQRVERKGEERRGEEGGGGLALALACAFS

SEQ ID NO: 69201 - protein, 440 aa, Zea mays
  Clone ID: UC-ZMFLMO17044H08_FLI.pep
PYLVPASTEQRVGMGMRRRQDAAAILGLLKLFLFRLAASQSFIGVNYGTIADNLPPPASTASLLMSTSIAKLRLYEPQPDLVAALAGSNISILLGIPNGAVPNLASSPAAAASWAAANIPATLPVSSISVGNELLNSGDPTLAPQLLPAMQNLLAALPAGSTTKISTVHSMAVLSASDPPSSGAFHPDLAGSLDPVLDFLHQNGAPFMINPYPYFAYASDTRPETLAFCLFQPNAGRVDAVSGLTYTNMFDAQLDAIRAALDAKGYSDVEIVIAETGWPYKGDADEAGATVDNAKAYNSNLVAHLKSQVGTPRTPGKSVDTYIFALYDEDLKGGPESERSFGLYKTDLTANYDVGLAKDNGTAAPTSLTPVPAQGTPQPSKGTMPTGYCETTSAVPGTTQGQQLPQSSSCYIPGGAESRHATWQLVLLGVLLFLVKVAGN

SEQ ID NO: 69202 - protein, 132 aa, Glycine max
  Clone ID: UC-GMROPIC050A05_FLI.pep
TYLLLGTKTKHVVFGMFGTCQNPLLFLKAILELYAQYVSHLMDSSWRWPSQLTLCMCMTQSMDLRRSKRLIFLGRSLVYPLALIQNHSLLVFGTAPMEAFYSSIDAEITCILTACKFVTLHLVSTNSLCCVV

SEQ ID NO: 69203 - protein, 130 aa, Glycine max
  Clone ID: UC-GMROPIC058H06_FLI.pep
GQRVLSVQYSIPDNVQVSPECRHLISRIFVFDPAERITIPEILQNEWFLKNLPPYLMDEKIMGNQFVESDQPMQNIDTIMQIISEATIPAAGTYSLDQFMADNIIDDDMDELDSDFELDVDSSGEIVYAI

SEQ ID NO: 69204 - protein, 248 aa, Glycine max
  Clone ID: UC-GMROPIC111H08_FLI.pep
VNKDTTNSKAPPMPLATLPLLLVDDNNACIDLSMGEEKVVKLSPLSPKILVYIDWSQKLLEKYDTHTLETLPEVLKYGPVTKKARTEPLSLYTCLEAFLREEPLVPEDMWYCPKCKERRQASKKLDLWRLPEVLVIHLKRFSYSRSMKHKLETFVNFPIHDFDLTNYIANKNNSRRQLYELYALTNHYGSMGSGHYTAHIKLLDENRWYNFDDSHISLISEDEVNTAAAYVLFYRRVKTDDAAVSNGA

SEQ ID NO: 69205 - protein, 70 aa, Zea mays
  Clone ID: 700084512_FLI.pep
RQTEPESQLHKGLFNTARTWDKTGRVHPAKFQSSAQFNSSGRWVASSALPFSFKCSTLCTGRKRVASGET

SEQ ID NO: 69206 - protein, 105 aa, Zea mays
  Clone ID: 700163914_FLI.pep
NRAPLKCFSGSKNGRAFNCRQAGKLSTKVMNISVGALPLAASSKNFVAHPFSILIVPHCHACLRCYYVIDSVKKRRIQISCTDESPPIEVLKHKLNQAVPHQKIM

SEQ ID NO: 69207 - protein, 97 aa, Zea mays
  Clone ID: 700073549_FLI.pep
SGKCTNLTEANGSGIHGYKQFSLTATTAGPRKQTMRAAPAQRRPETVYDACTCTRETKRRRAGRERWMLAALRCAPLGRSASAFSSRWRGAARGCGR

SEQ ID NO: 69208 - protein, 58 aa, Zea mays
  Clone ID: 700073619_FLI.pep
TQTHREGHPSPKIDRSIATNFILATRQQLLTTGGYAFKAPDHGDDQCSHRTAHLPGDD

SEQ ID NO: 69209 - protein, 47 aa, Zea mays
  Clone ID: 700219013_FLI.pep
KWYIYSSSVTYTTHRHTIKSNQPSCLYTAGSSSDRMTAPDDMCMHSC

SEQ ID NO: 69210 - protein, 267 aa, Zea mays
  Clone ID: 700222232_FLI.pep
KLRLYKNRRLVIQTSQSIGDAPYGDHFTVEGIWDVEQDSLDENCCDLRIYINVAFSKKTIFRGKIEQSTKDECREVFSLWIKLGHDLLKQEYDRSKGASSTPDSGVQPGATTNEESAVEVAVPVVSSSHDESGARSLIPPTQDHQQRTGRDPSITSTSQELWGSLSSYMRSRQLGPVLAMSLVALIILMQVTIIVLLTRPPQVQMDPHGIWTGSSGYSKESIEWVQKRLSLLSEEMQLAEAHMETMRREFAWLRSYLERLQRTRGST

SEQ ID NO: 69211 - protein, 118 aa, Zea mays
  Clone ID: 700211235_FLI.pep
TEYHKTLDFKLLVSVLNMNHFQEANSIYIYIFHLSAYYNACLYMHPLLCFILMSSSLSYGPTSDLQIPRLLGGLQFVPSEEIWPPLAEHPLNIRMGRRQTNLQDVCFFGEEAARSEDI

SEQ ID NO: 69212 - protein, 242 aa, Zea mays
  Clone ID: UC-ZMFLMO17005E05_FLI.pep
GPGRGDAAGPVLVPQEEADGGAVVDAGRRVPGPPALRRGLGDGLGRVLLPRRGADDGHDLLVAEHVPHAVRGQDDEQVPRRDAAVRHLRLRHHAVALEAVVAQRARHGEARAVLVGKPHAQHRRLVLEREHAAVAALDTLSLLGHVGLLVGGELHGLEVARVRHGRQHGPGVAEVGDDEVLPLLDGAHGGGAAEVAVHVGLELELLVHGLERVGAGLPPLLQQLRRRRRRLPAAVRGRRRRR

SEQ ID NO: 69213 - protein, 129 aa, Zea mays
  Clone ID: 700204680_FLI.pep
STRSDGYVLHGLPAGPTMKESTSALRRPSAARNTPPTASDRWSSSGATSSARLSASCAAARTAASSSAAPSPEASSADASLRTASSNDATSPSPSAASWPDTALNGSAQGRSPTPPDTRGKVTGPPTRT

SEQ ID NO: 69214 - protein, 79 aa, Zea mays
  Clone ID: 700460657_FLI.pep
KVKVGSVVMPTYPPAMVLLVLCLFLVFLGSQLLCFMWSHTALFVVLHHRSWLTQKPTFWGQQLNEMFAREFRALWNLFG

SEQ ID NO: 69215 - protein, 88 aa, Glycine max
  Clone ID: UC-GMROPIC027D10_FLI.pep
GSEKKHWPEVVSFFLLRMTARGSDPIRGRLWPQMALALAIAFISSTVVSVNADGYPYYSPPPPYEYKSPPPPPYVYKSPPPPSPSPPP

SEQ ID NO: 69216 - protein, 149 aa, Glycine max
  Clone ID: UC-GMRONOIR055C01_FLI.pep
REQAQEFTDIKFREAYLDTVCLNMVQDPGHYDVLVMPNLYGDILSDLCAGLIGGLGVTPSGNIGEGAAVFESVHGTAPDIAGQDKANPTALLLSGVMMLRYMGLESYANKIEKACFDAISHGDHKTRDLGGTGTCSSFTADICARIKSM

SEQ ID NO: 69217 - protein, 642 aa, Glycine max
  Clone ID: 700661209_FLI.pep
KQYYANDVDRTKNMGVLIHGDGSFAGQGVVYETLHLSALPNYTTGGTIHIVFNNQVAFTTDPTSGRSSQYCTDVAKALDAPIFHVNGDDVEAVVHACELAAEWRQTFHSDVVVDLVCYRRFGHNEIDEPSFTQPKMYKVIRSHPSTLEIYEKNLLESGELTQEEIDRIHKKVTSILNEEFLASKEYIPKRRDWLSAYWLGFKSPEQLSRIRNTGVKPEILKTVGKAITTIPENFTPHRAVKRIYEQRAQMIETGEDIDWGFAEALAYATLLIEGNHVRLSGQDVERGTFSHRHAVVHDQTTGEKYCPLDHVIMNQDEEMFTVSNSSLSEFGVLGFELGYSMENPNSLIIWEAQFGDFANGAHVIFDNFLASGEAKWLRQTGLVVLLPHGYDGQGPEHSSARLERFLQMADDNPHVIPEMDPTLRKQIQECNLQIVNVTTPANFFHVLRRQVHRDFRKPLIVMSPKNLLRSKACRSNLSEFDDVQGHPGFDKQGTRFKRLIKDQNAHKDVEEGIRRLVLCSGKVYYELDEQRTKVDANDVAICRVEQLCPFPYDLVQRELKRYPNAEVVWCQEEPMNMGGYTYVLPRLISSMKAVNRGGYDDVKYIGRAPSAATATGFLKVHQKEQTEIAEKAVQQEPIDFPF

SEQ ID NO: 69218 - protein, 557 aa, Zea mays
  Clone ID: UC-ZMFLB73067A02_FLI.pep
SPFARNAHTARSPISDPRSPRRSKMQIFVKTLTGKTITLEVESSDTIDNVKAKIQDKEGIPPDQQRLIFAGKQLEDGRTLADYNIQKESTLHLVLRLRGGMQIFVKTLTGKTITLEVESSDTIDNVKAKIQDKEGIPPDQQRLIFAGKQLEDGRTLADYNIQKESTLHLVLRLRGGMQIFVKTLTGKTITLEVESSDTIDNVKAKIQDKEGIPPDQQRLIFAGKQLEDGRTLADYNIQKESTLHLVLRLRGGMQIFVKTLTGKTITLEVESSDTIDNVKAKIQDKEGIPPDQQRLIFAGKQLEDGRTLADYNIQKESTLHLVLRLRGGMQIFVKTLTGKTITLEVESSDTIDNVKAKIQDKEGIPPDQQRLIFAGKQLEDGRTLADYNIQKESTLHLVLRLRGGMQIFVKTLTGKTITLEVESSDTIDNVKAKIQDKEGIPPDQQRLIFAGKQLEDGRTLADYNIQKESTLHLVLRLRGGMQIFVKTLTGKTITLEVESSDTIDNVKAKIQDKEGIPPDQQRLIFAGKQLEDGRTLADYNIQKESTLHLVLRLRGGQ

SEQ ID NO: 69219 - protein, 533 aa, Zea mays
  Clone ID: UC-ZMFLB73180D07_FLI.pep
PRYNKGLAFTERERETHYLRGLLPPAIVSQELQERKIMNNIRQYQLPLQRYMALMDLQEGNERLFYKLLIDNVEELLPIVYTPTVGEACQKYGSIFSRPQGLYISLKEKGKILEVLKNWPERSIQVIVVTDGERILGLGDLGCQGMGIPVGKLSLYTALGGVRPSACLPITLDVGTNNEELLNDEFYIGLRQRRATGQEYTDFLQEFMTAVKQNYGEKVLIQFEDFANHNAFDLLARYGTTHLVFNDDIQGTASVVLAGLIAAQTLLGGSLADHTYLFLGAGEAGTGIAELIALEISRQTKAPIEECRKKIWLVDSKGLIVSTRKESLQHFKKPWAHEHKPLSNLLDAVNAIKPTVLIGTSGKGQTFTKDVVEAISSFNERPIILALSNPTSQSECTAEQAYTWSKGQAVFATGSPFDPVEYNGKIHVPGQANNAYIFPGFGLGVVMSGAIRVHDDMLLAASEALAQQVTEENFEKGLIYPPFSNIRKISAHIAASVAAKAYELGLASRRPRPKDLVKYAESCMYSPIYRNYR

SEQ ID NO: 69220 - protein, 292 aa, Zea mays
  Clone ID: UC-ZMFLMO17218B03_FLI.pep
SFYVAGTLVCWVSTLILQLAWDYKALLLLLVVVRWSVLHLPSVVYLQCAAHSQDEVRGKAVRLVAKRLYDLTYATEKIEQFAIESLVGVANEHTVDTDINSKSLKESTAEIEVGSQGTSVSGSQIPDTEFSENGPFKTSSVSTKQSAVSVSEAKRRTSLFFALCTKRSSLLQHLFNAYGRSPKVVKQCIHWHMPNLIRNLGPSCPELLNIIHNPPEGSEHLITLTLQTLTEDSNPSADLVAAVKQLYNTKLKDASILIPLLPSFPKEEVLPIFPRLVDLPLERFQDVLARIL

SEQ ID NO: 69221 - protein, 458 aa, Zea mays
  Clone ID: UC-ZMFLMO17219A09_FLI.pep
AAAQELRHHLPTLPGFLRLFLELIESFMESAEGPSPYSGDRAAPVQDGNGQTTPGHNSRRPNLSLQIPARTLDTNIPSSTRVTISCSPSSTRVGLPPRPNSTRTKSSIKNMNPQHSFRARSSAQEGDRVVLLNPGTSSEGQQDNPSTARSFSFRKVINSLSAKRTHSLPVTPVGTTDKAASPPNQLDTLPTTTNEGVEAKIRRSLSVPGNRKNRSLRRADSLGVIRVIPTTPRPVPVEATTSSDIIEETIDVPEDGGEDIPEEEAVCRICFVELNEGGETLKMECSCKGELALAHQDCAVKWFSIKGNKICDVCKQEVQNLPVMLLRIPTQTANRRVANAAQQRAAQQYRFWQDIPILVMVSMLAYFCFLEQLLVTDLQSRALAISLPFSCVLGLLSSMIASTMVSKSYLWAYASFQFAIVILFAHIFYNVVRNSTWVTSIADKCLCGTDCCLVITFS

SEQ ID NO: 69222 - protein, 400 aa, Zea mays
  Clone ID: UC-ZMFLMO17263G04_FLI.pep
QADLIPSALRVFSLLSHPSTASYTTVLSALSRHGRPHDAISLFAISASAVAPDAELLSCLVSCCRRASALLPARAAHAYGIKNVAALAFYASAGPALVALYASRGKVGAARRVFGYMDGLDVVSWNAMIGGFASAGMDEESWACFREMHSRGVRGNARTAVVVLGSCDMESGRQVHGTIVSSHGGSSNAILWNALMSMYSRAGCVTDAERVFMEIVKKDVVSWNVMIGAFAKNGYGERALEFVDMVLQCGMKPDSVTFTAVLMACCHCGLVDEGLVLFQRFVSVVGLVPTMEQCACIVDLLARAGRFLEALEFIGQMSVRPNAVVWGALLSASRMHHNVEFAKIAFEQLVQVEPENAGNFVTMSNIYAKAGMVEDAKRVRMMIDSVELAKPSGKSCVEIL

SEQ ID NO: 69223 - protein, 120 aa, Zea mays
  Clone ID: UC-ZMFLMO17138F07_FLI.pep
SCDKLPVSVSNSPISQHPNSQPWPFACSDTSVGIARDAFNTFFSETGAGKHVPRALFVDLEPTVIDEVKTGAYRQLFHPEQLISHKEDAANNFARGHYTGVTCSPHPELFPGEQKMFLQF

SEQ ID NO: 69224 - protein, 468 aa, Zea mays
  Clone ID: UC-ZMFLB73078G12_FLI.pep
NKASPPRRHASKDLARASKGGRDLSASRNAARPDGMESLVLASSCSPSPRLPLLSPSARFRRLPGSMPQAPASTSGATRKGLRRHMLFVAAATATPSGSRNVFKELRAKGFASMSSSTANENMSTETGTLPPMPPPSSYIGSPVFWIGVGVALSVAFTTVSSMLKKYAMEQAFKSMMTQAPPNSFGSNSPFPFGMPPQASPTAPSSFSYLEPRKGTSPQVSTVDVSATEVDAAGTSKEVDVTETPKPSKNFAFVDVSPEDLQQKDLQSSLEMVDVKHDSTESESKEDTEEKAPRNGATFKLNEDAARGPTESSQSGPMLSVETIEKMMEDPAVQKMVYPYLPEEMRNPDSFKWMLQNPMYRQQLQDMLKNMGGSPDQWDNRMLDHLKNFDLSSPEVRQQFAQVGMTPEEVVSKIMANPDVAVAFQNPKIQTAIMDCSQNPLNIVKYQNDKEVMDVFMKISQIFPQING

SEQ ID NO: 69225 - protein, 808 aa, Zea mays
  Clone ID: UC-ZMFLB73076G02_FLI.pep
SMCTLCAVQRWSRRVATMLPWLVVPLIVIWAATQLLLPAAYRFEVTSPRLACVSVLLLTLFWYEILLPRLSLWRSRRSARLREERRAHALELHKLRKTATRRCRNCSNPYRDQNPGGGKFMCSYCGHVSKRPVLDLNSAGKAPTGWPCAQDCGYWLDLHCSSSNNSSFLGFSWRLLSSFCSTAMRWLLRNIFRFTLSGDGEGLNIDGKRLAKSGENGGKTEESRTNKARRKAEEKRLARLEREMLEEEERKQREEMAKLVEERRKLRDEKAEAEERSKSATPVGEKDARREVEKRCQERKKKEDKGSSKSNSDCEDIDRRLNQEGDRKRDFDRKSDLDRRESYKPRYFDANSHSNKTGESRSRYFGRVTGGFLSSSRGFGGGSFFGRSAQAPAPQVSKVSRSVVPATDQGNAIKRDVQHAATQATDKSATAGETRNAWTNFNRPVSPNVQPHPTGLKKSWHQLFIRSASVAPYPDVTTSAHDMIRKPEPNGAQINNAHTFLSQYPPLDCKPSSSQSMQYPGFPPLNGAPPSNPLFHFSAGHMPFYDDAESTLLEESEQFEDPCYDPDAIALLGPVSESLDNFPPDLDCGFFSSDVAKEPHGWPSPIESPLSRSHTVEEKLTKPSHSSVARGSGGPILPVTSSEQGTWQMWSTPLVQESLGLQGPQSQWFQQNTNQFNHSANLFSSGGRARSPLGTGLNDSDPWLQKAPFQQLPPDTSSLFLSHEMPGKLHNDLAFGSPNKSAREHPFGPPGYLLPKEELVLDGAQEGGGGHVLSPSGAHVGLFSPTSPDVQPLWPFSEKREHRTNRLL

SEQ ID NO: 69226 - protein, 492 aa, Zea mays
  Clone ID: UC-ZMFLB73210G03_FLI.pep
RSRTPLRLRSPLAAAIAGLAAASAPVLAPVPRGGHWTSLDAAARRLVEEMDSVMAAPDSPPQTVVLVSAGASHSVALLTGNVLCSWGRGEDGQLGHGDAEDRLVPTVLSGFDAPAITSVICGADHTTAYSEDELQVYSWGWGDFGRLGHGNSSDVFTPQPVKALQGLKIKQIACGDSHCLAVTMAGEVQSWGRNQNGQLGLGTTEDSLLPQKIQAFESVCVKMIAAGAEHTAAVTEDGDLYGWGWGRYGNLGLGDRNDRLLPEKVSSVEGEKMVLVACGWRHTITVSDSGNLYTYGWSKYGQLGHGDFEDHLVPHKVEALKDSTISQISGGWRHTMALTSEGKLYGWGWNKFGQVGVGNNDDHSSPGQVSFPEDQKISQVACGWRHTLALSEKKNVFSWGRGTSGQLGNGEIVDRNTPVLIDALSSDGSACKKLESSTAAPFAAKVWVSPSERYAIVPDENVRKAGGGTARGNGADANVPENDVKRMRVQSS

SEQ ID NO: 69227 - protein, 369 aa, Zea mays
  Clone ID: LIB3076-041-E11_FLI.pep
GDDFLAMLEESKELTSSTRWSKAILMFEDDERFKAVERPREREDLFENYLVELHKKEKAKAAEEHKRYVAEYRAFLESCDFIKASTQWRKVQERLEDDERYSRLEKFDRLDIFQEYIRHLEKEEEEQKRVQKDQVRRQERKNRDGFRKMLEEHVADGTLNARTRWRDYCAQIKDSQSYLAVASNTSGSTPKELFDDVIEELGKQYQEDKIQIKEVVKSGKIPMTTSWTLEEFQTATLEDDALKGISTINIKLVYDDQLERLKEKEQKDAKKRQRLGENFSDLLYSIKEISASSTWDDSKQLFEDSQEFRALDSETYARELFEECVVHLKERLKEKERLREEEKAKREKEREEKEKKKEKEKERKEKERK

SEQ ID NO: 69228 - protein, 171 aa, Zea mays
  Clone ID: UC-ZMFLMO17103F03_FLI.pep
QIFMESAPCVYIPALTVWLPTTATQPHQRGPRPHPTTHHHYSLCHVPSSNHPVPPTGDNLVSVSSDLISMDSRISSLQDMVQTMSKSLEVVSKSVDTMNTSLTNVIGRQRDSDNQLQALNLAVTRLEKTSPSSGLPDNTSHNNCNGHRGGGGGGGRGGRNDGDGGGGRGGG

SEQ ID NO: 69229 - protein, 675 aa, Zea mays
  Clone ID: UC-ZMROB73004F09_FLI.pep
RCQCVRACVPMAPSWWGRDARANGVVGGGTPVVVRMENPNWCISEVAAAASEVDAPPPAAAGGGKAGRRGKNARQITWVLLLRAHRAAGRLTGAASAALSVAAAARRRVAAGRTDSDADADAAPGESAALRARSYGCIRLFLALSLLLLAVEVAAYLRGWHLEVDVGAGILAVDGLFAAAYAAWMRARLDYLAPPLQFLTNACVLLFLVQSVDRLVLCLGCFWIKLKGVRPVPPLPADKEDVEAGPDGVPMVLVQMPMCNEREVYQQSIGAVCSLDWPRSNFLVQVLDDSDDATTSALIKEEVEKWQREGVRIVYRHRVIRDGYKAGNLKSAMNCSYVKDYEFVVIFDADFQPQADFLKRTVPHFKGKDDVGLVQARWSFVNKDENLLTRLQNINLCFHFEVEQQVNGAFLNFFGFNGTAGVWRIKALEESGGWMERTTVEDMDIAVRAHLKGWKFLFLNDVECQCELPESYEAYRKQQHRWHSGPMQLFRLCFVDIIKSKIGFWKKFNLIFLFFLLRKLILPFYSFTLFCVILPMTMFVPEAELPAWVVCYIPATMSILNILPSPKSFPFIVPYLLFENTMSVTKFNAMVSGLFQLGSAYEWVVTKKSGRSSEGDLVALVEKHSKQQRVGSAPNLDALTKESKGTEEEKNKKKRKKKHNRIYRKELALSFLLLT

SEQ ID NO: 69230 - protein, 195 aa, Zea mays
  Clone ID: UC-ZMFLB73147F01_FLI.pep
HKNLMDESSCFLSSFQNSQQGSKFVKTGLDSSGNIGSSSIAPPKKVHPGSNGMLPQEEADMPSHLSISTKMLPPPLKSMLPLPPRSMPPPPPKSMPPPPPKFPSDEFLSRNENKFFPLKEPTAPPRSFDAISVLPSERRPREPKEEKTKGTPVSDTLLKLIDYGDDDDDGDIDVTDNTPKGNPTPGSEQKPFWAV

SEQ ID NO: 69231 - protein, 239 aa, Zea mays
  Clone ID: UC-ZMROB73061A07_FLI.pep
FPAGGRGLTSPLSSFSCRLVLFVACGAGRVGRVQGVQQGAAGGEERAIIGGGRRGGARARGLAGLPQRAPRLRGAAGPRRSRRGRGDRLQGPRPRVRSGRELPPGQDGGARAAADAAVPVPAAAPDVLPEPVLLSSGDELRPPPPGDPEVLQGGAAGGLGADGVGDQPVPRDRAQHRPQRGGRLRGDLVGGDPVVVAPVPARARRPGPQPRRPLEVLKPGRRSTGGWAAHPPRSRGLVG

SEQ ID NO: 69232 - protein, 695 aa, Zea mays
  Clone ID: UC-ZMFLMO17025B10_FLI.pep
RRGEGAEENLARGRRERNRGGRRSSGRWRWRARWPSEMEYISPERNLEGTCGDPGPLFADQGGSLLDHLGYQGGGIPQHESPTLDHGLLVDPAGAIPYLSTDSPPFMNDQITCNVIKSASASPESCTKQPQEPLNIESDVQNDAAEQNVHNSNSEEQITSLGCDVQQNTEVIDELLPPKLPESSGNDISNFQPETIYSDAYHGDSLLTENSCNSYQLNNSGAPAADIPNSPALQMENEEMGKLHETSHNENSGSEDDQMNGRKPCPISGRDNEKFNTSAVPPSWEQTKQKNPGTRNGSSTPDDQFDSPPDRFARLERDTPSPDGRVSPERFARLERDTPPPDGDISRPGESSRVHSETMEMEPEYRANDDTPPPDGRMSHPVESSHVHSKKMESQHRAKDVGELARFESPQVRHRSRSSEKHDPSRKRTSSGELSPHARQNSPVERKRRRESRHGDGSPRQRSASPRRRSTPPRRRSISPRRSSHKRRESPRRGDSPRRRHSPRRRESPRKRDSPRRRDSPRRRDSPKRRRDSPRRRDRSKSRSPSRKHDTSRHKKEHDRSRSRSPHSRDHHRRSPRRHSPRRRSPPASHRHHSPRRHWSPPANRKTGLGKPGKNLFIAGFSYATTERDLEKKFCKFGRVTSARVVRDKRTGDSRGFGFLSLDKDEDADAAIRACDETEWNGRIILVEKSKAPAW

SEQ ID NO: 69233 - protein, 728 aa, Zea mays
  Clone ID: UC-ZMFLB73046G04_FLI.pep
LSRPGWLSIIFASDSIAARRLQSSKQTFAVRIFLRGRAEGAMAPVSLPPGFRFHPTDEELIICYLKRKINGRQIELEIIPEVDLYKCEPWDLPEKSFLPSKDLEWYFFSPRDRKYPNGSRTNRATKSGYWKATGKDRKVNSHRRAVGMKKTLVYYRGRAPHGSRTDWVMHEYRLDERECETDTGLQDAYALCRVFKKTAPGPKIIEHYGAVHHPIEQTQWMGSSVERSPTLDLSSDVRGDDFDSSSFSFPTEAPMDSSMHGGLFGMQMSAPHEDAKWMQFLSEDAFNATNPFFTNPASSSFSCLPSKVDVALECARLQHRLSLPPLEVEDFPHDVSLDTKASVLRSSNPNNEVDILQEFLSVASASQELINGTSSSYAAEMWAGAGTSSTSDTHYVNELSSLFEFGVKAKEEADNFYHMDCIGTSSGFSPKPVRVDEPVRLVEIADMEEFKEEKRRVENLRGVRLHNNDDLGEIPTDCCITQYPISDTADISGEAGHLTNPTSAGGLDTAPIFSQSQPDDFAIGFSDDADPNASFDLCERVDVKHGLFVSTVGAPKTFFHHVEPSKKVSFHLNNNPVASDDDVSKATTGKSRSPIISVMTTKDSGSSFSVFSKLKALIRDKFLVKKLPSSCQRSLLGSKETAAVSELLQMVVSSLLLTPTEVTGPTTEQEKLARKAMKPGPRRCDGSHAWLLPLPKRSKGISSMFFSGKWAFLTSALAIRAPGPGCNH

SEQ ID NO: 69234 - protein, 795 aa, Zea mays
  Clone ID: UC-ZMFLB73143B02_FLI.pep
KTLSATMACTSAGGRAATQKKKEQRHTRTHTYGSINTTKNQQRRTIDGTRSGHTRVQVLFFFPRISSPPSSSPWRSLLDVDGQRLAVPLLEALEHGVHELALADADEHLVALLAGGLEPLAGQEHAAELLAHEAVQRERPAVRDPVRHGGGALGDRHAGGLHLLGQHRAELLLEPGDLGEHGGLPLRVAAAEGVVHQHGAQLLHQRQAAAGRVLRVREHGLAVDGADQLLLAEAGAGELARGVHGQHLLGHLGHGVLHRRLDVLLEVAQVHGLAQRHDVGGRHELQDVDRLGGLPGRDEAQGVHVLVVLLRALHVVGDGVAQVLELGAVGGHGDLGALEAVVQAGVAAAGQVGGEPVVVELVDELGELREHELADVGDGEAGVVHGHADGGALEVAAVQRLAAVDVDDRVVVHGVDLALDGLGGGADDLDLGAQPLRRRAERVPVLLGLQQRVQLVQLLGLLHEGAAIQDVLHDGRGLDGPRVVLQLVGQVVRVLGLAVHDLAEDGGQDLRQDGQDVGVVHHGGRERGAHGRAVDDGEALLGVELEEAALDAGDLERLGGVHLPPVDGDGLRVGAARDEAGDVGERDQVARRGDGAPERQAGADTGVEQLRDGLEDLEADAGVALEEGVDAHQHRRAGDLRRQRVPVAAGAEDSGVEMPEQLDLERGPVLGAAVGGAAEAGGDAVDVAAVGDAVEDPLAAGLDAGAGLLVELDGDAGRVLGGGDGGHLADAEGGTLDLDHGLPGLRHHALHLVQVAPGQLRRRRAPVQRVALHDGAVARHCCAAVWLVGAARWQE

SEQ ID NO: 69235 - protein, 926 aa, Zea mays
  Clone ID: UC-ZMFLB73069D11_FLI.pep
GRAAPAAQPFSSPHLGVLAPRSYWLVGGNMNLSPPKMSEPSPESDGEQRCLNSELWHACAGPLVSLPVVGSRVVYFPQGHSEQVAASTNKEVDAQIPNYPNLPPQLICQLHNVTMHADAETEEVYAQMTLQPLSPEEQKDPFLPIELGAGSKQPTNYFCKTLTASDTSTHGGFSVPRRAAEKVFPPLDFSQQPPVQELVARDLHDNEWKFRHIFRGQPKRHLLTTGWSVFVSAKRLVAGDSIIFIWNDNNQLLLGIRRASRPQTVMPSSVLSSDSMHIGLLAAAAHAAATNSRFTIFYNPRASPSEFVIPLAKYVKAVYHTRVSVGMRFRMLFETEESSVRRYMGTITGISDLDSERWPNSHWRSVKVGWDESTAGDKQPRVSLWEIEPLTTFPMYPTAFPLRLKRPWASGLPMFNGGRSDEFARYSSLMWLRDGNRGAQSLNFQGLGASPWLQPRIDYPLLSLKPDTYQQMAAAALEEIRAGDHLKQASSLLPVQQTQTLNGGLDHLYGNPVLQQMQFQSQQSTLQAVQQGYGQNANDSGYVQNQLQQLQLQKQQEPPPPQQQQQTQVLQRQAHQEMQQHLSASCHDIANVASGVSMSGSACQSQSSLLSGSSFYQQNIFDGNGGPDLHLHNSFHNFSSQESSNLLNLPRSGQLMASEGWPSKRLAVESLAGHEIQPLQHKLEKVSHQSTVSHCSGTLPPLSARDGSSAQACGTNVQSHLLPSSFAIHDGLSTIRSGGVGSGTDAITIASLRYSDANLLPENSIATSSCLGESGTFNSLDDVCGVNPSQGGTFVKVYKSGSLGRSLDITRFGSYYELRVELERLFGLEGQLEDPARSGWQLVFVDRENDVLLLGDDPWQEFVNSVGCIKILSPQDLQQMARGGGGDLLSAPGARMLQGSVCDDYSAGHDVQNLTGSIAPVVPLDY

SEQ ID NO: 69236 - protein, 379 aa, Glycine max
  Clone ID: 700561485_FLI.pep
REWATSLKVGKLFLGLPADEAAAPAGGYVPADVLMSKILPEINKSTNYGGLMLWSRYYDKISGYSTRIQNPLRNGTANPLCTRKSQACRSHEGGFAELLGYMSTLGIKVYEDDNNGTQCCEIICRNNCSCDAFAPLNHINNTSTGCQIWLKGTKFVRASGNIALPINVSVALLEHKVNSWWIWLIVGVGAAFVIPVIFYLSRAFLRKYKAKVERKKMQKKLLHDIGGNAMLAMVYGKTIKSNNKGKTNNEVELFAFDTIVVATNNFSAANKLGEGGFGPVYKGNLSDQQEVAIKRLSKSSGQGLIEFTNEAKLMAKLQHTNLVKLLGFCIQRDERILVYEYMSNKSLDFYLFDSAKGFARLGKTVEHHWRNCSRTSIPS

SEQ ID NO: 69237 - protein, 581 aa, Zea mays
  Clone ID: UC-ZMFLMO17245B07_FLI.pep
SLRLIFLGIHRFRAYGDQVAMRSAEDIAYAVLRFFAKGGSLVNYYMYHGGTNFGRTGASYVLTGYYDEAPMDEYGMYKEPKFGHLRDLHNVIRSYQKAFLLGKHSSEILGHGYEAHIFELPEENLCLSFLSNNNTGEDGTVIFRGEKHYVPSRSVSILAGCKNVVYNTKRVFVQHNERSYHTSEVTSKNNQWEMYSEKIPKYRDTKVRMKEPLEQFNQTKDASDYLWYTTSFRLESDDLPFRNDIRPVLQVKSSAHSMMGFANDAFVGCARGSKQVKGFMFEKPVDLKVGVNHVVLLSSTMGMKDSGGELAEVKSGIQECLIQGLNTGTLDLQVNGWGHKAALEGEDKEIYSEKGVGKVQWKPAENGRAATWYKRYFDEPDGDDPVVLDMSSMDKGMIFVNGEGVGRYWVSYRTLAGTPSQALYHIPRPFLKSKDNLLVVFEEEMGKPDGILVQTVTRDDICLFISEHNPGQIKTWDTDGDKIKLIAEDHSRRGTLMCPPEKTIQEVVFASFGNPEGMCGNFTVGTCHTPNAKQIVEKECLGKPSCMLPVDHTVYGADINCQSTTATLGVQVRCGGGKKGA

SEQ ID NO: 69238 - protein, 160 aa, Zea mays
  Clone ID: LIB3075-015-A9_FLI.pep
MKHVKTIMSKNKAKKDGNSSHLWPQTLNTWPCMKHSWVVDQWPPVTVSLTPAAAPVTVFVTPATAPVTVFVTPAATPATVFVTPTAAPATVSLTPAATPWPVCATCSTVPVGRCCCSCALSAAAAAVSLTHCAACSAWYSPWASALPAWKDCPMFDIADG

SEQ ID NO: 69239 - protein, 653 aa, Zea mays; identical to SEQ ID NO: 56213
  Clone ID: UC-ZMFLMO17203G05_FLI.pep

SEQ ID NO: 69240 - protein, 229 aa, Zea mays
  Clone ID: UC-ZMFLB73186H07_FLI.pep
KDEGFDFSANRVTRSIDESLARLGLDYVDILHAHDIEFTHLEQIVNETIPALQKIKENGKARFIGITGLPLSIYPYVLDRVAPGSVDVILSYCHYGINDTSLVDLLPYLKSKGVGVISASPLSMGLLTDNGPPEWHPAPEELKSACKAAADHCRKKGKSITKLAMQYSLMNNEISTVLVGMNSLEQVEENVAAALELSTSGIDEELMREVEAILEPVKNLTWPSGIQQA

SEQ ID NO: 69241 - protein, 573 aa, Zea mays
  Clone ID: UC-ZMFLB73196A03_FLI.pep
LERAATDKDTMPPIPKRGEHLLVLLIVACAATAATAAGTVPFYPSAESAAAAHCDGTLYPELCLSTLADIPDLHKKPLPDVICAAVNRTEDVVVATSSNCSYYLQDRSLSARDRLAINDCLELLSTTMDELRASTADLASPAGRGSASAGVSQGARRATMEHVMTVLSAAITNQYTCLDGFAYQSGGRVRRYIEPTFHHVSRMVSNSLAMAKKLPGAGASAAPAPPRQPFTGYGQMVKGFPRWVRPGDRRLLQAPASAVAADAVVAKDGSGDYTTVAAAVAAAPTNSKKRHVIYIKAGAYMENVEVGKKHVNLMFVGDGIGKTVIKASRNVVDGYTTFRSATVAVVGNNFLARDLTIENSAGPSKHQAVALRVGADLSAFYRCSFVGYQDTLYVHSLRQFFRDCDVYGTIDFVFGNAAVVLQGCNLYARKPLPNQSNIFTAQGREDPNQNTGISIQRCKVAAAADLAAAQSSTKTYLGRPWKQYSRTVYLQSELDSLVDPAGWLEWNGSFALDTLYYGEYMNTGPGAGTSGRVKWKGYRVITSAAEASAFTVGNFIDGDLWLAGTSIPFTTGL

SEQ ID NO: 69242 - protein, 363 aa, Zea mays
  Clone ID: UC-ZMFLB73207D07_FLI.pep
WIGAWSVNSSRGGDAVGVWAEAVTADLADVPLGSPELAHLDHGGPELVEEPPVVVGEALDEPARARVAHQPLVRRQHHPLVLPQRQLHEVEVVEHGGRQEVQVPQRVAAPGGRARRRHAPRHVVGGRARHVAKRAAPRLPHRVRARQRHQVRRVRQVLAPERRQQLVHRRRRRRQREHVVAGRRRRAVQPPQRHREGRPAGQAHGVAGGQHRDVGARHGGPARRVHLPADVLHQLHGLLLQPHVGREAALAVVQEDGRVAALREAVVEQEAEETRRQTDVLLERRVHAGPHDRLQLRARVRVEVHGQVAGSRAASTQRSQDGPRGHGGCGEQHAEDSGQDEHTAAHCRRPTDHHCLCDKRIKT

SEQ ID NO: 69243 - protein, 353 aa, Zea mays
  Clone ID: LIB3066-029-B6_FLI.pep
KVKNNISETAEVAQAEDTSPMDINSQSNQKQESCGPNGSKDRILRSTSRSSSSREKTMEKSCSSAHKGKRTLWGRTSARKDLSTEEIECCSDDEALVEKLESNKIDLQSKIAKEAKENAILWSSLEKRKEELHERRLALEKEVENLRDQLKRVMNLRRGQVSSPSTIDSKVRGQQLCCESCNQRLLNTDRLSGPESSSVEASPTVGSDPAFDMGDIEQSRKQVAQHSPSSRDKPSHEAVGGITQRAPQRGHSIAREGQDGSSSLSSSNSKWNLAQKQYSNSPLIRGLHVSSRLEDFGGSISPAASSALAKLTNRLNFLKERRALLASEMQSLDLGRPPTVKSPTPKGHESKNS

SEQ ID NO: 69244 - protein, 87 aa, Zea mays
  Clone ID: LIB3079-036-E5_FLI.pep
TRYTYTIVLLRHTYFLASYQTSDASLFKKPIAVAYGSKHKRVKSKELNLVVPLEYAYIVLQDHLPIDSAKNAFCSLDSLVLTLIHMY

SEQ ID NO: 69245 - protein, 221 aa, Zea mays
  Clone ID: LIB3079-036-F9_FLI.pep
SAAATGGVAKVVAPRRKRAPAGEPAASVGAGGDGGSCYIHLRSRMLFMAPPQPQPPSVPTPAEAADGAAGQQGAALAAGLSRCSSTASSVHVGGQRGSHTCRSDDAAEAGGDHVLVDVSAASNSGSGPDRERRETTPSSRAHGELSDLESDLAGHKTGPSLPAATPAAELIVPPAHEIQEFFAAAEAAQAKRFASKYNFDFVRGVPLDAGGRFEWAPVVSI

SEQ ID NO: 69246 - protein, 355 aa, Zea mays
  Clone ID: LIB3179-002-A10_FLI.pep
EANSRLQQNGITNDNATEDGSEQDLQMHPLLFHYPRDVVSSYSHPVQNLINQSRKYDLFPFEKVQVERSNNQTTGSTKNGTVNANTIDFHPLLQRTEVDVHNDVPEYDSNLDYHQSDNNMSKVPVDDQSTAGQASTGPSERETSIDLNIHLCSPTVIKDSNDFRSSFSRSNVQDEVSRKDKSSVPGLEIVNSYFHHCIQEPNEESMQGIVMEQEELSDSEEDSQHVEFECEEMDDSEEEQVQGPEASPIQNKGISASVVCGEFHVSNDQSQIQQGSVQKDKQGASSMQKTQVPSRSVRAKLKPETAKRTGSRTSTSRTVETSRSKTRSSKVPQGQSSAEWKSNDSRRTRKIPAPR

SEQ ID NO: 69247 - protein, 502 aa, Zea mays
  Clone ID: LIB3150-090-G4_FLI.pep
ELTLAGAACGDDQLVIFDASDGLLNLSVNGVLMQDRVFACQKLGFYFGSGCLRCSNLSDAWRSAVKQYCGEGSEKSHATLHQDVPRKLLRWSTENSSRNACERSGLNENNQDIGDSSEKQEHLLAVPGVILLCCGLMLPCFHAERKEVSRHDNATIQRNALESVSSYEGSMSSEKVPPTPHRIPPSPSRFAPSPQIARVGSVNLSIQQILRATQNFSPSFKLGEGGFGMVYRAVLPDGNVVAVKRAKKDQFAGPRDEFSNEVDLLAKIDHRNLVRLLGFTDKGNERIIITEYVPNGTLREHLDGQHGRVLDFNQRLEIAIDVAHALTYLHLYAEKTIIHRDVKSSNILLTDSYRAKVSDFGFARSGPSDTEKTHISTKVKGTAGYLDPEYLRTYQLTPKSDVFSFGILLVEILSARRPVELKRTPEERITIRWTFKKFNEGNTREILDPLLEDHVDDEVLEKLLSLAFQCAAPTRDDRPTMKEVGEQLWEIRKEYGKSVRKV

SEQ ID NO: 69248 - protein, 266 aa, Zea mays
  Clone ID: LIB3156-003-F7_FLI.pep
GLVTREQYVEKRVNIRTKIEEEEKEKLQKLQQEEEELQMQKRKKRRVKSDPRLSFCDDIENGSDEDDFENQETKKNGPAKLGKDPTVETSFLPDREREAEEQAERERLKKQWSHEQELIKNEPLSITYSYWDGTGHRRAIQVRKGDTIGEFLRAVQQQLAPEFREVRTTSVENLLYVKEDLIIPHQHSFYELIINKARGKSGPLFHFDVHEDVRTIADATKEKDESHAGKVVERHWYEKNKHIFPASRWEIYDPTKKWERYTIHGD

SEQ ID NO: 69249 - protein, 259 aa, Zea mays
  Clone ID: LIB3150-103-H11_FLI.pep
PCSASQSAAGLQGRTYTYYARRRPCAFTFACRLEHARVRTYVLRVGSEGEGEGGGGGELGVAVAVSGAEAGEEEGAAERAGGLALVDPLVDAGLVEGVRAVAELADAVPRLERAEAHGADGRARRGAAGPEQVGVPDGGEAGLDGCRRGRRRQGRRRRRRRRRLLLLQGRRLQCPEVRWRRRRRVGVGRVVVGGRRRREAQRGEAEQHGVPQEVQQLQHQDERLRQDHAVAHRREPHGRPGDARACVQLLPCFSFSPLD

SEQ ID NO: 69250 - protein, 424 aa, Zea mays
  Clone ID: LIB3180-040-E6_FLI.pep
VQAEVIELTALRYNSLRISMGCFSTFCKKRRATRQPSSHHNEDVPGCSNITKYTYKELVRATNNFNPLNKIGEGGFGSVYKGQLRNGTVIAVKVLSSESRQGVREFLNELVAISDISHDNLVKLYGYCAEGDQRILVYNHLENNSLAQTLLGSSHSNIQFDWKTRVNICLGIARGLAYLHHGVSPHIVHRDIKASNILLDRDLTPKISDFGLAKLLPPNATHVSTRVAGTLGYLAPEYAIRGQVTRKSDVYSFGVLLLEIVCGRSNSDTRLAYGDQILLEKFPEITNGALLLQTWMHYEQGCLERIIDRSLGGGDLDVAQACRFLKVGLLCTQDVTRHRPDMPRVVAMLTGEWDVEPETVSKPAIISDFMDLKVRSTRKASDNVATPPTSSSTFLSSLMAHSSPLLSNESTQASMAFTGVSDRE

SEQ ID NO: 69251 - protein, 295 aa, Zea mays
  Clone ID: UC-ZMFLMO17362G12_FLI.pep
DSILEVLAQDDMLNAKELVQWENGLSFNDIAARQGIRIRRHCRPTASLKEIEEELGAPLNILEKIIWDKEIEVAEGHAKKPLEEVIQAATKAPPSRDFYGALEAAYKRNGVPALIAEVKKASPSRGVLRENFNPVEIAQAYEKNGAACLSILTDEKYFQGSFDNLEKVRSSGVKCPLLCKEFVIDKWQIYNARSKGADAILLIAAVLPDLDIRKFLQICEELGMTALIEVHDEREMERVLKINGVKLIGINNRSLETFVVDTSNTKMLLEKHGDIIREKGILVISLSWVYIDPLK

SEQ ID NO: 69252 - protein, 507 aa, Zea mays
  Clone ID: 700047484_FLI.pep
PRPRSHPAAAGQSDPSPVPSPSPAFPVRSRRRAMEGLIKGLVHVAIDAVEDAVRERDHGRADDDEVPRRRAAQSSDPDDDGEEERDERSRSTWAEVVSEQKGSDPDERRDHRSSGRDNRHERRDDEGWKRADGRNQQQHHAGRQNQCEGEERWDGSGSRRRQQQQQAQGYGNQHQEEERINDGGWQTVGEKKRHGRPQQSEAWNGYRKPPSEQKYSEDVGHIHQGLNFEPTREELNSLSKACSRLWELDMNRIVPGKDYIIDCGKGKKVYQKGDMASESLFSWLGDDVLRKPTYSRFCALLDNYNPHQGYKEVVTQQDKHEEIAFVEEIARTAPIKYLHRYLVQKGAVPQDYEDFKRMLTSLWFDLYGRGGNSSCSSAFEHVFVGEIKGRGQGESEVSGFHNWIQFYLEEAKGNVDYQGYIFPRRRGESPDSEIQLLTVQFEWHGVLKSVSSTLIGVSPEFEVALYTLCFFVGGEDNRVDIGPYSVNVKCYRLGNNKIGSAFPIVEN

SEQ ID NO: 69253 - protein, 601 aa, Zea mays
  Clone ID: 700095288_FLI.pep
APARSHRTSHRLLPSFLYYHPTSCPAQRYLPDIRQASPSGSEQRSEMGSVDAAIAVPVPAAEEKAVEEKAVVFRSKLPDIEIDSSMALHTYCFGKMGEVAERACLVDGLTGASYTYAEVESLSRRAASGLRAMGVGKGDVVMSLLRNCPEFAFTFLGAARLGAATTTANPFYTPHEVHRQAEAAGARLIVTEACAVEKVREFAAERGIPVVTVDGRFDGCVEFAELIAAEELEADADIHPDDVVALPYSSGTTGLPKGVMLTHRSLITSVAQQVDGENPNLYFRKDDVVLCLLPLFHIYSLNSVLLAGLRAGSTIVIMRKFDLGALVDLVRRYVITIAPFVPPIVVEIAKSPRVTAGDLASIRMVMSGAAPMGKELQDAFMAKIPNAVLGQGYGMTEAGPVLAMCLAFAKEPYPVKSGSCGTVVRNAELKIVDPDTGAALGRNQPGEICIRGEQIMKGYLNDPESTKNTIDKDGWLHTGDIGYVDDDDEIFIVDRLKEIIKYKGFQVPPAELEALLITHPEIKDAAVVSMNDDLAGEIPVAFIVRTEGSQVTEDEIKQFVAKEVVFYKKIHKVFFTESIPKNPSGKILRKDLRARLAAGVH

SEQ ID NO: 69254 - protein, 402 aa, Zea mays
  Clone ID: 700087636_FLI.pep
DPKSMGKSGKKPRESHRQGRGRRASHFCDEDDYDLPSSAYDATPRQNEESSEDNDDTSEATAEDEPERDTEAGEQDQWQGSMPSKFHLYQLSVQSPKGDISYLQKFFLMYVGGRAPLHLQEDFCGTALLSTEWIRTDARRTAIGLDLDLESLEWCLENNLSKIGADGYSRMLLFHGNVLQPMESRLVKQKFTNLVHGLDLNSNNGTGSNSCKQMGLADSKCLANLTMSEADFPARDIICAFNYSCCCLHSRKDLVLYFRHVRSVLSERGGIFVMDVYGGISSERKLRLQRKFPSFTYFWEQDEFDIISRQTRISLHFQGGKKQMMRYAFTYHWRLWSIPEIKDCLEEAGFKWVHVWMREMPNTQSGGNAKEYNANRDVKYEESQHFNQGDAWNAYVVGVANV

SEQ ID NO: 69255 - protein, 209 aa, Zea mays
  Clone ID: 700084248_FLI.pep
DVIVEFISEEIRHGPLILFLKDTEKICGNNDSYHGLKSKLKHFPAGAFIIGSQIQPDNRKEKANVSSPFLSKFRYSQAILGLTLQDIDGGNDNNKETSKAIMKHLIKLFPNKVTLEAPQAEMELSRWNQMLNRDIEVLKGNANISKIRSFLTRLGLECTDPEAILVTDRILTNECIDKIIGFALSHQLKNCTNPDPPLGSVQFALSSGR

SEQ ID NO: 69256 - protein, 217 aa, Zea mays
  Clone ID: 700074818_FLI.pep
STCVYGGAPKGPQIRDLRRGVEIVIATPGRLIDMLEAGHTNLRRVTYLVLDEADRMLDMGFEPQIRKIVAQIRPDRQTLYWSATWPREVEALARQFLQNPYKVIIGSPELKANHSIQQIVEVISDHEKYPRLSKLLSDLMDGSRILIFFQTKKDCDKITRQLRMDGWPALSIHGDKAQAERDYVLAEFKSGKSPIMAATDVAARGLGMMIYLNIRIR

SEQ ID NO: 69257 - protein, 156 aa, Zea mays
  Clone ID: 700089539_FLI.pep
STLSKKEKSHYLHLILSLNKASIYSLRLTSNNTAQESILPAGLHPAAEISAVVFSWSTRTTSVMEGRIPEPSLTHRSASAATVAASWASYSSPSLRSTTSATSPSLSVGPTAAARRHPVSAHMASRPVRSSSSSTPKLYTSLFLVATPERRKSGST

SEQ ID NO: 69258 - protein, 524 aa, Zea mays; identical to SEQ ID NO: 58903
  Clone ID: UC-ZMFLMO17257E08_FLI.pep

SEQ ID NO: 69259 - protein, 196 aa, Zea mays
  Clone ID: 700455578_FLI.pep
TVGASARDATGTPRAHAETSISRPAVRRRSARTAHGLTRWPSRPPQRPARPSRAPQRPAQPPRAPQQQQQPRAQRLPVLLLSRQRALPLPPSPLQPPPAPAPAPPPLPSLPPLASLPPPPRGPPRAQRRQLARSPPGQLAPPPWPRRRGQPPRARRRAEPGSPPPALPRSPRRSGSGPRQWPWVTIRRLMTTRPSG

SEQ ID NO: 69260 - protein, 174 aa, Glycine max
  Clone ID: 700652626_FLI.pep
ALNLTPCLDIDKDDSYDQTIQQKPSSDEVTAAFLCASCWAKISNEDSSKAQAGNPDGMTDKEVQEELAQSDVSFDSTEKESLLKEIQNLRSKLQLCSDAPVKKSTDKLRSSLVSRSIQLQKSGVFSYDNGHEYLENERQRWTEMKVSGSILLMNLELILSPTANVQRGWRWMMH

SEQ ID NO: 69261 - protein, 243 aa, Zea mays
  Clone ID: 700476112_FLI.pep
GKEQYHNNFGCYSFVARSGSSCPVPTFQKRWPGDWMKEWFYVKNDLKAREDVKDIIMRPIWQRFGLRKPKVEIDEAAEECQKAFGIVCSFIGTRDLVQEHIAFRVCPLVEQWEMPKETISKSDEGGLVRLKYTFRYEGKFIEPDDDWLKCIEATSNRLLGPYSKVEDNTLSATFGGRKKKRLNRVFDAIGFMYPNYRYPLKGQKRKSATSGKGDAVVALSEAAPKRKKMKVLTHRPHFIEPAS

SEQ ID NO: 69262 - protein, 257 aa, Zea mays
  Clone ID: 700223860_FLI.pep
PSFSLPCCFPCVQGALRPAPLPSAPAMAWAFSGPGSQSPMALSPSPRRSVAGKSSAPSFSPMTGAPCPPPHGARAPALGARLLHFGWPALVAAVAMSAMVERPIPCSMARARVSSWRCLPVHGDAAAPSHGAPCSSSLAPRNCSNISLPQTALVMADSSLRPTLPWKSSKSSISSMAGAPRNASARLSLPKQRAPFLAARRGARRLFGKMRSKPRTAAAPSLALRCVELRYCTSPMENSSPSASRARLAALARVVSQ

SEQ ID NO: 69263 - protein, 147 aa, Zea mays
  Clone ID: 701182268_FLI.pep
THSPARNASVHPITARAHLTAAAAAESLAQWAEIEAPGHVRSAKRKKPRDLTEPLTPNQKGDLLEQAHAPIPGTKSGGHRFDSEREEVERKVLAELLTYKPAKENANGPNLLYSLCPFSPGAKPAARAPPETEVSGRKPHPLFVRGN

SEQ ID NO: 69264 - protein, 265 aa, Zea mays
  Clone ID: 701160696_FLI.pep
FFLWPALGLCSPSPWSIFLSRVPPFSLCRAQASPSRSLLAGARTMPPLCSPWSSSRAVPSSPLIPAYRVPARRRLAARSARAVLCPLRAAGFSVRRGACALGSVQFMYCSPVRAARRPCPLSVVESLRAQQLPVSCSIRLNRSSPAVPACLCAAALVRISPKSLPWLSGVWPTPIRIRLYRHRRVVAGDGFACASNFRVEFPRRASSRVLFPAHQRALSARSTLIPIASLTSPVVVVRRRVVRAAAPDLYRLGLVVDIARRSSAC

SEQ ID NO: 69265 - protein, 198 aa, Glycine max
  Clone ID: JC-GMFL02220072G03_FLI.pep
IIDTLVGPTLKDEVMKITPVQKQTRAGQRTRFKAFVVVGDNNGHVGLGVKCSKEVATAIRGAIILAKLSVIPVRRGYWGNKIGKPHTVPCKVTGKCGSVTVRMVPAPRGSGIVAARVPKKVLQFAGIDDVFTSSRGSTKTLGNFVKATFDCLMKTYGFLTPEFWKETRFSKSPFQEYTDLLAKPTGKTLILEEERVDA

SEQ ID NO: 69266 - protein, 109 aa, Glycine max
  Clone ID: JC-GMFL02220076H05_FLI.pep
ICTPSQEINGSIYCSKLIYGWLYFMFLQQHLEYVLQTKTKLDSHMISFLCRNYSKQMIQEQGETSGAIQYGEPLLDLTSLNFVAFANPKSASLTCPLTSTSILAHLISL

SEQ ID NO: 69267 - protein, 227 aa, Glycine max
  Clone ID: JC-GMFL02220131B01_FLI.pep
MEAVCGSGSSVWVTSSLTRSPKITLPLFHASYQHLTAFPSQSLLFSYHPSRYANARTLRARTSSKPIFLPHLIASLEQVDQTYIMVKPDGVQRGLVGEIISRFEKKGFKLTGLKLFQCSKELAEEHYKDLKQKSFFPKLIDYITSGPVVCMAWEGVGVVASARKLIGATDPLQAEPGTIRGDLAVQTGRNVVHGSDSPENGKREIALWFKEGEVCDWTPVQSPWLRE

SEQ ID NO: 69268 - protein, 292 aa, Glycine max
  Clone ID: JC-GMFL02220141E06_FLI.pep
NFMILCFVLCVVVMDDDVLNMPNWGYYEPFRGGHLGLQLMPGITERDTKPFLPGRDPAMLMGANGTFHPRDCAVSEAPMPLNYVRDNWINPRDRFFNMQQPTNPSYAVLPETSGAPNLQIIQPPDSSSDEKVDRVEEVAVKKEGGQSKKRQTKGALSTPKAKKPRKPKDNGNAPVQRAKPPKKTMELVINGIDMDISGLPTPVCSCTGAPQQCYRWGCGGWQSACCTTNVSIYPLPMSMKRRGARIAGRKMSQGAFKKVLEKLAAEGYNFANPIDLKTHWARHGTNKFVTIR

SEQ ID NO: 69269 - protein, 70 aa, Glycine max
  Clone ID: JC-GMLE01810009B03_FLI.pep
SWRQPLTAQGNSWILLLEEDCQLSVIWLHNPQALAIPLPKPNTLAPGTKLPPAVDKVCEPATFIVTYTKL

SEQ ID NO: 69270 - protein, 478 aa, Glycine max
  Clone ID: JC-GMLE01810043H06_FLI.pep
TNRDPKSMDIEAGKDIPVRDPALLDDDGRIKRTGNVFTATTHIVTVVVGAGVLALAWAMAQLGWIAGIAVMILFACISVYTYNLVADCYRFPDPVSGKRNYTYMQAVDAYLGGKMHVFCGSVLYGKLAGVTVGYTITSSVSLVAIKKAICFHKKGHDAYCKFSNNPYMIGFGICQILLSQIPNFHKLTWLSTIAAATSFGYAFIGSGLSLSVVVSGKGEATSIFGSKVGPDLSEADKVWKVFSALGNIALACSFATVIYDIMDTLKSYPPENKQMKKANMLGITTMTILFLLCGGLGYAAFGDDTPGNILTGFGFYEPFWLVALGNVFIVVHMVGAYQVMAQPLFRVIEMGANMAWPRSDFINKSYPIKMGSLTCNINLFRIIWRSMYVAVATVIAMAMPFFNEFLALLGAIGFWPLIVFFPVQMHIAQKRVKRLSLKWCCLQILSFACFLVTVSAAVGSVRGISKNIKKYKLFQYKQ

SEQ ID NO: 69271 - protein, 318 aa, Glycine max
  Clone ID: JC-GMLE01810086G12_FLI.pep
GNARTLEDAPMRERHEQWMAIHGKVYTHSYEKEQKYQTFKENVQRIEAFNHAGNKPYKLGINHFADLTNEEFKAINRFKGHVCSKITRTPTFRYENMTAVPATLDWRQEGAVTPIKDQGQCGCCWAFSAVAATEGITKLSTGKLISLSEQELVDCDTKGVDQGCEGGLMDDAFKFILQNKGLAAEAIYPYEGVDGTCNAKAEGNHATSIKGYEDVPANSESALLKAVANQPVSVAIEASGFEFQFYSGGVFTGSCGTNLDHGVTAVGYGVSDDGTKYWLVKNSWGVKWGDKGYIRMQRDVAAKEGLCGIAMLASYPNA

SEQ ID NO: 69272 - protein, 575 aa, Glycine max
  Clone ID: JC-GMST02400016G05_FLI.pep
VFPILAWGRNYTATKFRKDLLAGLTIASLCIPQSIGYATLAHLDPQYGLYTSVVPPLIYAVMGTSREIAIGPVAVVSLLLSSMMEKLVDPATDPVGYTKLILLATLFAGIFQTSFGLLRLGFLVDFLSHAAIVGFVAGAAIVIGLQQLKGLLGITHFTTKTDIVSVMKAVWEAVHNPWNPRNFILGCSFLVFILTTRCLGKRKKKLFWLASISPLVSVVVSTLIVFITRADKNGVKIVKHVKGGLNPSSIHQLDFNNPYIGEVAKIGLVVAVVALTESIAVGRSFASIKGYQLDGNKEMMSIGLTNIIGSFTSCYVATGSFSRTAVNYAAGCETLVSNIVMAITVLISLQFLTKLLYYTPTAILASVILSALPGLIDLSEAYKIWKVDKIDFLACAGAFFGVLFASVEIGLLVAVVISFSKIILISIRPGTETLGKLPGTDLFCDVYQYPMAVKVPGVMIIRVKSALLCFANANFVRERIIKWVTEEESEDDKGNSRSTIQFLILDTSNLVNIDTAGITALEELHKSLSSHGKQLAIANPRWQVIHKLKVSNFVGKIRGRVFLTVEEAVGCKSRC

SEQ ID NO: 69273 - protein, 385 aa, Glycine max
  Clone ID: JC-GMST02400027E02_FLI.pep
ELSASTLVLYPASQPPQEPKNENNGGIVFDSKNLQQMQGEMPKEFLWPSRDLVDTTQEELKEPLVDLAIFKNGDEKAISNAAELVRKACLKHGFFQVINHGVDPDLIDAAYHEIDSIFKLPLSKKMGAKRKPGGVSGYSGAHADRYSSKLPWKETFSFLYDHQSFSNSQIVDYFKSVLGEDLQHTGRVYQKYCEAMKDLSLVIMELLGISLGVDREHYRRFFQDGDSIMRCNYYPPCNRANLTLGTGPHTDPTSLTILHQDQVGGLEVFVDNKWLAVRPRSEALVINIGDTFMALSNGRYKSCLHRALVNTYRERRSLVYFVCPREDKIVRPPDNLLCRNEERKYPDFTWSNLFEFTQKHYRADVATLQSFIEWQQCSNSNPSNF

SEQ ID NO: 69274 - protein, 249 aa, Glycine max
  Clone ID: JC-GMST02400030F01_FLI.pep
DNLRYQAMNIVAARLGRAEPPLRKEVVEYMLDVDSHMWSMRRSKANFFRIMSLFSGMITMGKWFSDVCLWKNHVTSVLVHILFLILIWYPELILPTVFLYMFLIGLWNYRFRPRHPPHMDTKLSWAEAVHPDELDEEFDTFPTSRSQDVVRMRYDRLRTVAGRIQTVVGDIATQGERFQSLLSWRDPRATSLFVVFSFCAAVVLYATPFRVVALVTGLYFLRHPKFRSKMPSVPSNFFKRLPARTDSLL

SEQ ID NO: 69275 - protein, 410 aa, Glycine max
  Clone ID: UC-GMFLMINSOY008G10_FLI.pep
KDSDLPRNANERMRAMEQTLMKGKQAQDDCAAVVKKLRAMLHSSEEQLHVLKKQTLFLTQLTAKTLPKGLHCLPLRLTTEYHNMNSSHQQFPHQENLEDPHLYHYAIFSDNILATAVVVNSTVSNTKDASKHVFHIVTDRLNYAAMRMWFLVNPPGKATIQVQNIEDFTWLNASYSPVLKQLGSQSMIDYYFKAHRVTSDSNLKFRNPKYLSILNHLRFYLPEIFPKLNKVLFLDDDIVVQKDLTDLWSIDLKGNVNGAVETCGESFHRFDRYLNFSNPLIAKNFDPHACGWAYGMNVFDLAEWKRQNITEVYHNWQNLNHDRQLWKLGTLPPGLITFWKRTFPLNRSWHILGLGYNPNVNQRDIEQSAVVHYNGNMKPWLEISIPKFRRYWTNYVDYDHVYLRECNINP

SEQ ID NO: 69276 - protein, 573 aa, Glycine max
  Clone ID: UC-GMFLMINSOY010E11_FLI.pep
LILMALPICLTVIAIFTLCCVINCNNGVEAFHDIYPDLQSISARSVSKLQRTGYHFQPHPNGPMYYNGIYHLFYQYNPKGAVWGNIVWGHAVSKDLINWKELEPALYPSKPFDKYGVWSGSATVLPGKGPVILYTGVIDKQSNEVQLYAIPENKSDPFLRKWVKPKAFNPIVVADHSMNASVFRDPTTAWWSKDGHWRMLIGGRRKDRGMAYLYRSKDFVKWIQAKHPIHSAASTGMWECPDFYPVSLKGKNGLDISVVGSSSIKHVLKNSLDLTRYEYYTIGTYFKNKDKYIPDNTSEDGWGGLRYDYGNFYASKSFFDPSKNRRILWAWANESDSKEDDVKKGWAGIQSIPRTVWLDYGGKQLVQWPVEELNSLRKKEVKISHQKLKKGQHVEVKGITAAQADVEVTFSFSSLDRAEPFDSRWVNAQDLCSQKGSKVQGGVGPFGLLTLASEKLEEFTPVFFRIFKAPNKHVILMCSDARSSSLKRELYKPSFAGFVNVDLAKNKKLSLKSLIDHSVVESFGAGGRTNILSRVYPTLAIKKKAHLFVFNNGTEHITVEYLKAWSMKSARRN

SEQ ID NO: 69277 - protein, 380 aa, Glycine max
  Clone ID: UC-GMFLMINSOY018E04_FLI.pep
AYQMPRSRGSELPQRQSPRGAHQHRTSSSDSDPLHHRPIADRSPKLGDRRSPRGTQSEGLNQKKLGTRIADLESQLGQAQVELKVLKDQLASAEAAKKEAQDELVKKAVQSVVPVVEKLQEKSTSKNAPETNKTESKSQDIIPDDNQQETDVFEVPIEKLTIEFSKPADQSEKETQPSEDSNAPAISKPSVDEHELTLKNDEIALLKTGLEEKGKELESMTNEKENLKNQLNEAVSKVSAAQTKEEEMTLQLNQLREELEASKANGDKLDEKLKSMEARKEGLESEMKKLRVQTEQWRKAADAAAAVLAGGVDMSARIPERCGSMDKHFGGTFETPAGRYNGYVGSPGMADVLDDGFGGGKRKGSGIRMFGDLWKKKSQK

SEQ ID NO: 69278 - protein, 375 aa, Glycine max
  Clone ID: UC-GMFLMINSOY020F05_FLI.pep
LIHRSSMESELKDLNSKPPNGNGNSVRDDRPLLKPEPPVSADSIADMEKKFAAYVRRDVYGTMGRGELPTKEKLLLGFALVTLLPIRVVLAVTILLFYYLICRVCTLFSAPTGEEEQEDYAHISGWRRTIIVSCGRALSRLMLFIFGFYWIPESNSASQEDKSRQPEELRRPGVIISNHVSYLDILYHMSSSFPSFVAKRSVAKLPLVGLISKCLGCVYVQRESRSSDFKGVSAVVTDRIREAHQNESAPLMMLFPEGTTTNGEFLLPFKTGGFLAKAPVLPVILQYHYQRFSPAWDSISGVRHVIFLLCQFVNYMEVIRLPVYHPSQQEMDDPKLYANNVRRLMATEGNLILSDIGLAEKRIYHAALNGLFSQC

SEQ ID NO: 69279 - protein, 197 aa, Zea mays
  Clone ID: UC-ZMFLB73292F12_FLI.pep
CDTLHINDAFQQVQRHLQLRIEAQGKYLQSVLEKAQETLSKQNAGSVGVETAKMQLSELVSKVSTECLQHAFTGFEEIDGSQILQGHTIQLGDGSVDSCLTACDGSQKDQDILSISLSAHRGKEIGGMTFDIQEKERGREDLFLDKLSMTPPGQLDRRERGSFSMTRKAAKLDLNINDTTDGPQNCKKIDLNGFNWT

SEQ ID NO: 69280 - protein, 489 aa, Glycine max
  Clone ID: UC-GMFLMINSOY042E10_FLI.pep
PSTPLRKKKEMGSLEAIKKPHAVCVPFPAQGHINPMLKLAKLLHFKGFHITFVNTEYNHKRLLKARGPDSLNGLSSFRFETLADGLPQPDIEGTQHVPSLCDYTKRTCLPHFRNLLSKLNDSPDVPSVSCVVSDGIMSFTLDAAQELGVPNVLFWTTSACGFMCYVQYQQLVERDLTPLKDASYLTNGYLETSIDWIPGIKEIRLKDIPTFIRTTDPDDIMLNFARGECIRAQKASAIILNTFDALEHDILEAFSTILPPVYSIGPLNFLLNEVKDKDLNAIGSNLWKEEPGCLECLDTKEVNTVVYVNFGSVTVMTNDQLIEFAWGLAASNKTFVWVIRPDLVIGENAILPKEFVAQTKNRGLLSSWCPQEQVLAHPAIGGFLTHNGWNSTLESVCGGVPMICWPFFAEQHTNCRFCCKEWGIGLEIEDIERGKIESLVRELMDGEKGKEMKKKALEWKRLAKVAASSPSGYSLVQFEKMIREVLIAF

SEQ ID NO: 69281 - protein, 408 aa, Glycine max
  Clone ID: UC-GMFLMINSOY043C10_FLI.pep
LMRRKSESSTQQGHSWLPLPLYGNSLTMTKNSTISQKSGTASCISLASSNLGRFFSFQEILDASNKFDEKLLLGVGGFGRVYKGTLEDGTNVAVKRGNPRSEQGLAEFRTEIEMLSKLRHCHLVSLIGYCDERSEMILVYEYMANGPLRSHLYGTDLPPLSWKQRLEICIGAARGLHYLHTGAAQSIIHRDVKTTNILLDENFVAKVADFGLSKTGPSLDQTHVSTAVKGSFGYLDPEYFRRQQLTEKSDVYSFGVVLMEVLCTRPALNPVLPREQVNIAEWAMTWQKKGMLDQIMDQNLVGKVNPASLKKFGETAEKCLAEHGVDRPSMGDVLWNLEYALQLQETSSALMEPEDNSTNHITGIQLTPLDHFDNSVSMIDGGNSCTDDDTEDVATSAVFSQLVNPRGR

SEQ ID NO: 69282 - protein, 330 aa, Zea mays
  Clone ID: LIB3245-025-C11_FLI.pep
LPPLGKPFLRSASYLKEALLALAEGHHGGCHLKSPLDVALKLAAYKTFSDHSPVLQFTNFTATQALLDEIGGSTSSCIHVIDFDLGVGGQWASFLQELAHCRGAGGAALPFVKLTAFVSAASHHPLELCLARDNIAQFAADLGIPFEFSAISADMINPAEFISATDDEDVVVVLPTGCSARAPPLPAILGLVKQLAPKIVIAIDHGADRADLPFSQYFLNCFQSCMFLLDSLDAAGIDADSACKIEKFLIQPRIEDSVLGRGKLDNPIAWRSAFAAARFVPVPPSNWAEAEADCLLKRVQVHGFHVEKCGVGLTLYWQHGELVTVSAWRC

SEQ ID NO: 69283 - protein, 87 aa, Zea mays
  Clone ID: LIB3245-311-F8_FLI.pep
VRACSTQQLGRGRGRLPPETGAGPRFPCGEMWGRAHTILAAWRACHCISMAVLISNLRLWAPIFHHHLLAASTPVTCISSCNLVLQR

SEQ ID NO: 69284 - protein, 147 aa, Zea mays
  Clone ID: LIB3900-004-A11_FLI.pep
QFSDGNNGPGGRSAARRGLAPRGGDGHRAPHPTEPEHAVLRLDCEPGRYMADAGADQLFGNARAERHRAEARHAEPGAPLAEDLAPLQPVGAIPADRVRRLLRQGRLGPGLLRNLPRQRRVQRLQDGAVVRARVSEARRQRCRIGVQ

SEQ ID NO: 69285 - protein, 256 aa, Zea mays
  Clone ID: LIB3960-017-H12_FLI.pep
RKSRGTPKQRGAEGSDDRSAEMEAAAGGVEAEGVMRVLVVDDSPVDRRVAQLLLSSDSCAGSFHVIAVDSARKAMEFLGLKDGGEEQAVDMVLTDYCMPEMTGYDLLKAIKALNPLEPIPVVVMSSEDEPQRISRCLSAGAEDFIVKPLQSKDVQRLRNCSAAARPSKGATQCEAAVVAKRNHKPHPAAAGAGAASPSGRRASLAGVAMVLHSSGVEYLPLLLKLVVLAYAALCLGELLHRWASSDGRCSLSPWCA

SEQ ID NO: 69286 - protein, 471 aa, Zea mays
  Clone ID: 700051102_FLI.pep
SAGPPALTAASLPLRYCSSPPHSPAGAAAAAAAARSYPTSASGGGTAGGKGKMFGRAPKKSDNTKYYEILGVPKSASQDDLKKAYRKAAIKNHPDKGGDPEKFKELAQAYEVLSDPEKREIYDQYGEDALKEGMGGGGSHVDPFDIFSSFFGPSFGGGGGSSRGRRQRRGEDVVHPLKVSLEDLYNGTSKKLSLSRNVICSKCKGKGSKSGASMRCPGCQGSGMKVTIRQLGPSMIQQMQQPCNECKGTGESINEKDRCPGCKGEKVVQEKKVLEVHVEKGMQHNQKITFPGEADEAPDTVTGDIVFVLQQKDHSKFKRKGEDLFYEHTLSLTEALCGFQFVLTHLDNRQLLIKSDPGEVVKPDQFKAINDEGMPIYQRPFMKGKLYIHFTVEFPDSLAPEQCKALETVLPPRPSSKLTDMEIDECEETTMHDVNNIEEEMRRKQAHAAQEAYEEDDEMPGGAQRVQCAQQ

SEQ ID NO: 69287 - protein, 536 aa, Zea mays
  Clone ID: 700104787_FLI.pep
KTKSQQSESSSTARVISESSDSEVHPISNKSPQHSPSPSKVKIGPKGGIRKITNRRIAERILMSVKKGQREMASSDSNFVSGYLLARDMKLRSDTRNGNKELIVSSQQSSPSTRSSKKKSTPQIGNSSAFAEAHNDSTEEANNRHSATDGYDSSRKEEFVNENLCKQEVYLRSWKAIEQGLLVKGLEIFGRNSCLIARNLLGGMKTCKDVFQYMNYIENNSASGALSGVDSLVKGYIKGTELRTRSRYFRRRGKVRRLKYTWKSAGYNFKRITERKDQPCRQYNPCGCQSTCGKQCPCLSNGTCCEKYCGCPKICKNRFRGCHCAKSQCRSRQCPCFAADRECDPDVCRNCWVGCGDGTLGVPNQRGDNYECRNMKLLLKQQQRVLLGRSDVSGWGAFLKNSVSKHEYLGEYTGELISHKEADKRGKIYDRENSSFLFNLNNEYVLDAYRMGDKLKFANHAPDPNCYAKVIMVTGDHRVGIFAKERILAGEELFYDYRYEPDRAPAWARKPEASGAKDDGQPFNGRAKKLAQNNRG

SEQ ID NO: 69288 - protein, 285 aa, Zea mays
  Clone ID: LIB3600-015-B11_FLI.pep
PLRARGAEGGASASASGCGAMALADATAFPYGLRVLVVDDDPTWLKILEKMLRKCSYEVTTCGLASVALQILRERRNKFDIVISDVNMPDMDGFKLLELIGLEMDLPVIMMSIDGETSRVMKGVHHGACDYLLKPVRMKELRNIWQHVYRKKMHEVKEIEGNDSCDDLPIFRNGLDGLDERGLFMRADTDTMRKRKDVDKDHADQDSSDGATAKKARVVWSVDLHQKFVNAVNQIGFDSECSLKFDKFATPFICFFFKKKLHDLNLKFATMALLQKWGRRKYLIL

SEQ ID NO: 69289 - protein, 212 aa, Glycine max
  Clone ID: UC-GMRONOIR006G05_FLI.pep
FVPQNGDGDCEEQGKYSLQLSNIYIYIKGQCCLSNSMSVLMFSFVYIYFLQKVRFWKKVYVIYSFFFVRKIIAHMVTFFFYCVVIPLTILVPEVHVPIWGAVYIPSVITILNSVGTPRSIHLLFYWILFENVMSLHRTKATFIGLLEYGRANEWVVTEKLGDSVNNNKNKSGDAAKKNNAIKATPKKTRSKFVERSVLNLFILFLFVFFESK

SEQ ID NO: 69290 - protein, 194 aa, Glycine max
  Clone ID: UC-GMRONOIR014F05_FLI.pep
MIFLLVFVFDRYDITSNNAILAEDKHTPMFEELVEKYNVEYIAGGATQNSIKVAQWMLQVPGATSYMGGIGKDKFGEEMKKNSRLAGVNVHYYEDETTPTGTCAVCIVGDDRSLVANLAAANCYKSDHLKRPENWALVEKAKYIYIAGFFLTVSPDSIQLVAEHAAANNKIFSMNLSAPFICEFFRDVQEKALP

SEQ ID NO: 69291 - protein, 338 aa, Glycine max
  Clone ID: UC-GMRONOIR016H01_FLI.pep
LHGPVDCRKIFIGGLARETTIAQFIKHFGKYGEITDSVIMKDRKTGQPRGFGFITYADPSVVDTVIEDTHIINGKQVEIKRTIPRGAVGSNSKDFRTKKIFVGGIPSTVTEDEFRDFFTRYGEVKDHQIMRDHSTNRSRGFGFITYDSEEAVDDLLSVGNKIEFAGAQVEIKKAEPKKPNPPAPSSKRYNDSRSSYGGGYGDAYDGFGGNFGMGGYRSGGAYGGRGSAYGGFGSEFGGYGGYAGAMGPYRGDPSLGYAGRYGGGYGRGYDLGGYGGPSEGYGAYGGGGGGGSSGSAYGSSSYDASLGGGYGAAAGGSFYGTRGGYGGAGTGRYHPYGR

SEQ ID NO: 69292 - protein, 281 aa, Glycine max
  Clone ID: UC-GMRONOIR024D07_FLI.pep
TLIGPYANAKDSERRSSTSAVTLAAALIAAAALLALSAIIISLISTRNGKFQHLISRKSPNVSIKIDSVKEFTFRELALATNNFSSSTKVGQGGYGNVYKGILSGETLVAIKRAAEGSLQGKKEFLTEIELLSRLHHRNLVSLIGYCNEEQEQMLVYEFMPNGTLRDWISGKSEKAKERQNFGMGLKIAMGAAKGILYLHTDADPPIFHRDIKAGNILLDSKFTAKVADFGLSRLASFEEGSNNTKYMSTVVRGTPVRLSENFGIMISISIFKTGVILRNL

SEQ ID NO: 69293 - protein, 219 aa, Glycine max
  Clone ID: UC-GMRONOIR024E02_FLI.pep
FADKIEAIDVGVDESGLCDSPTSDATVDSSSSSSNSKGLLCGHGFSEITYIHIHECDYFSMGVFCLPAGKVFPLHDHPGMTVLSKLLYGSTCVKAYDWIALDCAGSQTIGLAGRVVDEVIKAPQEPSILFPRSGGNIHSFTALTPCAILDVLSPPYSEEFGRPSTYFSDIPIPSLNGYAILEEKPMPSNLVVQGAPYLGPSIVTVDHYNFGQIDFDNHV

SEQ ID NO: 69294 - protein, 300 aa, Glycine max
  Clone ID: UC-GMRONOIR031B08_FLI.pep
QKKGSNNAVVAYTLLLKEHQETPKFVDCSIEPSQNPSSTPKSSFFQPDLNLIMANKEFKVPPVAFPSAGNPAAAGPNLQQRRMPTPPFQPNSGIPFMSFDIGSAAASTSSGPIYTGPAVGPGGSANFDDEEPLLDELGIHPDQIWSKIRSVLNPFRVNHTVHKDSDLSGPILLYMSFCLFQLLAGKIQFGVILGWIVVSSIFLYVVFNMLAGRTGNLDLHTCTSVVGYCLLPVVIFSALSLFLPVDGVIRLSVASVFVLWATRASAGLVVSLADGGDEHRGLIAYASFLIYTLFSLLVIF

SEQ ID NO: 69295 - protein, 273 aa, Zea mays
  Clone ID: UC-ZMFLB73022B06_FLI.pep
DDYRDSDGEQENEALDRSNRRRKRSQRYTQDFVEAVSDVDPNFDSDDDIMGEAVYDDEYLRSRKQNKPSSASEEDEEFRLEEDAEDDDEEEYSLSTSEDLEEPQRHKKLETRGRRGTKLRSVGEIQAGLRRSKRSSRPRINYRQYDFSDSDTEPRKARKSDASDPDAGSDAENDMELSTSSQEQEEEEDDSHDEENGNNANDKMEEDHTAEENKIEPEEEKEQPQQQPVEKMDAPSRESKSVGRTFLDLNELAPGGGFDDGPSLTVRDDMDNI

SEQ ID NO: 69296 - protein, 371 aa, Zea mays
  Clone ID: UC-ZMFLB73026B04_FLI.pep
ARRKKTSHPPRPRWQTVLSIAAKNAALLAALLYLGDLAWRWSHPPPPSPPPDRAALEGYAARVDEVEASLTRTFRMIQVQLEAVDRKIDGEVGAARGDLLALLEDKRLALERQLTRLDARAGELGDALAGLKRMEFLRKDEFEKFWDEVKGSLGSSSESEVDLDQVRALAREIVMREIEKHAADGIGRVDYAVASGGGRVVRHSEAYVPKRGFMVWMSGVDVGPKPEKMLQPSFGEPGQCFALQGSNGFVEVKLKSGIIPEAVTLEHVSKDVAYDRSTAPKGCRVYGWYEETPGETQSGHAAKMALAEFAYDLEKNNVQTFDVTAPDVGVINMVRLDFTSNHGSSQLTCIYRLRVHGHEPVSPGSSAGSQA

SEQ ID NO: 69297 - protein, 402 aa, Zea mays
  Clone ID: UC-ZMFLB73027F10_FLI.pep
RRERMASWSSPSAAANAASGARFGPFPSGGQRLAPCPSLVRGTPAPTLVLRPHPDGRGHGLLAHTASPPSLRCRAVAAEVGGLNIANDVTQLIGNTPMVYLNNVVKGSVANVAAKLEIMEPCCSVKDRIGYSMINDAEQKGLITPGKSVLVEATSGNTGIGLAFIAASKGYKLILTMPSSMSMERRVLLRAFGAELVLTDAAKGMKGALDKATEILNKTPNSYMLQQFDNPANPQVHYETTGPEIWEDSKGKVDIFIGGIGTGGTISGAGRFLKEKNPGIKVIGIEPSESNILSGGKPGPHKIQGIGAGFVPRNLDSDILDEVIEISSDEAVETAKQLAVQEGLLVGISSGAAAAAAIKVAKRPENAGKLIVVVFPSFGERYLSSVLYQSIREECENMQPEP

SEQ ID NO: 69298 - protein, 431 aa, Zea mays
  Clone ID: UC-ZMFLB73070D10_FLI.pep
LRLPITTSPAPSTDQINQARPDPKMQRWLPALLRRAAPGGGAARLFASSSLLFDDTQEQFKESVRKFAQENIAPRAAAIDASNHFPRDVDLWRLMGDFNLHGLTAPEEYGGMGLGYMYHCISMEEITRASGAVGLSYGAHSNLCINQLVRHGSPEQRLKYLPKLISGEHIGALAMSEPNSGSDVVSMKCKAEKVDGGYVLNGNKMWCTNGPSAQTLVVYAKTDLAAGSKGITAFIIEKGMPGFSTAQKLDKLGMRGSDTCELVFENCFVPRENVLGEEGKGVYVMMSGLDLERLVLAAGPIGLMQACLDVVLPYVRQREQFGRPIGEFQFIQGKMADMYTSLQSSRSFVYSVARDCDNGKVDRKDCAGVILFAAENATQVALQAIQCLGGNGYINEYPTGRLLRDAKLFEIGAGTSEIRRMIIGRELFKED

SEQ ID NO: 69299 - protein, 81 aa, Zea mays
  Clone ID: UC-ZMFLB73068F07_FLI.pep
GIAVSQVIDQMTTYHDDVLFDRDVGKEKYFYCIIYYFLRADGKANSFLPFLCTHYSDCQPVLNVLQTESTPKALKQLNSTL

SEQ ID NO: 69300 - protein, 127 aa, Zea mays
  Clone ID: UC-ZMFLB73068B08_FLI.pep
KEEEKKNYSCIIYTVVFCLRIYPPSRSHSHIPHHTSTQAKFTSPDAASRRRLSPSPSVSLPPPAEPEYAWISSSAAAAGRSSRCRRSARAGGGGRRGTGLRGAGRGGRRCSSGGRRRGGRRGSGLAR

SEQ ID NO: 69301 - protein, 164 aa, Zea mays
  Clone ID: UC-ZMFLB73075G04_FLI.pep
SGACDRALGLALRRRAAALRLCCWDGNLLRAADRQLSVPRRRCGSAGCCSARGGWGRSSARLGRRDEGGRAARRRDRGSWPEPESDGRVAAGSVVLHECRRWELLGCFRDEDAAGGLLGLHQLLHQHPVQRREQPLRHRRPPLVSLLLAQQDKEEKSSTLPQFH

SEQ ID NO: 69302 - protein, 133 aa, Zea mays
  Clone ID: UC-ZMFLB73079D08_FLI.pep
CSPSPFPPSVWIFVLWATGFPEIAAEAWSGSGSSSLLCLILCGEGAWIFSLMSFRVMSPWMLYGLISTKGRDTDGLAFFAPIINFASCTFQRSRSRACRIVVDYDRRRAQAKTSAVSSVAAAGLFLLRRFSTP

SEQ ID NO: 69303 - protein, 306 aa, Zea mays; identical to SEQ ID NO: 68852
  Clone ID: UC-ZMFLB73079F10_FLI.pep

SEQ ID NO: 69304 - protein, 342 aa, Zea mays; identical to SEQ ID NO: 57039
  Clone ID: UC-ZMFLB73080F11_FLI.pep

SEQ ID NO: 69305 - protein, 606 aa, Zea mays
  Clone ID: UC-ZMFLMO17095D07_FLI.pep
GTYDGFNNAIEEVTHLDIDQISPLRMVLTASVAFHDQSVKPGSPLLVSVSLLSHLPSPVVVDQLEVQFNQSDCNFVMHSAQEDSLPSYSNLHGQVIQDTSSLTLFTNRWMRLTHEVKSGKSGKLECLSVKATISKHLVICCHAESPASMEDFPLWKFENQVETLPTKDTTLAFSGQKLIQVDEPDAQVDLVLNSAGPALVGELFTLPVIIESKGHAVHSGELKINLIDARGGGLLLSPREAEDSESHHVELLGVSTVSEDKESKEEADSIRKIQYSFGVVSVPTLSVGDSWSCKLEIKWHRAKSVMLYVSLGYSLGSSEEEALHRLNVHRSLQIEGQIPLLVSHQFLRSFRREPLLLSGIRSLGSDDKKCSLAMNESNMLIVTAKNCTEVPLCLHSMTIQPDGDGEQLCSVQQISGISNRHAIVAPSEEYKGIFSVNPRAISTNFRLGEICLNWSRDSSLGEDQDRLIIMKVQLPEVNIEEPPLVVGMECPPYAILGIPFTIYVKIHNSTSLLQEIKYSLVDSQNFVFSGAHNHAAFILPKSEHTVSHKFVPLGSGSQQLPRITVTSVRYSAALTPSASAATIFVYPSEPKFNLETSHSTSDEIVS

SEQ ID NO: 69306 - protein, 653 aa, Zea mays
  Clone ID: UC-ZMFLMO17099C05_FLI.pep
EREEMAGKGDGPAIGIDLGTTYSCVGVWQHDRVEIIANDQGNRTTPSYVAFTDSERLIGDAAKNQVAMNPINTVFDAKRLIGRRFSDASVQSDIKLWPFKVIPGPGEKPMIVVQHKGEEKQFAAEEISSMVLIKMREIAEAYLGSTIKNAVITVPAYFNDSQRQATKDAGVIAGLNVLRIINEPTAAAIAYGLDKKATSVGEKNVLIFDLGGGTFDVSLLTIEEGIFEVKATAGDTHLGGEDFDNRMVNHFVQEFKRKNKKDITGNPRALRRLRTSCERAKRTLSSTAQTTIEIDSLYEGIDFYSTITRARFEELNMDLFRKCMEPVEKCLRDAKMDKSSVHDVVLVGGSTRIPRVQQLLQDFFNGKELCKNINPDEAVAYGAAVQAAILSGEGNEKVQDLLLLDVTPLSLGLETAGGVMTVLIPRNTTIPTKKEQVFSTYSDNQPGVLIQVYEGERTRTRDNNLLGKFELSGIPPAPRGVPQITVCFDIDANGILNVSAEDKTTGQKNKITITNDKGRLSKEEIEKMVQDAEKYKSEDEEHKKKVESKNSLENYAYNMRNTIKDEKIASKLAADDKKKIEDAIDAAISWLDANQLAEADEFDDKMKELESLCNPIIAKMYQGAGADMGGSGGMDEDAPAGSGGPGPKIEEVD

SEQ ID NO: 69307 - protein, 258 aa, Zea mays
  Clone ID: UC-ZMFLMO17113E12_FLI.pep
LLNISISARDQVASAPGVLDALTAALRSGDAAHHAAAVVHSLLCGGEPHRAAVCERRPLLAALVALLRAPPHRPGATRATKDALRALFGAALYPPARAALVSLGAVQALFALVLTDARAGVVEDATAVVAQVAGCAESLEAFRWVSGVRILLDLVESGGAATPRARENAAAALLNLVVAGGEAAAADVVAVGGAEETVRLLAEDSAASPRGKAKAEALLRALEDAAVRRREHRLADFLDGLVQSDPYISSPASASTHG

SEQ ID NO: 69308 - protein, 461 aa, Zea mays subsp. mexicana
  Clone ID: UC-ZMROTEOSINTE001E04_FLI.pep
REAISKMHNMSAAVLTSVLTLIDEYDLYGQVAYPKHHKHSEVPDIYRLAARTKGAFVNVAYFEQFGVTLIEAAMNGLPIIATKNGAPVEINQVLNNGLLVDPHDQNAIADALYKLLSDKHLWSRCRENGLTNIHQFSWPEHCKNYLSRILTLGPRSPAIGNREERSNTPISGRKNIIVISVDSVNKEDLVRIIRNAIEVIHKENMSGSTGFVLSTSLTISEIHSLLLSGGMLPTDFDAFICNSGSNIYYPSHSGETSNNSKITFALDQNHQSHIEYRWGGEGLRKYLVKWATSVVERKGRTERQIIFEDPEHSSAYCLAFRVVNPNHLPPLKELRKLMRIQSLRCNALYNHSATRLSVVPIHASRSQALRYLCIRWGIEVPNVAVLVGESGDSDYEELLGGLHRTVILKGEFNIAANRIHTVRRYPLQDVVALDSSNIIGVDGYTTDDLRSALQQMGILAR

SEQ ID NO: 69309 - protein, 54 aa, Zea mays subsp. mexicana
  Clone ID: UC-ZMROTEOSINTE001E07_FLI.pep
LHKCVYHDTIQLSRTDISNGKLQHFLKSPVTLLVSTSPSAPCIDDNVPAFISCG

SEQ ID NO: 69310 - protein, 573 aa, Zea mays
  Clone ID: UC-ZMFLB73147F05_FLI.pep
IGGAMSHDELADKEPSSSEEFQLAPTGSKFRSLSPAPIPIPASPGIRSLVDSVSDETVNVDVMASHQSENGSISTASSTVSLLESEKAAYEFLAQTPVRSTDAHLIEFSEALRTVAKALRQVAEGKAAAQAEAAEWKRKYELETAQKQQSKIRGYSSCISNNLDKLASQLTLETPAPDQLGCCGKHGICAHQVLQDEVPGPIPRSNHKVGGRKAPFKLSWGCNGDKNGQHKHDFVSFEKGDITTAERSNKQILLKWESPPQTVLFITKPNSSSVRVLCAEMVRWLREYKNVNIFVDPRVSKELLTEDSYYNFVQTWDNDDDIKMLHTKVDLIVTLGGDGTVLWAASLFKGPVPPVVAFALGSLGFMTPFPSEHYRELLDNVLNGPFSITLRNRIQCHVIRDAAKDEIVTEEPFLVLNEVTIDRGISSYLTNLEVYCDSSFVTCVQGDGLIISTTSGSTAYSLAAGGSMVHPQVPGILFTPICPHSLSFRPLILPEYVTLRVQVPYNSRGHAWASFDGKDRKQLSPGDALICSISPWPVPTACLVDSTTDFFRSIHEGLHWNLRKSQSFDGPRD

SEQ ID NO: 69311 - protein, 525 aa, Zea mays
  Clone ID: UC-ZMFLMO17176F02_FLI.pep
GCGQMGIEILCLIFIFLLLIRVLTRSYAASPSPPAMSAAAALRLPPGPWQLPLIGSLHHLLLSRFSDLPHRALREMSGTYGPLMLLRLGSVPTLVASSAEAAREVMRIHDVAFCSRYLSASLDIISCGGRGVLFSPYNDRWRELRKVCMLELFNPRRVLSFRSVREEEVARLLRSISDQCGGGGRHAAAVVNLSEAICRMVNDVVVRTAIGDRCKHRDEFLRELDEAVRLTGGFSLADLYPSSRLVRWFSASARDMGRCQKNVYGIIGSIIRERDGARVPGRREDDLLGVLLRLQREGGLQFALTDEIVIAVIFDIFAAGSETSSTVLAWAMSELVRNPRVLHKAQSEVRETFKGQERLTEDDMPRLSYLHLVIKEALRLHAPVPLLLPRECREPCRVMGYDVPEGTRVFVNVWAIGRDDGFWGDGEVFRPERFDGGGGGVDFRGNDFEFTPFGAGRRICPGIALGLANMELALASLLYHFDWEQPADGPGTGSSGSLDMAEAFGITLRRKSKLLLKATPRVETK

SEQ ID NO: 69312 - protein, 496 aa, Zea mays
  Clone ID: UC-ZMFLB73151E06_FLI.pep
ALLWWPFTQHNLVPQDSVTVIDSRYGENFSVYKIKDKMLIPQFDACASWWTQGPDSNLQIELARDMGYAAARYGHVMFPENVHEPALHSAEVLLGGVGKGWASRVYYSDNGSTAIEIALKMAFRKFSLDHGIMASSENSTRNERNIQLKVLALNGSYHGDTLGAMEAQAPSAYTSFLQQPWYSGRGLFLDPPTVYIKSEVYNISLPQSMQHDPQTYGDTCFFSQAEVFCKTRDKTFAADLYSSYIKQKLSEFSLSSSSEHLAALIIEPVIQGAGGMLMIDPLFQRVLVSECRSRKIPVIFDEVFTGFWRLGVESASELLGCLPDIACYAKLMTGGIIPLAATLATEEVFESFESDSKLTALLHGHSYTAHAMGCTAALKAMQWYRGPSTNSNLDTDHMKLKELWDGTLVKQLSSLPNVKRVVSLGTLCAIELKAEGADAGYASLYASSLVQQLRKEDDIYIRPLGNVIYLMCGPCTPRDSCTRQLLKVHRRLCALN

SEQ ID NO: 69313 - protein, 141 aa, Zea mays
  Clone ID: UC-ZMFLB73148C09_FLI.pep
VRPSFYSFEISTKLQWRMRIFKIQPLDAHQSSPAHLIFYLFLNHKSSSPVCIVHPNFPSIKHLTVHLLQCCVSLVLRRKLDKTKSFRLAACGMAYNLRRNNITTLRENILESCLVSVVGKTCRENKKEGCIIRCQFFFYCN

SEQ ID NO: 69314 - protein, 320 aa, Zea mays
  Clone ID: UC-ZMFLMO17123H02_FLI.pep
LRRIREVELKRDYAFIEFSDHRDADEARYQLDGRDVDGSRIVVEFAKGVPRGSGGSREYMGRGPPPGTGRCFNCGVDGHWARDCKAGDWKNKCYRCGERGHIERNCQNSPRSLRRERSYSRSPSPRRGRGRSRSYSRSRSRSRSYSRSRSLSRSPRGGRRDRDDRRSRSPSYSRSPMRSASPPVKEKERSPAPDGSRSPRSRSPQDQVMSPPPKDNGEGNGSDRGGSPRGRENSRSCSRSRSPSGSNRSPAANGRSRSPGGERSPSPGGERSPSPRGERSPSPRADRSPSPNGNGNNDAAADVDADAAARSGSPTGSKSP

SEQ ID NO: 69315 - protein, 509 aa, Zea mays
  Clone ID: UC-ZMFLMO17131F09_FLI.pep
WRGATIDVLRLWASKAATHEHDFLSLYAAAAAKDAPLLLHDSKAPPPSQGNFLLKTHDFLQPLDQKPGAPPEPSPLPASAAESRHQPQQQVVVANQHALPLPGGVGTFSISPAPVSVALPAAVVKSEPPFVLWGQPAATLHPGARGHQQQWALPFAGAGQVRLPPQQAPPDRKGRGGAGGGVMESGSRSSGGAGFDDDDGLTTRREVSSSLQDLTVRVDRKGGSCSDGGTDQRPNTPRSKHSATEQRRRSKINDRFQILRELLPHSDQKRDKATFLLEVIEYIRFLQEKVQKYEATFPEWNQENAKMLPWSKGQISGDSPPDPSHFMRNGSSPGSNFTGKLDDNHNIVTSAAASGAQDQVETDHMASGCYRSAETTANFTNNAMSQSQPQWTGPSPVDDSAVNSETLNNQQLVIDEGTIRVSSNYSQELLNSLTHALQSSGVDLSQANISVQINMGKRAAKRPAAGVSSNSKEPADPASSNELGHQLTLSGAGADCLSHATKRHKRSNS

SEQ ID NO: 69316 - protein, 515 aa, Zea mays; identical to SEQ ID NO: 54604
  Clone ID: UC-ZMFLMO17301A08_FLI.pep

SEQ ID NO: 69317 - protein, 391 aa, Zea mays
  Clone ID: UC-ZMFLMO17011F11_FLI.pep
FFLVLLPAPHSRTLTLPLSLPRRRRACSRGMLRAARYLLGSPGASGFGSRSTAEEVTPDLGATTAIITGATSGIGAETARVLAKRGARVVIPARSAKAAEDVRARIVAECPAAAVLVLPLDLSSLASVRAFADRFLALGLPLHLLINNAGKFSHGQLALSEDGVEMTFATNYLGHFLLTKLLAGRMAETAAATGVQGRIVNVSSSVHGWFAGDWAEYLHLVTRRKIPYDATQAYAVSKLANVLHTRELAARLQEMGANVTANCVHPGIVRTRLNRDRDGVLTDLVFLLLSKLLKTIPQAAATTCYVAAHPRVAGVSGRYFADCNEALPSPAATDRHEAARLWRVSEAIIDGCTNSQPQRDCTTSPLLRLLPAQTQSQSPTGASSSPRRRAC

SEQ ID NO: 69318 - protein, 512 aa, Zea mays
  Clone ID: UC-ZMFLMO17015H10_FLI.pep
AASKPAPTPAPTTSNSTPPAPAPSFPSRSPPPPKTTSNSSEGSTTRDSTSPSKKHSTSTLKIVGFVLAGVVLFIIIVLLVLFCLSKYQERRSRYDHNRSQQARVHHRVEPQIKPPPVQQSNDLKKGSGEVLDRRGHELSSSTAALAKKSPENQKEHVINFDRTDSDLFPVSLPPPPPPPPLPPIERVIANPIVPPEKRYSPPPKTSSSTSATSFSIASLQQYTNSFREENVIRESRLGKVYLAELPDGKLLEVLKIDNANGRISVDDFLEEVECILDIKHPNILELVGYCAEYGQRLLVYNHFSRTTLDDTLHDGEDTESALSWNARLQVALGSGKALEYLHASFQPPIVHQNFEPANVLLDKKFSVCVAECGLAELMPPSSVTQLSGRMRALLNYEAPELQDSGVVSERGDVYSFGVVMLELLTGRKPYDSSRPRHEQHLVRWASSQLHDIESLSKMVDPSIRGQCSEKALSRFADIISRCIQQQPEFRPPMSEIVQDLARLVNATGEESE

SEQ ID NO: 69319 - protein, 432 aa, Zea mays
  Clone ID: UC-ZMFLMO17011B05_FLI.pep
VPRRRFVPKPYSLQNAAAPKLKSVNRAPRRRENSNSAGLVRNRRGAAERWSEREIEIIRFAMSSRAGGGKPLWSASTIVAKVASGYHILRIDGYSRTMETPTGESIASLPFSVGGRCWRIRYYPNGDKLENKEYISLYLNLHDRSVEAEKAQLMFRFVGDVAEQPLILGRLHTFEKQGWGYAKFIKRKDLEESKHLVDDSFSIRCDVAVRFNDVRVEKAPEAAAAAAMISVQPSDLHQHLGSLLLTQKGADVVFDVAGETFAAHRCVLAARSPVFTAELFGAMKEGHTGGVVRIEDMEPRAFKALLYFLYTDLLFPKTMATTMNQSEDGDVGGDDEDVLCQHLLVAADKYNLERLKSLCEKKLSECIHVGTVAIILTLAEQHRCPGLKKVCLHFLRSPANLRAVASSDAFKHLSSSCPSVMVELVAMLGNSA

SEQ ID NO: 69320 - protein, 293 aa, Zea mays
  Clone ID: UC-ZMFLMO17099B07_FLI.pep
PYFMDGSSSAKDGHHAVAGNKRKHETLEVDEDDSIIAESEVLWRINFERFIFCLKKKFCAERKKAKMRLGTLAIWEAFFEANVTNNDNKTVTSPIDGILERVGQKEGGMSMTLDHITSVLNDLECTSTANNPEEFTFDLNKLVETCRNDEIESLVKKKHGQEAYTIFRLLLKQGCPVETDEITDRTILDKQVVHETLYKLWKDEYIDSERVPSTSATGTGSAQFFVWRVKNIYREHFMDNLYHAALNLRQMVNYMAELLLEGSKDEIKLRNRKNILVLALTRHDESLMLFHDF

SEQ ID NO: 69321 - protein, 328 aa, Zea mays
  Clone ID: UC-ZMFLMO17129B06_FLI.pep
RTLPKGHHCLAMQLTAEYFSLDPTKREFPKRDNIQLGGYYHYAMFSDNVLASAVVVNSTIAASKDPGRILLHIVTDALNYPAMMMWFLTNPPTPSVIQIQSLDDLKWLPGDFSSRFKLKGVRDPRYTSALNHLRFYLPEVFPSLSKVLLLDHDVVVQNDLSGLWDLDMKGKVTGAVDTCTSSEGFRQLDSLIDFSNPSVFNELDPKACAFAFGMNIFDLNEWRKQGLSTTYHRWFQLGKSEKLWKAGSLPLGQVVFYNRTLPLDHRWHVLGLGHDSSIGRDELESASVIHYSGKLKPWLEISIPKYRGYWNRYLNYDNPHLQQCNIHG

SEQ ID NO: 69322 - protein, 157 aa, Zea mays subsp. mexicana
  Clone ID: UC-ZMROTEOSINTE117B03_FLI.pep
HMAYLRAVTKESLRIHNVTPLLAPHLSMDSCTIDGYTVPAGVQVLINSWAIGRDTRYWGDDAEEFVPERFMDGGSAVHVSFKGSDFEFLPFGSGRRMCAGVNFAMATVELMLANLVHRFDWDLPPGQEGRDIDVSQVFGLVVRRKKKLLLVPKLRVY

SEQ ID NO: 69323 - protein, 426 aa, Zea mays
  Clone ID: UC-ZMFLMO17128B01_FLI.pep
GQEVMIRPGSKDSQNYDNNNQRVHPQPIDDNMNQNGDSMDTVIGRIFNNISSLKSAYIQLQEAHTPYDPDKIQEADKLVIEELTRLSELKHAYREKHPKPIAASPQDSRLLSEIQEQQNLLKTYEVMVKKFQSQIQSRDTEITHLQQQIDEAKLRKSKLEKKLKQRGLLNRESEESDEEENYFSIELTPSLFTSAVDNAYQSIHDFSKPLINMMKAAGWDLDGAASAIEPGVVYTRRAHKKFAFESYICQRMFSGFQEESFSIKDSNISVSNEAFFHQFLAVRAMDPLDVLSQNPDSVFGKFCRSKYLSLVHQKMEGSFFGNVDQRNYVMSGGHPRTPFYQAFLKLAKSIWLLHRLAHSFDPKAKVFQVKKGSEFSDIHMESVVKDIILEDVAERPKVGLMVTPGFLIGTSIIQSRVYLSGAKCAD

SEQ ID NO: 69324 - protein, 279 aa, Zea mays
  Clone ID: UC-ZMFLMO17045D12_FLI.pep
VRNARSRDMADGKRGEDSAVALKTSPSSAVMAGGLRGVSNPLEEWSGRVKAIEAGFRAWMAKQPIQIEAAVTTAVGAVQGGALGGLMGSLTADGGSPFPIPQPPPNANPEAMASFKQAQALAGGPLVQARNFAVMTGANAGISCVMRRIRGKEDIQGSMAAAFGSGALFSIVSGMGTPNPVANAVTTGVAFAVFQGGFFMIGQKFSKPPSEDTYYSRTRSMLHKLGLEKYEKNFKRGLLNDQTLPLLTDSALRDVKIPPGPRLLILDQIKRDPELVRAK

SEQ ID NO: 69325 - protein, 86 aa, Zea mays
  Clone ID: UC-ZMFLMO17309B04_FLI.pep
QHILQLPNMFTLYFLKRSRVKATQCFFLFFWNFALWTLNKRPVNALQVLLSYSYFPSNLKNSSEERDEASRAARKDETSLNICCWH

SEQ ID NO: 69326 - protein, 310 aa, Zea mays
  Clone ID: UC-ZMFLMO17295A02_FLI.pep
EMTDPVLEGETSEKSNSKASSAQDSDSTSSVADQESQKDVLEDCSNQGQQSSFSQTEEHAHIARHAREVSLSLDMEPPVLISDSSDDDISLSGEHINDWEEAQQSENFSLSQNTWQEDPNVMQHHQEIDITSNGLNQMSPHSNDLELTSSSTETTDDPFEVNDIEPPAKEVVVVDDTHVVDPVYDSSPSGSERPAPTGLVIDGPVLKDGHACTLVVEATIEEGGSSSRMEVSSSEVAGPSLSSVEQSESPEKEASEIREQSMVGHDEAHGGSVSHADPSVSDISSQPSTESSTNGDSGSGVTPSFTNAVL

SEQ ID NO: 69327 - protein, 206 aa, Zea mays
  Clone ID: UC-ZMFLMO17295C07_FLI.pep
KYLLARPPSNCKLQSAVGHISQHSKAPAKPCSPTPCQVVCSSPVSRKTVQNKVSIIQNLLFELRPFTVCSIILLRPPYQLREVVLQCVFKLLGLVLRNIILLIKWRMFFVVQWKPRVFHSCWYTRLDMVTILHYLVSGLKIHWSMGHVLPLILLNLLILNVGQVLHVILLVLNMGQILHIILRNLLVLNMGQVMHLILLNLLILNS

SEQ ID NO: 69328 - protein, 230 aa, Zea mays
  Clone ID: UC-ZMFLMO17297B03_FLI.pep
PLHAYVQHGQGRAAPRPRGFARRAAILLPRRVPGLLHRRPIRRRHAGRLPVQAPEGRDRRRLPLWRPRHPRHGAETLQDLPGLGRRHHVPRPERAGHLCRADGDGPGRRRAAALPPGRHRAHLRHRGQRRLRLHQRHAQQGVHQDAVRRRPDGAPAGPAPLPVQPRQHHGGDAVLVQQRQPRPADPRLRALRQRPAHGGREQGDQPGRTADRQAQGAVRREGLDAYVLRI

SEQ ID NO: 69329 - protein, 262 aa, Zea mays
  Clone ID: UC-ZMFLMO17312E04_FLI.pep
PRCVVIPKLSCAQSRCTPSSPPQGCHRPQGRRRPATSAKQPLFVGGFLGLCHAKDLKLFCRQHAEDMDPRFEDEDTSFPWNFSGLTNTARNLFGAHSTPSSFNQFTGGRCRVSDRIDDLDLNSQVLDLNTNVSFIVSHGGSRGVHELNIQGGGHGVAHFVSHVAQHCNISGGGRGRTYDDVHGLEDASMRVSDTVLGGAYSSRGGHGGRRARGHHPAPLQQCHIVHLAQLEIVVLLSSLWTTTLRVMNSMTKMLWGMLNGGS

SEQ ID NO: 69330 - protein, 371 aa, Zea mays
  Clone ID: UC-ZMFLB73116G11_FLI.pep
VLKKRGWGFNELGRCRLENRNLVSAEIAFADAIKAFEEVFDHTNVILINCNLGHGRRALAEECVSRIDEFQKHNLPEGTYMQSFKSAKSEYFQAINYYSAAKRQLKYVNTEADKVLYHEVYTQYAHTYLRLGMLLARESFLTDSYEGGLVNESSNRTAVEILASDAFREALSTYESLGEHRKQEAAFGHFQLACYQRDLCLRFLDLVDKEVKQKNEDKYRQKSKWYGSLAEKNWQKALEFYGPKTHPTMFLNILMAQSALSINISNSFHSTAMLDTALTHLLEGRHVVEANEDNSNDMDLDIKPKFWCQLQSLLKRMLAGSLPSSTGRAASVSQASTSSRTETSKLKEMYRLSLKSSTLGQLHALYKLWVS

SEQ ID NO: 69331 - protein, 122 aa, Glycine max; identical to SEQ ID NO: 50957
  Clone ID: 700796424_FLI.pep

SEQ ID NO: 69332 - protein, 155 aa, Zea mays
  Clone ID: LIB3068-014-E5_FLI.pep
INYQDYLKLRTRVEFLQTTQRNILGEDLGPLSMKELEQLEDQIEISLKHISSRKNQMLLDQLFDLKSKEQELLDLNKDLRKQLQETRPENALRVSWEEGGHSGASGNVLDPYQGLLQHLDNDPSLQFGYHHQAYMDQLNNEDLVDPNEHGRSGWI

SEQ ID NO: 69333 - protein, 306 aa, Zea mays
  Clone ID: LIB3069-020-C4_FLI.pep
QNTQLFTALNNAKKSARSNGTGFAGRKSVRSSQHFGYSKDNFNWVDDMDISDSEHSDELENMSDGSDSDWVQSTRKAKKHQRRVSSHSNPNLDCQNTQGSAEPEKPSDEKCILPKYISSDGCSCSKSSSCKTNKCECRGSGAQCGAGCGCKDSKCSNRDSSTIEKANQGAMLLQTAFSEKEAQDAKPRKPLTNIGNNVVNQTAETKKPRKNRRKSAIQLVPGPLLPSEPVATEAAPRDIANIPLKLPRAMSSVTPAESNPPLTDRNAAKPDESVSTGSKNSTGAAATRAPSQLRKNATTEKENQLR

SEQ ID NO: 69334 - protein, 434 aa, Zea mays
  Clone ID: UC-ZMFLB73005G09_FLI.pep
LESCDEGTEMASSSSDSGRIAGTLALRTSSALAAASLIPGLPDDVAAVILCLLTFPDQSRLRATSRAWCLLLSAATLLPLRRSLRLPRRHLLCLFPTDPSLASPILLDPAAPTTWWPLPPLPCSPQLYGLANFTALAVGRHLYVLGGSCFDARSYPLGQPSASAAVYRLDLANSRHCWERLPDMQLPRGSFACAHAPSAGGLLVAGGGSRHPMFPSNGSRTGSTEWYDATTHSWHLGASMPRDRAGCVGFLARGAGDGGEDEFWVMGGYDGYTTLGGVVPNDVYCRDAVALGLWSGKWRVIGDMWEEGERRRLGPIAALSADDGRITEVFMLDGNDVFRYDFASNRWLKEATTRRKIPNTESCGFVPMNGELYVLRSAKVRVESSGPWRQLKKKLAMEFQVYNPGAKKWRVLTTYPPVDAPIDFRTAALCTVEL

SEQ ID NO: 69335 - protein, 271 aa, Zea mays
  Clone ID: UC-ZMFLB73011E09_FLI.pep
AIPRRSGEVAMEYRRVKDQEIYDDLSQKDVESLSGRTLSSANRGAKANSSWKLKSVVTLALTLLTSSQAILIVWSKRAGKYEYSVTTANFSVEALKCLLSLAALFRTWNCHGVTDDNRLTTSFDEVGVYPIPAVLYMVKNLLQYYIFVYVDAPAYQILKNLNIISTGVLYRIILKKKLSEIQWAAFVLLCAGCTTAQLNPSSDHVLQTPIQGWMMAIVMALLSGFAGVYTEVRLVTLCLCSLIYIYLSSEFIGGVRQLECFYLSLNTAGYH

SEQ ID NO: 69336 - protein, 130 aa, Zea mays
  Clone ID: UC-ZMFLB73114B09_FLI.pep
LSSSWLHDTILKESLDSKGRVMVEKDLRVKGFNNIFAIGDITDIPEIKQGYLAQKHALLVAKNLKLLTKGLPNSKLATYSTGYPLALVSLGRKEGLAQFPLLTLSGCLPGMIKSGDLFVSKTRKQMGLNG

SEQ ID NO: 69337 - protein, 353 aa, Zea mays
  Clone ID: UC-ZMROB73058D01_FLI.pep
IIHGEGSWEVTLYQKLDITMDDVLRGLTSANMIGTGSSGAVYKVDTPNGYTLAVKKMWSSDEVTSAAFRSEIAALGSIRHRNIVRLLGWAANGGTRLLFYSYLPNGSLSGLLHGGRAAKGSPADEWGARYEIALGVAHAVAYLHHDCVPAILHGDVKSMNVLLGASYEPYLADFGLARVLAAASSMLDTGKQPRIAGSYGYMAPEYASMQRISEKSDVYSFGVVLLEILTGRHPLDPTLSGGAHLVQWLREHVQAKRDASELLDARLRARAGEADVHEMRQVLSVATLCVSRRADDRPAMKDVVALLKEIRRPAAVDDAKQRPPTAAAPVSPVSAHSRGQSSSCSFAVSEYSA

SEQ ID NO: 69338 - protein, 489 aa, Zea mays
  Clone ID: UC-ZMROB73079A05_FLI.pep
QARTSHNASEKELSSAPRRNQRGEEEGSELSRACAPRLPPARLMRKLCPNLERDDALDTVLEVPIPEEMFSGGGGSRGSTRFGCTNVKAWMRSHAADRSGAGEPCSMTRGELQLMLGVIGAPLIPLPVYHANQSPCSVLCEQLKADPIESSSAKYIVQQYIAASGGEWALNKVKSMYAMGKVRMTAAELNSSDADGHGGSTGNGHHRGGKKGSKGGGGGGEIGGFVLWQKKPELWCLELVVSGCKISAGSDGKVAWRQTPWHQSHASRGPPRPLRRSLQGLDPQLTASLFADSVCIGERSIDGEDCFVLKVEAEASSLRARNSSSVEIIRHTVWGYFSQRTGLLVQLEDSHLLQIRSSGGGAGGSVFWETTMESRLGDYRAVDGVNIAHAGRTAVSLVRFGDCQDGNTRTRMEEEWNIEEVDFNIWGLSMDCFLPPSDLREGKESQDVAVVKADARPPPLRIPAVTVRVGPSQVAAVNMDDSDSLVARS

SEQ ID NO: 69339 - protein, 177 aa, Zea mays
  Clone ID: UC-ZMFLB73126C03_FLI.pep
RSCLVPGSRGRRRLQQWPTSPGSRCLASYSSPSTQAWRFIGPTVTPAPSLSSWYLISTWWPCSPACATTSSWISSTPKSARGSRLGFGASRPSLLSCSVTRWLRLCPCQSNLLSGRWQPLPPVAASTLSSSTARSLSCQRWRHGPPRPRMQPPTRFVCHHKAHTAGLGSAPRVRSHM

SEQ ID NO: 69340 - protein, 323 aa, Zea mays
  Clone ID: UC-ZMFLB73134A10_FLI.pep
LETRSRAESWLFAPFRLCPPSPQTTPIPIPPYPANARRGHVQLLREGASATTPLAMDEGYSNLPTSHLLGSVPAVTQDDRKLGPPAAQDAAATSRLQEFPPGGGNVGGYRPPGGPADGDVENQADWKGYFNVASYAPYFNVDTDVVVDRLISSVYPMDGFYRKIDANPDMYGPLWITTTLIFMLAVFGNYATYLVQTKKDMDIWNFDVGYFSWAASVMYSYAIIVPVVFFFLFQYFGSRPSLVRFWCMWGYSLFIFIPASVLLLIPVGFLQWVIIALAGGASSWFITLNLKECTEGADLMVLMASASVLQFALALFIKVYFFA

SEQ ID NO: 69341 - protein, 154 aa, Zea mays
  Clone ID: UC-ZMFLB73118C12_FLI.pep
YSLTSIYSMHEIQSTFPSTHTKRATSLLLFHDGDGTKLLLTTTTSVLRVCSCFPFIPIGAYVPVYYLVVDLDELRTVHGLWYLIRVRAAPAAAMVPAVAAAPPAVRVAAAAAAAVTRVAAAAVPVLDLHLLLLFGRLGLLVSGGGEEGGGEQER

SEQ ID NO: 69342 - protein, 436 aa, Zea mays
  Clone ID: UC-ZMFLMO17222B08_FLI.pep
VGVRRGWSLRLQRLMVQDGCFVEWRDMVADAARKGFAGGVSLEWNSYKILSEQMRHDWLENLQKRRSMPRPRGNRRAPKTPEQRRKIAEAIAAKWLDQEYRERVCSGIASYHGSSSATKTPRKPRPAGEPGVKKQTTRKKPMQAKPVILEDAHGKSAALKRKKSATPYKDPMAVEKLEMISKIRAQRTAQEIEKKEAIRRARTLIAEAEKAADALETAAAMNPFAQASLIEARKLVTEARVSLECVDDEEPQETASNDVSGSSVLLNLHDHRHGLEMQNGSNLLKQENKPANGMEFPPSSVNGLAFHLDVSELSGTKQLYQRIENSMERAFLLPSASSKLKSANGDYGIIDLHVRQSMVDDTAKHKGITAETCPPGTLELEDPPSPRSAEKAGTREDYPGGKPEEDAPSSEEKARMRWVRGRLVKVKTNGPGDLEI

SEQ ID NO: 69343 - protein, 620 aa, Zea mays
  Clone ID: UC-ZMFLMO17221A03_FLI.pep
AMAASPQQQGQGGPGSGGWTPEQFWSLLDKADRRFARVRDLPSFGRQEPDEFAKAFRAYTQLWRMQQEHRHRLLDAGLRRWQVGEIAARIAHLYYAQYQRTADTALLSEAFVFYHAVLDRAYFQDADHHLTPAKHLRFLARFLLVALLLGRRSHTVPRLASDIRTLLDDSKKSFQDAEYKEWRHVVQEIARFLRADSPFMNMRPLRYSYAFDPPPDTLRTMPTTIKKRGLVLSDTILCSYYPNEVKFTDLSIDVFRMVQCLEWEPCGSFALNDGYSAHDESGQNQPNLLKDLRDAALPPNPLKTILYRPSVTHFLTVLSTKCEELPSNGIMLIYLSATGEMGTSGFCPDTGENVLSNFNKFDISSLSHTSSKENKEPCLWLGCRETEGSNCIYPGDLIPFTRRPLFLVIDSSTSYAFKSIHGTERGETSAMLLSPSSRSSAAGFSGDSTRHSGSQFTMFLTSPLQAFCLLLGNNGTDIDRELLLLSLNEWAATLVASSSLHSIWVEVLGDPLLRRLLLRFIFCRATHSLFKPTNHKTEFLPTCMPPLPESVDAESMLSQSCVLRVASFFGAASQFSFAEVTTWPDVDPEEAVVTSSSGSANKGVPETARDSDISNSSSSF

SEQ ID NO: 69344 - protein, 363 aa, Zea mays
  Clone ID: UC-ZMFLMO17223F04_FLI.pep
PCPSPPAPRAGSMRPPPPEMHITRRRYRWVKEWVPQDLVVTGGPCTLYKWVREDRLAALKAKDKEQGAASAMPEPNSEVLFLCSYEGCGKTFFDVGALKKHAHVHGERQYICHYENCGKKFLDSSKLKRHFLIHTGEKNFVCPHEGCGRAFSLDFNLKAHMKTHSADNYHVCQYPECGRRFTQESKLRAHIRAQHEKNPGASSMNHSAIGGPHQPPRPAKVSAAPPAPSAERPYVCPYDGCDKAYIHEYKLNLHLKKEHPNHYQDGGPNGAAAPSKRSISKSSHRSKLDITSRMPPANIPKHRGYATPLPAVVSLPEEQQLLRKVVYEDDSEETEEEGDNNGEDRWNYKRAASSDDEETEDEE

SEQ ID NO: 69345 - protein, 216 aa, Zea mays
  Clone ID: UC-ZMFLB73108C04_FLI.pep
ADHQPRRRPPQRALQREGPAHRHRPRGGVRVLRRPLQRQLAPDEEDPGRAGGPRPRQRRGREGRQRVRVLQDQQVRGGAARGAAQGDGGRPRGLRDRRRADRQQDQGEPVVPAVPLHPPGPRRRVPDRREAQVPRRGVQQGVPGPQRGQAHRPHARLPQGVGRQAPAHLLRSEEEDATGAKRQDPQEEEMTPYAREEEIKKGVFRYSQAGFISFAI

SEQ ID NO: 69346 - protein, 96 aa, Zea mays
  Clone ID: UC-ZMFLB73106E10_FLI.pep
ILSESVEPRTPTNGKEQLHNTCLVADFNQRQRAAAEHLFGCGLQTFPWRGELLEARRLLAARGRCCGGRWTHNLWCDVITDVVQGQQVLGSECGWT

SEQ ID NO: 69347 - protein, 328 aa, Zea mays
  Clone ID: UC-ZMFLB73106C09_FLI.pep
AYVSSQGEGDRLGDARVHHPGGRRRGQDGRAVGRHRGLADRAQGPAPRHVQLGVLRRERAVLPGKEHHFQGTYVAGTTHPCRVFPSTIYMCSLVLALARGTEHVAGAEAWGGGEAGGGAAGVGGQRGVRGVQVPGRAGHAVRPLGPPLLQGLLHPRVRGLHLRQRAVAVRGLPRARDRAGLRGADGAEPAEHAGGHGVLVRQLPGDGVRRALPGPRLGHLLPRRLRLHPHGRHHRPQRVVQLGRPQPRADGVLRAVQVHGPGRDLCRPGGVVARAHRRRGQALHLAQLHRWHRVGQAVAVNLAAAHATTPHTVKKQSKTVYTDFILSV

SEQ ID NO: 69348 - protein, 262 aa, Zea mays
  Clone ID: UC-ZMFLB73046G08_FLI.pep
ASIEQQRADADVLKLLADQEREKEDVLARMLQLEKELHEKQQLELEVERLNGTLQVMKHLEGDDDGGDIHEKMEKLSERFEREKKRLEELSGDLVRKERESNDELQEARKELIKGLEEELNGRTAIGVKRMGELDEKPFQNACKTKYGKDEYEIKAAELVTSWQDELKKPSWHPFKMVEVNGENKEILDDDDTKLKFLWIEYGDDVCNAVKTALMEINEYNPSGRYVVPELWNFRKGRKATVKEVLKYLFSQMDTTTKRRRG

SEQ ID NO: 69349 - protein, 127 aa, Zea mays
  Clone ID: UC-ZMFLB73045H11_FLI.pep
GDKLRKLCQSNGVHLSAFSPLGSPGSPWINGPSVLKNPIVVSVADKLQKTPAQVALRWGIQMGHSVLPKSANESRIKENIDIFGWSIPEDLMAKFSEIKQVRLLTAEFVVHPQAGYNTLEDFWDGEI

SEQ ID NO: 69350 - protein, 326 aa, Zea mays
  Clone ID: UC-ZMFLMO17023F11_FLI.pep
PDRQWPPPAASKEEARPSRLRLVRSWTRGTSGRRTPAASSSASTSQASGNKISGCKSTAPAASPSVASAPTPPPTPGTPASTRSSSCPPPPTSTTSPAASTLESSRSPCPSACPRPQRKTSSRPRSPRMPLPLPPPSRWREPRAPNRSRSSSTRRRRRQRKISPRRPPQHLHRQPTRRQRKISPRPPPQHLHRQPTRRSSPRRRPTQRARRRIRPKAWRSGAPRKSGPMQMLQLRRSTRERHAVASRSAWRRSSRGWRAPSGRRALWRRSRGTGRWSPSPSPPSPSASSSPAGSSPGPAGTRSQPCMHLSFVTIVIALVTTTNYVY

SEQ ID NO: 69351 - protein, 198 aa, Zea mays
  Clone ID: UC-ZMFLMO17023G02_FLI.pep
VDSSGDKSKRSVVEIKGRFSVTSENVDLAKVQEGPLSSLSRKSPEGSLLRKSASTGDCLINTKLMRNANQLKEFCNSSVSSSVLIPHLNNLVQQTMFQQDVIMNLLSNLQQDEKVDRTQPGISSQVRTMENGKVADTANSEKERSLLVKISELQSRMITLTDELIAAKTKHVQLQQELNALYYREEIEDVRDEDIEET

SEQ ID NO: 69352 - protein, 119 aa, Zea mays
  Clone ID: UC-ZMFLB73042B04_FLI.pep
LLFNLYTISLVYMPSVYKLEARIFTVFFSKKSKQYNKSRKILLDSNHKKATIMQANKWYITKKIQSFVTLKRRNFQSNTYFLKAAIMLVVMICFHCILMLCWWSHHSSYGFFLEGDLDR

SEQ ID NO: 69353 - protein, 254 aa, Zea mays
  Clone ID: UC-ZMFLB73022E07_FLI.pep
IMFETFNVPAMYVAIQAVLSLYASGRTTGIVLDSGDGVSHTVPIYEGYALPHAILRLDLAGRDLTDSLMKILTERGYSFTTSAEREIVRDIKEKLAYIALDYEQELETAKNSSSVEKSYELPDGQVITIGAERFRCPEVLFQPSMIGMEAAGIHETTYNSIMKCDVDIRKDLYGNIVLSGGSTMFPGIADRMSKEITSLAPSSMKIKVVAPPERKYSVWIGGSILASLSTFQQMWISKEEYDESGPAIVHRKCF

SEQ ID NO: 69354 - protein, 465 aa, Zea mays
  Clone ID: UC-ZMFLB73021E12_FLI.pep
KTSPLAKKLVRPCLSLHSTMAAPPATAPATARCLSVAKSCWAAERSSSSFVLSAPATGLRQSGSRVLSIRAKVATGLQRACIADDGAERPWKLSDARLVLEDGSVWTAKSFGASGTQVGEVVFNTSLTGYQEILTDPSYAGQFVLMTNPHIGNTGVNPDDEESNQCFLGGLIIRNLSICTSNWRCKETLEKYLIKRNIMGIYDVDTRAITRRLREDGSLIGVLSTDQSLTDNELLEMAQKWKIVGVDLISGVTCDAPYEWSDKTDSEWEFKRDPSSETFHVVAYDFGIKHNILRRLTSYGCKITVVPANWPASEVLNLKPDGVLFSNGPGDPAAVPYAVKTVQEIIGKVPVFGICMGHQLIGQALGGKTFKMKFGHHGGNHPVCDLRSGRVDISAQNHNYAVDPESLPEGAKVTHVNLNDNSCAGLQYSKMKLMSLQYHPESSPGPHDSDTAFGEFIELMKSNRL

SEQ ID NO: 69355 - protein, 444 aa, Zea mays
  Clone ID: UC-ZMFLMO17029G01_FLI.pep
EFMNKIGLMLPQKYSQLGSDGLLAFVNNFLKEHFLPAIFVDYRKCVQQAISSPAAFRPRVHATSAYSSSVELGRPVLQGLLAIDIIAKEVLGWVQLMPNYATELVEYVRTFLERAHERCRASYMEAVLEKQSYILLSRNDIESLMRLEPANISLQNSTGEHDNNATGAEAVEVEIELSDLLLDMCPIKQENLIHDDQKLILLASLSDSLEYLADSVERLGESFISPPTTSESINHSHGRHARSSSAIPKSLASLANEYRRLAVDCVRVLRLEMQLEAIYHMQEMTKREYVEDQDAEDPDDFIISLTTQIARRDEEMAPYITESERNYIFGGISSVAANASIKALAQMKSINLLGVQQICRNSIALEQALAAIPSIDSEAVQQRLDRVRTFYELLNLPFESLLGFIAEHEYLFSAKEYLSVLKVNVPGREIPADAERRISQILGH

SEQ ID NO: 69356 - protein, 128 aa, Zea mays
  Clone ID: UC-ZMFLMO17029A07_FLI.pep
RGRGRGKADKKVYSLPGQKFDPPEEREPLRIFYESLSKQIPSSEMAEFWLMEHGMLSPERARKAYERKQKRQQQVRMGTPIKSCAVRKDNKPESSKKPGIMDSKAKRRVDYSEDDDDDFIVKMKRSRG

SEQ ID NO: 69357 - protein, 108 aa, Zea mays
  Clone ID: UC-ZMFLB73009C09_FLI.pep
VTPPFGFFLFHMYICTRVNSSTRRHTTWFSGGRIRVSTEHHQNSEAIDLSPHLDTIEGIQRRWRGASTPLLVLYTIEGRWMTLAGTSTYITHSTRGKKTSSSQGVASS

SEQ ID NO: 69358 - protein, 162 aa, Zea mays
  Clone ID: UC-ZMFLB73009C10_FLI.pep
RHVKVNSNAPVCEDFLKGYCADGDECRKKHSYVCLVFEATGECPQGSRCKLHHPKKKSKSKRSKVDTVQNNSWGRYFETNVGHGSGARIVYLEEDERQKPEQVSGEEFADFIELGAGIEVPEDADTSDDIQLMELDLGNLEVQADNNDAIIKPLRIMRTARV

SEQ ID NO: 69359 - protein, 813 aa, Zea mays
  Clone ID: UC-ZMFLMO17092H10_FLI.pep
DAGIDQETYLLYLVDDLLQKPTVSELAEGHAILDDGRALLDTGIIAATGKAWQDLVTLAHSSSHSVVKELMSCNKELSLYEDLVAAWVPAKHVWLRNRPLGKELISALGKQRLFSFCSYDFSFLHFGTSAEVLDHLAGSYSGLVGRRHMCSLPETTACDIAATAIILCTKISSGVSIGEDTLVYDSVLSGRIRIGSQCIIVTVNIREFDGSACFTLPDRHCLWEVPLANSAGRVLVYCGLHDNPKVSIQKDGTFCGKPWINVLEDLRIQDTDLWGSTSQDKCLWTAKLFPVMSLPEMLNVGMWLMGSECDPDGRIASLWQKSQRISLEELHRAIDYRQLCTDSSKHQANLAADIAKACMNYGLLGRNLFQLCEEMLQKDTCLAVYEELLSFFPSHSEQYPGVLPQSREYQVKMDLLRASGDLSTACTVEEKVWASIASETATAIKYGSKEPSSGKMSSNHESLHPRKTVVELPVRVDFVGGWSDTPPWSLERPGCVLNMAISLQGSLPVGAMVETTEDHLGVRIEDDAGRHVYIDNLASISSPFKENDPFRLVKSALIVTGILGHEILSKSGLNIRTWSNVPRGSGLGTSSILSAAVVKGLFQVMEDDESDDSVARAVLVVEQIMGTGGGWQDQIGGLYPGIKCTQSFPGQPLRLQVVPVLTTPQLIRELEERLLVVFTGQVRLAHQVLQKVVTRYLRRDSILISSIKRLAELAKIGREALMNGELDELGGILLEAWRLHQELDPFCSNRPVDELFAFADPYCCGYKLVGAGGGGFALLLAKNPSCARELRRALEESDTFDVKVYDWNVAMPR

SEQ ID NO: 69360 - protein, 348 aa, Zea mays
  Clone ID: UC-ZMFLB73002B07_FLI.pep
ASFPARGAVAVAAKKAAAAVATPKQAKGAVPIGSETAAGRAVEKKASLARTPVARRPMLVKSGSVDAAAPNDTVVAVQESDENTDKPLKQTQPGKTEDDVHSTTSSTNTPRAAARKSAAAAAAGFSFRLEERAEKRKEFFQKLEEKIHAKELEKTNLQEKSKESQEAEIKLLRKSLTFKATPMPSFYKEQPPKVELKKIPPTRARSPRLGRHKAASSATAPAPADGSVSCGSPRSTANSGKVNEIMENIKPRVPARKSIQRPVTKTPLQVSATTKAEPRPIATKPKIANSKPKVSRAKVAQAQGNSAEVPPSEPSASEELVVEHGVGEATGPDLASQLVASNEVPVHG

SEQ ID NO: 69361 - protein, 319 aa, Zea mays
  Clone ID: UC-ZMFLB73002C03_FLI.pep
SSVTLTVKGTLVASPNRADWSDNDRRHWIVFRSIDKLTVNGGGAIDGNGEKWWPHSCKINKALPCKEAPTALSFHYCVDLKVEDLKIVNSQQIHMSVEDSANALLARLSITAPGTSPNTDGIHITRSKDVRVTDCKIKTGDDCMSIENGTHNLHVSKVNCGPGHGISIGSLGDDNSRAEVSGITIDSVQLHGTTNGARIKTYQGGSGYAKDITFQNMVMYDVKNPIIIDQNYCDKAKPCGEQESAVQVSGVVFKNIRGTTSTKDAIKMNCSENVPCQGITLQNIDLKMQDGKGNTRSTCQNAKWTEFGTVRPQPCTAIK

SEQ ID NO: 69362 - protein, 258 aa, Zea mays
  Clone ID: UC-ZMFLB73005D04_FLI.pep
AEGGSRTPVKCMPCSRTYIGGAHLDTLTGQLAQRRDIVEMSDSGELCKGLADDVEVPMLSKLRRQLVGKGSHRRLVYSVDFGAHEGAMVNFLDHYDAHLVIFEKLPDGVFADPFELQHFVERKVFVDVAVFGDANLELPTALSNGSSVEIHFDLRRIISINCNLVIEMPLHARYPPLDASGYATVEFGSADLFLRYRKKDIHSGSCLWVINNLKAAPLEKAAWRIPCGDEAHIGFVSSITFLSALVCSMSIVLASLIF

SEQ ID NO: 69363 - protein, 77 aa, Zea mays
  Clone ID: UC-ZMFLB73006C06_FLI.pep
IILHTGDILVYMYFSVFLYLILEEQTVQPMMAGGRVLDPFCTRLDPTMVEALVCTKDWIAGARKGYIVVPYIYLQFN

SEQ ID NO: 69364 - protein, 163 aa, Zea mays
  Clone ID: UC-ZMFLB73007D02_FLI.pep
EDHRDRRRGGDVRPEADPGRLERRGRPHQLQHRVHEEGGRVRGDQGGHREAEAAAQGAHRGLRRGQRAPAHRQARDRRHQHLQLGTLLIVQLLYRGGSAKPVCLPTVVALCRCRESPTVASVRVGRETEQNGKGYFEDRRPASNMDPYVVTSMIAETTIVWKP

SEQ ID NO: 69365 - protein, 107 aa, Zea mays
  Clone ID: UC-ZMFLB73047C10_FLI.pep
ARDHKCHISSNLYSLRFQLNMFIATMKPFCCLLSAAVFGVFACLYGLRADRGLQDLLGPRNRSPPATSLLPFVSGLPLYLHQSEGSEATPLGGEERNCEPCVGEVED

SEQ ID NO: 69366 - protein, 399 aa, Zea mays
  Clone ID: UC-ZMFLB73046B01_FLI.pep
SVTTHTFHCNYQELEMDDDNGLELSLGLSLGGSSGKAKARDAPLEPKAEPQVEESSSKGGLQTPDAPSGKFYQKSADNHEQNSKQRHSPVAPQFGNFWGQPGNSSGPVVDGSVEPVSHQPQLSSYQDGRMPINSGNNSEEQKPVSGNHKLPSEEMNFQKKHQTASDQPDAFSKSSDGGAKNAPISISTDDGSTGENEDVAESEAEGSNSWLVAQREDSAKGSVVNKGTDRKRSADAAADGFKGKRQPSFSGSESSSGKLTPGNLISMQASNVVALPYQVPGQVSGPPVLTNAPNFHPVCTVQLRPPTNGGLAVQTMGSASQVALVTQQSSYQHLKRALHGHLVLHLRLCLLLLQKTKLIKQEPSKLTMARSPRRQVLPRLLMLKMRKRLIEDSLLWVLP

SEQ ID NO: 69367 - protein, 395 aa, Glycine max
  Clone ID: UC-GMRONOIR046G03_FLI.pep
GFGRVYSGTLEDGAEIAVKMLTRDNHQNGDREFIAEVEMLSRLHHRNLVKLIGICIEGRRRCLVYELVRNGSVESHLHGDDKIKGMLDWEARMKIALGAARGLAYLHEDSNPRVIHRDFKASNVLLEDDFTPKVSDFGLAREATEGSNHISTRVMGTFGYVAPEYAMTGHLLVKSDVYSYGVVLLELLTGRKPVDMSQPQGQENLVTWARPMLTSREGVEQLVDPSLAGSYNFDDMAKVAAIASMCVHSEVTQRPFMGEVVQALKLIYNDTDETCGDYCSQKDSSAQESDFRGDLAPSDSSWWNAGGLTPRITYGQASSFITMEYSSGPLEEMENRPFSTSSLIGDEISLPIRHGNRSGPLRTVRNKLSLYRFTGSRSEHGGPSSKPNWNDGYWV

SEQ ID NO: 69368 - protein, 273 aa, Glycine max
  Clone ID: UC-GMRONOIR048B12_FLI.pep
LGLDPTVANIVHQFIVDGIGSILPSGLQKVALDGIFGIGRAQVSEFVLNESNPLGSSRLAKLRHIFEEGKSLQLQFPAEDLGFRYLQGALMPESKDVESPPEVLTGRRRDYTPSAQPGSRLPHIFVRVNPLSEETVSTLDLVSGDKVEFILIIAPVEESYHLAREAFKVAEEQEIFLKVCIFWSTDSVEGLEKGSKAALSPWKNYLDVVEVWSSTSNWWDMCNMTNRGAILVRPDEHIAWRTSSGLAGDPRVEMQRVFSAILGVHGSNKQIHG

SEQ ID NO: 69369 - protein, 297 aa, Glycine max
  Clone ID: UC-GMRONOIR053G02_FLI.pep
RFYAVELVLALEYLHNLGIVYRDLKPENVMIQDNGHIMLVDFDLSKKLNPKSPHSLSQNSSPSPNSKTKQTRKQRLMRFYSFCNSGILPCDSDSEPPLSSVNSVRHTESDLVEKSNSFVGTEEYVAPEIVSGKGHGFSVDWWSYGVVLYEMLYGTTPFKGSNRKETFYRILMKEPELTGEKTALRDLIGKLLEKNPDRRIQVNEIKGHNFFKGVKWDTVLHIARPPYIPENEVENKVGFSKSDVEVFVDNVFFPTGDDGGEKTKTLLDNNNNNNNNNNNNNNNNKVWIDELSHVPIG

SEQ ID NO: 69370 - protein, 784 aa, Glycine max
  Clone ID: UC-GMRONOIR071B03_FLI.pep
CFLSRSLQTIMDTPDRSKINTPLSQFEDSPVFKYISNLSPIEPVKSVHVTQTFNSYSFSSPPSVFTSPHGNCHKESRFLRRHNLLETSKPKVSSEDVNNVYSCEETPADSAQACHESSEQQENTAQKISVADASIEPCNENKNPNISIELPQVLKYNLGSPGYEPLLYGDEANSLLELPGNGKPASDVASVPEGSEKDSIEGEMHLPGLCQIEEAKVEGQDCGVDSLITEASDLLMFSPPEAFKGLNKQLNPSIELSNIMTVIPQFATNDGQQMHIGNAVASGSEHEIEDHPSESAAATGTSQRQDNLGNLALVTSNPSEKMDNKLVYVTHRGIRRRCLDFEMASVQRRNPADNSNTNSSTAKSEERNVSNEKQLLPTKHSGDSRRCVLPGIGLHLNALASLKDCKNIKIDTLSSGRQPNLLSSPSSVQLSPSQEHQLSLVPASVERDLEPLENEVQPGEDCTQSLVLVQMAGEDFQQNSPKKKRRKLEPAGEGESCKRCNCKKSKCLKLYCECFAAGVYCIEPCACRDCFNKPIHVETVLQTRQQIESRNPLAFAPKVIRSSDSVSEIGDDLNKTPASARHKRGCNCKKSSCLKKYCECYQGGVGCSVSCRCEGCKNTYGRKDGSVPSGLEAEPEEETEACEKGVVENASWKTETQNTEDHPDQSLATTPLPLSRSLLPLSFSSKGKPPRSFVTTISSSGLFVSQKLGKSNAPRSQHQPKCVKPLQTVPDDDSPVTCIKTSSPNGKRISSPNCDVGSSPTTRRGGRKLILQSISSFPSLTPHH

SEQ ID NO: 69371 - protein, 495 aa, Glycine max
  Clone ID: UC-GMROPIC0001B11_FLI.pep
KMTRVTRDFGDTMQREAVPAVSSDVVFASARFPNYKIGANNQIMETKGDPKVISMKEVVARETAQLLEQHNRLSVRDLASKFEKGLAAAAKLSEEARLREAASLEKHVLLKKLRDALESLKGRVAGRNKDDVEEAIAMVEALAVQLTQREGELIQEKAEVKKLANFLKQASEDAKKLVDEERAFARAEIEDARAAVQRVEEALQEHERMSQASGKQDMEQLMKEVQEARRIKMLHQPSKVMDMEHELRALRAQLAEKTRQYLRLQKELTRTKKGGENVPHLYELEGNETLGSYLQIQPCSDNAPEVSRCAIQWYCVSSDGAKKELISGATKSVYAPEPFDVGRILQVDIISENEHITLSTAGPIDPAAGLGTYVEALMRKHDAEFNVVVTQMNGSHHPTESIHVLHVGKMRIKLCKGKTTIAKEYYSSSMQLCGVRGGGNAAAQALFWQPKQGHSFVLAFESERERNAAIMLARRFAFDCNIMLAGPDDRAPLGT

SEQ ID NO: 69372 - protein, 748 aa, Glycine max
  Clone ID: UC-GMROPIC0001F04_FLI.pep
CGGLSDSSCCIAMATDSSFEGLALDPSKCSKLSMEEKRELVYEVSNWSHGASEMLQSWSRQEILQILCAEMGKERKYTGLTKLKIIENLLKIVSEKKSGGNETATDPEPQSSPAPGQKPAKRQRKSENPSHIPVPATSVPVNNGGDSINTTFCKNSACKATLNQSDAFCKRCSCCICHQYDDNKDPSLWLICSSENPFPGVSCGLSCHLECALKHDGSGIGKDGERPKLDGGFYCVSCWKINDLLGCWRKQLMVAKDTRRVDILCYRVSLSQRLLQGTEMYEELYKIVDEAVKKLEPEVGPLTGSPVKIGRGIVNRLSSGPEVQKLCGFALESLDSLSKRILPLSPKPTNQDAYLLAPNMLRFEDVTATTLTIILGSEEPSGEILAGYTLWHRKVDDVDYPMDPTCTSLLPNRRFSVSGLIPGTEYSFKVVSNDLRESGMCEVQVSTEHGEEEVPNCSATERSQSPVTNCSSLSNPSSVEDETNNCNPYSDLTDNRADHYPSYHKDSNKLASGNLSNDAINCSNLGGAGLPPDADSLSDKQHAGGTTASIPSSDVLKLENKHSPEEQITEDMSTDDGLISPALTGRECVPLVGSSEGGLPNTPCKLETLKDGPGKNKRSKSSGKDQENVSGKREGPQDGSTSKKRSGERQEEGRVANGFSDRDFEYYVKVIRWLECEGHIEKNFRQKFLTWYSLRATPQEVRIVKIYIDTFLEDPASLAEQLVDTFSECLSSKRTSVVPAGFCMKLWH

SEQ ID NO: 69373 - protein, 500 aa, Glycine max
  Clone ID: UC-GMROPIC004A12_FLI.pep
ALTAGQAYEAMNNAGFLDSNMIVVLNDNKQVSLPTATLDGPATPVGALSSALSKIQASSEFRKLREAAKTITKQIGGQTHQVAAKVDEYARGMISASGSTLFEELGLYYIGPVDGHNIEDLVTIFEKVKAMPAPGPVLIHVVTEKGKGYPPAEKAADRMHGVVKFDPKTGQQFKAKTSTLSYTQYFAESLIKEAENDKKIVAIHAAMGGGTGLNYFHKRFPKRCFDVGIAEQHAVTFAAGLAAEGLKPFCAIYSSFLQRGYDQVVHDVDLQKLPVRFAMDRAGLVGADGPTHCGAFDIAYMACLPNMVVMAPSDEAELMHMVATAAAIDDRPSCFRFPRGNGIGATLPLNNKGTSLEIGKGRILVEGSRVAILGYGSVVQQCRQASEMLKELGIDVTVADARFCKPLDTGLIRLLAKEHEILITVEEGSIGGFGSHVSQFLSLSGILDGPLKWRAMMLPDRYIEHGSPQVQIEEAGLSSKQIAATVLSLMERPNEALLFK

SEQ ID NO: 69374 - protein, 501 aa, Glycine max
  Clone ID: UC-GMROPIC004E10_FLI.pep
TNRMVKSCCVMCLCLILLHIFLRFVPIQSAPESAIVTQIPGFSGTLPSKHYAGYVTVDKSHGRNLYYYFVESEGKPSEDPVVLWLNGGPGCSSFDGFIYEHGPFNFEAAKTRGGLPTLHLNPYSWSKVSSVIYLDSPAGVGFSYSENKTDYITGDIKTATDSHAFLLKWFELYPEFLSNPFFIAGESYAGVYVPTLASEVVKGIDAGVEPKLNFKGYMVGNGVTDEQIDGNALVPFVHGMGLIPDELFEEVNRECNGNFYDPTSANCSSKLSKVDELVDEINIYNILEPCYHGTEAEKITESYIRMPSTFRKLGETERPFPVRKRMFGRAWPLRAPVRDGIVPTWPQLMNSKSAPPCTDDEVANSWLNNEAVRTAIHTAQKSVVSSWDLCTDRIYFDHDAGSMIKYHKNLTSKGYRALIFSGDHDMCVPYTGSQVWTRSVGYKIVDEWRPWSSNGQVAGYTQGYDKNLTFLTVKGSGHTVPEYKPREALDFYKRFLAGLPI

SEQ ID NO: 69375 - protein, 453 aa, Glycine max
  Clone ID: UC-GMROPIC006G11_FLI.pep
KSGTTSIIGIVAGVVSGVVLISLIILFLIVFFRRKTITTPKDYNKSKSSATSKWGPLSFTTTKSTTTTKSSLPSDLCRHFSLPEIKSATNNFDDVFIVGVGGFGHVYKGYIDNGSTPVAIKRLKPGSQQGAHEFMNEIEMLSQLRHLHLVSLIGYCNENNEMILVYDFMARGTLRDHLYNTDNPPLTWKQRLQICIGAARGLHYLHTGAKHTIIHRDVKTTNILLDDKWVAKVSDFGLSRIGPTGNAKAHVSTVVKGSIGYLDPEYYKRQRLTEKSDVYSFGVVLFELLCARPPLIRTAEKKQVSLADWARHCCQNGTIGQIVDPTLKGRMAPECLRKFCEVAVSCLLDDGTLRPSMNDVVWMLEFALQLQESAEQRENTNIVDNEINERREEEASDDLFSTGTSVGQVSDFNKSSGVVSVSTDSEELSSSYKESDKLMSGTVFSEIVDPKPR

SEQ ID NO: 69376 - protein, 383 aa, Glycine max
  Clone ID: UC-GMROPIC011A12_FLI.pep
FLFSFWVLHFPSSSASAFRRFSSRRKMDVRRRPIPPSGDRRQTQKLKNTATTDSQTLLPLYLTNALFFAVFFSVAYFLLHRWREKIRTATPLHVVTPAETAAIVSLVASAVYLLGFFGVASRASLDELSDDEIILKEDSRAPGPCAAALSDSCSLPNNKIQDQFPLPPRAVHSLAKEKQHIPSPPQVDSPVSVSVSVSSSSDDEDEEIVQAVVSGSIPSYSLESRLGDTRRAATIRHEVVQRLTSRSLSGLPLEGFNYDSILGQCCEMPIGFVQIPVGVAGPLLLDGKEFTVPMATTEGCLVASTNRGCKAIYVSGGASSVLLRDGMTRAPVVRFPSAQRAAQLKFFLEDPLNFDSLASFSISQADLPGCRIFSVLLRARICT

SEQ ID NO: 69377 - protein, 381 aa, Glycine max
  Clone ID: UC-GMROPIC011D05_FLI.pep
LLPVTATPISTLTKTLPLSNHYLLSYKFKFNSLVRHCSLSDREEQRWLREEQRWLRDERRWLREEQRWARERDQLLREIADLNLQIQALERRLSMRDLSSPASVSDAVANVTLLLKVLKDKNLVLESVSSLRNTEAEEEEEKKQFEEVVEHVKEVVMVEESARVEKRISLRIGSEGEEVRQMQEALLKLGFYSGEEDMEYSSFSSGTERAVKTWQAALGAPEDGIMTAELLERLYLEIRNKGTGSATQDKQSTTVLPKEVENGAAVASVAENSEVQQKDVKNDKETEVSHRGVFLLGENRWEEPSRLVARDGVDKSKNKDMTTKCLQCRGEGRLMCTECDGSGEPNIEPQFIEWVEEGTKCPYCKGLGYTVCDLCGGKTMV

SEQ ID NO: 69378 - protein, 192 aa, Glycine max
  Clone ID: UC-GMROPIC012G10_FLI.pep
QSHLPHHENKLVLQHQIHPSKGPKLLSIRVTPNTQRRRQTHHHHASTHMRRTPKVGPPSLHQHLPHLNNQIMVPLSDPFNPTLEPFHELHNRRNHQLRAVVPVPGPRALHGQPLPVLVRHHGMVQVTCLRGGTCVEERHGGRAEEPLVQVAGVEVRSDLLHVHARAPNRVCRVHEYLLHPSYKMMIFSVNHY

SEQ ID NO: 69379 - protein, 170 aa, Glycine max
  Clone ID: UC-GMROPIC013F07_FLI.pep
LRPQQIPFLHLLLQHRCKLYFPFLSFLPEKKMANAASGMAVHDDCKLKFLELKAKRTYRFIVFKIEEKQKQVIVEKLGEPANGYDDFAASLPADECRYAVYDFDFVTEENCQKSRIFFIAWSPDTSRVRSKMIYASSKDRFKRELDGIQIELQATDPTEMGLDVFKSRAN

SEQ ID NO: 69380 - protein, 415 aa, Glycine max
  Clone ID: UC-GMROPIC019B11_FLI.pep
SRGTMNALAATNRNFKLASRLLGLDSKLEKSLLIPFREIKVECTIPKDDGTLQSYVGFRVQHDNARGPMKGGIRYHPEVDPDEVNALAQLMTWKTAVANIPYGGAKGGIGCDPAELSISELERLTRVFTQKIHDLIGIHTDVPAPDMGTGPQTMAWILDEYSKFHGYSPAVVTGKPIDLGGSLGRDAATGRGVLFATEALLNEYGKSVSGQRFVIQGFGNVGSWAAQLISNKGGKVVAVSDITGAIKNSNGLDIPSLLEHSKVHRGVKGFNGSDPIDPNSILVEDCDVLVPAALGGVINRENANEIKAKFIVEAANHPTDPEADEILKKKGVVILPDIFANSGGVTVSYFEWVQNIQGFMWDEEKVNNELKTYMTKGFKDVKEMCKTHECDLRMGAFTLAVNRVARATVLRGWEA

SEQ ID NO: 69381 - protein, 440 aa, Glycine max
  Clone ID: UC-GMROPIC020D03_FLI.pep
GEGSLVGLDMASGEGRRRHHDLVPLAALLKREMKSEKMEKPTVRVGHAAQSKKGEDYFLIKTDCQRVPGNSSSSFSVYAVFDGHNGNAAAIFTREHLLNHVLGALPRGLGRDEWLQALPRALVAGFVKTDKEFQSRGETSGTTATFVIVDRWTVTVASVGDSRCILDTQGGAVTSLTVDHRLEENIEERERVTASGGEVGRLSIVGGAEIGPLRCWPGGLCLSRSIGDMDVGEFIVPIPYVKQVKLSKAGGRLVIASDGIWDALSSEMAAKSCRGLPAELAAMQVVKEALRTRGLKDDTTCIVVDIIPPDNELPPTPPPPKRNKLRDLLSFRKRSRDSASKLSKKLSAINIVEELFEEGSAMLAERLGNDDNLNSGQSTSGIFVCAVCQVDLAPSEGISVHAGSIFSTSSKPWEGPFLCFDCRDKKDAMEGKRPSGVKVS

SEQ ID NO: 69382 - protein, 361 aa, Glycine max; identical to SEQ ID NO: 44088
  Clone ID: UC-GMROPIC022A03_FLI.pep

SEQ ID NO: 69383 - protein, 364 aa, Glycine max
  Clone ID: UC-GMROPIC030A08_FLI.pep
NSHKITEYFEAIPGVPKIKEMYNPATWMLEVSSVAAEVRLGMDFAEYYKTSSLFQRNKALVKELSTPPPGATDLYFPTKYSQSTLGQFKSCFWKQWLTYWRSPDYNLVRYFFTLACALMIGTVFWRIGKHRESSADLTMIIGAMYAAVIFVGINNCQTVQPIVAVERTVFYRERAAGMYAPLPYALAQVFCEIPYVFFQTVYYSLIVYAMVSFEWKVEKFFWFFFVSFFSFLYFTYYGMMTVSITPNHQVASIFAAAFYGLFNLFSGFFIPRPKIPKWWVWYYWICPVAWTVYGLIVSQYRDIEDPLFVPGSTTQNFTVKGYIEDHYGFKSDFMGPVAAVLVAFTVFFAFVFSFCIKALNFQTR

SEQ ID NO: 69384 - protein, 186 aa, Glycine max
  Clone ID: UC-GMROPIC034A10_FLI.pep
TVSMADKAVTIRTRKFMTNRLLSRKQFVVDVLHPGRANVSKAELKEKLARMYEVKDPNTVFVFKFRTHFGGGKSTGFGLIYDTVENAKKYEPKYRLIRNGLDTKVEKSRKQMKERKNRAKLVSNENYEKGLIYPPFSNIREISANIAASVAGKAYELGLATRLPRPQNLVKYAESCMYSPVYRNYR

SEQ ID NO: 69385 - protein, 96 aa, Zea mays
  Clone ID: 701185694_FLI.pep
EKQQNLESSSIQFPPVYSIQLELTFRGYKYKDWNLQRNILAGLPPSQTGTMFVDGRLYRFYNALSAFSKGFSLLPAHVLHYSLSRKQTAGLEIQIS

SEQ ID NO: 69386 - protein, 179 aa, Zea mays
  Clone ID: 701185934_FLI.pep
VRFLCLCLRYFSWLLAELESALDESAKALAEALAGAAEQRDADLAAMSEAVSDFYRVLGSGDVPSGSSPQSRLRALGDHARGRVREALHHGVRRAFAVLASHYVVDLERVSEGYCLPDEDDAALAEVQRLDAVAAGPSAVLATTFEAEILPPATSPEAEMDPTDGRDGAEGAAPSQGGA

SEQ ID NO: 69387 - protein, 151 aa, Zea mays
  Clone ID: 701159740_FLI.pep
WIQVLSTSLSTSNFRGTIRTIIVSHQGAWDLRLAISRRVLKEICTSYWAPGMRRRFSQKNFLWSSCGLAVSSTNCFLTCIENCSLDFLSICGDRSTVYKARDSGSPTFFVNGRSPATWLLWLIKDFITTRIFAAMAPQQARQNLCHCLQIP

SEQ ID NO: 69388 - protein, 311 aa, Zea mays
  Clone ID: 701166809_FLI.pep
STAQTTPFTCTQTHRPDTNPQTGALHEQLTWYWCSASGRRSPPRRSQALPPHRLPSHLSLQSRVRLSSAPLTASSFCKKQKVVLFQCTCCCGGLHGLRDPLPAGERRDSLARFGHHLAGRRHALRYRAPDVLLAALHGAGDRLAERAVLVARTELLGDVPRDGRSLGLPAGAGGGRRGGVGVLLRVGSRRRRAGRLCGLLHLARHGGADAGDLLVHCARQLLAVLRGARSRGLDLVSIARRPRRAVGRVRGSRGAFPLLNAGVRYRRRLAVCAFRLGRALLRTEVGRDGSADTGDLLVDGGRQLPAVPSGA

SEQ ID NO: 69389 - protein, 411 aa, Glycine max
  Clone ID: UC-GMROPIC107H01_FLI.pep
FNPKSKSFMSDSVGRASAETTSEFYFAIISNAATVTSHAASKLMGTTDTTLETWSNFITLSPYRPFGTYYFCTGNGKSGKKIVITNSNAVLQVLFFSAQLSTEAEAAQVPYRSLRDHTIYGTELQQMGPQNVVHLDQHQLQNLPLSEDGAGGSNATINTALNDLGLIPRARLCLRAAAEWEARRTDNENKIKEKKDFVAKKLDVLREYRKMYKDKRVGFYDGFREHKQGEDDFKANVTRLELAGVWDEMMEKVRSYELPDEFEGNKDYIDLGTELRKLMEPLDIANYYRHGRNYEDSSSSYMIKGRPKRYRYPQRWLEHAERKSHESLSASCFWAEVEELHYKTSRSSNIVSLDQQFKERIEKLEIQIKAWSDRKELDEDVFLEGSTLVKWWKALPQQHKQHSCIKTLIRE

SEQ ID NO: 69390 - protein, 121 aa, Glycine max
  Clone ID: UC-GMROPIC110D02_FLI.pep
SWNNPVCHFLGSKAILWVPNLSVDTDYKTNVCCSSMHGYDFWVIGHGFGQWTDASRKTYNLVDALTRHTTQVYPKSWTTILVSLDNQGMWNLRSAICPTDQHCCLISPCILSTMRMRLCIK

SEQ ID NO: 69391 - protein, 565 aa, Glycine max
  Clone ID: UC-GMROPIC111B04_FLI.pep
PFSLLHLCTLTLSPATMNASIIDPLQGDFPEVIEEYLEYGCMKCIAFNRRGTLLAAGCNNGSCVIWDFETRGIAKILRDDECSSPITSICWSKYGHQILVSAADKSLILWDVMSSKKITRIVLQQTPLQARLHPGSSTPSLCLACPLSCAPMIVDLNTGNTTLLKVSVLETCNGPTPTPPSRNKCSDGITSFTPTAACFNKYGTLVYVGNSKGEILAIDYKNGDVRAVVPISGGSVVKNIVFSRNGQYLLTNSNDRIIRIYENRLPLKDEVRALDDLSENHNVLNNIENLKAVGSKCLTLFREFQDSITKVHWKAPCFSGDGEWVVGGSASKGEHKIYIWDRAGHLVKILEGPKEALIDLAWHPVHPIVVSVSLNGLVYIWAKDYTENWSAFAPDFKELEENEEYVEREDEFDLIPETEKVKGPDVNEDEEVDIITVEKDAAFSDSDMSQEELCYLPSTPSRDVPEQQEKCVESSSKLLDSNNTGSPLSEEAGPNGHMMNHASSPLEDDAGRMKRKRKPSEKVLELQAEKVKKPSKSSKLAKPKSKSLADQDNGNGFHGDGLYDE

SEQ ID NO: 69392 - protein, 501 aa, Glycine max
  Clone ID: UC-GMROPIC114G03_FLI.pep
GDSRRKYATGSMPTSNFQITYGFTECTPDLSLQECTQCLGEAIADIPVYFNGKTGGNVLKPSCRIRFDPYSFYGSTLKLDPDAPPPATPLPSPPTNNNSSSQGKSNTSRIIIAIVVPVASVVLVLILFCIYLRVKKPRKENEIKREEDNYEDEITFAESLQFNFDTIRVATNEFADSYKLGQGGFGAVYRGQLSNGQEIAVKRLSRNSGQGDMEFKNEVLLVAKLQHRNLVRLLGFCLEGTERLLVYEFVPNKSLDYFIFDPIKKAQLNWQRRYKIIGGIARGILYLHEDSRLRIIHRDLKASNILLDEEMHPKISDFGMARLVHMDQTQGNTSRIVGTYGYMAPEYALYGQFSAKSDVFSFGVLVLEIISGQKNSGVRHGENVEDLLCFAWRNWRAGTASNIVDPTLNDGSQNEIMRCIHIGLLCVQENVVARPTMASIGLMLNSYSLTLPVPSEPALLVDSRTRSLSEHDSMETRTSESANQSTPKSINEVSITELYPR

SEQ ID NO: 69393 - protein, 484 aa, Glycine max
  Clone ID: 701001054_FLI.pep
SETLEIHHLSESDKFPQPNLNSLTKSSLIQIRYSNPHPNSPHRLPSPKFPHRRRLPRPNASHRRFGYGANSGYRMGKILQETAKPSANSTSAYPSAAPGTTSSMSVTETVRGSHQFKITGYSLSKGIGIGKYMASDVFSVGGYNWAIYFYPDGKSVEDNATYVSLFIALASEGTDVRALFELTLLDQSGKERHKVHSHFERTLESGPYTLKYRGSMWGYKRFFKRTALETSDYLKDDCLSVNCSVGVVRSRTEGPKIYTIAIPPSSIGQKFGHLLESGKGSDVNFEVNDDIFAAHKLVLAARSPVFRAQLFGPMKDQNTQCIKVEDMEAPVFKALLHFIYWDSLPDMQELTGLDSKWASTLMAQHLLAAADRHGLERLRLMCEASLCEDVAINTVATTLALAEQHHCFQLKAVCLKFIATSQNLRAVMQTDGFEYLKESCPSVLTELLEYVARFTEHSDIMCNHRNDALLDGSDINGRRVKQRL

SEQ ID NO: 69394 - protein, 298 aa, Glycine max
  Clone ID: 701125911_FLI.pep
GHITEIVYKGQHSHPKPQSTRRTNSQSIHQPSSSCTNSGITDHSVVTLGNPQMDHFSIQEDSSASVGEEEFEQTPQTSYSGGDGDNLGPDAKRWKGDNENDGYSVSASRSVREPRVVVETTSEIDILDDGFRWRKYGQKVVKGNSNARSYYKCTAPGCSVRKHVERAAHDIKAVITTYEGKHNHDVPAARGSGKYNSNRNSQNSNISAPIRPSAVNCYSNSSSFTNSLYNNTRLPATGNQESFSLDKFKNPGSFGYSDLNRPMGSHTNHAQYTDAAYSRAKDERKDDSFLQSFLSKDF

SEQ ID NO: 69395 - protein, 326 aa, Glycine max
  Clone ID: 701126078_FLI.pep
KTKITHHPSVPKLQISHLLLLSLCKMNMSDMISCFNENAVNVSHSSCSSYSNNACISPSVTPSTQNSVSSVYKTTLSNQKQLLITVTWCKSHSNQGLNVTFGEENNNPLAPSFRLNTNSRFFRKKKGSKMLESEDSKVEVFWDLSKAKYDTGPEPVEGFYVAILVDAEIGLILGEDVAKKFKTRTLLGNVSLLSRREHCSGNAVYATKAQFCDTGTWHDILIRCSGENEGLKAPVLSVCIDKKTVIRVKRLQWNFRGNQTIFVDGLLVDLLWDVHNWFFNPASGNAVFMFRTRSGLDSRLWLEEKIAQKDKDRVEFSLLIYAYKNT

SEQ ID NO: 69396 - protein, 354 aa, Glycine max
  Clone ID: 700869793_FLI.pep
FYFIAMDKYEAVKDLGAGNFGVARLMRNKVTKELVAMKYIERGPKIDENVAREIMNHRSLRHPNIIRYKEVVLTPTHLAIVMEYAAGGELFERICSAGRFSEDEARYFFQQLISGVHFCHTMQICHRDLKLENTLLDGSPAPRLKICDFGYSKSSLLHSRPKSTVGTPAYIAPEVLSRREYDGKLADVWSCAVTLYVMLVGAYPFEDQDDPRNFRKTIQRIMAVQYKIPDYVHISQDCRHLLSRIFVANPLRRITIKEIKNHPWFLRNLPRELTESAQAIYYQRDSPNFHLQSVDEIMKIVGEARNPPPVSRPVKGFGWEGEEDLDEEVEEEEDEDEYDKRVKEVHASGEFQIS

SEQ ID NO: 69397 - protein, 274 aa, Glycine max
  Clone ID: UC-GMFLMINSOY109E03_FLI.pep
AICKLKSLLSLSKCNSALVSSSIRAFSSAQVIDVYTGPNGLLHGGKLLRPWLLLDSSTIDPQTSRNLSATVTNYILREKKGEWEKPFKLDAPVSGSVTAAEAGTLTFMVGGSEEAFLAAKPLLFSMGKSAIYCGGAGSGSAAKICNNLALAVSMLGISEALALGQSLGVSASTLTNIFNCSSARCWSSDAYNPVPGLMEGVPSSGDYNGGFASKLMAKDLNLAVESAKLAGCKYPLTSQAQKIYTELCSVGHEAKDFSCAFRHYYSGIDEPHDQ

SEQ ID NO: 69398 - protein, 527 aa, Zea mays
  Clone ID: 700074867_FLI.pep
VASAAEHRSRGTLSSIRREIDRSSIDMAGRGGASAAAPLLEKTAAAAESGGGCCYVDGCPGCAVDRHKAANPGIPYGNFIYVWIVTLCTALPISSLFPFLYFMIRDLNVAKRTEDIGFYAGFVGASFMFGRCLTSTVWGIAADRVGRKPVVVFGISSVVVFNTLFGLSVNYWMAIATRFLLGALNGLLGPIKAYAIEVCRPEHEALALSLVSTAWGIGLIIGPALGGYLALPAENFPTVFSPDSIFGRFPYFLPCLCTSIFAAVVLISCIWMPETLHKHKVHENRSRNIEALEARLIDSNEKVEESGSLDSKKSLFRNWPLMSSIIVYCVFSFHDMAYTEVFSLWAESDKKYGGLSLSSEDVGQVLAVTGASLLVYQLFLYPSINKVLGPIKSSRVAAILCIPILFAYPYMTYLSEPGLSIVLNIASVIKNNLGVTIITGTFILQNNAVPQDQRGAANGLSMTGMSFFKALAPAGAGIVFSWAQKRQHAFFFPGDQMVFFLLNAVELVGLLLTFKPFLAVPEQYDTR

SEQ ID NO: 69399 - protein, 231 aa, Glycine max
  Clone ID: JC-GMFL02220056C02_FLI.pep
TKLKEFTKNFPPELKGLAINNSEAIRTAHNSFARPEPFVPEEQKVATRDDDVYHFISYLPVDGVLYELDGLKEGPISLGQCSGGQGDIEWLKIVQPVIQERIERYSQSEIRFNLLAVIKNRKELYTAELKELQKRRERILQQLAASKSDRLVDNSSFEALNNSLSEVNAGIEAATEKILMEEEKFKKWKTENIRRKHNYIPFLFNFLKILAEKKQLKPLIEKAKQKTSSPR

SEQ ID NO: 69400 - protein, 151 aa, Zea mays
  Clone ID: 700097712_FLI.pep
LYTTPRPCSCMQRGRAQLWQTLAVGMVTQMAAYFFFASGVPFLGPAMAAPAPPMAATAAAAAASMTARRPSAAGLASVAASVAGSWQRSTLADLTTAKVPRREGAATATAAKDAIMVSDAIALRWVRGAAAGWWWWFVSCGRGSLALRWGA

SEQ ID NO: 69401 - protein, 107 aa, Zea mays
  Clone ID: 700089211_FLI.pep
TDETMQMSHSVFTIQVHGQLASETTKQIVKQVPRGGEIKKTSNLTTDGAQQNGGHRGGALFIGNKLASTTPSSETKKAKKGAHLALASWVRMSLAAETMLVRAGLTS

SEQ ID NO: 69402 - protein, 93 aa, Zea mays
  Clone ID: 700050963_FLI.pep
RRFLQSCTQTLFSHRQPKTDETHGRKTQDSLQTMVPSGWPNSLAMMSRPNKGEVSACCSKRDVAVVGATISWRSSSANTPAAAFLLPLSMLAS

SEQ ID NO: 69403 - protein, 75 aa, Zea mays
  Clone ID: 700154112_FLI.pep
ILIPARDGHDREHVTQMNMNPRSDHGSIMAGAVDRILFRRCYYIYTPRRRRPLDSRAPSPGRAGRLSCSCSRSSR

SEQ ID NO: 69404 - protein, 423 aa, Zea mays; identical to SEQ ID NO: 59058
  Clone ID: 700152365_FLI.pep

SEQ ID NO: 69405 - protein, 328 aa, Zea mays
  Clone ID: 700099206_FLI.pep
LIGPRTLGASLVAARCASSSAAAAVTAYDHASFVKEIAATDPPEHLNSLLNVLQARGEKIVSPGAKRGLIPCVVPLSESPAGDLTSLLRWPTAPTGMEMPVVEVRKHGLWFLAKNVKQYIHRILVEADLTGDDLWAAVGEAGKNLYAKGEFKESQVADLDVYLLKKVGLFPDVIERKTLRHLEKGDNVSALITGEFYTRDKFPGFGRPFVFNAEIFKRVGRTSEAKDSARVALKSPWWTLGCSYEEAAELAGWEDEQLEFIREKVTEEGKREDLKRGKAPEQVILDEAAFLMDLASVDGNWDEVVDRIAECYREAGLHDIANFIAYRE

SEQ ID NO: 69406 - protein, 232 aa, Zea mays
  Clone ID: 700049568_FLI.pep
SSSLLHSKIRAVYLLHICWSAESSLFFLFLVLTLAVLHEAASRVANPVPDLRRHGHHRQPRLPEQREVLHPLHLARRLLDDTQRDGVPELPDRPHVHGATGHRLLALALVPGPGDLDDADDAAGGGAGAGVVEQAAVARPHGAQAAHGLPVPDAVPRRDAARGARLVGPRPLARLRLQEPVLDAGGGSHDRGALGGGFRFPRHPVRGSLQDSDVQGSGGCRLAGGRKGSCDW

SEQ ID NO: 69407 - protein, 209 aa, Zea mays
  Clone ID: 700235237_FLI.pep
NRLKNATSLFSSYIITRSKGSTQALDHKITIHAPSREKLLKRKTTRDICDGAASWVKHWSQSPLLGIGLHLPLDGRHQLAVGLGPGFLHLEAPHVSGERLLDRLKQREPRHLEVSICDAVPQVRGAQPLERGLPHGDLPGLAKLRRRLAGHDEDGHGVRLELGVLLQRHVGVAQEREHLLRRRRDLEDLEKEAEAQVGGVLLHDGPRLE

SEQ ID NO: 69408 - protein, 269 aa, Zea mays
  Clone ID: 700222317_FLI.pep
EGYLMATLFYEPSTRTRLSFEAAMRRLGGEVLTTENAREFSSAAKGETLEDTIRTVEGYSDIIVLRHFESGAARRAAYTANIPVINAGDGPGQHPTQALLDVYTIKREIGTLDGIKLGLVGDLANGRTVRSLAYLIAKYQNIKIYFVSPDVVKMKDDIKDYLNSQGVEWEECSDLLEVASKCDVIYQTRIQKERFGERIDLYKAARGKYIVDKKVLDVLPKHAVIMHPLPRLDEITAEVDSDPRAAYFRQAKNGLYIRMALLKLLLVGH

SEQ ID NO: 69409 - protein, 269 aa, Zea mays; identical to SEQ ID NO: 52067
  Clone ID: 700169781_FLI.pep

SEQ ID NO: 69410 - protein, 151 aa, Zea mays
  Clone ID: 700244495_FLI.pep
GEGAGERDGHQSSIIIRTQRQMRDAAADRIVVVDRSTARDGRRPRPCESMTESIYIHIYPTSTSAWMAVTMSIHLHSAIMSLTNLLVISTLNYRRSSHLPPPPACLPSQFSRITDQFIVAPPCFPPSFKTKTTCASRKDQRQNPSEKVAPS

SEQ ID NO: 69411 - protein, 129 aa, Zea mays
  Clone ID: 700221819_FLI.pep
IYACFSHEQCYYYYCCCTTASMKQFSKQCYGRDEKRRQNIHRCLKTRNPRSRWFLESNTLQHQDLSSSTDQYSAYTAGCSLTQRDANWRKHSFTSNWFWNMSSKQTHPSSLLTYKKNSKYTVAITQNDE

SEQ ID NO: 69412 - protein, 217 aa, Zea mays
  Clone ID: 700170284_FLI.pep
FVSLCRSLRYAQGSLLLDFNLFIFPPHLSIAACLALPSGCRVAPLADDGLCPGMCSRSESGEEEKAIDGVQLRGHDGRGGTVPRPSQPQHQHDPDGRRGGGGGIAAQLPAQLLLRVLRGPQPRRRRRRGQVRVRARDPRRVVQVPAPPHQLPGPRPRPPAPVPAGLPRRAGAGRLVFRFLPHRRGPVSVRGQRRARRGESEKMMGYTCRVSLSEGKE

SEQ ID NO: 69413 - protein, 364 aa, Zea mays
  Clone ID: 700172805_FLI.pep
AAPISAPLPLQHPPVSVVSSPLLTSPAMGKIKIGINGFGRIGRLVARVALQSEDVELVAVNDPFITTDYMTYMFKYDTVHGQWKHSDIALKDSKTLLFGEKPVTVFGIRNPEEIPWGEAGAEYVVESTGVFTDKDKAAAHLKGGAKKVVISAPSKDAPMFVVGVNEDKYTSDVNIVSNASCTTNCLAPLAKVIHDNFGIIEGLMTTVHAITATQKTVDGPSAKDWRGGRAASFNIIPSSTGAAKAVGKVLPELNGKLTGMSFRVPTVDVSVVDLTVRIEKGASYEEIKKAIKAASEGPLKGIMGYVEEDLVSTDFTGDSRSSIFDAKAGIALNDHFIKLVSWYDNEWGYSNRVVDLIRHMFKTQ

SEQ ID NO: 69414 - protein, 137 aa, Zea mays
  Clone ID: 700209073_FLI.pep
ASLNSASGLTSRMTKFKEAHPPGAINVQIYRLIKEWTAWDIARRAAFAFFGIFAGTEENPEFIQSVDTKVGKDAKIIVACSTGGTLKPTQNFPDGKQSRSLIAAYLLVLNGYSNVYHLEGGLYTWFKEGLPAVAGEE

SEQ ID NO: 69415 - protein, 152 aa, Zea mays
  Clone ID: 700449616_FLI.pep
RHAAFSSADGGDGGLLEHLVERGAEASGDGLVAPGDSQPRLALPGQLPEPLLQIRAAAAGALQLCLRGAEPSLRRAAHGWLTVQHHGNVERQHSREHWSGVKMRYHRILPRVCFSAENPWSCDEPRLIDESRFTASLQHAHHPALSSSCTQS

SEQ ID NO: 69416 - protein, 232 aa, Zea mays
  Clone ID: 700089767_FLI.pep
RGNDLFKAGKFAEASLAYGEGLKYEPSNPVLYCNRAACWLKLGRWAKAVEDCSEALRVQPNYTKALLRRAASYAKLERWADCVRDYEVLRKDLPGDTEVAESLFHAQVALKTARGEVVSNMKFGGVVEEIISLEQLQDVIRSPGVSVLYFMATMNKQCAQITPSVDSLCSECPALNFLKVNVDERPLVASAENVRVVPSFKIYKDGTRVKEMVCPSLQVLRYSVRHYAVSSS

SEQ ID NO: 69417 - protein, 235 aa, Zea mays
  Clone ID: 700073589_FLI.pep
ARWTGRASEMEWTTVETRDGAKLSVRLFKPPASGTGLEPEPREDVAVVLVHPYTILGGVQGLLRGMAEGVARRGYTAVTFDMRGAGRSTGRASLTGSTEVGDVVAVCRWVAENIKPRGILLVGSSAGAPIAGSAVDKVDEVIGYVSIGYPFGLMASVLFGRHNDAILKSEKPKLFIMGTKDGFTSVKQLQNKLKSAAGRADTHLIEGAGHFQMEGPAFDAQMVEIIIKFINSLPK

SEQ ID NO: 69418 - protein, 538 aa, Zea mays
  Clone ID: 700073880_FLI.pep
KAVNPSGIEEGLQSLREGGVPPRFLIIDDGWQETVDEIKEVDEALREQTVFAQRLADLKENHKFRGETCKNLEDLVKTIKEKHGVKCVYMWHALLGYWGGTLAASKVMKKYNPKLVYPVQSRGNVANLRDIAMDSLEKFGVGIVDPDKIYEFYNDQHSYLSSVGVDGVKVDVQNVLETLGRGFGGRVAVTRKYQQALEESIAQNFKTNNLICCMSHNSDSIFSALKSAVARASEDFMPREPTLQTLHIASVAFNSLLLGEIFIPDWDMFHSKHESAEFHGAARALSGGGVYVSDKPGVHDFSVLKKLVLPDGSILRARYAGRPTRDCLFTDPVMDGKSLMKIWNLNNFTGVIGVFNCQGAGQWVWPVKQTAYVPTNINITGQLSPSDVESLEEIAGDDWNGETAVYAFGSCSLSRLQKHQSLEVSLSTMTCEIYSISPIKIFSEVVQFAPLGLIDMFNSGGALDNISSVADSSATTVHIRCRGPGRFGAYSDTRPELCRVDEHEVEFTLAEDGLLTFYLPPSSSQDNLRHVEIVYKAS

SEQ ID NO: 69419 - protein, 162 aa, Glycine max
  Clone ID: UC-GMROPIC023H06_FLI.pep
IGSLMYLLATRPDLTFSVCLIARYMDRPTELHLAAAKRVLRYLKGTMEFGVWYKKQNGRVNLQGWTDSDYAGDLDDRKSTSGYVFTFGSGPISWSSKKQAIVTLSTTEAEFVAAASCACQAVWLKRILDQLGKPQDSGVVIWCDNSSSVKLSKNPVMHGRCK

SEQ ID NO: 69420 - protein, 87 aa, Glycine max
  Clone ID: UC-GMFLMINSOY010B02_FLI.pep
RKCCLGFCGNTPTMLIQDKDSHQSGIILWQLKNRWAASSSLSQQNGHNLSMMSTFLLHKLDLVGNLSRNNLQAKNAALLGIFNFHLS

SEQ ID NO: 69421 - protein, 187 aa, Zea mays
  Clone ID: 701164037_FLI.pep
GFVRGKMSSPHGGLDDQIERLMQCKPLAEPEVRALCEKAKEILMEESNVQPVKSPVTICGDIHGQFHDLAELFRIGGKCPDTNYLFMGDYVDRGYYSVETVTLLVALKVRYPQRITILRGNHESRQITQVYGFYDECLRKYGNANVWKTFTDLFDYFPLTALVESEIFCLHGGLSPSIETLDNIRNF

SEQ ID NO: 69422 - protein, 139 aa, Zea mays
  Clone ID: 700553303_FLI.pep
MESVECLDGWSGGIWGGIYSPQTPKQPLGWLLSMGTPDSLVRQPRHPTVRVLTQSTVGALTSGGTKQSGAAPDKHCSLFGAPLTSALTSTANCSAVRGTVQSTVVPKSRCSAITPDSPVNYSGATPEKPEGEEFGVVRS

SEQ ID NO: 69423 - protein, 213 aa, Zea mays
  Clone ID: 701183505_FLI.pep
LLAAPEPRSPWSLHPCPPASGRQGLNPKPPGGPRPCSPRRRGHVPAPGSRDHAVVAGWQARAGGADDRRAPIHSRGRGSRTPAHPRWGRAALVRREGTPPYRARARARATACRAAGGLSPRRRGACLRVLAGEPRPRCAVPSGACPRVLPEMRTRVRRAARAAGAKCSCAGGGCSSPGMAARLGPRACTAPGLLARGPRPLPCPCMAAAAAGW

SEQ ID NO: 69424 - protein, 51 aa, Zea mays
  Clone ID: 700338792_FLI.pep
EKSTFTQHSSISTRTTAGKLNVKMIQLVPEFWTTHIITGHIYNSFISQVHY

SEQ ID NO: 69425 - protein, 304 aa, Zea mays
  Clone ID: UC-ZMFLB73150F10_FLI.pep
LVEYPEVPQWAPWCMEQPKSVDWDALINSIFSEAENVPEINWCEPGESSAMEVLLGSKDGFLTKRIKNYDTGRNDPTKPHALSCLSPYLHFGHISAQRCALEAKKRRHLSPKSVDTFLEELIIRRELADNFCYYQPQYDSLAGAWEWARKTLTDHTGDKREHIYTREQLENAKTSDPLWNASQLEMVHHGKMHGFMRMYWAKKILEWTSQPEEALSIAIYLNDKYHIDGRDPNGYVGCMWSICGLHDQGWKERPVFGKIRYMNYAGCKRKFDVDAYISYVKRLVPRAKKRKTEEGESTVKESNV

SEQ ID NO: 69426 - protein, 186 aa, Zea mays; identical to SEQ ID NO: 64708
  Clone ID: UC-ZMFLB73193F11_FLI.pep

SEQ ID NO: 69427 - protein, 141 aa, Zea mays
  Clone ID: UC-ZMFLB73187C05_FLI.pep
VELDQQIARFDACAGLDVRGEALPVQLDGVDADMQQHFRALRRRDRHRVARAREMRHDARARRDELARERVDADAVAEHPAGEHRIGHVGQRDDRPRQGAKQDDLIMGGALQLGLLGASHRLSRLSVRFGDFVQVARRVGI

SEQ ID NO: 69428 - protein, 136 aa, Zea mays; identical to SEQ ID NO: 56375
  Clone ID: UC-ZMFLB73210F05_FLI.pep

SEQ ID NO: 69429 - protein, 427 aa, Zea mays
  Clone ID: UC-ZMFLB73224C06_FLI.pep
LPTDATSHRAIVSVSQQEAALPPAVSCSQQRRDQGLRFGRRESPHPPGRLLHASMDPVADPSPSRRSLKRRPPARSPELSPKSGPGAGEAAAEGLIRRVEELEAAAARLRGEKEAAEDAARGLRQELDAERASAETAASEAMLMIERLQREKAAAQMEARQFKRYAESREDREREVQEELASLSDLAASYHSRLQSHGIDPDSFTDDDDDESYSYEEVGAEDVEQIGMAALQVERNVRDSGSGMEVKAMVVGNDRGEDEEDADADADDAEEPSSPVEKEFEYTVDVTCASTTKPATSVVAQYVGDGNSGGLYARVEALEADRAALRREIFALRAERAQLVMAREMARRLCWEMVAEQRAIVKKALVPASSFSVIRICKWVLSILFWRNRSSTAKYTFGLSTTFLGLLLLLDRSALLSSWRRLPWPQR

SEQ ID NO: 69430 - protein, 199 aa, Zea mays
  Clone ID: UC-ZMFLB73224E12_FLI.pep
SQRKGICCSHLQAGSSRLRLVAQLAACSSNREKLLSITPFHAVSSPEAAFVCSSATTSCMLSWHIVATYSSSAKLLSTYITPQRDLKFLDGRMCASCMPYVGAAVAVEDAEEVVLAGAGQEVRPDGDRVLHLAPSAADGGDPVPGQGRPVGVRARVGAGAGQRARQPLPLGSADVLRDQLLGIARDAEPPHLQPASPPL

SEQ ID NO: 69431 - protein, 186 aa, Zea mays
  Clone ID: UC-ZMFLB73222H01_FLI.pep
EMIFDNAHELGKKFRVVVVDSRPNHEGQGLLRRLVAKGISCTYTHINAVSYIMHEVTRVFLGASSVLSNGTVYSRVGTALVAMVAHAFGVPVLVCCEAYKFHERVQLDSICFNELGDPDAISRVPRDESLSNLKNWAENENLHLLNLKYDITPSDYVSMLITDYGMLPPTSVPVIVREYRREHVWI

SEQ ID NO: 69432 - protein, 174 aa, Zea mays
  Clone ID: UC-ZMFLB73223A01_FLI.pep
HRRAHARLPYAQEQVGPQHVGGAAGGRGLLPGGAAAVLPERRAGGGRAGGAERRHPPRLPRQRLRLQGLLPELPRRGRLGAPLRRRQVEALRGPQGPVRPAGDPRAGPEDLPSGPGVRRRVEQGGRTSQLPAKTGGGGGGEADGSPLLLPVMMAITLLILVMMMDDRGSRRAGQ

SEQ ID NO: 69433 - protein, 393 aa, Zea mays
  Clone ID: UC-ZMFLB73260A09_FLI.pep
STLHLVLRLRGGMQIFVKTLTGKTITLEVESSDTIDNVKAKIQDKEGIPPDQQRLIFAGKQLEDGRTLADYNIQKESTLHLVLRLRGGMQIFVKTLTGKTITLEVESSDTIDNVKAKIQDKEGIPPDQQRLIFAGKQLEDGRTLADYNIQKESTLHLVLRLRGGMQIFVKTLTGKTITLEVESSDTIDNVKAKIQDKEGIPPDQQRLIFAGKQLEDGRTLADYNIQKESTLHLVLRLRGGMQIFVKTLTGKTITLEVESSDTIDNVKAKIQDKEGIPPDQQRLIFAGKQLEDGRTLADYNIQKESTLHLVLRLRGGMQIFVKTLTGKTITLEVESSDTIDNVKAKIQDKEGIPPDQQRLIFAGKQLEDGRTLADYNIQKESTLHLVLRLRGGQ

SEQ ID NO: 69434 - protein, 179 aa, Zea mays
  Clone ID: UC-ZMFLB73253D03_FLI.pep
QESKMEVEVDVDDDTGGTPASIAQQETHVEAPGGTSIKESVQDVVLGGGQHVVKDVALTISQAIGPVEKGVGKIQEKFHHISLKPGDKKEPQVAVEEHVTENVVDGKPAVAVNAEVEVQQKAQDRRGEEEGVQLKRTEKEGRLSHLRVPWWKMQRKREQVQEQAESKAEAVRGPDGEQG

SEQ ID NO: 69435 - protein, 166 aa, Zea mays
  Clone ID: UC-ZMFLB73253E04_FLI.pep
AETGKHLRVGESKEPSEEGESEHPCRGRHEHGIHTTFLPGRWQPVVWHHMDETPASQARGTDAKATRAKMSMGSQGGSRPLQLQEMACWRVVAAAGGQADLRGGQEAHVMGTGSESEVFTWESRTEVREDMELSVGDGAVASGMEEESRGSGGGAAVSESSKAGDG

SEQ ID NO: 69436 - protein, 144 aa, Zea mays
  Clone ID: UC-ZMFLB73278D05_FLI.pep
LCGSCSGHGWSYPCDIWSVGCILVELCTGEALFQTHENLEHLAMMERVLGPLPYHMLKRADRHSDKYIRKGRLNWPEGCTSRESMKAVMKLSRLQNLVMQNVDQAAGDFIGLLQGLLKYDPASRLTAREALRHPFFTEGFGRRR

SEQ ID NO: 69437 - protein, 135 aa, Zea mays
  Clone ID: UC-ZMFLB73285D10_FLI.pep
EIPCSTMLFFINTNYETTVWRSLRPYTLVRSSTFKSDVSKAPLFNLATRTHMLARSFSRDSSLFASSNFFLYSSSRRSSTKAASLARCSYFIFSILASYQSTSSKLVGLNINKESIKYKQFAYSHLMNMHTISIK

SEQ ID NO: 69438 - protein, 135 aa, Zea mays
  Clone ID: UC-ZMFLB73278E04_FLI.pep
RMPFKRFVEIGRVALVNYGKDYGRLVVIVDVVDQNRALVDAPDMVRCQINFKRLSLTDIKIDIKRVPKKSTLIKAMEEADVKTKWENSSWGKKLIVQKRRAALSDFDRFKVMLARIKRGGAIRQELAKLKKASTA

SEQ ID NO: 69439 - protein, 160 aa, Zea mays
  Clone ID: UC-ZMFLB73274E12_FLI.pep
IATIYVHISRGDKESVFSAAISKDGRAYNDQIGGDPKIIQEFVQLAGRAKAAASEAMDAEAILGDIPDEFLDPIQYTLMKDPVTLPSSKVTVDRPVIIRHLLSDSTDPFNRSHLTQDMLIPNTELKLQIEEFVRSQQSRKRTAAALLEIGEAEGTDDMAE

SEQ ID NO: 69440 - protein, 337 aa, Zea mays
  Clone ID: UC-ZMFLB73283C12_FLI.pep
QKQSYLSSGESISNNEVSMSINSKISNVKGIDVELWTQDGLPSAQLLKLMRDVVAGLVHLHNLGIIHRDLKPQNVLISAEGPIRAKLSDMGISKHLQDDMTSVSHHGTGIGSSGWQAPEQLRHGRQTRAMDLFSLGCLIFYCITKGKHPFGEYYERDTNIVNNRFDLFVVDYIPEAVHLISQLLQPNPETRPTAVYVMHHPLFWSPELRLSFLRDTSDRIEKTSETDLINALESIGPVAFGGKWGEKLDAALVTDMGRYRKYNFESTRDLLRYIRNKSGHYRELSNDLKGILGSLPEGFDHYFASRFPKLLIEVYKVLWVHCKDEEAFSKHFNGSSL

SEQ ID NO: 69441 - protein, 270 aa, Zea mays
  Clone ID: UC-ZMFLB73264H01_FLI.pep
DRAAPALRSSSTTAPELDRPPSPMPSFIDGPTFRALLRPSTNGRRTKISDSGGGGGGIFKMFKLMPMLSSGCKMVALLGKHNNRALLADHATTVTLFGPRRGRVSLAIHEDTRAPPLFLIELPMLTSALHREISSGALKLALESDTRSARRRLVEEYVWAVYCNGRKAGYSIRRKEASDDERHVLRLLRGVSMGAGVLPAAPEKEGGVPAGPDGELTYVRARVERVVGSKDSEAFYMINPEEGGNGADNNGGGGGAGGAPELSIFLVRMK

SEQ ID NO: 69442 - protein, 303 aa, Zea mays
  Clone ID: UC-ZMFLB73303E11_FLI.pep
IVSSLLQLTYAPRIHIAISGSTVKSRFTDDRFHACKEDAKFAWVRALDFTPNSSFGECSTLVLKLSKGASVSYILESLPFSGELGELAIASMDVFGSSSNVVPLVDCPNGFSVPYEVLFRLNSLVHMGKLVARHVNADLFKVLEDLSIDTLRRIFEKMSKLKSTCYEPLQFIRHEAHSMNMRKKALSNKRESGKLMRCYRIHITPSKIYCLGPEEEVSNYVVKYHSEYASDFARVTFVDEDWSKLSPNALSARTEQGFFSKPLKTGLYHRILSILKEGFCIGPKKYEFLAFSASQLRGNSVWM

SEQ ID NO: 69443 - protein, 161 aa, Zea mays
  Clone ID: UC-ZMFLMO17036G01_FLI.pep
SVLTISRAFDDYYIKDCGVISTPENEMNERELSALKSVIKCIEEHKLEQQYPVDPLQKRVLQLEKAKADKRMAVEAAKPQSKRPRANGSAFATRATGFADKSFYSATPERHPFNPCERQFVYGAEVHLPPMMTSASYTMQPAHGPYYGNGYPVQYQVSYIH

SEQ ID NO: 69444 - protein, 140 aa, Zea mays
  Clone ID: UC-ZMFLMO17037C06_FLI.pep
PTSTFKVGLSFLINIFIIRKPLNAVCSLFICIMVENNETFLYIAVGIWHDVYFTFYFYFLLKAGIETAKLFLNKGDTVIYTAGRDRLVQKAIVAESGPMIATPLMLLVNNRTASASEIVASALHDNCKAVLVGERTFGKV

SEQ ID NO: 69445 - protein, 556 aa, Zea mays
  Clone ID: UC-ZMFLMO17086H11_FLI.pep
PFARNAHTARSPISDPRSPRRSKMQIFVKTLTGKTITLEVESSDTIDNVKAKIQDKEGIPPDQQRLIFAGKQLEDGRTLADYNIQKESTLHLVLRLRGGMQIFVKTLTGKTITLEVESSDTIDNVKAKIQDKEGIPPDQQRLIFAGKQLEDGRTLADYNIQKESTLHLVLRLRGGMQIFVKTLTGKTITLEVESSDTIDNVKAKIQDKEGIPPDQQRLIFAGKQLEDGRTLADYNIQKESTLHLVLRLRGGMQIFVKTLTGKTITLEVESSDTIDNVKAKIQDKEGIPPDQQRLIFAGKQLEDGRTLADYNIQKESTLHLVLRLRGGMQIFVKTLTGKTITLEVESSDTIDNVKAKIQDKEGIPPDQQRLIFAGKQLEDGRTLADYNIQKESTLHLVLRLRGGMQIFVKTLTGKTITLEVESSDTIDNVKAKIQDKEGIPPDQQRLIFAGKQLEDGRTLADYNIQKESTLHLVLRLRGGMQIFVKTLTGKTITLEVESSDTIDNVKAKIQDKEGIPPDQQRLIFAGKQLEDGRTLADYNIQKESTLHLVLRLRGGQ

SEQ ID NO: 69446 - protein, 263 aa, Zea mays
  Clone ID: UC-ZMFLMO17109A11_FLI.pep
FNWKEPMGVSTLDYNCTVEYYRSPFIVLQGRAPAGAPEIVRYSIRVDAMDWMSDRGNWKDADVLIFNTGHWWNNEKTIRGGAYFQVGDEVKMGMSVAEAYRRSIETLSDWLRKEVNTSKTHVIYRTYAPVHFRDGDWKTGGSCHLETLPDAMPVKSLDEWADLLQPVDEFLGSDLGSELAGVDLLRVTGMTAQRKDGHLSVYLSPSGPVPRYRQDCSHWCLPGVPDAWNELLYALVMRRHKKMAGTRTPDAEEGDVFSSGSSS

SEQ ID NO: 69447 - protein, 238 aa, Zea mays
  Clone ID: UC-ZMFLMO17016F02_FLI.pep
YMQIANALYYNPALTLEILNKLGVAADIFNHWFAMLRQVKKSGARVNFKREHDKKVCCLGLTSLIALPAAKIPADALDRIFKATLELLVAYKDQVAEAKKQNEEAADDMDGFDADEEDDDEVDSDKEMGLDDEDGDEVSSLQLQKLAAEARGFQPADDDDSDDDFSDDELHSPIDEVDPFIFFVETVQGLQASDPARFQNLMHTLDFSYQALASGIAQHAEQRKNEIEKEKSEKANAQ

SEQ ID NO: 69448 - protein, 452 aa, Zea mays
  Clone ID: UC-ZMFLMO17005G07_FLI.pep
LAPYILPPPARARACTLASCRSPRHHGVRRERQQVGGGGVGEPSPRDPDARVRAAGARGAVVDGVREPAHHGVLRRDVHLRELLRHAQVVARVRPAHAQHRVLLQGPRRQPGRLLGAHQRGDPAVGGAGHGRRHEPVRVPHGVPGRVRAHRAAAAVARVPLLLRGRQLAVVRQHRRARDLRQELPRQPRGGARHPQGLRRPQRRRVHAAVPGPVRRRRRRVADPPRRLAPRGGVRRVRPHHPVHAVPAPPWRRAGDEQLRLRPLLLLPLPLHRAGVLPPRHDRGAEAGALLPRRVRLGRHAAAHPPPHAPRRRRQAGVQDLPGAPARRRRPAAADHRLRVGNGRHQENRAAAGVVVVLWVREDHVPSAGSWGGLHDPAGAGERGHAGAVRGDNLRRGRDADGDRQHGADRRVAGLPRQERQHVRVPDQHLELRGARDGGLRLGGGAGPVPRA

SEQ ID NO: 69449 - protein, 226 aa, Zea mays
  Clone ID: UC-ZMFLMO17229H01_FLI.pep
LINAWQKIFPELFLPFSSMPSTLKSHIRYPVDMFSTQSERLLTYHMEDIDVFYNREDQWRIPQETYADEQQPIAPYYLIMKLAGIDAKEEEFVLSQVYTPNARNNLIALLFARCDEQNYGKLLLYTLPKERLVYGPEQIEALVNQDPVISERISLWNRRGSRAIQGNLLVIPIEESLLYVEPIYLEAEKNSLPTLARVVVVYGNQIAMAESLNEAIEAIFDRRNGD

SEQ ID NO: 69450 - protein, 198 aa, Zea mays
  Clone ID: UC-ZMFLMO17227H05_FLI.pep
SAPEQTPESKLQEIVHQRSQWIYKHLIRKEILNPSVPEKEYVSGEGFPYLGRNYRLQVIADDASQEKLKYYRGRFQLQQSSQHQGRELFIEWYKSHLKAHLQSKVEQFKHRVEVNPNSIQIRELGNRWGSCSTKGDLYFHWRVAMLPSNIVNYVVVHEMAHLKERRHNQTFWETIECILPDYQDSKQWLATQGIYYDL

SEQ ID NO: 69451 - protein, 344 aa, Zea mays
  Clone ID: UC-ZMFLMO17235G07_FLI.pep
QPASTSIDAQGMFDEMQQSDTSVAIAHTAFNTFFNTEELDRWLESCDEQGESIGVNKIHVKPQFFDVGKDYNWARGIRSTEIQLADGKNCELHRCWADILDAISKAQHSTDITGWLTILVRDDSNSVDLLTKEGLLTTHDVEIAKGEQEIMNEVFPAESRSSGFGVAMDLPDIWPCYESKPSDAQGYAVKGIPNLRNTCYRSAVLQCLFMLGKLLERILTSTWLAIQGCSQIGVGGVLQLPYLLEFSPVLEELFVEASAWDVLYNFEQGDTWNVQLVGSIDGAAAFGFPETPEQAARARLVSGIKQPWPPPMAFECLDLCMASDNSTIMVSGLGASRISSGGKC

SEQ ID NO: 69452 - protein, 522 aa, Zea mays; identical to SEQ ID NO: 58447
  Clone ID: UC-ZMFLMO17246C08_FLI.pep

SEQ ID NO: 69453 - protein, 154 aa, Zea mays
  Clone ID: UC-ZMFLMO17230G07_FLI.pep
AYFYQKSGQFGLINDVHAMANPILLWFSTGAMALLTGTVIWQKIRQFSSQTINAPLRGITLYIEVNYAVNLLPWLGISRCTFFYHYLPAYAFSILALALILETLLDSPRHSHNVIAWAVLTLVAIAFWYWLPVFLGLPLTPRGFALRMLFPSWI

SEQ ID NO: 69454 - protein, 205 aa, Zea mays
  Clone ID: UC-ZMFLMO17236F01_FLI.pep
ISVLLVLLSQHILASKYVDLIVPGYTHLQRAQPVLLPHLLLSYVEQLERDAGRLVNCRERMNFCPLGACALAGTGLPIDRFQTAKDLKFTAPMKNSIDAVSDRDFVLEFLAANSIAAVHLSRIGEEWVLWASEEFGFLIPSDKVSTGSSIMPQKKNPDPMELVRGKSARVVGDLMTVLTLCKGLPQAYNRDLQVSLILISMSSLT

SEQ ID NO: 69455 - protein, 504 aa, Zea mays
  Clone ID: UC-ZMFLMO17240D07_FLI.pep
TVTLEDAQKILGLNVGGRAVTGQCDSDGWRARVEAFLGRELPAEGVERTAGVGITWLRQSFGVCPADADEATVQFYCRAWILHMFGCVLFPDATGDCASWMYIPCLTDWDTAGQYSWGSAVLSFLYRQLCEACRRTSSSSSIGGCVYLLQIWMWFRIPVGRPRVFQPRPWPWMIHGNDRLRPTYAYIWDQVAAPFARAKRAYMEYVNEFDTLSASSVTWQPYNAPEYAGMIFSVVCSSEDELYMMQCPLVCFWCVEWHLPHRVQRQFGRNQLWPVEDVPTSKELHKFDRRKQKKITDFRQHHLILVNDWESGAENVYSNDELHNNSDYRRYQAWYQGATRCKLRQQWTAEDYADIDSSDDEETEYDLTTRLGTQVEAAPILDRVGNTLRRSVEDIDRQLLTTGDSSMRSFLQRLSRRLRGAAARCGCRTTVAHDVHVPSCTDTATPSTGLGAGFDYDHDEIGPSQLEGAPSTQPLQPQDRRRHRSPQRYTPGTDALGKGKTRRR

SEQ ID NO: 69456 - protein, 431 aa, Zea mays
  Clone ID: UC-ZMFLMO17246G11_FLI.pep
TNEIIDGSMVNTVEGLKVYEGLLNVTEANKILSLVNETRASYRRGGLEARQKVIIAKRPMKGHGREIVQLGVPIIDGPPDDENLRETRVEAIPGLLNDLFDRLSQQEIIPFKPDYCVIDIFNEGDYSHPHQSPSWYGRPLCTLCLTDCDMVFGRYISGEKGDHRGPLKLSLATGSLLLMQGRSIDCAKRAIPATRKQRVILNFGKSVARKHIPAESAWSTPLTPPMPWGQSSRPVNGSRHPQSPKHYGYAPISGVLPAPPVGAHHVPPSDGMQPLFVAPAPISAAAIPFTPTVPLQNTSAAWIQEVTPRPAPPRFPGPGTGVFLPPGSGHPLPHQMMPASHGHGEPNSPQGSSAYLHSKVNGKETSNGNLSPKNSPRKTSCTAEEKPECNGSLNGGGGSADEKSTVGMEQQNGVQKNVGSSKVQPHGHATE

SEQ ID NO: 69457 - protein, 358 aa, Zea mays
  Clone ID: UC-ZMFLMO17242D09_FLI.pep
CHIDEYSEAGLRTLALAYCELTEEQYVVWNQDYSSAKNSVHTDHVAAVEKVSEDIEKDLVLLGATAVEDRLQNGVPECIYKLAQAGIKIWILTGDKLETAVNIGYACNLLRKEMEEIFITLENSSTSASEGSSGEGNKIATFEEIDRKLKDARGKISQKGTSTSFALIIDGNALTHALTGSLKNSFLDLAVNCASVLCCRVSPKQKALVTRLVKIRTSKTTLAIGDGANDVGMLQEADIGVGISGAEGMQAVMASDFAIAQFRFLERLLLVHGHWCYRRIAAMICYFFFKNITFGFTLFWFEAHAMFSAQPAYNDWFISFYNVAFTSLPVIALGVFDKDVSSHVCLEVCNLSDSYVML

SEQ ID NO: 69458 - protein, 183 aa, Zea mays
  Clone ID: UC-ZMFLMO17243F02_FLI.pep
KLDRIVDSRAGRALLPGILMDASLRGVQKYLSEKAAAAVKALLPESAGGELSTVCPWADQVRWHYHWASPLHYANTPQVCNFKYSRDCHNSRGQQGMCVVGAINNYTDQLYSYGQKTSYNLTESLMFLAHFVGDVHQPLHVGFEDDEGGNTITVHWYRRKANLHHVCACCTSSMLNFRCVLTR

SEQ ID NO: 69459 - protein, 84 aa, Zea mays
  Clone ID: UC-ZMFLMO17230F05_FLI.pep
HQLPASKTIDCLLVDGPPAYREDIQYSRFPAVPFFQPQLAPHSTIILDDINRRGEQEILARWQTLLNVSFDSSIGNVAIAHLSA

SEQ ID NO: 69460 - protein, 79 aa, Zea mays
  Clone ID: UC-ZMFLMO17244G12_FLI.pep
SRAGTESTSNGRAEDRFPTAGRVQHVKGEQMRSCLFGLVPRCICSYVSASPLFVNYQYLEVIRKWGFTCTFPVLCHLKQ

SEQ ID NO: 69461 - protein, 211 aa, Zea mays
  Clone ID: UC-ZMFLMO17253C07_FLI.pep
RCAKNIKLHSSGSKPTLAIRKMSGAIAELLKESGATDIWICDSKGIVGKHRTDLNSKKQSFAVDAEGTLADAMAGADVFLGVSAPGVVTKEMVQSMAKDPIVFAMANPIPEIQPELIQEDAAVIATGRSDYPNQINNVLAFPGVFRGAIDCRASIITTTMCIEAAKAIASLVHSNTLDSEHIIPSVFDNRVATTVASAVQLAARNEGVAGQ

SEQ ID NO: 69462 - protein, 123 aa, Zea mays
  Clone ID: 701160833_FLI.pep
TPAGAAGPASCSAGGGGSRRRNGTGTAASGCAGTEGRGSAARWWWWWWRRLLLLLLRRLRGGLMQGATRWWSRRRGRGGGGRGRGAPGGACGRGAWPRARAWTSRRRPLRRRCARAAPWLVSK

SEQ ID NO: 69463 - protein, 567 aa, Zea mays
  Clone ID: UC-ZMFLB73001A06_FLI.pep
RRARPPRLRRPPRRRRHGQLLPGVVVVRGARAAAAAGPLRLVAPRGFACLGVADRGARARQAPGPHRPRAGPAHGGREGHLRRGQGARARAVRRHVAVHAQGHGAQVRVQDHQQEEAVHQGGRGGRAARGADHVPPVRPAGRGGAQGRVRGQGLRAPRHGALRRRRALRPHHRQGPLHRARRRLAAPHHRRDRAHLPLHGRHPPRPQARELPPPQQGRGRAAQGHRLWALRLLQGRLICLLSLSSMVALHHHIHICCSAYALQCDAGEVFRDIVGSAYYIAPEVLKRSYGPEADIWSVGVIVYILLSGVPPFWAESEHGIFNAILRGQVDFTSDPWPRISQGAKDLVRKMLNPDPKQRISAYDVLNHPWIKEDGEAPDTPLDNAVLGRLKQFRAMNQFKKAALRVIAGCLSEEEIRGLKEMFKSMDSDSSGTITVDELRRGLANKGTKLSEAEVQQLMEAADADGNGTIDYEEFITATMHMNRMDRDEHLYTAFQYFDKDNSGYITMEELEQALREKGLLDGRDIKEIVAEVDADNDGRINYTEFAAMMRKGDPEPSNPKKRRDIVL

SEQ ID NO: 69464 - protein, 319 aa, Zea mays; identical to SEQ ID NO: 65361
  Clone ID: UC-ZMFLB73009D01_FLI.pep

SEQ ID NO: 69465 - protein, 434 aa, Zea mays
  Clone ID: UC-ZMFLB73005C05_FLI.pep
SYPTIRECLAENMRTFHKEPRNSTGIRQQILDILTFETLWFCVIEQLGSTNNGVKSVLIDIIQQIPYVLSSLKSAHVICRFVLMPLAVFVFLAYKYWKTQITIDAVEKFLRMQNMLVPMRYAYTNIIAITGHFRDKLGQGGYGTVYKGVLLPGEIHVAVKMLGNSNCNGEEFISEVATIGKIHHVNVVRLIGFCSEENIRALIYEFMPRGSLDKYIFSSEKTFSWDKLNEIALGIARGLNYLHHGCDMQIVHFDIKPHNILLDSNFVPKVADFGLAKLFPRDDSFVPLSAMRGTIGYIAPEMVSRSFGIISSKSDVYSFGMLLLEMTGGRRNADPHAGSSSQAYYPSLVYRQLSQGDANRISEGVDMHELEKKLCIIGLWCIQMKPQDRPTMSEVIEMLEAGVDGIQMPPRPYFCDEEGDSSYSTISELDTIEE

SEQ ID NO: 69466 - protein, 369 aa, Zea mays
  Clone ID: UC-ZMFLB73007G03_FLI.pep
HKRTLAMASEVVRPSDAELLKAQADIWRLSLSYLTPLSLRCAVELGIPTAIYRHGGAASAAELVTALSLPSTKLPFLRRLLRLLAASGVFTVDKQSSEEERYRISPVSYLLVDGIPHEDHMNHTALVLTCTSTRYIEAGIGLAEWFKRDVVTSPFEELHGATLFHESMGSLDADFHDMASEALDAHDNFGIEIAMREFRDLFEGIQSMTYCCGNFGDDKGARAIVKAFPHIKCTVLAPPKIIATKPADGAMINYVEGDMFSFIPPAQTVVLKLVLHHLTDEECVKLLAQCRKAIPSRKDGGKVIIGDIMIDHSGPMLETHLLMDIGMMTMTKGRQRDEKEWSELFTKAGFSEYKILKEFGARVAFEVYP

SEQ ID NO: 69467 - protein, 263 aa, Zea mays
  Clone ID: UC-ZMFLB73012G01_FLI.pep
SLHAASGGRPSAAMATTTAPVLLVFLVAIATSVAPSFPILTMAADADNGTTHLSFFMHDITSGASPTAVKVIKGPGAGSTPTAPALGMTFGDTMVIDDPLTEEASPASAALGRMQGFYMLASQTGAALMVCANLLLTSGAHNGSTLAVLGRDDTGQDVREIPVVGGTGTFRMATGYVLWKTPDGINGTDATVQLDVYVTTDGNGTTDAGDADGGGGSPSAGSGSSGSSGGSKSTSGAESRRRRMTGGWVVAVVVAVVGSFWVW

SEQ ID NO: 69468 - protein, 63 aa, Zea mays
  Clone ID: UC-ZMFLB73020F12_FLI.pep
LPWYSHFSVLKTAWISSPAARYTIISLLLNCKVFCICYLFWLTEHSVADSNTFCKTKLEEGIL

SEQ ID NO: 69469 - protein, 520 aa, Zea mays
  Clone ID: UC-ZMFLB73009H01_FLI.pep
DDADKLLAILSSSPQNVLLMAEAGYFRPLIQYLKQGSDMNKVLMATAISKMFLSEHMKSSLGEDGAIEPLVDMFKHGNLEAKHSALGALCNLSSSLQNAELLINSGITGPLLQLLFSVTSALMALREPASAILAAIAQSERILLHKDVAPQMLSLLNLSSPVIQLHLLRALNSISGHANAKRARSKIRQNGGVQLLLPFLTEKNVGIKIAALHLMFHLSKDSSQELAEQFRETHLDIFVKIISSPTSRDEKAAAVGILSNLPATDKKATEILMRANLLPILITLFEANMAAAVTPQRMWLLEGIAGVFIRFTVTWDRKLQSSAVGHGVVPCLVKLLSEGSVDAKSKAATSLAQLSQSTMALRKSKTPRWLCVPPSAESYCTVHSCQCTVKSTFCLVKAGAVHPLVQTLEGEERGADGAALEALGTLMEDEVWENGSRVIERASGIHALLRIAEAGEPSSQDKAIWMLERMFRLEAHRERYGEIAQALLIDLAQKGDPALKPMIGKILAHLELLQTQSSYF

SEQ ID NO: 69470 - protein, 179 aa, Zea mays
  Clone ID: UC-ZMFLB73012G05_FLI.pep
GIFTGFGSIGRRRALRRTWLPADRQGLLRLEEATGLAFRFVIGKSNSKNKMAALNREVEEYDDFVLLDLEEEYSRLPYKTLAFFKAAYALFDSDFYVKADDDIYLRPDRLSLLLVKERSHPQTYIGCMKKGPVFTDPKLKWYEPQSFLLGSEYFLHAYGPIYALSADVVASLVALRNNR

SEQ ID NO: 69471 - protein, 406 aa, Zea mays
  Clone ID: UC-ZMFLB73001D07_FLI.pep
CSSVPLPPHSLLRFLAARFLLPDPPLASRFMAMWRAAARQLVDRALGSRAAHTSTGSKKIVGVFYKAGEYADKNPNFVGCVEGALGIRGWLESQGHQYIVTDDKEGPNCELEKHIEDMHVLITTPFHPAYVTAERIKKAKNLELLLTAGIGSDHIDLPAAAAAGLTVAEVTGSNTVSVAEDELLRILILLRNFLPGYQQVVQGEWNVAGIAHRAYDLEGKTVGTVGAGRIGRLLLQRLKPFNCNLLYHDRLQIDPELEKEIGAKFEEDLDAMLPKCDVIVINTPLTEKTRGMFNKERIAKMKKGVIVVNNARGAIMDAQAVADACSSGHIAGYGGDVWFPQPAPKDHPWRYMPNHAMTPHISGTTIDAQLRYADGVRDMLDRYFKGEDFPVQNYIVKEGQLASQYQ

SEQ ID NO: 69472 - protein, 461 aa, Zea mays
  Clone ID: UC-ZMFLB73005E10_FLI.pep
DAELRRFRVEYERCLFENTYGVEATDEGRKEVFGADFAAWARPAEADDTVWADAEESLTPPAAAPGKDLLKEFEEEAGDGDSIQSLALGALDNSFLVGGAGIQVVKNFRHGLHGKGASVKISGGRGGSGSAYSTPKKALLMRGETNMLLMSPGEALHSNGVHHVDVETGKVVAEWRFEKDGADITMRDIANDSKGAQLEPSGSTFLGLDDNRLCRWDMRDARGRVQTIGSSSDSPVLNWSQGHQFSRGTNFQCFASTGDGSIVVGSVDGKIRLYSKSSMRMAKTAFPGLGSPITHVDVTYDGKWILGTTDTYLILICTIFKDKDGKEKTGFSGRMGNRIAAPRLLKLTPLDSVLAGTDNKFHGGQFSWVTENGKQEKHLVATVGKFSVIWNFQQVKDSNHECYRDQQGLKSCYCYKVVLKDESIVDSRFMHEKFATSDSPEAPLVVATPMKVSSFSIANRR

SEQ ID NO: 69473 - protein, 542 aa, Zea mays
  Clone ID: UC-ZMFLB73005F09_FLI.pep
LSAPVYATEPVFRLGLLTMYDHFLSRWQVSDFDLFTLDDVDAAFQNVVRLKYSQNYLLNGEGVVIAPHVAGHLLGGTVWKITKDGEDVVYAVDFNHRKERHLNGTVLGSFVRPAVLITDAYNALNNQGYRKKQDQDFIESLIKVLATGGSVLLPVDTAGRVLELLLLLDMYWDERRLQYPIYFLTNVSTSTVDYVKSFLEWMGDQIAKSFESSRANAFLLKKVTLIINKEELEKLGDAPKVVLASMASLEVGFSHDIFVEMANEARNLVLFTEKGQFGTLARMLQVDPPPKALKVTMSKRIPLVGNELKAYEEEQERIKKEKSLKASLVKEEELKASHGSNTKASEPMVIDASSSRKSVNASHFGGNNDILIDGFVPPLTSVAPMFPFFENTAEWDDFGEVINPDDYMMKQEEMDNTLMLGPGDGLDGRIDDGSARLLLDSTPSKEDEKLILLPPSSTPPPHKPVLVGDLKLSDFKQFLENKGWQVEFAGGALRCGEYIMVRKVGDSILKGSTGSQQIVIEGPLCEDYYKIRELLYSQFYLL

SEQ ID NO: 69474 - protein, 485 aa, Zea mays; identical to SEQ ID NO: 60964
  Clone ID: UC-ZMFLB73008B02_FLI.pep

SEQ ID NO: 69475 - protein, 96 aa, Zea mays
  Clone ID: UC-ZMFLB73010D08_FLI.pep
SSVASSLVVTLFIRLGTLEPLDERLGILDNLGVLPSCDSIIVPVHNGFLVQDISIVEGFEDNGNLLQRLRVALPTKSLNGLNQKGLGTLIWHSNCK

SEQ ID NO: 69476 - protein, 517 aa, Zea mays
  Clone ID: UC-ZMFLB73021C03_FLI.pep
LAQYNLRLQQAAAPSLEAERGTHEARKRRCCRPRAAAVGVRGMGRHGVDQIGAVAAFVWVTLLPLLLVCVVWPGAQAGHTSEYRRQLGSAIDMPLDADVFRPPPGYNAPEQVHITQGNHDGTAMIISWVTTSEPGSSTVIYGTSEDNLNYTANGKHTQYTFYNYTSGYIHHCTIKKLEFDTKYYYAVGIGQTVRKFWFLTPPKSGPDVPYTLGLIGDLGQSFDSNVTLTHYESNAKAQAVLFVGDLSYADNYPYHDNVRWDTWARFVERSVAYQPWIWTAGNHEIDFAPELGETKPFKPFSHRYPTPYKASGSTAPYWYSIKRASAYIIVLASYSAYGKYTPQYKWLEAEFPKVNRSETPWLVVLMHAPWYNSYNYHYMEGETMRVMYEPWFVKYKVDVVFAGHVHAYERTHRISNVAYNVVNGLCTPIPDQSAPVYITIGDGGNQEGLATNMSQPQPSYSAFREASFGHAILDIKNRTHAYYTWHRNQDGSAVAADSMWFTNRYWEPTDDSADDFQ

SEQ ID NO: 69477 - protein, 183 aa, Zea mays
  Clone ID: UC-ZMFLB73002B04_FLI.pep
NLQWCFTTSYVDELLSIQKISAETMLYSVWDANSRMCDSMVIKRNYVQQLRQEVKLGIVLKEQMDYLDHWAALQTEHSSSLSSATEALKASTLRLPVSGGAKADVLTVKNAVSSAVDIMQAMGSSVCHLLSKLQASHSLVTELSAVAAKESTLLNEYRELLATAAALQVQESSLRTQLIQETE

SEQ ID NO: 69478 - protein, 36 aa, Zea mays
  Clone ID: UC-ZMFLB73005G07_FLI.pep
LYKNPITQRKYTKVKRLHIPIYYSREQSSPARVSTS

SEQ ID NO: 69479 - protein, 213 aa, Zea mays
  Clone ID: UC-ZMFLB73013F04_FLI.pep
GHHTCQEVEHVVIPPHVPPEVEHELPEPEKAQRDIFAFFRGKMEVHPKNISGRFYSKKVRTELLQHYGRNRKFYLKRKRFDNYRSEMARSLFCLCPLGWAPWSPRLVESVLLGCIPVIIADNIRMPFPSVLQWPEISLQVAEKDVANLEVVLDHVVATNLSVIQKNLWDPVKRKALVFNRPMEVGDATWQVLRELEVLLDQSQRRRYGGSWRA

SEQ ID NO: 69480 - protein, 293 aa, Zea mays
  Clone ID: UC-ZMFLB73017B07_FLI.pep
GERVRRGGEAAQGRGPPGAGVPGAHRGHRRRAARAGGAPPRLLLQQGREAPRLRLHVHGQPLRPAAREPRLRPDAAGLGDAVGDRAGGGSRRGAHPLHGAHGVARQHQVLQRPSHQELRGARVGPRPPHARRPLLLAHQGVRLPRTGGHRHPPRLAEGRRLQLRRPPAGAAHGEGAHARRRQRGGARPAALGAVRRAGGVDRRGVRPGAPQVPKRRGGDGAAPPARHRLLRAAPRQEARHVRGGHADRRDPPLQPRRPAGGRQRRRRRAISITAVAVAPPLIHHHTYCVNLSE

SEQ ID NO: 69481 - protein, 212 aa, Zea mays
  Clone ID: UC-ZMFLB73021G01_FLI.pep
TNKTPLTGNLSLLWSFRLFEEMSSSSSSSLLSGSNTVSVELHLIPCKLCNGVVIERVSKQPESTSRKFYRCRAKKMDGSQCDFFHWQASYAVLLIKDGVVSGDHCLELLMVALNDHGKAVESLTNSIREMKKKLSDLELVMEELDNVKKSMKAAMVGIEENNKTIAALKLMENEMQMLKGSTKVKPRNMALCFLLLALIGWFVMGQMYWGED

SEQ ID NO: 69482 - protein, 152 aa, Zea mays
  Clone ID: UC-ZMFLB73014D11_FLI.pep
AQLVVERREERPSVMNAFELISTSQGLNLGTLFEKQTGSVKRETRFASRLPANEILSKIEAAAGPMGFNVQKRNYKLKLQGENPGRKGQLAIATEVFEVTPSLYMVELRKSNGDTLEFHKFYHNISNGLKDVMWKPESGIVEGDEARQRRSP

SEQ ID NO: 69483 - protein, 216 aa, Zea mays
  Clone ID: UC-ZMFLB73017D04_FLI.pep
RATTTTATMAASSLCHGHLLLFLLVSVTSACLGTAAAHQAGSGEGYTIAGRVKIDGMSEKGYGLPAKTSNTKVILNGGQRVTFARPDGYFAFHNVPAGTHLIEVSSIGYFFSPVRVDISARNPGYIQAALTETRRVLNELVLEPLKEEQYYEVREPFSIMSLLKSPMGLMVGFMVLMVFVMPKMMENLDPEEMKQAQEQMRNNPVSFSGLLARAQG

SEQ ID NO: 69484 - protein, 264 aa, Zea mays
  Clone ID: UC-ZMFLB73018G09_FLI.pep
VLSTHSLLEHTDVAILLDNEAIYDICRRSLDIERPTYTNLNRLVSQVISSLTASLRFDGALNVDVNEFQTNLVPYPRIHFMLSSYAPVISAEKAYHEQLSVAEITNSAFEPSSMMAKCDPRHGKYMACCLMYRGDVVPKDVNAAVATIKTKRTIQFVDWCPTGFKCGINYQPPSVVPGGDLAKVQRAVCMISNSTSVVEVFSRIDHKFDLMYAKRAFVHWYVGEGMEEGEFSEAREDLAALEKDYEEVGAEFDEGEDGDEGDEY

SEQ ID NO: 69485 - protein, 55 aa, Zea mays; identical to SEQ ID NO: 50272
  Clone ID: UC-ZMFLB73010G11_FLI.pep

SEQ ID NO: 69486 - protein, 303 aa, Zea mays
  Clone ID: UC-ZMFLB73022A04_FLI.pep
AMTPSSALALAHHAAVSPLPSSTPRPSPRSSSLSLGPGSAGLGPRRLVAAAPPRAFFSSSPYQPPQPEGFSQHREYGLVPMVIETTSRGERAYDIFSRLLKERIVCIHGPIADDTASLVVAQLLFLESENPLKPVHLYINSPGGVVTAGLAIYDTMQYIRCPVTTLCIGQAASMGSLLLAAGAPGERRALPNARVMIHQPSGGAQGQATDIAIQAKEILKMRDRLNKIYQKHTRQPIDKIEQCMERDLFMDPEEARDWGLIDEVIENRPASFMPDGIGGGLDVPRLGGVGGGRGRDVEEPSAV

SEQ ID NO: 69487 - protein, 336 aa, Zea mays
  Clone ID: UC-ZMFLB73003G04_FLI.pep
RDMKPENFLFKSKKEDSPLKATDFGLSDFIKPGRQFRDIVGSAYYVAPEVLKRRSGPESDVWSIGVITYILLCGRRPFWDKTEDGIFKEVLKKKPDFRRKPWSNITSSAKDFVQKLLVKDPRARLTAAQALSHDWVREGGKASEIPLDISVLHNMRQFVKYSRFKQFALRALASTLNSEEMSDLRDQFNAIDVDKNGTISLEELKQALAKDVPWRLKGPRVLEIIEAIDSNTDGLVDFEEFVAATLHVHQLVEHDTEKWKSLSQAAFDKFDVDRDGYITPDELRMHTGMKGSIDPLLEEADIDKDGKISLDEFRRLLKTASMSARNVQTPRGVRKS

SEQ ID NO: 69488 - protein, 75 aa, Zea mays
  Clone ID: UC-ZMFLB73006E10_FLI.pep
VLWTAIYGYLVSLEMIKWRNQTQRPSDGNSWCLICFFCHHPHYTVVMDRLIAHGYITVTRGKGPGGDYWSELRSV

SEQ ID NO: 69489 - protein, 408 aa, Zea mays
  Clone ID: UC-ZMFLB73019F03_FLI.pep
QYSTNDKQGADQESQVGAIKKHDRAQAHQTRPDQTKSFFQNRGGASCRRRLLRLEGLHHLPGEVGVVPPKVPVGRRLEVAPVAAFLEVEVDDDHAGPEVEVLLHDLQDLLVGDRAGAVRVHEHRKGLGHADGVGDLDNGAAGEAGGDDALGSLPRDVGPAAVHLGRVLAGEGAPAVGSPATVGVDDDLPASEASVAVRSADDEAARRVEVEDCLLVEVLLGDDWLDDVLLQVSSNLVVGDCLVVLGRDEDCVHTDGNHGATLVAVLHCHLGLPIGPEPGAGSILANLRETSTKLGGKDMAEGHQLRGLVSRIPKHVPLVTSSNLLGALGEVAVHTLSNIRGLLLNVHKHLAVVSVKPDIVRHETNVAACLPDNLLVVDIGLGGDLTKDHDHVGLGAGLASNLAVRVLS

SEQ ID NO: 69490 - protein, 365 aa, Zea mays
  Clone ID: UC-ZMFLB73011A08_FLI.pep
YVCGNTTTKAGLTVAVVKDSMTNDYAFEAGAMVLADRGICCIDEFDKMFTEHQALLEAMEQQCVSIAKAGLVASLSARTSVLAAANPIGGHYDRAKTVNENLKMSAALLSRFDLVFILLDKPDESLDKRVSDHIIALHTNDVDNFRPNKRTRTGSHFDGDPGLGVGGNSVASRLRLHPEKDKDFTPLSGQLLRKYISYSREHVFPRMSKAAAAILKEFYLKLRNRSASADGTPITARQLESLVRLAEARARVDLRDEVTEEDAQDVVDIMKESLYDKYVDEHGFVDFTRSGGMSQPKQAKKFLNALNKESELQQKDCFSRTELYTIADKISLQVPDLDTLVEKMNIAGYLIQKRSGMYQLVTAPY

SEQ ID NO: 69491 - protein, 151 aa, Zea mays
  Clone ID: UC-ZMFLB73015A11_FLI.pep
SLAPEIVLGRGHGFPADWWALGVLIYFMLQSDMPFGSWRESELEPITKIAKGHLVMPVSFSAEVVDLITKLLVVDENARLGTSGAEAVKKHPWFDGTDWERIASGTCAAPEEITERINYCIETLNEDLSASPSVPIEDPDDLTAPEWIQDW

SEQ ID NO: 69492 - protein, 306 aa, Zea mays
  Clone ID: UC-ZMFLB73017F10_FLI.pep
GALIAMAMVMIQTNESFDSRVGAFRRQLEKIILDKHEDTMSKMGAILASGVLDAGGRNVTIKLLSRNKHDKLTAVIGLAVFSQFWYWYPLLYFISLAFSPTAFIGLNSDLKVPKFEFLSHAKPSLFEYPKPTTQQTTTSTVKLPTAILSTYAKAKSRAKKDAESKANQEKATEEASGSTSSKAAKAQEKDADVMQVDNATEKKAPEPEATYQLLTNPARVIPAQEKFIKFLENSRYVPVKPAPSGFILLRDLQPTEAEDLALTDAPTAVGGSTGNTATAASQQGSGSSAMAVDDEPQPPQPFEYSS

SEQ ID NO: 69493 - protein, 281 aa, Zea mays
  Clone ID: UC-ZMFLB73026H07_FLI.pep
DPPPPLYRPWVAHSVPGISCAAHQEGHLIHPSLYCSGITRNSPAARRQTTAASGDRKKEEAETKVRERGKRAAMTMKQSRFKRICVFCGSSQGKKASYHDAAVELGNQLVARSIDLVYGGGSIGLMGLVSQAVYGGGRHVIGVIPKTLMTPEISGETVGEVRAVADMHQRKAEMARQSDAFVALPGGYGTLEELLEVITWAQLGIHHKPVGLLNVDGYYNSLLTFIDKAVEEGFINPSARRIIVLAPTAQELMDKLEEYEPYHDRVASTLNWETTMDHLAY

SEQ ID NO: 69494 - protein, 392 aa, Zea mays; identical to SEQ ID NO: 65098
  Clone ID: UC-ZMFLB73028G03_FLI.pep

SEQ ID NO: 69495 - protein, 181 aa, Zea mays
  Clone ID: UC-ZMFLB73038E01_FLI.pep
QDYKSLEQYQQKKIPLKIDSDVSVSGTRHKVRMTVENISKKSVVDSTRSVSAMDLGDASGSHSTRKETTRKGNGSDGLWRKIRSGLGVARPSDNRRTLEVSGTDSGVAFFLHFSVHTSESSTDGEEYNDTRILPVHYSDNYFSLTPGENMAVDISFEAPQGSSPRVVLRGWNHHLDHAVMI

SEQ ID NO: 69496 - protein, 152 aa, Zea mays
  Clone ID: UC-ZMFLB73022G12_FLI.pep
LVTFQLEKQRNYYESLLLEVKEETEKEISAATEKAMSTKLQKLEVKFDKCMEEKKFLDEVNGNLVKNQEMWIETIRKAQAREQAALRLKDEKIEKLQEELRGLIAHFDCQSDTAQASNAISSDIPGGMILPVASESSSSGGVVGGTGNGEQN

SEQ ID NO: 69497 - protein, 126 aa, Zea mays
  Clone ID: UC-ZMFLB73027B02_FLI.pep
TLITGNLYSFFPIFHFSSTMPPILLFPPSIFTFTPQQNKPTKDTAYWRQEKKLCTQAYNSYIPPRYKRALRCLYAIFILNEPFTATGHLHVVLKWDTKNRKSGWSTCILRSQLSASCIREVTRSRS

SEQ ID NO: 69498 - protein, 107 aa, Zea mays
  Clone ID: UC-ZMFLB73028G10_FLI.pep
RRSTSTSSTSARPAPSPPAPSHSTRSTRRRRTPSTRTGTRSRRRSLPRRPSAPAATYSTSTTRRRRTTRTPRRPAARRSTTTSSADRSTGRRATELASSGAHNHTPV

SEQ ID NO: 69499 - protein, 436 aa, Zea mays
  Clone ID: UC-ZMFLB73028H03_FLI.pep
GHHLDEDEQIAQALQENIGHNLAEDEQLARALQESMNDGPPRQHIPVEDVNSESTPASILPSNIFRTSGLRVCAGCRSPIGRGRFLSCMDSVWHPECFRCYACDRPISEYEFAVHENHAYHRPCYKERFHPKCDVCSSFIPTDKNGLIEYRAHPFWMQKYCPSHENDGTPRCCSCERMEPKDSQYITLDDGRRLCLECLHTAIMETNECQPLYIDIQEFYEGMNMKVEQQVPLLLVERQALNEAMEAEKSVHHLPETRGLCLSEEQIVRTILKGPIGPGNRIIDMVTGPYKLIRRCEVTAILILYGLPRLLTGSILAHEMMHAYLRLKGYRTLSPEVEEGICQVLAHLWLESEITSGSGSMSTTSDASSSSSTSSSSKKGAKTEFEKRLGEFFKYQIETDSSVAYGDGFRAGMRAIERYGLRSTLDHIKMTGSFPC

SEQ ID NO: 69500 - protein, 339 aa, Zea mays
  Clone ID: UC-ZMFLB73032F02_FLI.pep
NLHKIEQDQMRVIPLSLQHFLEKTAYPLLEGSARFLLDWLIEGHRGYLETNPSTSPEHYFIAPDGKEACVSYSTTMDISIIREVFSALILSADILGKSDTNVVQRIKKALPNLPPMKVARDGTIMEWAQDFQDPEIHHRHVSHLFGLYPGHTMSLEETPDLCRAVANSLYKRGDEGPGWSTSWKMVLWARLHNSDHAYKMILQLITLVDPEHEVSREGGLYSNLFTAHPPFQIDANFGFPAALSEMLVQSTGTDLYLLPALPRNKWPQGYVKGLKARGGVTVNISWKEGSLHEALLWSSGGQNTLSRLHYGDQIATVSLSSGQVYRFSMDLKCLKTWPL

SEQ ID NO: 69501 - protein, 157 aa, Zea mays
  Clone ID: UC-ZMFLB73022H11_FLI.pep
VGPKTIHVPSGEKLAVFDAAMKYKNEGHDTIILAGAEYGSGSSRDWVAKGPMLQGVKAVIAKSFERIHRSNLAGMGIIPLCYKAGEDADTLGLTGHERYTVHLPTNVSEIKPGQDVTVTTDNGKSFTCTLRFDTEVELAYYDHGGILPYVARKIAEQ

SEQ ID NO: 69502 - protein, 179 aa, Zea mays
  Clone ID: UC-ZMFLB73045B02_FLI.pep
AVLLDEDYDARITDVGLTRLVRMAPGEGGDTSPFLNGDFGEFGYVAPEYASNPVGTMKGDAYAFGVILFELVSGQEAAAVVTDVTGEGFKGTLVDWVNQLKASGRISDAIDKPLRGKGHEAEIQEFLKIAFACTQPRVTERHSMYRVFHALKSIGEGCDVTEQFDEFPLAYNKDDSDAI

SEQ ID NO: 69503 - protein, 426 aa, Zea mays
  Clone ID: UC-ZMFLB73029C09_FLI.pep
QEFLGDTPCYQTGVLRTNCIDCLDRTNVAQYAYGLAALGRQLHAMGLTDVLKIHPDSSIASALMEMYQSMGDALAHQYGGSAAHNTVFPERQGKWKATTQSREFLKSIKRYYSNAYTDGEKQDAINLFLGYFQPQEGKPALWELDTDYYLHVTTAGDDLMSDSYHLSSAPGNNVFVGSGAALNPGTILSPVPACKEDFSRKKLTSFDKLIERTCSSIRNVRLHCDADLKPSGGVGTSGMAPDAAEIQLKSPNWLFGQRKHTETISTARVAPVENVNEGNRDESNVSLCGELIWLSSSVESCEEDIFRRYLAFTTADVENGWYGGTLLYDRDENSGAYRHYSELCQGAVMDPFEHDPEKERHYAEALSVDLGDARVEAEMQAALDDYQVIGSDLSIIPSCGALAEDPSQLTRWIIGDERLLVGAAAQ

SEQ ID NO: 69504 - protein, 408 aa, Zea mays
  Clone ID: UC-ZMFLB73045G02_FLI.pep
LIQSIPMTTVPKPQQVAHSRARLAPRAIGALLEFAPASSSLRFAVHRCRTARLEVKASGNTFGNYFQVATYCESHGGGVGCVISGCPPRIPLTEADLQVELDRRRPGQSRITSTRKETDTCKILSGTHEGVTTGTPILVIVPNTDQIGSDHREIANVYRPSHADATYDFKYGVRAVQGGGRSSGRETVGRVAAGALAKKILKLKCGLEIESNIVRCPDPEYAEKMIDAIDRVRVRGDSVGGVITCVARNVPRGLGSPVFDKLESELAKAMLSIPASNGFEIGSGFAGTDLTGSEHNDEFYMDKAGSVRTRTNRSGGVQGGISNGEIVHFKVAFKPTPSIGVKQNTVSRERQNVELLARGRHDPCVAPRAVPVVESMAALVLMDQLMAHVAQCEMFALNTALQEPVGSF

SEQ ID NO: 69505 - protein, 399 aa, Zea mays
  Clone ID: UC-ZMFLB73023E02_FLI.pep
RKHTQLLANPAVSAMHAKMTKPAAIVVAAIAVLSVSLLAGSSCLALARPSGDFSIVGYSEEDLSSHESLAELFERWLSRHRRAYASLEEKLRRFQVFKDNLHHIDETNRKVSSYWLGLNEFADLTHDEFKATYLGLRSSVGDGGSGIDDDDEPEEEEGYEGVDGASLPKSVDWRSKGAVTGVKNQGQCGSCWAFSTVAAVEGINQIVTGNLTALSEQELIDCDTDGNNGCNGGLMDYAFSYIAHNGGLHTEEAYPYLMEEGTCQRSSSSEKKWPGSSEDANDDAAVVTISGYEDVPRNNEQALLKALAQQPVSVAIEASGRNFQFYSGGVFDGPCGTQLDHGVAAVGYGTAAKGHDYIIVKNSWGPSWGEKGYIRMRRGTGKRQGLCGINKMASYPTKN

SEQ ID NO: 69506 - protein, 332 aa, Zea mays
  Clone ID: UC-ZMFLB73029D07_FLI.pep
SSSICTTERMDGRIDGVRLVHSTATRSTRTASSLAHPSTMPGSTRDITFSRLSSRRDTQSTRSRLSTTAGRPVTSSSSTTPKLYTSLFSVTLHVYAYSGAMYPSVPATTPADEWPPPPPAELRILASPKSASRGLNDSSRRMLLDLTSRWRMGRSQPWWRYSRPLAAPTATSCRSTHPSAPSFRPAAPCSRSYRLPLGRCSYTSRLAAPSALVMLHSSFTTFTCRMALSVPTSESNSRHRTDAAGRSMAADGAVLVATPRVTCFTATTAPLPSFTRYTFPDPPLPTRFSSRTPSMISRSSNARIRNDLRSHEPFLANSFPAEASARRRRRGR

SEQ ID NO: 69507 - protein, 121 aa, Zea mays
  Clone ID: UC-ZMFLB73042E11_FLI.pep
DVVPKQHSTAGAHHETIVHSKACNCQNSMSGNYLDLAPTEQLVVDHVLEKLMVITPDVASQSDFQLHSKVPHRLRLTQVLGRGSCYSWEPEYLGASQNCMGLGSCGKHMYSVHIPEVVYFG

SEQ ID NO: 69508 - protein, 222 aa, Zea mays
  Clone ID: UC-ZMFLB73028C01_FLI.pep
HMRRGNHACTHAGKLAGGGGDTVVGLTAVALAHTLVVAVMVSAGLHVSGGHINPAVTLGLAATGRITLFRSALYVAAQLLGSTLACLLLAFLAVADSGVPVHALGTGVGALRGVLMEAVLTFSLLFAVYATVVDPRRAVGGMGPLLVGLVVGANVLAGGPFSGASMNPARSFGPALVAGVWADHWVYWVGPLIGGPLAGLVYDGLFMAQGGHEPLPRDDTDF

SEQ ID NO: 69509 - protein, 362 aa, Zea mays
  Clone ID: UC-ZMFLB73029D11_FLI.pep
LTKINRQVPAGNLITDWSSQHRACHPLSSSSVVGDVARNLEPLGVERARHVDPLVGVSPEVVPLGLHQVGRQPVPAVGVEVGQASGHSRGADAVVDGEAHHPAPRRLPVHDLLRELGVYEQAGEARVPVVGLLDAVQEDGADDAPALPDPGQLAEVEPPAFLRALGLDDVHALRVAADLGRVQGLPHVLHQLRLVHRRAGGVVVTLEDLGGLHPLVLQPAQEPRVQGRLDRRSGHRQLGGLLHRPLPCPFHPGLVKDLVHQVAIAMLVLDAKDVGRDLDQEAQELALVPLGEHLVQLTVGELTDRLENVVCLGNQLHIAILDSVVNHLDKVARSTFANVRDTRATVRDLSSHLEDNVFDVLV

SEQ ID NO: 69510 - protein, 180 aa, Zea mays
  Clone ID: UC-ZMFLB73045H01_FLI.pep
TIIGNKNYYDIRKPCIGSLCYDFSNLEKFLNLKSVRESLGVGDIEFVSCSPTVYEAMLLDWMRNLEVGIPELLESDIKVLIYAGEYDLICNWLGNSRWVNSMEWSGKEAFVSSSEKPFTVDGKEAGVLKSHGPLSFLKVHDAGHMVPMDQPKAALEMLKRWTSGNLSEPSSSSQRLDFTM

SEQ ID NO: 69511 - protein, 455 aa, Zea mays
  Clone ID: UC-ZMFLB73040C05_FLI.pep
RRSQPLTPSLSPAPVTSISTRPPEIQNQTSESANPCSDSPLLGLLDGSSRAGAAEPMWPGCGGRFYWAPESAPPGQARGVAVLFAWVWSDETQLRPFVELYSSLGWRCLVCHPDLVALYLSEKAISLATGVINELVKELKIKIVPIVLASFSGGSKGCMYKVIQLLDGICEGDAIMKDYRLVRNCICGQIYDSSPVDFVSDVGAQFVQKPADGNSSQPTILHSWMAKALASVMDTLFPSRIEAQRAEYWHTLYSAAGLGPVLLFCSEADNLAPCYIICGFARRLIELGTEVKLMKWNSSQHVGHYNSHETEYRTAVDDMLKKALLTFCHRSQLYDSNMAGDREYKIAHSVCSLHNAAANSNESLRGVPNSPSDHFFLPSSKDHDESQEPGSHMSHPPCMEPKGVLGQILFDVCVPRNVEGWDIKPTVSPNGRPTFASARQLGPFNPIRYFRRSRL

SEQ ID NO: 69512 - protein, 104 aa, Zea mays
  Clone ID: UC-ZMFLB73046A04_FLI.pep
LAKKANEGALSIDDMAGGTFTISNGGVYGSLLSTPIINPPQSSILGMHSIVQRPVVVNGDILARPMMFLALTYDHRLIDGREAVFFLRRIKDVVEDPRRLLLDI

SEQ ID NO: 69513 - protein, 167 aa, Zea mays
  Clone ID: UC-ZMFLB73028D05_FLI.pep
HTDKWFPKPSVCTSNQLARAAAGSHHVGGEAPPLLQPPQEGRGAARRRVRVLRDRGGHRHRRGRVREVQEGGEGAQAQAAPRRGRRHRRRRLRTLREARGEEGPRARAQAQDHGGGRCRGGRRRRRLRIPRAPREEEGPQGRRGGQRREEAPPPLRLTVVPAGARPS

SEQ ID NO: 69514 - protein, 415 aa, Zea mays
  Clone ID: UC-ZMFLB73030B01_FLI.pep
LPPRTPDSTFSILDPFAARRSKNRGSLTGERAAMGGSSAMLAVLAVVVLAAVGGADAAAESSEASAKGRYHALFNFGDSLADAGNLIQNGTPDILATARLPYGQTYFGRATGRCSDGRLVIDHLAQEFGLPLLPPSKATNASFAYGANFAITGATALDTPYFEAKGLGAVIWNSGALMTQIQWFRDLKPFFCNTTQACKKFFAKALFVVGEFGGNDYNAPLFAGMGIPEVYKFMPDVIQGISDGIEALIAEGAVEMIVPGVMPTGCFPVYLNMLDEPKEGYGSRSGCVRRYNTFSWVHNAHLKAMLKKLRAKHPNVRIIYGDYYTPVVQFMLQPEKFGFAKQLPRACCGAPSTPEKAAYNFNVTAKCGEPGATACADPTTHWSWDGIHLTEAAYRHIAKGWLYGPFADQPIIQSS

SEQ ID NO: 69515 - protein, 239 aa, Zea mays
  Clone ID: UC-ZMFLB73037C11_FLI.pep
FLNGFNQGYNPNPIGGYGIRVDGRYGLISGARNGFSSFGPGYGMGMNVEGGLGGTFGASSGFISNSNGRQMGSYFNASSNRLGSPIGYLGLNDVPGSMLSSMSRNVWGNGSLNYPSNPTNMSAFASPRNGGQVSLPSDNWGGLPSAHGMDNISSLGSGNLGRGTGDNNFGLPSGSYGRNNSTGTIGEPFSAAGNTYEVNNRDTYGSSSIYGGTAWRFASSEVDMPSFVHDIGNVDPTIK

SEQ ID NO: 69516 - protein, 131 aa, Zea mays
  Clone ID: UC-ZMFLB73043D01_FLI.pep
KSKLAFVYASPRSTKKTVQVIEHLPYDHRADVFSFGIVLWELLTGKLPYEDMTPLQAAVAVVQKDLRPTIAVDTHPMLAELLQRCWQKDPALRPTFAEIVDILNSIKEAVRSSVHHKRHSCRSHSGRRRGC

SEQ ID NO: 69517 - protein, 178 aa, Zea mays
  Clone ID: UC-ZMFLB73046B06_FLI.pep
VEQVRQRRKAEKSLLSLQRRLAMAGADGFHPAVALAEDSAEKGKEIQAAGTKRNPFLEPALPPGEKDVSEVGMPPEKKKLSVLEAFAPAMQSRTIVRDVDAGAGLDENQRSIVPKERAPVHLKIGFGKKPLAAALNSRTLDLREDPSFLKEEAKDDKKRRAGMILRASMENPQELPQL

SEQ ID NO: 69518 - protein, 293 aa, Zea mays
  Clone ID: UC-ZMFLB73025G01_FLI.pep
RTRSGEARHGRSKIPQFRDRSALRTCCHSPTRPKITGDLLSRHHSMSPGDHSRGAARSDLRFVHGGGGHGQQVARSRGGRPPGLHLGDHLRRHEPGQQQPRDERGRHQHREHGAPAPGGDVAREERADGGADGPRAVDDRRDGGQRAGVAVERAVRAEVRGHGRRDQRVGAVHQHPRDEHEGDVPGQRDVPVDAVEEERRYRREGEARGRQRPGVQVVGDVAGEDAAHDAAHVEQRRQYPGCGVRQVFSTDSCVADIEGKPVQERIRHKLAEEKAEGERGNTRDPPRLNKPNR

SEQ ID NO: 69519 - protein, 160 aa, Zea mays
  Clone ID: UC-ZMFLB73028D07_FLI.pep
PQDFMFLSRCLRWRLGPLAADPPCQLNVLWHDGHTLSMDGAQVGVLKQANKVCLSSLLEGKHRMALETQISFEVLCNFPDEPLEGQLPDQQLSALLILADLTEGNSSRAVAVRLLHSTSGGGRLTGSLGGKLLPGSLPSRGLASSLLGTSHLSRFFGLSA

SEQ ID NO: 69520 - protein, 490 aa, Zea mays
  Clone ID: UC-ZMFLB73030C03_FLI.pep
MPQMEGSTDQIAAGWFAKEPASERPVGLPRTGSSSRLNAQAPEFVPRGPPPPAPAVVLPPPPQVIRMFAAPPPPPRGGFFSAPQPRPFEYYAPIGERSGFAAKEQQAPELEAEMLPPAAVKTEPVVDGLDDEVVHKITKQVEYYFSDINLATTEHLMRFITKDSEGFVPISVIAGFKKVKTSVRNNVMLAAALRTSSKLVVSDDGKRVKRQQPFTESDLQELQSRIVVAENLPGDPSYQNLKKIFSAVGSLISIRTCYPQTPNGTGPATNRSSKLDMLFANKLHAFVEYETPEDAAKAILELNDEKNWRNGLRVRLLNTCTVKGAGKGKNGMNETDGNSEEDVSTLNHSNEKQFEQSSQLLDVLPEHLFDENFNKEVPKRGKGRGRGGRGHGRGNHQYNNHHHNNQHHQNNQPQYNNHGNNHLGGNRGSLHSVGTTPHNLITKLEPHPQLPIGANKLPPGPRMPDGTRGFTMGRGKPQAVLPGLCAVGVE

SEQ ID NO: 69521 - protein, 446 aa, Zea mays
  Clone ID: UC-ZMFLB73048E04_FLI.pep
LRMSASRSGRIRRAGSVALGDFLRREASAERAALGGGERPSVAAGQACRAKKGEDFALLKPACERRPGAPSTSFSAFALFDGHNGSAAAVYAEEHLLANVLGCVPADLSRDDWLAALPRALVAGFVKTDKDFQTKAHSSGTTVTLAIIDGSVVTVASVGDSRCVLDAAGSIYYLSADHRFDANEEEVGRVTECGGEVGRLNVVGGAEIGPLRCWPGGLCLSRSIGDQDVGEFIIPVPYVKQIKLSNAGGRLIISSDGVWDALTAEMAFRCARGLPPEAAAEQIVKEAVESKGLRDDTTCIVIDIIPPEKQKCTIESPKTPGKGLVLLKNFFLRKTASGSLSLADKDNYPEPDFVEEVFEDGCPSLSRRLNSEYPVRDMFKLFACAICQIDLESGQGISIHEGSSKTGKLRPWDGPFLCHSCQEKKEAMEGKRHSRDSSSRNSGSSE

SEQ ID NO: 69522 - protein, 253 aa, Zea mays
  Clone ID: UC-ZMFLB73043E05_FLI.pep
SIQSHSPFTDGELLLSKSPKNSANATSEDPPSLVAPNAFSLATASLSRRILPSSASITSLTFASSSSALTNFSYPRSSTPILHSSTMNTLLSPCSAYSGQHIMGRPDMMASSVEFQPQCVTNARTASCRTTSACGTQSFTTMPLSLFLSRNPSGSSFPRSVSGSSGGLLTAHRNRWPELSSPWAISCNCAAGKEPLLPKQRNTTLRLGCASSHARHSCLPPPPAVLLPSLTSGPTQKTLGVGRPGTQTPSPSA

SEQ ID NO: 69523 - protein, 150 aa, Zea mays
  Clone ID: UC-ZMFLB73046B09_FLI.pep
VEELLKEYDNVCTLRVRMPISSDLSNPRNFITKIARYDKVVNIPNSMTILDELLPISIEMAKRDCRGIWNFTNPGAVSHNEILEMYKKYINPDFKWTNFTLEEQAKVIVAPRSNNEMDTSKLKAEFPQLLSIKDSLIKYVFEPNRKVPVN

SEQ ID NO: 69524 - protein, 180 aa, Zea mays
  Clone ID: UC-ZMFLB73026D01_FLI.pep
YQHCNLNLQCPKHKHRDTKVRPERRAAMALPAVCTLCGEDGREVIRLVPEDAGAGVGEVLHPGQLGNAAVGSDTDRVAEEVAREVLLQVVARVQVPVLLGDLVHLLHTLYALGPLEDVFQHSQVLVPKRHPEAMDLAPGRLPSRQVVRLVRAHGDLGVPGTVHGPLVDVGGPNDDVLVVH

SEQ ID NO: 69525 - protein, 325 aa, Zea mays; identical to SEQ ID NO: 54104
  Clone ID: UC-ZMFLB73038D12_FLI.pep

SEQ ID NO: 69526 - protein, 252 aa, Zea mays
  Clone ID: UC-ZMFLB73043F07_FLI.pep
TTNSPPRHYIELVRTLTFKHPNCGKTSRQTGRQLTTHRNHSISAISRPSVLCTVLPFGARVIIGRLLVLVPAGDDEVGKEVEKAEHGEQPEEVVEVAAVEVLRDPPDAAVPGGDVGDDGHQDRAEVVAERDGGERQRGAHAPHGVGRLVVEELQLPHEGEHLRAPDDEVLRYLPEDGDGHDVVLAVQAVPRDGAQPHDVQHARRHHGEDGDDEADAHALQLREPARPPGVGAHQGHDGAVVHGDPDDDADGV

SEQ ID NO: 69527 - protein, 328 aa, Zea mays
  Clone ID: UC-ZMFLB73068B11_FLI.pep
TQFFFHFHFVGKISDFSNADVAVDQYHRFEEDVQLMADMGMDAYRFSIAWSRILPNGTGQVNQAGIDHYNKVINALLSKGIQPYVTLYHWDLPQALEDRYNGWLDRQIVNDFAAYAETCFKAFGDRVKHWITLNEPHTVAVQGYDAGLHAPGRCSVLLHLYCRTGNSGTEPYIVAHNFILAHATVSDMYRRKYKAAQNGELGIAFDVIWYEPMTNSTIDIEATKRAQEFQLGWFADPFFFGDYPATMRARVGERLPKFTADEAALVKGALDFMGINHYTTFYTRHNDTNIIGRLLNDTLADTGTISLRESSSCVFASSFQLKKKKPER

SEQ ID NO: 69528 - protein, 250 aa, Zea mays
  Clone ID: UC-ZMFLB73058C05_FLI.pep
AARGGVRDRRAVLRRQGEPERVAGAGGVAGGVQPLADLGHLRRLRQRPQHHRGRLAGQPSAVRRQQPQVLHLLDSKSSSLDHPSSPFFPAINQVKKWKRNAGRRVPGDGLLQPPLLGLRADQQPRGHRRRHLARLLLRRPPVRRHASHLEGPAPGPLVAAARLRRARRLLALRALHAPRLARRHGAVRGRGRQRAPRRRAAHAHADGLRPLPRRGIRARRILPKRAARRLGQQPRTGRRAPPARRPAGVL

SEQ ID NO: 69529 - protein, 513 aa, Zea mays
  Clone ID: UC-ZMFLB73065D10_FLI.pep
ELLDEVGSRYLDHLIIERKYAEAAQRCPKLLRGSPSAWERWVFHFAHLRQLPVLVPYIPTENPQLSDTAYEVALVALTTNPSFHELLLTTIKNWPPTLYSASPVISAIEPQLNSSSMADSLKESLAELYVINGQYEKALSLYAELLKPEVFEFIEKYNLHDAIHDKIVNLMIVDNKRTVHLLIQHRDIIPPYEVVEQLLHTSKKCDKRYLLHLYLHALFEIDIHAGKDFHDMQVELYADYETRMLLPFLRTSQHYRLDKAYEIFAQKELVREQVFVLGRMGNAKEALSTIINKLEDMQEAVEFVTEQHDDELWEELIRQCLQKPEMVGNLLEHTVGNLDPLYIVSLVPDGLEIPRLRDRLVKIVTDYRTETSLRNGCNDILKADCVNLLVKYYHEARRGVYMVSMDEEVHGNRADDGSSRGHERSSSVRALDIKSRTRCGARCCLCFDPLPIQDISVIVFYCCHAYHLSCLEGGLDSMRSNSGQDSDGGMDDEDGSPSGQSRMRCVLCTTAAS

SEQ ID NO: 69530 - protein, 323 aa, Zea mays
  Clone ID: UC-ZMFLB73050B03_FLI.pep
DADGLHKALEASILRNEGSWSGSSHSSAAERTLPFQVKGGEWEIDKRLLKMGGMVASGSCGDLYHGTYLGEDVAVKVIRAEHLNKNVWNEFTQEVYILREVQHKNVVRFIGACTKPPQFCIITEYMSGGSLYDFVHKQHNVLNLRTLLKFAVDVCRGMCYLHERGIIHRDLKTANLLMDKDHVVKVADFGVARFQDQGGVMTAETGTYRWMAPEVINHQPYDNKADVFSFAIVIWELITSKIPYESMTPLQAAVGVRQGLRPGLPKKTHPKVLDLMQRCWEADPSARPAFPDILAELEDLLAQVQGTPGKTAHAPSNNSNTKD

SEQ ID NO: 69531 - protein, 81 aa, Zea mays
  Clone ID: UC-ZMFLB73058D02_FLI.pep
GGQSFIESQVRKIAELRRLCAEKGVNPWIEVDGGVGPKNAYKVIEAGANAIVAGSAVFGAPDYAEAIKGIKTSQRPAAVHA

SEQ ID NO: 69532 - protein, 285 aa, Zea mays
  Clone ID: UC-ZMFLB73050G09_FLI.pep
PTLPDPFPFPSPPAPPPRPLRQPPAPPLRRAPPLHRRRREAGGLTKSVGCGGGDPGAGAESRAMGQQSLIYAFVARGTVVLAEYTEFTGNFTTIAAQCLQKLPASNNKFTYNCDGHTFNYLVEDGFTYCVVAVESVGRQIPIAFLDRVKEDFTKKYGGGKAATAAANSLNREFGSKLKEHMQYCVDHPEEVSKLAKVKAQVSEVKGVMMENIEKVLDRGEKIELLVDKTENLRSQAQDFRQQGTKVRRKMWLQNMKIKLIVLGIIIALILIIILSVCHGFKCGSK

SEQ ID NO: 69533 - protein, 319 aa, Zea mays
  Clone ID: UC-ZMFLB73051A02_FLI.pep
LCPQNPRRRPSELRCVSSPSKDMDYDRLNSPNTSAISLEVMGHRLHISQDPNSKHLGTTVWDASMVFVKFLEKNSRKGRFCPSKLKGKRVIELGAGCGLAGFGMTLLGCDVTTTDQVEVLPLLMRNVERNRSWISQSNSDTDTIGSITVAELDWGNKEHIKAVEPPFDYIIGTDVIYSEHLLQPLMETITALSGPKTKILLGYEIRSATVHEKMMEMWKSNFIVKTVSKSKMDVKYQHPNIHLYMMDLKAPLIPEVEATDDNGNDDEEVVSNLGEDEDNGLKSESCSGSSPEAKSGSLDDWEIRRCGAMAARLLKDVKL

SEQ ID NO: 69534 - protein, 452 aa, Zea mays
  Clone ID: UC-ZMFLB73056C10_FLI.pep
SSSPPQKPTNPVQPPAVSAAAAAAAALSRSFRRTRLVMAFNKIKVSNPVVEMDGDEMTRVFWKSIKDKLIFPFVDLDIKYFDLGLPHRDATDDKVTVEAAEATLKYNVAIKCATITPDEARVNEFGLKAMWKSPNGTIRNILNGTVFREPIICKNIPRLVPGWTKPICIGRHAFGDQYRATDAVIKGPGKLKSVFEGKEEQVELEVFNFTGAGGVALSMYNTDESIHAFADASMATAYEKKWPLYLSTKNTILKKYDGRFKDIFQEVYEAGWKTKFEAAGIWYEHRLIDDMVAYALKSEGGYVWACKNYDGDVQSDFLAQGFGSLGLMTSVLVCPDGKTIEAEAAHGTVTRHYRVHQKGGETSTNSIASIFAWTRGLAHRAKLDDNARLLDFTQKLEAACVGAVESGKMTKDLALLVHGSSNITRSHYLNTEEFIDAVADELRSRLAANSNL

SEQ ID NO: 69535 - protein, 138 aa, Zea mays
  Clone ID: UC-ZMFLB73066C01_FLI.pep
VGKENLGSDVMCSACQMAVVWIENQLRENKTKELILQYANQLCERLPSPNGESTVSCQEISKMPSLAFTIANKTFTLTPQQYIVKLEQGGQTVCISGFMAYDVPPPRGPLWILGDVFMGAYHTVFDFGNDRIGFAESA

SEQ ID NO: 69536 - protein, 289 aa, Zea mays
  Clone ID: UC-ZMFLB73068G12_FLI.pep
SLTSRMVIAGSWLAPTPVSSTLLAATASKLPMKGSGMHLFGESLRTAFLCGTHCFLAPNGRKAEVESALLLVNLGLARKANRHPGCWIQFHPITQLFGKIRGGLVPTTAAVNGVMRTGNPSVYSDHLWASAFLVFGFKSEPPAVQLKAVDMVLFIKKTALPLAVDSFMSFSRCGSALELLKVCTNVLEEVEKSYASRMQDWSRGSLCWRKKLQPNHRVDELVWQEVTLLKATLLETRAKLLLRGGLFDTGEELCRTCISIRTVMLGHGHAQTLAAQETLAKLVRYRSKI

SEQ ID NO: 69537 - protein, 540 aa, Zea mays
  Clone ID: UC-ZMFLB73053A04_FLI.pep
FFPFIRNPRTLAARTKPPERRATMYRLFRRSFSMAAEGSAAAASSSPPPSTSMSSTPRQHLPDELYRRIMNVGRPSIPLSPVLEQWNQEGHTAKKFVIQAIVKKLVGLRRFAHALELSFWMTDRRHLHLSVGDVAYRLDLISKVHGLEKAVEYFGMVPKQLRKPQCYGSLLKCYVEAKAVDKAEEHFAKMQEMGMTSSYAYTWMMKLYLQTGQLERVHAMFQDMEEKGVKPDTFSVEAMLAAYIAAEDVQGVGKVLDKANPHEKLVTWHGHASAASLFMKSGMQVGAVMALVEAERRISPKSSRIAYAFLLKTYTELGMHAEAGRIWSVYKSKVPPCNTMYMSRLSALLRTNDIDGAEATLKEWETVPLRYHDFRLINVMVDAYCREGLVEKAVALVDGAIKKGRTPYANTWYKLAGGFFKTGQVPEAVDMTRKALDSATPPWRPDLANVLMSLNHFVDQKDVGAAEEMVSTLQKLVPLTRDVYHCLLKTYVRAGKPPSDLLERMKEDGLEADEETERILAGECERVDMHPLSITNHLIG

SEQ ID NO: 69538 - protein, 114 aa, Zea mays
  Clone ID: UC-ZMFLB73056G07_FLI.pep
NRILDPLFFGDYPHQMRQILGPNLPKFTEGEKKLLKNQIDFIGVNHYQTFYVKDCIYSLCDMDAYPSEALVSISTERNGIPIGKPVKIGIVYCIILFNKNPSYKLIMHKLTQLN

SEQ ID NO: 69539 - protein, 322 aa, Zea mays
  Clone ID: UC-ZMFLB73059F02_FLI.pep
RVPTAPSAGTAFRERVMVTCRKMARVDVAELKQRLVKRLGRERAAKYFAHLTRLLNLKLTKVEFDRLCFATIGKDNIALHNALIRGIIGNALSGVPPPSRQAVTGQSGTTTAPSGQCVGVALPVVGNVGAVVDSGDGELARELGAPVGKVVSVEDGEEVEQIRSVPCVQSRSPITQPLGISVAGGSGTRVRRRLDDPLVSCYDCGHLLDTGSLCEDLHRRLHSTGTGVTVQAVDALNRGLDELLRRLIKPCMDLSRVRASSRRISKVNEKVAGRVNSLQQLNQGQRTTMQDFAVAVQSDPHLLGPNWPTQIEKVQAMSFGGE

SEQ ID NO: 69540 - protein, 252 aa, Zea mays
  Clone ID: UC-ZMFLB73062C11_FLI.pep
DFCPGGELFALLDMQPMKLFREESARFYAAEVVIGLEYLHCLGIIYRDLKPENILLQEDGHIVLTDFDLSFLTSSKPHVIKHSTSRRRRSKEYLPPSFVSDPATPSNSFVGTEEYIAPEVITGVPHTSAIDWWALGILLYEMLYGRTPFRGKNRKRTFHNILHKDLTFPSSIPVSPAAKQLIHGLLQRDPSSRLGSSAAANDIKQHPFFEDIHWPLIRCMEPPELDVPLKLTRKEPEQKVKPEEDIYSCSDY

SEQ ID NO: 69541 - protein, 154 aa, Zea mays
  Clone ID: UC-ZMFLB73059F04_FLI.pep
AGRRDGVVECDAQNNPRVTDVGDDHEVPLLDDGQRGATALHRVQTAAAPELVVHSGTCGHVGLFLEVELAVIKFLLVVDERPQHECLRGGVDPELRHEPEAPRRGHTNHLLRKQSRSPRHLPPPPSPRTTRTPFRPQLSIVLIDSSSTFLRIHS

SEQ ID NO: 69542 - protein, 314 aa, Zea mays
  Clone ID: UC-ZMFLB73062D01_FLI.pep
LSAPPGERTMEAGGVGLALQARAAGFGSSRHRGGLQAPTGSLRVADPAGPAVAVRARGSKPVAPLRLRAKKSSGGHENSHNSVDEALLLKRKSEEVLFYLNGRCIYLVGMMGSGKSTVGKIMSEVLGYSFFDSDKLVEQAVGMPSVAQIFKVHSEAFFRDNESSVLRDLSSMRRLVVATGGGAVIRPINWRYMKRGLSVWLDVPLDALARRIAKVGTASRPLLDQPSGDPYAMAFSKLSMLAQQRGDAYANADVRVSLEEIACKQGHDDVSKLTPTDIAIESLHKIESFVIEHTADSSASDAQAESQIQRIQTL

SEQ ID NO: 69543 - protein, 105 aa, Zea mays
  Clone ID: UC-ZMFLB73064G03_FLI.pep
DVYSMGIVLMELVTGLLPTDKTFGGDMDMVRWVQSRMDAPLPAREQVFDPALKPLAPREESSMTEVLEVALRCTRAAPGERPTARQVSDLLLHVSLDYYRACEKR

SEQ ID NO: 69544 - protein, 151 aa, Zea mays
  Clone ID: UC-ZMFLB73053H12_FLI.pep
RKGIRRSGAMGEQVVTEQIQRKLEEVNATVQQHLAGVQDHINFTMQQAYFKCAYGCFDRRHTQEAISNCVENCSVPVLAANNIFESEMAKFQGMLNRSLRVCQDKFEAANLQKLKSDATRELESCVNRSIDDSLRVLPHVVDQIKSTLKIN

SEQ ID NO: 69545 - protein, 372 aa, Zea mays
  Clone ID: UC-ZMFLB73054D01_FLI.pep
AMATSSVAADMELDRPNLEDYLPPDSLPQEAPRNLHLRDLLDISPVLTEAAGAIVDDSFTRCFKSNSPEPWNWNIYLFPLWCFGVVIRYGILFPLRSLTLAIGWLAFFAAFFPVHFLLKGQDKLRSKIERKLVEMMCSVFVASWTGVIKYHGPRPSTLPHQVFVANHTSMIDFIILEQMTAFAVIMQKHPGWVGFIQKTILESVGCIWFNRNDLRDREVTARKLRDHVQQPDNNPLLIFPEGTCVNNQYTVMFKKGAFELGCAVCPIAIKYNKIFVDAFWNSKKQSFTMHLVRLMTSWAVVCDVWYLPPQYLREGETAIAFAERVRDMIAARAGLKKVPWDGYLKHNRPSPKHTEEKQRIFAESVLMRLEEK

SEQ ID NO: 69546 - protein, 862 aa, Zea mays
  Clone ID: UC-ZMFLB73060C09_FLI.pep
TGSLPAALPNLTDLVHVHLGGNFFSGSIPRSYGQWSRIRYLALSGNELTGEIPEELGNLTTLRELYLGYYNNFTGGIPPELGRLRALVRLDMANCGISEEIPPELANLTSLDTLFLQINALSGRLPTEIGAMGSLKSLDLSNNLFVGEIPASFASLKNLTLLNLFRNRLAGEIPEFIGDLPNLEVLQLWENNFTGGIPTNLGVAATRLRIVDVSTNKLTGVLRSELCAGQRLETFIALGNSLFGDVPDGLAGCPSLTRIRLGENFLNGTIPAKLFTLPNLTQVELHNNLLSGELRLDGGKVSSSIGELSLFNNRLTGQVPTGIGGLLGLQKLLLAGNMLSGELPPEVGKLQQLSKADLSGNLLSGAVPPAIGRCRLLTFLDISSNKLSGSIPPELGSLRILNYLNVSHNALQGEIPPAIAGMQSLTAVDFSYNNLSGEVPSTGQFGYFNATSFAGNAGLCGAFLSPCRSVGVATSALGSLSSTSKLLLVLGLLALSVVFAGAAVLKARSLKRSAEARAWRLTAFQRLDFAVDDVLDCLKEENVIGKGGSGIVYKGAMPGGAVVAVKRLPAIGRAGAAHDDYGFSAEIQTLGRIRHRHIVRLLGFAANRETNLLVYEYMPNGSLGEVLHGKKGGHLQWATRFKIAVEAAKGLCYLHHDCSPPILHRDVKSNNILLDADFEAHVADFGLAKFLRGNAGGSECMSAIAGSYGYIAPEYAYTLKVDEKSDVYSFGVVLLELIAGRKPVGEFGDGVDIVHWVRTVTGSSKEGVMKIADPRLSTVPLYELTHVFYVAMLCVAEQSVERPTMREVVQILADMPGSTSTTSIDVPLVIEPKEEDGGPEKKQQQQQEGPHDSPPQQDLLSI

SEQ ID NO: 69547 - protein, 315 aa, Zea mays
  Clone ID: UC-ZMFLB73064G12_FLI.pep
VRIHSFSSTLGLRQRERTGLVPASLHLSSFKSAEYFGAMRSILKDPMPNMRRSCSQRSPGTIEKLNVVLARKPTYISSTSNIINDGARLLLPQTGYEHDVVVAVYEDEPTSIISYAMTSEEYVEQVTHRLNSSLSFSHQPNTNGISSHGLEASSPSQGDHLHSKGTHFKLSFDDDSPISPDKTKFSVICYFAKHFAALRKKCCPKDIDYIRSLSRCKRWNAQGGKSNVYFAKTLDERFIIKQVTRTELESFVEFAPQYFKYLMESLASGSPTCLAKIVGLYQVGVKSLKTGKEVRMDLMVMENVSLKGRYLGCMT

SEQ ID NO: 69548 - protein, 293 aa, Zea mays
  Clone ID: UC-ZMFLB73058A04_FLI.pep
DYRKVTMGQRGEEKQYSYEDILRCMKKVTPMDLKQTVQVDKDLVIRAYYAGHVIGAAMIYAKVGDAAMVYTGDYNMTPDRHLGAAQIDRLKLDVLITESTYAKSIRDSKPAREREFLKAVHKCVSGGGKVLIPTFALGRAQELCMLLDDYWERMGLKVPIYFSAGLTIQANVYYKMLIGWTSQKIKDSHTVHNPFDFKHVCHFERSFINNPGPCVLFATPGMITGGFSLEAFKKWAPSEKNLVTLPGYCVSGTIGHKLMCGKPTRVDYEDTHIDVRCQVDFHVISYLAKNVQL

SEQ ID NO: 69549 - protein, 361 aa, Zea mays
  Clone ID: UC-ZMFLB73060C10_FLI.pep
PVGVHDGLAAPAVPGEAGDHVHVVGADRPRQRPRRRVVHPGLLGDAAPPGALAVEHAHHARALVHVPDLEQARAVARRVGEEAVAGGAARELRAEHGAVGEHQLLEQLEVVVAWLVADVYRAAADCPRRAVVVRRRVQAMEHVPVGLHELAEEEGVVGDGGDVDGVRRRVPRVEVVGGAHDGGLARAVEHVGVVAHAGDAAVVGEVARHGVLERAVVGAGERDPAAVPGAERLDDVLHVHLDAVDAAGGEVRVQLVVEAQRPARVHQPQAQHGQRVHDDVRLVAHHTRRLHRVRQRALVVLHPLRRRLHAAPVPRHGVPHVHVPDAVLALRLLHQQLQARRLRLLLAAAAAALLRLRLLLE

SEQ ID NO: 69550 - protein, 276 aa, Zea mays
  Clone ID: UC-ZMFLB73062F10_FLI.pep
ASPRHTDNTGTGSEQSGAMAPRLLLFLLLLLPLLAAGHQHPSSYGSSALSEWRPAKASYYAADPEDAIGGACGFGDLGKHGYGMATVGLSTALFERGAACGGCYEVKCVEDLKYCLPGTSIVVTATNFCAPNYGLPADAGGHCNPPNHHFLLPIQSFEKIALWKAGIMPIQYRRVKCLREGGVRFSVNGRHFFFTVLISNVGGAGDVRSVKIKGTELGWLPMGRNWGQVWHINCDMRGQPLSFELSSSDGKALTSFNVVPKDWEYGKTYTGKQFLL

SEQ ID NO: 69551 - protein, 86 aa, Zea mays
  Clone ID: UC-ZMFLB73055A09_FLI.pep
ISHECGHGRQMLSKLAVQKHGSIKLAPGNSWLIAQHSVPTDLGHVSLQRLVRSHESFICGTGTQTRIRRKHPLLKMRRCSMGTLML

SEQ ID NO: 69552 - protein, 368 aa, Zea mays; identical to SEQ ID NO: 42679
  Clone ID: UC-ZMFLB73058A12_FLI.pep

SEQ ID NO: 69553 - protein, 507 aa, Zea mays
  Clone ID: UC-ZMFLB73091C12_FLI.pep
PTEIAPGRPPFTFKKGARLPINEGVGHLSSSPAPRSGYSTGLATLSPSIEGGGAAEMVGGGGGGPLRRVGKYEVGRTIEEGTFAKVKFAQNTETGESVAMKVLDRSSILKNKMAEQIKREISIMKLVRHPNVVRLHEVLASRKKIFIILEFITGGELFDKIIRHGRLSEADARRYFQQLIDGVDFCHKKGVYHRDLKPENLLLDSQGNLKISDFGLSAWPAQGSFLLRTTCGTPNYVAPEVLSHKGYNGALADTWSCGVILYVLLAGYLPFDEVDLTTLYGKIESAEYSFPAWFSGGAKSLIRRILDPNPETRIRIEEIRSDEWFQKNYEPIKEIENEEVNLDDVNAAFDDPEDDNEDAFEDETGPLTLNAFDLIILSQGLNLAALFDRRQDCDKLQNRFLSRNPAKVILSSMEVVAQSMGFKTHIRNYKMRVEGLNADKTSHLSVMVEVFEVAPSIFMVELQRAAGDTSEYNTFVNNYCSKLDDIIWKFPTEKGKSRIPRLSKSHS

SEQ ID NO: 69554 - protein, 411 aa, Zea mays
  Clone ID: UC-ZMFLB73073D01_FLI.pep
GKLIMGFRKATNNSFEQEQATKPANGALATSEANGKVSAPDSSPNAAVSRQNKLNTETKSSSPVEQATALKMDKDGLTQKEGPGTGSSSPGSVKRKTTILGQKNKRLRMDNEESMELKITWEEAQELLRPPPKAPSIVIVDGHEFEEYEEPPVLGRKTYFVADKSGSNHQWAQCEDCSKWRKLPIDALLPSKWTCSDNKWDPERCSCESAQEISIEELAEFIPIKPAKKPKLKIESDAIDASDGLDTLANLAILGEGEALPSQPTTKHPRHRPGCSCIVCIQPPSGKGPKHKQTCTCNVCMTVRRRFRTLMLRREKKATKDLSRKKETGQSSEKATQQAVSGPPGANATATRSAQKADGNTDGPEDMAVDHKVTTSSPVKNHIDLNIQPERDDEQSPKSGAAGLLSRDNAT

SEQ ID NO: 69555 - protein, 517 aa, Zea mays
  Clone ID: UC-ZMFLB73091E12_FLI.pep
FAECLAFYATAKNLVTYLTAELGETNIDAATNVSTWIGSCYLTPLIGAFLADTYWGRYKTMIVFLLLYIVGMLTLTASAWLPLAMEDDSPDNSGLRRATAYLGLYLVSLGTGGIKPCTAALGADQFDGGDAAERVTKASFFNWYYFCTNIGSLLSGTVLVWVQENIGWGVGFTVQTVFMLFGLAVFVAGRKVYRYKKLGGSPLTRVAQVVVAAVRNCHLVLPDDTSALYHDKLLPTEPNFRIESARQFRFFDKAAIITGEKGAAAPTSPWRLCTVSQVEELKMLLRLLPVWASMVLFFAVSAQTVTTFIEQARVMDNRIGPFTIPPASIATFDVISVMVCVPVYDAVLVPLARRATGNDRGLSQLHRLSIGIALSVVVMVYAALLEGRRLALARANMPAMNIAWQAPMFAVHGAAAVFATVGVLEFFYDQSPDGMKSLGNALALLSMAAGSYFNSLALSAVGSITARGGERGWLPDDLNKGHMDYFFWMMAALGTLNLLHFLHYCNRRYRGNNNNTS

SEQ ID NO: 69556 - protein, 117 aa, Zea mays
  Clone ID: UC-ZMFLB73073D07_FLI.pep
LFPAGLTEQIKLDRYLQPHFRYYMREVRTVVYSQFLESYKSVTMEAMATAFGVTVDFIDQELSRFIAAGKLHCKIDKVAGVLETNRPDERNAFYQATIKQGDFLLNRIQKLSRVIDL

SEQ ID NO: 69557 - protein, 324 aa, Zea mays
  Clone ID: UC-ZMFLB73083D08_FLI.pep
VYKAVMQDGSKLAVKRGNQKSHQGLREFRTEIELLSGLRHRHLVSLIGYCDEHNEMILVYEYMEKGTLKSHLYGGDMPPLSWKKRLEICVGAARGLHYLHTGFAQSIIHRDVKSANILLDENLLAKVSDFGLSKVGPEFDQTHVSTAVKGSFGYLDPEYFRRQKLTDKSDVYSFGVVLLEVICARPVIDPTLPRDMINLAEWAIKWQKRGELDQIVDQRIAGTVRPEALRKFGETVEKCLAEYGVERPTMGDVLWNLEFVLQLQEAGPDMSNINSMNQISELPSNPKRVSSLDISSTDQSRVPIDYSDMSTSNAFSQLINAEGR

SEQ ID NO: 69558 - protein, 400 aa, Zea mays
  Clone ID: UC-ZMFLB73071D02_FLI.pep
TARSQQRQLSLCHAHTPAGRPAPLPTIVELAARWSHRPSNATYGRRSSCPAPAPAPARAAYFCCCYCSCSRSRRAASAVAGVLPEQALPRASLLPRLPHPVGRAAPVGVRRRRRRRRDHLAGLDVRERVQVAAGVPVGLLRRVGEAAGRVHGRGHHGLLPVERGRAPGVPRRGGHGVPGHHAGAAVHAADQRVRPRLRRRRAWQGRRAGGQVPPGLVRPHRRLPPLRHPLEPHAHHLLRGRRADPAVSAAERDVPAAADVGVRLHLGRLLLGHRRRQVQGRLPLQPLRSALLGAAPPRLLAARPAKVPRAKRRPDRRRRRCAQPAAGGRHAVGAAQSHGLQLLPRPQARPQPHPRVHYSPRSSWRYLLLANYIIRYIHIHHLMYVSTYHMSYRYISLVLL

SEQ ID NO: 69559 - protein, 215 aa, Zea mays
  Clone ID: UC-ZMFLB73073H01_FLI.pep
GLVVVRGATAEDVRHGRRAGAPDEHVEVLALGLPVRRRLPGALGRRGHGRVRRGVVSRPRPGRRIHHGERVLGLGRVVLVVGRARRGAGADAERVGRAEVGAAADHGVEVVVVEAGAPRGRVARRLQRVDLGVGQVAGARRGAGEAHGAARVDVGARGVGAAHGDVYPAVLLDLGLRLDGVPAAVEGDHVRVDDDGGDGPGVVRELLGDEHPRAA

SEQ ID NO: 69560 - protein, 358 aa, Zea mays
  Clone ID: UC-ZMFLB73084A05_FLI.pep
LVVRAGLGSRVNVQNVLIHMYSSCQDVVAARRLFDNGESLDHFSWNSMISGYLKNGRVEDAKALFDVMPDKDNVSWSAMIAGCVHNNQSSEALNVFDSMRAHEIKPDDVTLVSVISACSNLSALEQGKLVHEYIRKYQYNITIVLGTSLIDMYMKCGCMEAALEVFDMLEEKGTPCWNAVIVGLAMNGLVTRSLDMFSEMEATGTAVPNEITFTGVLSACRHGGLVEEGRQFFKLMQNKYQIVPNIRHYGCMVDLLGRAGYVREAEDMIQSMPMSPDVPAWGALLGACWKHGDSEVGERVGKKLVKLDPDHDGFQTMLSNIYASEGMWQCVKDLRGSMKQQHVAKVAGCSMVEPSHSS

SEQ ID NO: 69561 - protein, 227 aa, Zea mays
  Clone ID: UC-ZMFLB73094G07_FLI.pep
GMKGTGKWTVQQAAELAVAAPTIAASLDGRYLSGLKDERVAAAGVLEEEGMPAGLLETVNVDKKVLVDRVRQALYASKICSYAQGMNLLRAKSVEKGWNLNLAELARIWKGGCIIRARFLDRIKSAYDRNPELANLIVDREFAREMVQRQNAWRWVVARAVEAGISTPGMTASLSYFDTYRSSRLPANLIQAQRDLFGAHTYERIDCPGSFHTEWTKLARRSNGAAI

SEQ ID NO: 69562 - protein, 198 aa, Zea mays
  Clone ID: UC-ZMFLB73074E05_FLI.pep
ADHGPCVSGAHNSIVTARAGKDLVSSLVSGLLTIGPRFGGAIDDAARYFKDACDRGLTPYEFVEGMKKKGIRVPGIGHRIKSRDNRDKRVQLLQKYAHTHFPSVKYMEYAVQVETYTLSKANNLVMNVDGAIGSLFLDLLSGSGMFTKQEIDEIVEIGYLNGLFVLARSIGLIGHTFDQKRLKQPLYRHPWEDVLYTK

SEQ ID NO: 69563 - protein, 130 aa, Zea mays
  Clone ID: UC-ZMFLB73084C07_FLI.pep
KCRLIIHTTPVTRGHLVHQKGVQFVRRGGNHTKKEKPFTAASHLHIVLERETKNRKSGWSTRILRSQLSASCISEVTRSCSWVPSGIQMEARNLYGASPKVGKDSFPDAAVQRLIPPKPGHAGVGGSQSA

SEQ ID NO: 69564 - protein, 335 aa, Zea mays
  Clone ID: UC-ZMFLB73088C08_FLI.pep
RTLAMASEVVRPSDAELLKAQADIWRLSLSYLTPLSLRCAVELGIPTAIYRHGGAASAAELVTALSLPSTKLPFLRRLLRLLAASGVFTVDKQSSEEERYRISPVSYLLVDGIPHEDHMNHTALVLTCTSTRYIEAGIGLAEWFKRDVVTSPFEELHGATLFHESMGSLDADFHDMASEALDAHDNFGIEIAMREFRDLFEGIQSMTYCCGNFGDDKGARAIVKAFPHIKCTVLAPPKIIATKPADGAMINYVEGDMFSFIPPAQTVVLKLVLHHLTDEECVKLLAQCRKAIPSRKDGGKVIIGDIMIDHSGPMLETHLLMDIGMMTMTTRTAER

SEQ ID NO: 69565 - protein, 246 aa, Zea mays
  Clone ID: UC-ZMFLB73071F11_FLI.pep
ENRAEPPGCSSFPLSTLPPLPIAVPDRSAGLRMSEEDKAAASAEQPKRAPKLNERILSSLSRRSVAAHPWHDLEIGPGAPAVFNVVVEITKGSKVKYELDKKTGLIKVDRVLYSSVVYPHNYGFIPRTLCEDNDPMDVLVLMQEPVVPGSFLRARAIGLMPMIDQGEKDDKIIAVCADDPEYRHYNDISELSPHRLQEIKRFFEDYKKNENKEVAVDAFLPATTAQEAIQYSMDLYAQYILQSLRQ

SEQ ID NO: 69566 - protein, 189 aa, Zea mays
  Clone ID: UC-ZMFLB73080D07_FLI.pep
FFLSDSVVLSLILENRYGSANVWKIFTDLFDYFPLTALVESEIFCLHGGLSPSIENLDNVRSLDRVQEVPHEGPMCDLLWSDPDDRCGWGISPRGAGYTFGQDISEQFNHTNNLKLVARAHQLVMEGYNWAHEQKVVTIFSAPNYCYRCGNMASILEVDDCRNHTFIQFEPAPRRGEPDVTRRTPDYFL

SEQ ID NO: 69567 - protein, 290 aa, Zea mays; identical to SEQ ID NO: 46985
  Clone ID: UC-ZMFLB73084E02_FLI.pep

SEQ ID NO: 69568 - protein, 131 aa, Zea mays
  Clone ID: UC-ZMFLB73075A11_FLI.pep
PNQHWLLSSGLSLLQMGEALVHVCLGMLGLGVLPALHFSRGTHECLHAHFALDAHGLLVGLELAPLGPLVLLQVALAGHLGLLAVATAHGGWIRRQSTAATRTSPGGRPAPLRVRFVVHGKERGNGRPDLS

SEQ ID NO: 69569 - protein, 303 aa, Zea mays
  Clone ID: UC-ZMFLB73078D02_FLI.pep
PEWARRHALDKGEAVNFLKGAVVTADRIVTVSKGYSWEVTTAEGGQGLNELLSSRKSVLNGIVNGIDINDWNPATDKCIPCHYSVDDLSGKAKCKGALQKELGLPIRPDVPLIGFIGRLDYQKGIDLIQLIIPDLMREDVQFVMLGSGDPELEDWMRSTESIFKDKFRGWVGFSVPVSHRITAGCDILLMPSRFEPCGLNQLYAMQYGTVPVVHATGGLRDTVENFNPFGENGEQGTGWAFAPLTTENMLWTLRTAISTYREHKSSWEGLMKRGMSKDFTWDHAAEQYEQIFQWAFIDRPYVM

SEQ ID NO: 69570 - protein, 588 aa, Zea mays
  Clone ID: UC-ZMFLB73080E06_FLI.pep
ELAQDIASGVFMNQSQVRVMGANAAPDDPEKTIVFIDLVPLGPKFDNATAFLVFERFCNKQVIINPMDFGKYDVLYVLYQGLPPSPPAASMNNGLSNVNDPSLHPLAADVVNHKERKGRGIIIIIILSSAFAFILCAGAALVVYFKLRNRSHLTEASPVPTKPAGPGSAMLGNRLESRPISASPSFSSSLVAYKGTAKTFNLVEMERATLGFDESRIIGEGGFGRVYEGILEDGERVAIKVLKRDDQQGTREFLAEVEMLSRLHHRNLVKLIGICTEGHSRCLVYELVPNGSVESHLHGSDKGAARFDWDARLKIALGAARGLAYLHEDSSPRVIHRDFKSSNILLEHDFTPKVSDFGLARTALGEGNEHISTRVMGTFGYVAPEYAMTGHLLVKSDVYSYGVVLLELLTGMKPVDMLRPPGQENLVAWAGSLLTSRDGLESIVDPSLGSSIPFDSIARVAAIASMCVQPEVDQRPFMGEVVQALKLVCDEGSEFNGSTSFSQDLRIQDVEAMSRASGDVDFVDPTLSAELFTSSARYDAMDASGSFRRYSSSGPLRVGRAGLDKERGLSTGSSSEHVGLQRFRIDSE

SEQ ID NO: 69571 - protein, 326 aa, Zea mays
  Clone ID: UC-ZMFLB73071G12_FLI.pep
AVHDQPVPVVRVPVGPAAGHAGLLPVPAQRGARGRRVQDQVHQHVRRAAGRREVGAGARRVRGRGRRGGGDGVADQGRRRGARRHGGERQGVRVQPGGAPAVRRRHAADAWEGGGDVPVRAVRRGPQARAHVGALVRAVPHGPQHGLRRRAGLLRGGGGSGRGRGRRGAAQGRRVVRGAGRRLGRGAAGGPGLRVLAGGRRLQRHPARRRLLRAQHGARARRVRREPAVPGGRAAPVELRLPGVRHAHLRRPKLRGMRVHRGRPIMHGALEEISRSFSAAGYGACSADPLVCFVVPEEISRSFSAALTACLPWDRLGCVMCECDFV

SEQ ID NO: 69572 - protein, 367 aa, Zea mays; identical to SEQ ID NO: 56463
  Clone ID: UC-ZMFLB73078E06_FLI.pep

SEQ ID NO: 69573 - protein, 525 aa, Zea mays
  Clone ID: UC-ZMFLB73088H07_FLI.pep
LTKINRQVPAGNLITDWSSQHRACHPLSSSSVVGDVARNLEPLGVERARHVDPLVGVSPEVVPLGLHQVGRQPVPAVGVEVGQASGHSRGADAVVDGEAHHPAPRRLPVHDLLRELGVYEQAGEARVPVVGLLDAVQEDGADDAPALPDPGQLAEVEPPAFLRALGLDDVHALRVAADLGRVQGLPHVLHQLRLVHRRAGGVVVTLEDLGGLHPLVLQPAQEPRVQGRLDRRSGHRQLGGLLHRPLPCPFHPGLVKDLVHQVAIAMLVLDAKDVGRDLDQEAQELALVPLGEHLVQLTVGELTDRLENVVCLGNQLHIAILDSVVNHLDKVARSTFANVRDTRATVRDLSSHLEDNVFDVLVSLERASGHQGRAVAGTLLSSRDTHAKIQEAALLHGLLPPLRVLVPLVPPIDDAVALLQVSCERRDGLVNWRAGLDEHDHHPWLLNGLHKGRGVMEAVDGKVSFCLGTLHGLVHLGGCPVVHRDGEPFLCNVEGKVLPHDRKASKTDSCERHLLLWSWRAAECR

SEQ ID NO: 69574 - protein, 138 aa, Zea mays
  Clone ID: UC-ZMFLB73072D10_FLI.pep
LKVPIYFSAGLTIQANVYYKMLIGWTSQKIKDSHTVHNPFDFKHVCHFERSFINNPGPCVLFATPGMITGGFSLEAFKKWAPSEKNLVTLPGYCVSGTIGHKLMCGKPTRVDYEDTHIDVRCQVDFHVISYLAKNVQL

SEQ ID NO: 69575 - protein, 358 aa, Zea mays
  Clone ID: UC-ZMFLB73080G10_FLI.pep
EFVVGPISFSGPYCKPNILFQLDGTILAQTSARAWGSAGLLQWLEFTKLTGIAVQGSGVINGRGQDWWTYADPNDADDESVEMLLPRTKPTALRFYGSSNVTVAGITIVNSSQCHLKFDSCEGVMVHDLSVSSPEDSPNTDGIHLQNSRGVDIHHATLACGDDCISIQTGCSDVNIHSVNCGPGHGISIGGLGRFNTKACVSNVTVRDVKMFRTTTGVRIKTWQGGSGLVQGVRFSNIQVTEVQTPIMIDQFYCDRATCRNQTSAVAVSGVQYEDVRGTFTVRPAHLACSDSSPCSGITLAGIQLQPLPLPQHRRLSYDPFCWQAFGELYTPTVPPIPCLQIGRPAAGNSVLSDGDLC

SEQ ID NO: 69576 - protein, 196 aa, Zea mays
  Clone ID: UC-ZMFLB73084H05_FLI.pep
RQRVHYLQGILPRHRGGDEPDGHPHRAGGGVQHLVHQLRRDGGHRRPADDGPHARRGHRGGPRPGHLHVRGPADVRPPHGDGLRVHGRGAQGQHALHPRPQRGAQRRPRDEHRRRQRKVPHGAWVRPGAHHRLRLQIRRDRRPVHRQRQGLATRSIYLACSSGPWPTARPASCASIHLRMLCTHLVVLRCYYMTCI

SEQ ID NO: 69577 - protein, 183 aa, Zea mays
  Clone ID: UC-ZMFLB73093C10_FLI.pep
VPSRRCRLYFPTLNSSFPLSLPSPSLSSPSVLAMDLGAPARRRLPIRLLLVSLTVLVVLTARSSAEVITLTEETFSDKIKEKDTVWFVQFCVPWCKHCKNLGTLWEDLGKVMEGADEIEIGQVDCGVSKPVCSKVDIHSYPTFKVFYEGEEVVKYKGPRDVESLKNFVLNEAEKAGEAKLEAD

SEQ ID NO: 69578 - protein, 183 aa, Zea mays
  Clone ID: UC-ZMFLB73095F04_FLI.pep
RCFAGDAEDEEPACGGDDHEEEEKRGDRRVQGRAGVGRAAPAGGRRAPAVLRPADRGAPGDRVRVRQPAGARDVDQGRGAAAEHRRRAEAPGGVTWPWSWTGHWRPACSLFGRLVPSPFVRRRPLGPGASIHRTVRRCARLEHMREVVEGNRAERHGHLAGGEGYVAIGGRVGRILVLLGHEV

SEQ ID NO: 69579 - protein, 267 aa, Zea mays
  Clone ID: UC-ZMFLB73076D12_FLI.pep
RRPPPPPRLCPPAAAAAYPGIRMRVKKRSKHRKAVKFYATCFGFREPYKVLIDGTFVHHLLTQRLLPADEALRDLLSASRTPALFTSKCILAELRRLGKSHAESFDAAQLLTTTKCEHDKVVGAVNCVQSLIGDKNPEHFFVATQDPGLRENLREIPGVPVIYGLKNSLCIERPSMQQRKFAQLDEEKRLNMDISEYKKLLKAASEGKTIASENGSGEEQHEMPISSLVKNALHVTDKTKFKRNKAKVIFIAIGISCYAIDYTMFII

SEQ ID NO: 69580 - protein, 323 aa, Zea mays
  Clone ID: UC-ZMFLB73078E10_FLI.pep
HRRQRSTEGGGGQQIRGVTDTQGQEGCCLSMLLRLKIVVGVHSVVLPVPVPGGYGHGACYAAVEPCWRRSRRPALAAAGGLVARRPRQSATVVMALKEEPEGSSRRGFAGGGPSWDPGLEIQVPFEQRPVNEYSALKDSALYSWAELSPGSFFLRLGGLCLVTFTVLAAPIAAASFNPGKDPLKFVLAAGIGTLLLVSLAVLRIYLGWSYVGDRLLSAVVPYEETGWYDGQMWVKPPEVLARDRLLGSYKVKPVVNLLKQTLVGTGALLVGAVSLFAFAAPVEDFLHALSQPPSSATASSKPSLRKEELLRLPVEVMQDDDLA

SEQ ID NO: 69581 - protein, 377 aa, Zea mays
  Clone ID: UC-ZMFLB73091B02_FLI.pep
FPSGSGLDSHLLFPSMRAPAGGASATALAAAMNIKQPLHGASTLFALLSLSLLLLRLLLRLRLAAFRDAALSLHLLARLRLRPVLLCLPSACHDGGAGAGATTLRVWCPAAPSSKPPLLLLHGFGGDAKWTWARNLPRLSRHFHVYVPDLVFFGAQSRSASPLRSVAFQARCAAEAMRLLGVPRYDVAGISYGGFVAYRMAAAEARDAVGRLVIMTTGVAATPGEMRAMAAREDRTVEDALLPDTAEGLRFLVRRSMHRPPPWMPDFVLDDFIQLMYVDQKRERAELLHELLKTGAGFDPLPVLTQETLIIWGDKDQVFPVDLGHRLHRLLGERSRLEIVRDAGHALQLEGADHVNRSIKSFLLDERVGPGAGAGRK

SEQ ID NO: 69582 - protein, 103 aa, Zea mays
  Clone ID: UC-ZMFLB73073C04_FLI.pep
EIRSDVSEVVAADEFEYKDPVDGSVSKHQGIRYLFGDGSRLVFRLSGTGSVGATIRVYIEQYERDSSKTGRDSQDALAPLVDVALKLSKMQEYTGRSAPTVIT

SEQ ID NO: 69583 - protein, 288 aa, Zea mays
  Clone ID: UC-ZMFLB73080H11_FLI.pep
LRCAAHPWVGRLRLLVVGGGELLVGVGDEEQLVDDAGEAAADEGADPVHPLVAPLPADEGGAEGHGGVHGRAVEGAAHQDVGPHDEADGNGGDGAQAALLRVHRRRVHRVHQPEGHHDLQHQRLPHRHARQPEGARGLPARREAEQEARHGGPQQLRHPVQEPSEQGDVAAHEGAEGHGRVHVPAGDVRAHRHRHEQRERVRHRRRDQARRGRRAAAGQLAEGHAGALAGEDEDEGGDELSERRLEDARVVHLLVAPQGDPIDRHFHGPLASSRALVTTVIGAGVELS

SEQ ID NO: 69584 - protein, 258 aa, Zea mays
  Clone ID: UC-ZMFLB73086A06_FLI.pep
GALAMVLFMAGAALLAGAAGAGAQQGVWSIITRPMFQSMLSHRGDSGCQGAFYTYDAFIEAASKFPGFGTTGDEQTRRRELAAFFGQTSHETTGGWATAPDGPFAWGYCRVKEQKQTDPPYYGRGPIQLTHKYNYRLAGQALNLNLVGDPDLVARDPVVAFKTAIWFWMTPQSPKPSCHAVMTGDWRPSATDRAAGRLPGYGLTTNIINGGLECGEDRSTDGAKAAKDRVGYYKRYCGMLGVGYGDNMACGSQKPYGG

SEQ ID NO: 69585 - protein, 363 aa, Zea mays; identical to SEQ ID NO: 42242
  Clone ID: UC-ZMFLB73108A01_FLI.pep

SEQ ID NO: 69586 - protein, 228 aa, Zea mays
  Clone ID: UC-ZMFLB73116E03_FLI.pep
EMQHFAGGLIQLNHGRPQPLQYVVNAAFLASLYSDYLEAADTPGWYCGPNFYTTEVLRKFARSQVKALFLMLSKCPTYGEVKLIVKLNLLNLQLDYILGKNPLKMSYVVGFGNKYPKRPHHRGASIPHNGVKYGCKGGYKWRDTKKANPNILVGAMVAGPDRRDGYKDVRTNYNYTEPTLAANAGLVAALISISDIKTGRFGIDKNTIFSAIPPMFPTPPPPPSAWKP

SEQ ID NO: 69587 - protein, 239 aa, Zea mays
  Clone ID: UC-ZMFLB73122A03_FLI.pep
NGDEQEDESPVKAKLSSIPPPYQKPLKSSLRPPLIPNDDEPVKQEEEGLFTSIGKLVGVARSSVAEIVGATFSRKKRVNVHHHQLGRPTSWPVQESYAIPRDETPPPLDTRAPTPRKSYAFMSKEPEKIHHIRHGRPQSHGWTGEAAAAPQQQAASLPPQQQQQQQQVHHQQYHNRQYSAGPQTFYEPSCDAAKEIVFGAVQEGDTGRRRPVEIKPVNHGDVAPFELNGLRFRSSYGMG

SEQ ID NO: 69588 - protein, 706 aa, Zea mays
  Clone ID: UC-ZMFLB73108A08_FLI.pep
ETLRLAFIDNNKGSRIISTTRKSEVTSGNKVYKPKPLSDDNSKRLFYTRIFGGEDKCPDNEVDEVSNKILRKCGGIPLAIITMASLLVGKSWGQWFEVCNSIGFGDKDIEQVDKTMSILSLSYYDLPCHLRTCLLYLSSFPEDYIIDKNSLIWKWIAENFVHKKPGVWLFEVGEGYFNDLVNRSMIQAVASKDSSIIDGCRVHDMVLDLLRSLAREENFVTVLYNDEDMLSEISSTRRLAHQKSTMDAHLHNYKQGMQHLRSLTVYRCGADKELSFLLSFKLLRVLDLENVYTTSWHNARHIGNLIHLRYLGLKRTYMPELPEEIGALKFLQTLDLVENFFMEELPSSIGQLTQLVCLRASGLITSMPRGVIKTLTALEELAVQCQFNERFCRYQGQFKELGSLSELRVLKIKVISTMEQSILPDLMQSLGNLHKIQSLKLESHPGCGRADNAMFDAMALPGHLRHLLVSEYFVHLYRLPSCINPLCLVKLSHLELYVIDMDEHSMQILGELAELRHLVLSTRSTVRVNNVAADGFFHKLRSCKFYTSMVLFVLNEDSSVSFTLWNGTDDLVLSYGKKDGECPSAPAVMPNLEELLFSAQPKWSLMKCQGSHGNLGLEHLRSLQKVTAVISCELYMFEAEKMEAELGISCDRYFVEAWVMDAEDGLRDAIGVHPNHPTLVLGRKNEGVLASDVSDDTDADSATRRT

SEQ ID NO: 69589 - protein, 233 aa, Zea mays
  Clone ID: UC-ZMFLB73116F01_FLI.pep
GMQISVSIPSVWKTIKLNVMKSQSVADVKAMIEQMGGIPLDEQILMHGCQKLEDNKLLSQCGLSNGHTLHVLVRPTDRLHISVDVDGEETLNLDVKSWYTVADVKLMIDTLEGLPARTQILMHTQPGGANTVLKDIETLQNQGIKNNDIVALYHKVNFFVKTYEGRNLVLSMRTCDTAEEIMKVIEEKLKVNTGVYYLHYRGRVLALGDTLRKHKIENNCTVDVRLRNSHVTK

SEQ ID NO: 69590 - protein, 279 aa, Zea mays
  Clone ID: UC-ZMFLB73106C06_FLI.pep
NNLDDDLPILSNSGMYVHIQLVCPDYSHYRYNNSMIYNTLRSNIRARCVGILVDNIVAEELKLVGVQHELADGGEGADGPYAGEHDHDGRVGDEDRGAARRRERHVVHEDGEHEVERDEADGADHAHDVAEEGEHGGHERAEGQVERAQQQARDEVPAREAAPGGVGGSLLHDLVRHLGVDEADGEQLEEDEEDRDAQQPRRGEGGARVRHQALEDVGLHVAAEGPVARDRREEEGEDDDGVAQHQRLHHLPRCRWRQRRLQKRWSSNMFGPGVKIPSY

SEQ ID NO: 69591 - protein, 462 aa, Zea mays; identical to SEQ ID NO: 49172
  Clone ID: UC-ZMFLB73112H12_FLI.pep

SEQ ID NO: 69592 - protein, 319 aa, Zea mays
  Clone ID: UC-ZMFLB73122C11_FLI.pep
GFVKTDKDFQGKAARSGTTVTFVIIDGWVVTVASVGDSRCILESAEGSIYFLSADHRLDANEEEVERVTASGGEVGRINIAGGAGIGPLRCWPGGLCLSRSIGDIDVGEFIVPVPHVKQVKLSNAGGRLVIASDGVWDALHFQEALNYTRGLPAEAAANRIVKEAVTSKGLRDDTTCIVVDILPPEKLSPPLKRPGKGVIKALFRRRPSDEMSEDQMDRGCLETDVVEEIYEEGSAMLARRLNINYPEGNMFKLHDCAVCQLEMKPGEGTSVHGNMPKHSRVDPWGGPFLCSSCQLKKEAMEGKLHSRNSQSAVQPVPK

SEQ ID NO: 69593 - protein, 279 aa, Zea mays
  Clone ID: UC-ZMFLB73108G04_FLI.pep
AADVWSAGVILYILLSGIPPFWGKTKSKIFDCIRSMELRFPSDPWDRVSDSAKELVTGMLRRDPRLRLTAKQVLEHPWMQEHADPQDSCGQCHETGLQREGAGSCSFSTPLASRSRDVSFDTRGPIAWRGGGEDEATCCSPTFAAVCRSSFSAFITDPAPPPCSASSALGGSGFSFGEPCEPLDGGGGGGFPMPMASMPSFSFFCARDSSEPAEPQPVAASSTPRTARGSTPRGVNGRRNHTIGGGGREHLDVAVESVIRWASCTNFSTAPSLRASLVC

SEQ ID NO: 69594 - protein, 360 aa, Zea mays
  Clone ID: UC-ZMFLB73119H08_FLI.pep
AVLALGFVLYNEPEQTPRIVSLLSESYNPHVRYGAALAVGISCAGTGLSEAISLLEPLTSDVVDFVRQGALIAMAMVMIQTNESYDPRVGAFRRQLEKIILDKHEDAMSKMGAILASGILDAGGRNVTIKLKSRSKHDRLTAVVGLAVFTQFWYWYPLTYFISLAFSPTALIGLNSDLKVPKFEFLSNAKPSLFDYPKPVTQQTTATSVKVPAAILSTYAKSKSRARKDAESKAKAKAEDSSSASTSMQVDGASAAGAAAEKAPEPEPTFQILTNPARVVPAQEKFIKFLEDSRYKPVKAAPSGFVLLQDLEPTEAEELALTDAPSTAATTSTPASSAGEPVGMAVDDEPQPPPAFEYTS

SEQ ID NO: 69595 - protein, 234 aa, Zea mays
  Clone ID: UC-ZMFLB73111B04_FLI.pep
SQAFDMIHCSRCRINWTRDDGILLLEVNRLLRAGGYFAWAAQPVYKHEQAQQEAWKEMEDLTTRLCWELVKKEGYIAMWRKPLNNSCYMNRGPAVKPSLCDADDNPDVVWYVSLKACISRLPENGEAPPPVQWPARLMEPPKRLQGVEMDAYPSKNEIIKAETKFWEDIIDGYIHVFKWRKFKLRNVMDMRAGFGGFAAALISRKLAIEVSNCQAGVNFQELLELSRAAVETFD

SEQ ID NO: 69596 - protein, 97 aa, Zea mays
  Clone ID: UC-ZMFLB73113F09_FLI.pep
VRTSDCSPEVLLSSRAPFVPILCIPFLECFSYKLLCLRLPAFEQAMLLDLYLVDHYNACVAPSSFHAKFAVILASGENNNDNSGENSNHKKREDGNY

SEQ ID NO: 69597 - protein, 100 aa, Zea mays
  Clone ID: UC-ZMFLB73117D07_FLI.pep
PPPSSKPAKSGGGKQKKKKWSKGKQKEKVNNAVLFDQATYDKLLSEVPKYKQITPSVLSERLRINGSLARRAIKDLMARGFIRMISVHSSQQIYTRATNT

SEQ ID NO: 69598 - protein, 360 aa, Zea mays
  Clone ID: UC-ZMFLB73098B10_FLI.pep
FTMCNTVSGLNKINTSLLLQAAGWPCMNHDRCNASGSFTTRMHLAFHSKQLAAAAAAAGMLMHHVLVELEAGEHVVVDGVGEVVEQVLERADAGDEPLDEVTEDGEHGEPAVLDLLELELIHLLLGLAEAERVEEGPAGVGRVAGAGEELLEAEEVLLAHGARVVPVLEAAVLGEAHERHVEDEERVGVGPVVVGARGRDDARLEPRQRGLRGDDAHLAEDLRGDGAHRAQHGVAAVDHLAIGQPLGLDEAPGALRVREAQRVEAIVAGQRAIEVGEGLLGREPQLPVGTLLGWRAGAGPDDEGRLPRRRPRDGRLHGAAQQLPAGEESLGRHRSGTGASSNLSFRQRTCLRSRSCRWLA

SEQ ID NO: 69599 - protein, 206 aa, Zea mays
  Clone ID: UC-ZMFLB73100B11_FLI.pep
MYGDLPPAIILVGHSMGGSVAIHVAARKEIRNLHGLVVVDVVEGTAMASLVHMQKILANRAQHFPSIEKAIEWSVKGGPLRNIESARVSIPSTLKYDESRECYTYRTPLEQTEKYWKGWYEGLSDKFLSCPVQKILLLAGTDRLDRALTIGQMQGKFQMVVIRHTGHAIQEDVPEEFASHILKFISRNKIGPNGVEIPGLIKKWQQ

SEQ ID NO: 69600 - protein, 152 aa, Zea mays
  Clone ID: UC-ZMFLB73106D06_FLI.pep
HGYMFELIQRADTPEPLCQVMLRVGDLERSIKFYEKALGMKLLRKKDVPDYKYTIAMLGYADEDKTTVLELTYNYGVTEYSKGNAYAQVAIGTNDVYKSAEAVDLATKELGGKILRQPGPLPGINTKIASFVDPDGWKVVLVDNTDFLKELH

SEQ ID NO: 69601 - protein, 73 aa, Zea mays
  Clone ID: UC-ZMFLB73113H05_FLI.pep
ANDITTSADHHSSESREREEKNSSFLLLVLPRQNHLSSSRANTTIHLLRPYKHCNKRQQRASIAPQENIPILF

SEQ ID NO: 69602 - protein, 213 aa, Zea mays
  Clone ID: UC-ZMFLB73117E08_FLI.pep
GVTIARAIELADPMENAGASLIREVASKTNDSAGDGTTTASVLAREIIKLGMLSITSGANPVSVKKGIDKTVQKLVEELEKKSRPVKGSGDIKAVAAISAGNDEFVGTMIAEAIDKVGPDGVLSIESSSSFETTVEVEEGMELDRGYISPQFVTNLEKSIVEFENARILVTDQKISSIKEIIPLLEQTTQLRAPLLIIAEDVSGEALATLVIN

SEQ ID NO: 69603 - protein, 361 aa, Zea mays
  Clone ID: UC-ZMFLB73120D01_FLI.pep
QDFLQPSYDVVVFLTVILFVLLISPIAIPVIVSFMPEKAQHLMEDALLSEPLTGEASSSRQKEDQPEVILSEVEEEKSKETDSLPPSERRKRIAELQAKLVEAAARGGVRIKRRPHRGDNFTLMQALVKADFWLIWLSLLLGSGSGLTVIDNLGQMSQAIGYKNAHIFVSLVSIWNFLGRVGGGYFSEIIVRERTYPRHIALAVAQIVMAAGHFLFAMAWPGTMYIASLLVGLGYGAHWAIVPAAVSELFGVKHFGAMYNFLILANPAGSLIFSELIVSNLYEHEAEKQASQHQMSALLSPRLLRDTGFLADDALKCEGPACFFFSSLIMSVFCAVAAGLSLLVVQRTRQVYPRLYSSVRT

SEQ ID NO: 69604 - protein, 87 aa, Zea mays
  Clone ID: UC-ZMFLB73100C03_FLI.pep
GWLTRNAAMASSAVIVPASPRKLEGKVAVITGGASGIGERTARLFVEHGAHVVVADIQDEAGARVCADLGAGAASYVHCDVTSEDDV

SEQ ID NO: 69605 - protein, 155 aa, Zea mays
  Clone ID: UC-ZMFLB73111E01_FLI.pep
LHRERNGIPIGKPTPVANTYVVPSSMEKLVMYLKQRYKSIPLYITENGYAQIANISTTAEEIINDIERSTYIRDYLTYLSFAIRKGADVRGYFVWSLMDNFEWISGYTVKYGLCHVNFKSLKRTPKLSAKWYSKFIKGYEQIEMASEELPKHMVS

SEQ ID NO: 69606 - protein, 121 aa, Zea mays
  Clone ID: UC-ZMFLB73114A07_FLI.pep
LKSYDWAKSLPAGSNDNALENSDGAGARLAKVNTDAVFDASSETVVLYPENGGNLHCFTALTPCAVLDVMGPPYNRAQGRDCAYYSESPYSCAGDAQYSWLKEVHSTFEMEGIKMEPNFIV

SEQ ID NO: 69607 - protein, 230 aa, Zea mays
  Clone ID: UC-ZMFLB73123H01_FLI.pep
AQKDFMRSTKSVKSVRGDAVSSTSTPMPMPLAAAILNSFILSLISSPSLVPKSLSMAALTWPLSSCSPTSSVPTFHTSHTYLMLPNWSPCRGQQTMGTPSEMASTVEFQPLWVRKPPTAGCASTSSCGAQATTMPRPRTSSSTPSGSAPDSKPRMRLGLTTHTKGRLLSASPHASSTNSCGSMAAMLPKLTYSTEPGCCVSSHCRQPRSACTTPCRLAVAVGTSLLSGAT

SEQ ID NO: 69608 - protein, 325 aa, Zea mays
  Clone ID: UC-ZMFLB73100H08_FLI.pep
DLVSCTVSELQPLRAEAEDIPLDIVYEDDHVLVVNKPAHMVVHPAPGNAKGTLVNAILHHCKISTFTCLARSSAGDECPDSTDEDTDVFHVDQFAAEDVSSEVRNALVRPGIVHRLDKGTSGLLVVAKDEHSHARLAEQFKLHTIRRVYISLTCGAPNPNSGRIEASIARDPNNRIRMTAIAGSGHRYARNAASRYKVREVFAGGGSALVEWRLETGRTHQIRAHAKYIGIPLLGDETYGGTQSMALSLLRPRSPSKYHSGLSNLLSKVDRPCLHAASLGFKHPRSGKVLEFSCPPPDDFLEVLGELRRVTSRSSDAPNGDGVFR

SEQ ID NO: 69609 - protein, 264 aa, Zea mays
  Clone ID: UC-ZMFLB73114B11_FLI.pep
PRDTGKKEVDSELREIIIHLLAFISKGSVKTGNASKWNSSFFCPAVIKEEVALNEKPPLICSKYGWFRFAASCTLSTAGVSVSPSAALSVVRRDKTSGDSDSIRQTRFTEILAVQIYRIAFLIMKFLCSQAKEAVKRAEELEFLDLAHFPELPMPDILHGLQDQVVCIVTEIFEANGSSTLNPETEKVCQLLLVTLETSLYMELCVSQSCGIRPVLGRLEDFCKGIKAMLQAIEKHSSFEPFVRSLTEITSLLYPGLLHNNLLM

SEQ ID NO: 69610 - protein, 325 aa, Zea mays
  Clone ID: UC-ZMFLB73124B02_FLI.pep
GMINVERVEQSAAPGGSWSIWPFSFRRTRTITAIQPVCESIVETSVSTPKELTHFKELDRERNKSRVKRIERKVRSLTPTSDELASLDLREGRNVVTFTFSTAIVGKQQVDCHIYLWRWNTRIVISDVDGTITKSDVLGQFMPLVGVDWSQNGVAHLFSAIKENGYQLLFLSARAISQAHITRQFLFNLKQDGKALPDGPVVISPDGLFPSLYREVIRRAPHEFKISCLEAIKDLFPHDSNPFYAGFGNRDTDELSYLKVGIPMGKIFIINPKGEVAVNRRVDTKSYTSLHALVHGMFPPILSSSEQEDYNAWNYWKMPLPDVDL

SEQ ID NO: 69611 - protein, 307 aa, Zea mays
  Clone ID: UC-ZMFLB73106F07_FLI.pep
FVLNTGAKIPSVGLGTWQADNGLVGDAVYAAVKAGYRHIDCAQAYNNEKEVGFGLRRVLDEGIVKREDLFITSKLWDINHAAEDVPVALNGTLKDLQTDYVDLYLMHWPVRMKKGAGFGPHAVVPSDIPATWAAMEELYDAGKARAIGVSNFSSKKLADLLAVARVRPAVDQVECHPVWRQGRLRAFCASQGIHLSAYSPLGSPGTATVKAGAVLEHPAVVSAAETLGKTPAQVALRWGVQMGHSVLPKSTDEGRIRANLDVFGWSLPEDLLAKFSEIEQERLIRAGFFVDPDGVFKSIEEFWDGEI

SEQ ID NO: 69612 - protein, 406 aa, Zea mays
  Clone ID: UC-ZMFLB73112C06_FLI.pep
HAYAAVFKHFEQDGAFYCYPGQSNKSVTAMYNLYRASQVAFPGEDELRRAEAYSREFLCRRRASGELKDKWVIPKDLPGEVAYALDVPWKASLPRIETRMYLEQYGGADDVWIGKVLYRMSLVNNELLLRTAQADFRSFQRQCKLEWHGLRKWASRRNLQAYGVTSNSTLRSYFLAAASIFEPDRATERLGWARTAVLAEAVSSCLRDGRCSRADGMLRELTSGIHLRNDDNPAASLVHALHELIGLLAFDNASYNSLLDAWKQWLAMWTAQGHEGSVALLLVRTVEICSGRRRSASATDDGQAHSLSEYSQLEQLTSSVCSKLAAAGTGDGDDLSPASVEDAADRHRVDLEMQTLARCVLRSRSSIDAVTRQTFLHVARSFYYVAHCSARTVDAHISKVLFEDVV

SEQ ID NO: 69613 - protein, 445 aa, Zea mays
  Clone ID: UC-ZMFLB73114F08_FLI.pep
SLSSFKIPLAKGKREKLGSSSRGISSLSVRLRLLNACFVSGEPWWHLCFMAEICCEAAAAAAGSDQKGECAGSRAARRRRMEIRRLRVVAEEASAKRRRLEADEEDAVGGRAPRYGVTSVCGRRRDMEDAVTARPEFINGHHFFGVFDGHGCSHVATSCGERMHQIVAEEATAAAGSSVSDETARWRGVMEKSYARMDAEAVVSRETAGPAPTCRCEMQLPKCDHVGSTAVVAVVGPRHLVVANCGDSRAVLSSGGATIPLSADHKPDRPDELERIHAAGGRVIFWDGARVFGMLAMSRAIGDSYLKPFVISDPEVLVVERKDGEDEFLILASDGLWDVVSNEVACKVVRTCLRNRAPRGGRERSSPTSNLSPRQSSASGGSSSSGDEEAGGPSGDGAGSESDGESAEDRACAEAAILLTKLALARQSADNVSVVVINLRRRPRS

SEQ ID NO: 69614 - protein, 288 aa, Zea mays; identical to SEQ ID NO: 47549
  Clone ID: UC-ZMFLB73118C07_FLI.pep

SEQ ID NO: 69615 - protein, 295 aa, Zea mays
  Clone ID: UC-ZMFLB73121A03_FLI.pep
CGDLFENSVVDEFNDCAVSRKKCVPKKSDVGEFPVPDPSSLVKSFNMADFNGKWYISSGLNPTFDTFDCQLHEFHVEGDKLIANITWRVRTPDSGFFTRSTVQRFVQDPSQPGILYNHDNEFLHYQDDWYIISSKVENKDDDYIFVYYRGRNDAWDGYGGSVLYTRSKTVPETIIPELERAAKSVGRDFSTFIMTDNTCGPEPPLVERIEKTVVEGEKTIVREVKEIEEEVEELEKEEASLFQKLAEGLMEVKQDFMNFLQGLSKEEMELLDQLNMEATEVEQVFSRALPLRKLR

SEQ ID NO: 69616 - protein, 297 aa, Zea mays
  Clone ID: UC-ZMFLB73124B09_FLI.pep
LLAKRNANNRICIAEAGAIPLLLSLLSSSDLQTQEHAVTALLNLSIHEDNKASIILSGAVPGIVHVLKNGSMEARENAAATLFSLSVVDEYKVTIGGTGAIPALVVLLSEGRQRGKKDAAAALFNLCIYQGNKGRAIRAGLVPLVMGLVTNPTGALLDEAMAILSILSSHPEGKAAIGAAEPVPVLVEMIAGGSPRNRENAAAVMLHLSASVRQSAHLARAQECGIMAPLRELALNGTGRGKRKAVQLLERMSRFLVQQQEDAVDPRVQELEEIERQLAAFGPGVTEADVLQQLGAL

SEQ ID NO: 69617 - protein, 274 aa, Zea mays
  Clone ID: UC-ZMFLB73105D11_FLI.pep
VLAPILLLVELLEHRVADVEGVARHVAARGDQPEVLHGPDLLDGARRRGGLALQRLVRRGEDGGFRLLAAEDLRPLVEAGGGRRDVADEVRPAEPQRQPTAFEVCDLDVEQRREEELGAEHLVVAELPDPAGRGVADPLGHVAVAPGLHDAHAAVVALDVGPARRAVPLRLGAADAAGHGEVVVQPREHGVLEHLGGEAVPGPVVVHPAQVVQLEGQVRVRQRVVHLPRHRARHHRGEPVPVHRARRHRLLLMLLEHHAAFLVLYSAPAPGVSS

SEQ ID NO: 69618 - protein, 387 aa, Zea mays
  Clone ID: UC-ZMFLB73106H01_FLI.pep
RNYLEPKGNIFLCHPSLLRLTSYHHLFSTAMQHRPAAEAASVDEVGDPPDVGATGSGSWVAGNSALPAEPLEHLGAEGPPGLHPLHGLLVAAEADVKRLQVGHVAGGGGEGCRGGGQAVEPARCGRPVGSRGRRVAAPPAGRGRAGRAEAELAERGQDVVDGGPGAGPGPAAEGGGGPVRRQRRRLGRGRLGRRQERAGRRRGHDALGEVGLERLATQRGAVVGLGQRAGAPGAGARLLRRGREHPQLVRGVREEALGPVVAARAGAPPDLELVHAELVAAVAVHARGHGRRLLVVRLGGAGVVARQVLPQRRQQVRRHLVAADAGVDAAHGDVVGPRRHAHAFAHHHHGDLPWPVARIGLCFVPSLATGLREISWTELISLCGCVV

SEQ ID NO: 69619 - protein, 391 aa, Zea mays
  Clone ID: UC-ZMFLB73114F09_FLI.pep
HDLGGSDRIGSFHKFPSGFAGMAIRKGSSYAVAALLALASVAAVAGEVFFQEKFEDGWESRWVKSEWKKDENMAGEWNHTSGKWNGDAEDKGIQTSEDYRFYAISAEYPEFSNKDKTLVLQFSVKHEQKLDCGGGYVKLLGGGDVDQKKFGGDTSYSIMFGPDICGYSTKKVHTILTKDGKNHLIKKDVPCETDQLTHVYTLIIRPDATYSILIDNEDKQTGSIYEHWDILPPKKIKDPEAKKPEDWDDKEYIPDPEDKKPEGYDDIPKEIPDPDAKKPEDWDDEEDGEWTAPTIPNPEYKGPWKQKKIKNPNYQGKWKAPMIDNPDFKDDPYIYAFDSLKYIGIELWQVKSGTLFDNIIITDDPALAKTFAEETWGKHKEAEKAAFDEAE

SEQ ID NO: 69620 - protein, 113 aa, Zea mays
  Clone ID: UC-ZMFLB73121A12_FLI.pep
LRPRRARRHVGATCGQCRRHAAGGHGPAAVPRALRLPRHLHHGPGARGPGGLTELHVSRRRNRGASHGSGEKSPEGAQISSPGSSCPPTHTRVTVGSCFALPFFFSLFHLTLV

SEQ ID NO: 69621 - protein, 248 aa, Zea mays
  Clone ID: UC-ZMFLB73124E10_FLI.pep
RDNDAEKDAPDNVSLAGDGFDTVVRAKAEVEKKCPGVVSCADILAIAARDVVTMSSGPHWTVQLGRLDGLVSKAGNVAGKLPGPNMRVKDLAALFAKHNLTTLDMVALSGAHTVGFAHCTRFADRLYHHGVGDSDGASVDPSYNPAYARQLMDACPPGVGADIAVNMDPITPTAFDNAYYANLAGGLGLFTSDQALYSDGASQPAVRDFAKNQTRFFEAFKDAMVKLGSVGVKTGRHGEIRSDCTAFN

SEQ ID NO: 69622 - protein, 255 aa, Zea mays
  Clone ID: UC-ZMFLB73099A09_FLI.pep
RRPWKGVLMFGPPGTGKTLLAKAVATECGTTFFNVSSATLASKWRGESERMVRCLFDLARAYAPSTIFIDEIDSLCTSRGASGEHESSRRVKSELLVQIDGVNNSSTTDDGQPKIVMVLAATNFPWDIDEALRRRLEKRIYIPLPDFESRKALININLRTVQIAADVNIDEVARRTEGYSGDDLTNVCRDASMNGMRRKIAGKTRDEIKNMSKDEIAKDPVAMCDFVEALVKVQKSVSPSDIEKHEKWMAEFGSA

SEQ ID NO: 69623 - protein, 251 aa, Zea mays
  Clone ID: UC-ZMFLB73107H03_FLI.pep
LNSSRAVDHFLTENHISTVNYHGEVPAEERVENLNKFRNEEGDCPTLVCTDLAARGLDLDVDHVIMFDFPSNSIDYLHRTGRTARMGAKGKVTSIVAKKDVALATRIEEAMKKNESLEALTTNNVRRPTSSQSVNTKGRPSRLVKTSNALKVVSQKGRRGVSLSSRSSRAPKDTTSTRRRSPPKSQAKATKSSAPRKAKPVKPTQSSAKVSKSKAKPEGRRSKSDTLNKLGTKLSVVGFRGRSSGKSAQSS

SEQ ID NO: 69624 - protein, 369 aa, Zea mays
  Clone ID: UC-ZMFLB73112E10_FLI.pep
HTRATMYRAAAVISRSSSALRRQLARGVAGELPRLLARGYAATAKEVSFGVGARAAMLQGVNDLADAVKVTMGPKGRTVIIEGSHKGPKVTKDGVTVAKSVEFEDSAKNVGANLVKQVADATNKAAGDGTTCATVLTQAILTEGCKAVAAGVNVMDLRNGINKAINAITAHLKSKAWKINSPEEINQVATISANGEKEIGDLISKAMEKVGKDGVITIVDGKTLDNELEAVQGMKLSRGYISPYFVTDQKTQKCEMENPLILIHDKKISNMDSLLPALEISIKNRKPLLIVAEDVEGDALSMLVLNKHRAGLKVCAVKAPGFGENRRHNLDDMAVMTGGEVISEERGLDLGKVQLQMLGTAKKVTVRSR

SEQ ID NO: 69625 - protein, 391 aa, Zea mays
  Clone ID: UC-ZMFLB73118H03_FLI.pep
PFKVIPGPDDKPMIVVQYRGVEQQFAAEEISSMVLVKMREIAEAYLGTTVKDAVVTVPACSTDLQRQATWNAGVLANLNVIRIIPEPTAAALAYGLNRKAAQIMGEYDVLVFDLGGGTFDVSVLAIEQGIFEVRATAGAAHLGGEDFDNRMVNHFVEEFKRKKKKDISGNPRALRRLRTACERAKRTLSSYLEASIEIDCLYEDIDFYSAITRARFEELNMDLFRKCMAIVEDCLSDASYVRSIHDVVLVGGSSRIPKIQQLLQELFDGKELCNSINPDEAVAYGATMQAAILSREGGYEIQNYLLLDATPLSLGLETDGGLMTFFSLFAAACCGCNPAAAAASTVFFSLWIAAAAVQTAATVSACSQPNTPLDDSKEYHHSNQKGEGLID

SEQ ID NO: 69626 - protein, 91 aa, Zea mays
  Clone ID: UC-ZMFLB73155B10_FLI.pep
SQDSLFFGTRMPDEDALWSELRMMLAQFDERCTIRDGMRSLSSPPDASYPSLVDLDSWIPCCGVLPGAVRAVSCKSSAPDEETAETRYRCR

SEQ ID NO: 69627 - protein, 239 aa, Zea mays
  Clone ID: UC-ZMFLB73164G06_FLI.pep
ATDLFNMLSMDGTTEKESASSSNDDNGWDGFQSAQPVPSSEKKDSAKPAESKTQSTSGMEDLFKDSPAVPLSSAPAVSQVNAKNDIMSLFEKSNMVSPFAAHQQQLALMSQQQALLMAALKAGNAPQMMIPGTANQLNANGTLPFQNWTNLYQNPGSTPAAAQNGATKVANNNQDFSSGTFGFGTPGVYNISPTVPANGATTAGAINNGTASTASSTLPSQSGKDYDFSSLTQGFFTKR

SEQ ID NO: 69628 - protein, 144 aa, Zea mays
  Clone ID: UC-ZMFLB73173G05_FLI.pep
NNNNKNAVHILLEGENGGRPSYTLPAATLSAVQFQHTSPSRFSLAHGPSTSDVVLFYGREATRYLAGNVGLHCGRCVAHVSSVIWSLDPQAQPLRWEWIHRAGLRRAQPSLQRTRLSRLLSAFLAPRPGSSIGDEKSTLFLFSR

SEQ ID NO: 69629 - protein, 280 aa, Zea mays
  Clone ID: UC-ZMFLB73177F12_FLI.pep
IERGAQMATPSSSLCSSFASLRTASIGHPRGIASSTPRKAFHVRASARVDKFSKSDIIVSPSILSANFAKLGDQVKAVEVAGCDWIHVDVMDGRFVPNITIGPLVVDALRPVTDLPLDVHLMIVEPEQRVPDFIKAGADIVSVHCEQTSTIHLHRTVNQIKSLGAKAGVVLNPATPLTAIDYVLDVVDLVLIMSVNPGFGGQSFIESQVKKIAELRRLCAEKGVNPWIEVDGGVGPKNAYKVIEAGANAIVAGSAVFGAPDYAEAIKGIKTSQRPLAVAA

SEQ ID NO: 69630 - protein, 103 aa, Zea mays
  Clone ID: UC-ZMFLB73151C08_FLI.pep
GTGCAARSPPSTETTASSTACSTTSRTRTSRTTSSPPCRTTTPWRPPGRSGPSSASTTSSTRPLSPRPPGARPGSASTSSLRTATARASSGTTASSSRRLLFP

SEQ ID NO: 69631 - protein, 163 aa, Zea mays
  Clone ID: UC-ZMFLB73161E05_FLI.pep
SVPFTRSHPLHSSLWCSEYCNDGWPGWQLLQVQLRPSERRADVTEGVFPVSQVRQPTFKERSHLTYLSHPVNTEGCARSIVHITIFSPAKVITGSGNKESWPCRIAATHRIPTLRFLERLVSHPSCKHHLPSLFFLLARTTTTHWYTTYNVKSSITNLTVWSA

SEQ ID NO: 69632 - protein, 114 aa, Zea mays
  Clone ID: UC-ZMFLB73165A11_FLI.pep
NIAQAGGLACLSPDGLKAMQDVVGFYKENTEIIVETFTSLGFNVYGAKNAPYVWVHFPGRNSWDVFAEILEKANVVTTPGTGFGPGGEGFVRVSAFGHRENIIEAARRLKQLYK

SEQ ID NO: 69633 - protein, 227 aa, Zea mays
  Clone ID: UC-ZMFLB73174C08_FLI.pep
IPNPLPQSQPDTGPRQNPIPIPPSPSRLPSRPRGRGVRVRFTAGLSLRRGTGPRAPGPDAMLLSCRTLSTWSRGCFGCCAKPTPIIAVDEPSKRLRIQGRSVRKASLSEDFWSTSAHEMENSGIQSQRSMSSISTLAQSSDQHTAGSSSNPNEFMNQGLMLWNQTRQQWVGSKKRHSRSQQPREPKLSWNTTYESLLGSNKPFSQPIPLGEMVDLLVDAWEQEGLYD

SEQ ID NO: 69634 - protein, 100 aa, Zea mays
  Clone ID: UC-ZMFLB73166F03_FLI.pep
NGTGLFKLDARLLGIYAWAAWRGTRSLGGCGRNVICRAQENVQHLFRCVPSSMLHCRKKSSASTTIRYSYSSVGDESIPLPLLVIVSLTRSQEQSTRTRG

SEQ ID NO: 69635 - protein, 496 aa, Zea mays
  Clone ID: UC-ZMFLB73169D05_FLI.pep
EIESQLLPIATASLNIREKHVKAYLGTTPGAKPKFWLAFPVSVPPLGFNTYFVSNLKKSAHISSKSTQYSPQGSESSNLQVGQGNLKLQYNEAGKLSLYSDSKTMVQANFEQKYKYYIGQDGNGSDPQASGAYIFRPNGTVPISTDGQVSLTVLRGPILDEVHQQINSWIFQITRLYKEKDFLETEFIVGPIPVDDGNGKEVATEIVTNMVTNKTFYTDSSGRDFIKRIRDYRSEWKIEVHQPIAGNYYPVNLGIYVEDGSKELSVLVDRSIGGSSIKDGQIELMLHRRLLHDDGKGVAEALNETVCLDKQCEGLIIQGKYYVKIDPQGEGARWRRTFGQEIYSPLLLAFTEQDGGNWANSHVAKFSAMDSTYSLPDNVAMLTLQELEDGSVLLRFAHLYEAGEDKDLSSLASIDLKRVFPEKKIGKVIETSLSANQERAAMEKKRLKWKAQGSAADEKVVRGGPVDPSKLVVELGPMEIRTFIVSFDHISDKQQL

SEQ ID NO: 69636 - protein, 165 aa, Zea mays
  Clone ID: UC-ZMFLB73179H05_FLI.pep
QPIKKNEYCDGMIYTRSNILYHVSIQDLCSAHINHKIQKIGLTFCISYRSKCKRNEIRGCSLLNSRKQGCKLLSKEAFHMVCHGFCETVSFYLRRCLCVHPYHIFCTGWTHKASPVGVVGGLLIYQFLQTRRLANFCLCICCNNHTSIFNFHFQLSTGQITIQST

SEQ ID NO: 69637 - protein, 139 aa, Zea mays
  Clone ID: UC-ZMFLB73169G12_FLI.pep
NKIYGATSTVAMSLCLFFTNAASQQLLRRSSSRLQQGAHWHPPTTLGGDPWAAALCNATTRSVTPCMGLSRSATTRHQVDPGAHDGAVPQPEPGRDGEPDDQARAAVRWRAGHALHVLLVELRTASGIEVAGRRLQREG

SEQ ID NO: 69638 - protein, 206 aa, Zea mays
  Clone ID: UC-ZMFLB73175C03_FLI.pep
TSDAAMTLVPEPVAPETVGSTAVVAVICSSHIIVSNCGDSRAVLCRGKQPVPLSVDHKPNREDEYARIEAEGGKVIQWNGYRVFGVLAMSRSIGDRYLKPWIIPVPEVTIVPRAKDDECLILASDGLWDVMSNEEVCEIARKRILLWHKKNSTSSSSAPRVGDSADSAAQAAAECLSKLALQKGSKDNITVVVVDLKAQRKFKSKT

SEQ ID NO: 69639 - protein, 645 aa, Zea mays; identical to SEQ ID NO: 55223
  Clone ID: UC-ZMFLB73180C08_FLI.pep

SEQ ID NO: 69640 - protein, 320 aa, Zea mays
  Clone ID: UC-ZMFLB73162F01_FLI.pep
ASSIGLGSGLHTFVLYLGPHIALFTIKAVQCGRIDLKIAPYDTIQLKVGPSWLDKKCSEFGPPVYPASAHSVRIPVFDLLPQIQLEAVLWGIGTALGELPPYFISRAARLSGSESKAVQELDAATSKEDGPVASSLNRTKRWLLSHSQHLNFFSILILASVPNPLFDLAGIMCGQFGVPFWEFLFATLIGKAIIKTHIQTLFIVSLCNNQLLYLIEKELIWIFGHVPGFSATLPSVIARLHAAKDKYLSPPAPVSPSSQMGEKQWNFSFTSVWNSIVWLVLLNFFIKIVTSTAQDYLKKQQDTEMELISDSPIQDHSKTN

SEQ ID NO: 69641 - protein, 243 aa, Zea mays
  Clone ID: UC-ZMFLB73176H06_FLI.pep
QTTGMPTQHQKNSNRRRRDHPSIHGAMVPYWVLKPKRTGGAAGPVFLVAAGRPRSLPPFAAAVQPEEVERRDERDADHVQAGRHRAGHGATRLRAETLVEVARLHPLELLRPVLADHRRLHRHGHRRDREVRHHLIAGEDGPCHGPVDFVNLHLTAAAQCVKQLERELFRFRHPNAFREVGAGEETLGSEAVEVGLHLHPGVVGLVAADEAEAAERLVRAGARAVELRALPPRGAGSEGRLDA

SEQ ID NO: 69642 - protein, 338 aa, Zea mays
  Clone ID: UC-ZMFLB73152H10_FLI.pep
PGGEKGELELGEESERRIASSRRGSQRQGGGRRNRRRREAGMEDLSVEELASNLSTYKEQLREVKKLIKEKKDDAGISEYIDMEKELQEVITLTEEILATAKQTESAQNVAGLSPPSYSAGVQSEGLDDLSHSHKFAVGTRVQAVWSEDGEWYNATVEALTPNGYYVAYDGWGNSEEVDPDNVRLLEEEAADALGQAEKEAEATKMAIKRKIEQAATSDFQARSLPAKLRIEPSDPEDVKAAKRKKIHAFKSKSRFEQLEFAQNKRQNAWQQFQTKGKAKKVGFFSGRKKESIFKSPDDHRGKVGVTGSGKGLTDFQRREKHLHLKGGSGDAADDDEE

SEQ ID NO: 69643 - protein, 299 aa, Zea mays
  Clone ID: UC-ZMFLB73180H07_FLI.pep
RRPPERGGGTGADLKTMAAAGSSPSFSSSSKRLEGKVALVTGGATGIGEAIVRLFMEHGAKVCIADIQDEAGQQLRDALGGDAQGAMFVHCDVTSEEDVSRAVDAAAERFGALDVMVNNAGVTGTKVTDIRNVDFAEARRVLDVNVHGVFLGMKHAARAMIPRKRGSIVSLASVASAIGGTGPHVYTASKHAVVGLTKSVAAELGRHGVRVNCVSPYAVPTALSMPHLPQGARADDALKDFLAFVGGEANLKGVDAMPEDVAQAVLYLASDEARYVSAVNLMVDGGFTAVNNNLRAFED

SEQ ID NO: 69644 - protein, 221 aa, Zea mays
  Clone ID: UC-ZMFLB73167E12_FLI.pep
EISSPDASTAVGQHRVLIFAQHKAFLDIIEKDLFQSHMRSVTYLRLDGSVDPEKRFEIVKAFNSDPTIDVLLLTTHVGGLGLNLTSADTLVFVEHDWNPMKDLQAMDRAHRLGQRKVVNVHRLIMRGTLEEKVMSLQRFKVSVANAVINAENSSLKTMNTDQLLDLFTSTPASRKASDEQSKRKSGGKGLKSILNGLDELWDQSQYADEYDLNQFLAKLNG

SEQ ID NO: 69645 - protein, 192 aa, Zea mays
  Clone ID: UC-ZMFLB73170E12_FLI.pep
RALQKQQQQCSTQIKFTHQNAGQNPRRNRNPAAAKHTHAPTHTPLPTAAIYTTEPTPAAPTETQHPSPHSASRGRDGRGALGVRDGPEVDAVPGYPAATPIVRKARRLAASIASTAALQRFEGLDDVAHEWPGLGVLAQAVERKAAGFVGGSGRVLPLQSRVDDLEKPPLVVQLGEGPVNQALLPAGPRLVD

SEQ ID NO: 69646 - protein, 232 aa, Zea mays
  Clone ID: UC-ZMFLB73167F03_FLI.pep
LRPAAREPRLRPDAAGLGDAVGGRAGGGSRRGAHPLHGAHGVARQHQVLQRPSHQELRGARVGPRPPHARRPLLLAHQGVRLPRTGGHRHPPRLAEGRRLQLRRPPAGAAHGEGAHARRRQRGGARPAALGAVRRAGGVDRRGVRPGAPQVPKRRGGDGAAPPARHRLLRAAPRQEARHVRGGHADRRDPPLQPRRPAGGRQRRRRRAISITAIAVAPPLIHHHTYCVNLSE

SEQ ID NO: 69647 - protein, 298 aa, Zea mays
  Clone ID: UC-ZMFLB73170H06_FLI.pep
KVWDVGGDVRHIAWNPSPDRPILAAVVGHDLLLINAEVGSEEMQTMVKDLLKVDEMALQDDTDDKKPAVRWLKHDKLDGITLVHQKAVSNVEWHYKGDYFTTVVPTGDTRAVLLHQLTKKHSHHPFRKMPGLPVAATFHPSQKMFFVATKKFVQIYDLQKAQLVKKLESGLREISSISIHPGGDNVIVGSRDGKLCWFDTDLSTRPYKTLKIHSKDVTSVAFHRKYPLFASSSEDCTAYVCHGMVYSDLNQNPLIVPLGILRGHSSSDGRGVLDCKFHPKQPWLFTAGADSVIRLYCD

SEQ ID NO: 69648 - protein, 340 aa, Zea mays
  Clone ID: UC-ZMFLB73181H10_FLI.pep
ADLTSYDYDAPIKEHGDVHNAKYKALRRVIHECTGTPLHPLPANIKKASYGIMKLQKVVSLFDIIDNINDPLKVSVSEHPLYMEQIGQMFGFLLYMSEYQGKLPSSILSIPKVHDRAQVFVSCSAGVRTLRYCGVIERWSNKTLEIPNLRCSSKTSLYILVENMGRVNYGPYIFDRKGILSPIQIDGITLRHWKMYPLALNSLDILPKLQLITQIPYAGASKMSIHGDSEKILQDSSCCSNESTSAEPAFYEGHFRIDNETEIKDTFISFRGWNKGVAFVNNFNIGRFWPACGPQCTLYVPAPILRPGDNIVVIFELHAPNHELTIDFTTDPDFTCGPEQ

SEQ ID NO: 69649 - protein, 239 aa, Zea mays
  Clone ID: UC-ZMFLMO17126A04_FLI.pep
HQTSTLELEAYPALDELTSKISTLNLERVRQIKSRLVAISGRVQKVRDELEHLLDDEMDMAEMYLTEKLTQQEISEASSRAEVDDASLTEDDRDEDYRSEPDGSNGSVIGYKPNIEELEMLLEAYFVQIDGTLNKLSHLREYVDDTEDYINIMLDDKQNQLLQMGVMLSTATVVITAGVAVVGLFGMNIGISLYADPTTEEETRAANRKFWETTFGTVAGCVILYIIAMGWGKRSGLLQ

SEQ ID NO: 69650 - protein, 491 aa, Zea mays
  Clone ID: UC-ZMFLMO17127F03_FLI.pep
HATFHRFRIQMCVVIFIGTNGQTYFITASLVTSIQNFPKSRGPTVGILKGFMGLTSAILTQVYTVMHTPDHAALIFMVAVGPSLVAIGLMFVIRPVGGHRQIRPSDKNSFMFIYTVCLLLASYLVGAMLIQDFLQPSYDVVVFLTVILFVLLISPIAIPVIVSFMPEKAQHLMEDALLSEPLTGEASSSRQKEDQPEVILSEVEEEKSKETDSLPPSERRKRIAELQAKLVEAAARGGVRIKRRPHRGDNFTLMQALVKADFWLIWLSLLLGSGSGLTVIDNLGQMSQAIGYKNAHIFVSLVSIWNFLGRVGGGYFSEIIVRERTYPRHIALAVAQIVMAAGHFLFAMAWPGTMYIASLLVGLGYGAHWAIVPAAVSELFGVKHFGAMYNFLILANPAGSLIFSELIVSNLYEHEAEKQASQHQMSALLSPRLLRDTGFLADDALKCEGPACFFFSSLIMSVFCAVAAGLSLLVVQRTRQVYPRLYSSVRT

SEQ ID NO: 69651 - protein, 200 aa, Zea mays
  Clone ID: UC-ZMFLMO17139D05_FLI.pep
FSLRPGLQEASTSHQYMGELGLNFEVYRNDELTIEDVRRKNPRGILISPGPGEPQDSGISLQTVLELGPTIPIFGVCMGLQCIGEAFGGKIIRAPSGVMHGKSSPVYYDEELGKALFNGLPNPFTAARYHSLVIEQETFPHDALEATAWTEDGLIMAARHKKYKHIQGVQFHPESIITPEGKKIILNFVRFIEELEKQRS

SEQ ID NO: 69652 - protein, 396 aa, Zea mays
  Clone ID: UC-ZMFLMO17157D03_FLI.pep
LMHLDALLSGVYEMSWMEGRLQLVNSVLSSLPTYAMCTLQVPAAVLEYIDTARRHCLWRNSDSNAKFKPLVAWNKCTRPKKKGGLGVINLRSQNSYLRMKFLDKLYNRKQIPWVNLVWNTYYSDGKTPHASKFMGSFWWRDALKLCDLFRGISNCKVGDGKTVLFWHDLWNDNIRRNKFPRLFTFAKNQSISVASFLTQENLTDNFHLPLTEQANTELQQLPDEVQQIRESVIEPEEKDSWSYIWGNSTYSSTKLYHYTFKNVNPPKPFLWILESRCSNKLKVFAWLLLMDRLNTRNILKRKNFKVQGDNYSCALCQLQREETAFHLFFNCPFSQDCWRHLNIQWNHQIDFFATFQQARDLHGSPFFMEVFIIAAWQIWKQRNNFIFDRGRPSFIG

SEQ ID NO: 69653 - protein, 357 aa, Zea mays
  Clone ID: UC-ZMFLMO17152B01_FLI.pep
LSFLPSIPPCLRPLLTPVGRGAAADCWDCPTPSAQVIFGPFAGDEHHQVCQVDRAMDSLWHLGDELRGQPKVVEDRQWSLMTSKLAEITRSKGERMNTVPDAKQWDKTSYQLHDDSRMGHIGLMNLDLKMNEAAAMKLPFRGMPYNMNQMYLKGSNANSNVNAFKMNVGVNKYSNSPNGKDANGKNNGGSGGNNNNGSANGTSVADKRFKTLPTSEMLPRNEVLGGYIFVCNNDTMQEDLKRQLFGLPARYRDSVRAITPGLPLFLYNYTTHQLHGVFEAASFGGSNIDPTAWEDKKCKGESRFPAQVRICIRKLCKPLEEDSFRPVLHHYDGPKFRLELSIAETLSLLDLCGKEGI

SEQ ID NO: 69654 - protein, 370 aa, Zea mays
  Clone ID: UC-ZMFLMO17154G12_FLI.pep
ASYMACNRGVKEQEDPSAASAAPAPAAVARARAARPPRPRSRKGLGVRHLLKPCRFLAAVQRANARVREAGEATLVAALAAAQKESERENEVVADVCGGWKSEDGSLNCGYSSIRGRRVNMEDFYDIKSSRVDDKQINFFGVFDGHGGTHAAGYLKQHLFENLLKHPAFIGDTKSAMSQSYKKTDADFLDTEGNIHVGVGSTASTAVLIGNHLYVANVGDSRAVLSKAGKAIALSDDHKPNRSDEQKRIEDAGGVVVWSGTWRVGGILAMSRAFGNRLLKQFVVADPEIQDLEIDGDTEFLILASDGLWDVVPNEHAVAFVKDEDSPEAAARKLTEIAFRRGSTDNITCIVVEFCHDKMVDGSPPSTNKS

SEQ ID NO: 69655 - protein, 681 aa, Zea mays
  Clone ID: UC-ZMFLMO17132A06_FLI.pep
RILISGSIHYPRSTPEMWPGLLQKAKDGGLDVVQTYVFWNGHEPVRGQYYFGDRYDLVRFVKLAKQAGLYVHLRIGPYVCAEWNFGGFPVWLKYVPGISFRTDNGPFKAAMQAFVEKIVSMMKSEGLFEWQGGPIILAQVENEYGPMESVMGAGAKPYANWAAKMAVATGAGVPWVMCKQDDAPDPVINTCNGFYCDYFSPNSNSKPTMWTEAWTGWFTAFGGAVPHRPVEDMAFAVARFIQKGGSFVNYYMYHGGTNFDRTSGGPFIATSYDYDAPIDEYGLLRQPKWGHLRDLHKAIKQAEPALVSGDPTIQSLGNYEKAYVFKSSGGACAAFLSNYHTSAAARVVFNGRRYDLPAWSISVLPDCKAAVFNTATVSEPSAPARMSPAGGFSWQSYSEATNSLDGRAFTKDGLVEQLSMTWDKSDYLWYTTYVNINSNEQFLKSGQWPQLTIYSAGHSLQVFVNGQSYGAVYGGYDSPKLTYSGYVKMWQGSNKISILSAAVGLPNQGTHYETWNVGVLGPVTLSGLNEGKRDLSDQKWTYQIGLHGESLGVQSVAGSSSVEWGSAAGKQPLTWHKAYFSAPSGDAPVALDMGSMGKGQAWVNGRHIGRYWSYKASSSGCGGCSYAGTYSETKCQTGCGDVSQRYYHVPRSWLNPSGNLLVMLEEFGGDLSGVKLVTRTA

SEQ ID NO: 69656 - protein, 459 aa, Zea mays
  Clone ID: UC-ZMFLMO17135D11_FLI.pep
SIKVLKASGRAPELEVWKQLFSSLEERIRTHQQGGYGTNLAPGKIVGKIFTSLDKSISRMMGTPSAPLPPLPHGSFSDKESHSIPAAAKFVNSQSVMVMPSLIPSASMQSMTEIAEDSGGTGRKIAHNRSVSEPDFGRSSKQGAGGSDGTQSSASGSSSSRFGWLVQKTMGLVSKSHRQAKLGDQNKFYYDEKLKRWVEEGAAVPAEEPPLPPPPTKPSFQNGMLDNKLNGPMSVSHAPNGVTEWKSSNSSEQGLGMPPIPPSQNQFSARGRMGVRSRYVDTFNRSGASGAMPSYNKPAAPSMTPPAGAKFFMPTAAPVAADQMIPHQAAEIHSETIHDERSASPPAETSFSSTPPPTQFPSPVQSTIYRQSSMENISTPYQGSGVSSLSNDSSFSKSRAASWSGTYSEQFNAFAGTISPDRQTTHSPLMPGKPPHSRSNSNSSGHLNGLAEDLHEVEL

SEQ ID NO: 69657 - protein, 218 aa, Zea mays; identical to SEQ ID NO: 66277
  Clone ID: UC-ZMFLMO17155A07_FLI.pep

SEQ ID NO: 69658 - protein, 102 aa, Zea mays
  Clone ID: UC-ZMFLMO17127H06_FLI.pep
RFLKSGVYLVLEKLELQVYQRLVKKIHIIQRQKEPAKAHQIKLDVVVKALKWLEIDMDVDEVECIMACLIYKNLIKGYFAHKSKVLVLSKQDPFPKLNGKPV

SEQ ID NO: 69659 - protein, 109 aa, Zea mays
  Clone ID: UC-ZMFLMO17158H11_FLI.pep
QIPTAFDPFAEANAGDSGAAAGSKDYVHVRIQQRNGRKSLTTVQGLKKEFSYSKILKDLKKEFCCNGTVVQDPELGQVIQLQGDQRKNVSNFLVQAGIVKKEHIKIHGF

SEQ ID NO: 69660 - protein, 432 aa, Zea mays
  Clone ID: UC-ZMFLMO17152H10_FLI.pep
AVSPANQDLATSDAIKISREVDPKGERTFGVLTKIDLMDKGTDAVDILEGRSYRLQTPWVGVVNRSQQDINKNVDMIAARRREREYFATTPEYKHMASRMGSEYLGKMLSKHLEQVIKSRIPGIQSLITKTIAELETELNRLGKPIANDAGGKLYTIMEICRMFDSIYKEHLDGVRPGGEKVYHVFDNQFPVAIKRLQFDKQLSMENVKKLITEADGYQPHLIAPEQGYRRLIESCLISIRGPAEAAVDAVHAILKDLVRKAINETHELKQFPTLRVEVGNAAFESLDRMRDESKKNTLKLVDMECSYLTVDFFRKLPQDVERGGNPSHSIFDRYNDSYLRRIGQTVLSYVNMVCSTLRNSIPKSIVYCQVREAKRSLLDHFFTELGAREMKQLSKLLDEDPAVMERRTNLAKRLELYRSAQSEIDAVAWSK

SEQ ID NO: 69661 - protein, 352 aa, Zea mays
  Clone ID: UC-ZMFLMO17155E03_FLI.pep
RDTRNMMVDNMLNTFHTLLMDDPNSPLNFREVFKNELFRLSLVQALGEDVSSIYVEEYGKVISKEEIYKATVVDMMMCAIEVDWRDFFPYLSWIPNRTFETRVLTTEARRTTVMQALIKQQKERIARGETRISYLDFLLAENTLTDEQLLMLVWEAVIEAADTTLVTTEWAMYEIAKHPEKQEYLYQEIQKVCGNKTVTEDHLPELPYLNAVFHETMRRHSPVPLVPPRLVHENTNLAGYEVPAGTEIIINLYGCNMNKNDWAEPEEWKPERFLDGRFEAVDMHKTMAFGAGRRACAGSMQAMNISCTAIGRFVQEFAWRLEEGDEDKVDTIQLTTNRLYPLHVYLAPRGRK

SEQ ID NO: 69662 - protein, 422 aa, Zea mays
  Clone ID: UC-ZMFLMO17126E03_FLI.pep
TRGWPAIPREPLPLSSPSDPAPRGSARQSMASTQAEAEAGAPAPPEAAEAKEKGKQGGVLGRVWRALFGGREDFEKRLQYLSKEEAAVHARMRRRTQFSRRAVRNLIVLSVLAEVLAVVYAIMTTRNEDLTWQMRAIRVLPMFILPAVSSVIYSTVVNFTRMFEQKDQKTLEKLRAERKAKIDELKERTNYYLTQQLIQKYDLDPAAKAAAASVLASKLGEETGLKVHVGEEPKLDAAVARSNDVEIVPSDGLRNRKQPNARGSRTGSPTSHTPAQGTETNLPPASAGLETAPAPVVVEHHQGSGASDGGGWIAKIAALLVGEDPSQSYALICGSCHMHNGLSRKEDYPHVTYYCPHCHALNTSKQSMGQYSGSNSGRSTPVVLADGLSTSNSVQETELSNLTTLQELPEEGKTDKQQVEAS

SEQ ID NO: 69663 - protein, 317 aa, Zea mays
  Clone ID: UC-ZMFLMO17128H09_FLI.pep
EIHNVAIADNHGRVHNLSRYQARWNKPRPESATIDEELASKLNSMAAKEKLYCEIASTAESGWDFSSRWMRNSTDMTTLATTYIIPVDLNTFLFKMELDIGALAKVVGDNATSEFFLNASKARHIAIDSILWNSEMEQWLDYWLPGDADCQEVHEWKPNSQNRNIFASNFVPLWLNAYHSEFVRFADEAKSNRVMASLKASGLLHAAGIATSLTNTSQQWDFPNGWAPLQHLIAEGLLHSGSEAKKLAEDIATRWVRTNYAAYKATGAMHEKYDVEACGESGGGGEYKPQTGFGWSNGVVLSFLEEFGWPEGKEIAC

SEQ ID NO: 69664 - protein, 152 aa, Zea mays
  Clone ID: UC-ZMFLMO17141F10_FLI.pep
IISMYGVGIPTERAYVYKLAPQAECYIPFRIDASADGGEENKCLKGGVYLADGDETVPVLSAGYMCAKGWRGKTRFNPAGSKTYVREYSHSPPSTLLEGRGTQSGAHVDIMGNFALIEDIIRIAAGATGEEIGGDQVYSDIFKWSEKIKLKL

SEQ ID NO: 69665 - protein, 195 aa, Zea mays
  Clone ID: UC-ZMFLMO17155E06_FLI.pep
EGFQFDYVFDWTILKYQQAQMTTAPPRAIAPAVGQSSGMAPVANNNRHSGTEEGRRSGWSDMDPMRRQAPPPVINAGSLAKQKSPVRPETSTSKDAVFSSSTFLGRSSGSSRRPAVSSSRELSTEAEQTRSRTTDASPGAFQRSGAPRWSPQMPDSSDGRRSSSSRRHSSNPKNYESTIRGMQGLNFDGDDRVHY

SEQ ID NO: 69666 - protein, 340 aa, Zea mays
  Clone ID: UC-ZMFLMO17153C06_FLI.pep
FGPVYKGTLANGTIVAVKKLSSKSSQGNREFLNEIGIISALRHPNLVRLFGCCIDGDQLLLIYEFLENNSLGRALFGRTEHQLKLDWPTRYNICLGTAKGLVYLHEESALKIVHRDIKPSNILLDGKMRPKISDFGLAKLNDDCGRVSTRIAGTVGYMAPEYATRGCLTRKADIYSYGVVALEVVSGMSNTNSMSNEEYLHLLDWAERLKQQGKLLEMVDRRLGSDYSQEQALRLLDVALLCTSIQPTQRPRMSSVVKMLCGEIPVEIVPADDDLSEDLRLNIAQSRQSIDNSQTNWSQYSVNNSQTNWSETLSSDRSVLPHSSKDSGYLPSSSSLSVKL

SEQ ID NO: 69667 - protein, 181 aa, Zea mays
  Clone ID: UC-ZMFLMO17159E02_FLI.pep
CMPFSIGDENCYKKVCAGEYVYEITVHWLETKCVCPGKEMGITDFIDPNDICDKPVHEVIREMTDGGVDYSFECTGINDVLREAFLSTHDGWGLTVVLGIHSTPKMVPLHPMELYGRRITGCVFGDFKGKSQLPDLVDKCVNGEVNINFDGFITHKMPFSDINKAFRLLEEGKSLRCLLSL

SEQ ID NO: 69668 - protein, 230 aa, Zea mays
  Clone ID: UC-ZMFLMO17129F10_FLI.pep
IPFTRRPLFLVIDSSTSYAFKSIHGTERGETSAMLLSPSSRSSAAGFSGDSTRHSGSQFTMFLTSPLQAFCLLLGNNGTDIDRDAYNKAEELLLLSLNEWAATLVASSSLHSIWVEVLGDPLLRRLLLRFIFCRATHSLFKPTNHKTEFLPTCMPPLPESVDAESMLSQSCVLRVASFFGAASQFSFAEVTTWPDVDPEEAVVTSSSGSANKGVPETARDSDISNSSSSF

SEQ ID NO: 69669 - protein, 107 aa, Zea mays
  Clone ID: UC-ZMFLMO17150F02_FLI.pep
PKKVSASHNVYVSPLRQTKLDLLLSPSSRSFYACIGEGTHAYQSPSKDLAAINSRLNYNGRKVNSRLNFDMVSDSVVAGSLGQINGGSTSDPAAAFSPLSKKRETDT

SEQ ID NO: 69670 - protein, 167 aa, Zea mays
  Clone ID: UC-ZMFLMO17130B02_FLI.pep
LTAAGGLRKIGLGDTYESPSLIGIHYEGQFFEFVPWTGTVSWDIGLWGLWKMSGENKTHLVEIEATTAESGTALRAPTIEAGLVPACKDTCYGDLRLQLWEKKYDGSKGEMILDATSNMAALEVGGGPWFNGWKGTTVVNEVVNNIVGTPVDVESLLPIPFLKPPGL

SEQ ID NO: 69671 - protein, 121 aa, Zea mays
  Clone ID: UC-ZMFLMO17153H01_FLI.pep
LPLRFAHTLQPLHRAATATARMPFKRFVEIGRVALVNYGKDYGRLVVIVDVVDQNRALVDAPDMVRCQVNFKRLSLTDIKIDIKRVPKKTTLIKAMEEAGNDRAYAVDLFSTATLYSSSVF

SEQ ID NO: 69672 - protein, 142 aa, Zea mays
  Clone ID: UC-ZMFLMO17151C09_FLI.pep
SLPTTTPMADQLTDDQIAEFKEAFSLFDKDGDGCITTKELGTVMRSLGQNPTEAELQDMINEVDADGNGTIDFPEFLNLMARKMKDTDSEEELKEAFRVFDKDQNGFISAAELRHVMTNLGEKLTDEEVDEMIREADVDGDG

SEQ ID NO: 69673 - protein, 394 aa, Zea mays
  Clone ID: UC-ZMFLMO17156F11_FLI.pep
QALLDLIEFVESTNARFSEAAIAACSRMCAINLFRAFPPSCRSGSSGGGEGDEEEPMFDPAWCHLQLVYELLLKFIGSSSLDAKVGKKHFDHSFIVKLLNLLDSEDPRERDCLKTILHRVYGKFMVHRPFIRKAVSNIFYQFVFETDRHNGIAELLEVFGSVISGFALPLKEEHKIFLWRVLIPLHKPKSVGVYLQQLTYCVTQFLEKDPKLASSVIIGLLRYWPITNCQKEVMFLSEIEEILESTSQAEFQKCMVPLFRRIAHCITSSHFQVAERALFVWNNDHIISLIAQNRQVIMPLVVPALEQNIQNHWNQAVLNLTVNVKKMLSEMDDDLFSSCLAKYKDEEEKRASLEAKRRLTWEKLESAAAFQPVTGHTAVLVGHRPSANLIATMI

SEQ ID NO: 69674 - protein, 247 aa, Zea mays
  Clone ID: UC-ZMFLMO17165H03_FLI.pep
HPQSSSSRSPPQAFHDVRAIQVHRVLDCFDGIFGWEEIIHCNFFVFILFIIFKKAADLLKAMRGEVRDVLVVTEFRVISTDSYDLIIFLTLIDHRHEPNSTSSQETPRDNLFLHQYEDVHGVAILTECAWNETIVMWVNNRGVKDTIHLDQTRYLVQLILNLAASRNLNHTIEHFRSLWSYLQIMPWVSSNIFLGHGRKDTLIESSSSSHDGADRMVPSLARWREREEASGEVAERPRVRCCCPGLR

SEQ ID NO: 69675 - protein, 213 aa, Zea mays; identical to SEQ ID NO: 62941
  Clone ID: UC-ZMFLMO17174E03_FLI.pep

SEQ ID NO: 69676 - protein, 195 aa, Zea mays
  Clone ID: UC-ZMFLMO17176H05_FLI.pep
LHTSSGQFSSKSCYKAFFMGSITFEPWKRLWKSWAPPKCKFFLWLAIRNKCWTSDRLERRGLDHPESCLLCDQSQETIQHLLCTCVFARHFWHSVLLALGVGNLSPSGDETSFADWWRKSSKKIHKSKRKGMNNIIILGAWCLWIHRNKAVFNGETPSLSSIRCVFLDEMGCWITTGAKHLQSFDIEITRNLHRA

SEQ ID NO: 69677 - protein, 341 aa, Zea mays
  Clone ID: UC-ZMFLMO17160F05_FLI.pep
HPRPLRQRLLRRHTGVSVHRLLRAAGALPLPQRPLRRDTAAAGAPGRPDAARLAAQRAHGDPAEPGRDALAGPPRRERQRAVGVAAPRARDAAAVALVRRGPEQLLLRAAQRRGAGCAPRTAGAGPHWQRGVRRGPGRRVRAPGAAAAAPGFQPARRGPGGSRRWILEPARGAGSERQQARWAAASLPWRNAAARGGRARQEPVHRRHSRTVRRPCRGRGIHGTVGAVRQADAARQLSVRSPAEAVEADPGGQRSGELGGQLPAEVSTQVLLLPRGPAEGPRHVSQVRYFDPSSGHSAADALIVHSELVLKSLTKIKLRSMHSCTGVPKQQSRSCLSIECV

SEQ ID NO: 69678 - protein, 267 aa, Zea mays
  Clone ID: UC-ZMFLMO17163H05_FLI.pep
QIDVLIKRNEVENVYHWACGRPTSLHDRGRDSDDDDFRDRDYDVAALTNNMSQAFRFGIYRNDDIEEAQGSHERDDEDVYFDEESAEVVISSLCLGDDQDSSSLFTNSNWFTFDGDRGINDRLAASVPPSSPDSEAISLNTENTDEALTGETTGGTESLRESASLENGPVEDANELAEVADDNDADATDGEKILCTEEDSQASEGPVDAEEDKTGGASKAANESVPDNALPESHHTDCRCADSSESGTEEDVEIDDEKKSETAMTNE

SEQ ID NO: 69679 - protein, 365 aa, Zea mays
  Clone ID: UC-ZMFLMO17174G09_FLI.pep
NFQHTVTLSDGTIPEGTVRVSEAAIQISRCRVSEYLNLHTCYDLLPDSGKVIALDINLPVKQSFHILHEQGIPVAPLWDSFRGQFVGLLSPLDFILILRELETHGSNLTEDQLETHTISAWKEAKRQTCGRNDGQWRAHQHLVHATPYESLRDIAVKLLQNDISTVPVIYSSSSDGSFPQLLHLASLSGILKCIFRYFKNSTGNLPILNQPVCSIPLGSWVPKIGDPNSRPLAMLRPNASLSSALNMLVQAGVSSIPIVDENDSLLDTYSRSDITALAKDKVYTHVRLDEMTIHQALQLGQDANTPFGFFNGQRCQMCLRSDPLLKVMERLANPGVRRVFIVEAGSKRVEGIISLSDIFKFLLSL

SEQ ID NO: 69680 - protein, 142 aa, Zea mays
  Clone ID: UC-ZMFLMO17176H10_FLI.pep
EVFRDAQEKALPYVDYIFGNETEARTFAKVRGWEIENVEEIALKISQLPKASGTHKRITVITQGCDPVVVADDGKVKTFPVILLPKEKLVDTNGAGDAFVGGFLSQLVQEKSIDECVRAACYAANVVIQRSGCTYPEKPDFN

SEQ ID NO: 69681 - protein, 264 aa, Zea mays
  Clone ID: UC-ZMFLMO17160F08_FLI.pep
FFVTASDDSSVKIWDTRKLEKDIAFRSRLTYSVGNSRALCTAMVHGTSQVIVGGSNGTLHLFSVDCARSVGSVVERYAGIVGVKRNDIKEGAILSVVNCSPDSFSPTVLFSTEHCGIHKWDTRTNSEFWYFKSSPEEGYISALVVGQCGNWFISGSSRGVLTLWDNRFLLPVNSWNYSIVSPIEKLCLLIPPPSSISSAGRPLVFVAAGCNEVSLWNAENGSCHQVLISILRGLLVEHHRFKVNVLILLVFFIRSVFHVPYAIL

SEQ ID NO: 69682 - protein, 360 aa, Zea mays
  Clone ID: UC-ZMFLMO17171A06_FLI.pep
AEEAISLVEALAVQLTQREGELIYEKAEVKKLANFLKQATEDARKVAEEERALALAEIEKARAAIEKVEKAWHVHDFASSSREKAEIEELRKEVREARRIKMLHQPSKVMDMEFELQALRTLISEKTQLCNQLKKELAMIKRLEDDSSGLFELEGSNTLGSQLCIIPRVDGASNIANCPIQWYRVISGGTRELISGATKFMYAPEPFDVGRLLQAEIVLNADKIIVQTDGPVDNAAGLERYVDSLMKRTDIEFNVVVTQMNGKDYSSNSVHVFHIGKLRIKLRKGWSTKARESYSTTMKLCGSRGGGNAAARAVFWHPRKGSSYTLAFETDRDRNAAIMIARKFASNCNIALAGPGDQGT

SEQ ID NO: 69683 - protein, 189 aa, Zea mays
  Clone ID: UC-ZMFLMO17181C05_FLI.pep
ACILPCGALDVVRIVHSNGRVEEISGGPVLAAEIMKAYPKHVLRKPPSTCPADAAGIVLQKPVVLPPSAELHKGKIYFLMPVMADATPPAPAPENKPPAARLQPPPPGQTASSAARTRRRRRKEKDRTTAAQEGAAGLAPEEGDKERLLANERYLSEIMKETASTSRDRRQGRVAVWRPHLESITEDDL

SEQ ID NO: 69684 - protein, 174 aa, Zea mays
  Clone ID: UC-ZMFLMO17160H09_FLI.pep
SNLSVLSCFNLSTEKFLNTYMHMVHNCIVCPYDQSRYAAQTQNHEKHITDAQLTDPSPLLEPVLLALVEEVGLGATEVDDLGAPVPVLLLLGALLAVVGVRDAHAAADDAPPLERPVVALVADADQRARPHVRVADDALAVALLAQPPDGDAGLLPAHDQVRVVFRHASNVNPA

SEQ ID NO: 69685 - protein, 590 aa, Zea mays
  Clone ID: UC-ZMFLMO17169B04_FLI.pep
GGSNFSNLHASKVASHSNSKFPMQSPHGNANKKGSLMSSAGSVSQYQHLNGDSHDIDVSGWHTHTGGFTSSMLNNQLNPDGDYGNVLSNHGGSSYQGQPTETMYAQCLQANPDSPLGAAASMSPFQGRGFTGSGHLDSPGYQKAYLGSLFGQQKLQYGMPYLGNSGALNQNIYGNDSAFGIGMTYLTSPPSTPYISSPQGHVGQGNRLTRLPAVVRNTAGGSMGSWNSENGLMDNGYGSSLLEEFKSNKTRSFELLDIVGHVVEFSSDQYGSRFIQQKLETASTEQKNMIFPEILPQARTLMTDVFGNYVIQKFFEYGTETQTKQLATLLKGFVLQLSLQMCGCRVIQKALEVVEVEQQTQMALELDGSIMRCVRDQNGNHVIQKCIECIPQERIRFIISAFYGHVVELSMHPYGCRVIQRILEHCDDESTQNAMMEEIMQSVVTLTEDQYGNYVIQHVLQYGKPEERSTIIAQLAGQIVKMSQQKFASNVVEKCLTFGSPEQRQILINEMLGTTDENEPLQAMMKDQFANYVVQKVLETCDDQNRELILSRIKVHLNALKRYTYGKHIVTRVEKLIAAGERRIGALPSC

SEQ ID NO: 69686 - protein, 270 aa, Zea mays
  Clone ID: UC-ZMFLMO17177H11_FLI.pep
EKGKEQSQLLPTLLIQYSRFLFLVIRDLEKAREILTVLHEQLNLTKPVLEAVIHLESIFPCEKRIEFLDSLVEKFVTPESSQGELASLVDKEEISSIFLEFLDLFGDAKSINKASTRHTTFFSCKRSILPSKKRKADDAVLSDRDKFAKTGSVQSATGTDPNASNPPVWPATSETSGHQWGASYAQQAAYPAYGTYDYSHQMPQPAPQTAAYGAYPPTYSVQAYTQQSYTQPAAIPAAPVPAVVPAPTPASAYPQQPAAAPQPYYGTTYY

SEQ ID NO: 69687 - protein, 154 aa, Zea mays
  Clone ID: UC-ZMFLMO17171C08_FLI.pep
VLINERRGRRQLQAGAVDAVDPDDAGDAVVVDDAARRRQRVAQRLPPGEQPGHQGHGRQPLRPAAAQLPHRLRLVSTVSVVSISCLATCVVCVLKLDSSSRSRTKLIEQEPRECFDFIFYFFKISFSCVYNNFSGSTATRPGATTARSGEMDGQ

SEQ ID NO: 69688 - protein, 313 aa, Zea mays
  Clone ID: UC-ZMFLMO17164H04_FLI.pep
LAKRSAENRACIGDAGAIPILVSLLSTTDVSTQEHVVTALLNLSIYEENKARIISSGAVPGIVHVLKRGSMEARENSAATLFSLSIVDENKVTIGCSGAIPALVQLLSNGSQRGKKDAATALFNLCIYQGNKGKAVRAGLVPILLELLMETESGMVDEALAILAILSGHPEGKTAIGAASAIPVLVGVIRNGSPRNKENAAAVMVHLCSGEQQQQHLAEAQEQGIVSLLEELAESGTDRGKRKAVQLLERMNRFLKQQSQAEAEAEAMAQAHAQAQAQAQAQAQPQILVQAQAHADMQAERSLLPTSSDISDR

SEQ ID NO: 69689 - protein, 104 aa, Zea mays; identical to SEQ ID NO: 60005
  Clone ID: UC-ZMFLMO17179E10_FLI.pep

SEQ ID NO: 69690 - protein, 464 aa, Zea mays
  Clone ID: UC-ZMFLMO17184B02_FLI.pep
GESNWDHFCHNHPERILDGSNSDIGANSYHMYKTDVRLLKEMGMDAYRFSISWPRILPKGTKEGGINPDGIKYYRNLINLLLENGIEPYVTIFHWDVPQALEEKYGGFLDKSHKSIVEDYTYFAKVCFDNFGDKVKNWLTFNEPQTFTSFSYGTGVFAPGRCSPGLDCAYPTGNSLVEPYTAGHNILLAHAEAVDLYNKHYKRDDTRIGLAFDVMGRVPYGTSFLDKQAEERSWDINLGWFLEPVVRGDYPFSMRSLARERLPFFKDEQKEKLAGSYNMLGLNYYTSRFSKNIDISPNYSPVLNTDDAYASQEVNGPDGKPIGPPMGNPWIYMYPEGLKDLLMIMKNKYGNPPIYITENGIGDVDTKETPLPMEDALNDYKRLDYIQRHIATLKESIDLGSNVQGYFAWSLLDNFEWFAGFTERYGIVYVDRNNNCTRYMKESAKWLKQFNAAKKPSKKILTPA

SEQ ID NO: 69691 - protein, 272 aa, Zea mays
  Clone ID: UC-ZMFLMO17161E10_FLI.pep
LFSAVVSCYSHLLNPIKKHYHFFSPLGMTFRHMLYPAYKSNRTPTPDTVVQGMQYLKASIKAMSIKVIEVPGVEADDVIGTLAINSVSAGYKVRIVSPDKDFFQILSPSLRLLRIAPRGSGMVSFGVEDFVKRYGPLKPSQFVDVVALSGDKADNIPGVEGIGDINAVKLISKFGSLDNLLKSVDEVEDERIKQALISHSEQAILCKNLATLRSDLPHYMVPFKTADLVFKKPQDDGEKFIKLLRALEAYAEGSSVNPIIRRAAYLWNKLKS

SEQ ID NO: 69692 - protein, 188 aa, Zea mays
  Clone ID: UC-ZMFLMO17165A05_FLI.pep
KLRISYLTSRANSEFGPLNWVSSGFIKTCGDFRIGKYESCDIVNMFSHQMKWDKGPRGLIKIYPQKGDIWAVYRNWSSDWDEDTPDNVLHAYNVVEVLDAYDEDHGISIIPLVKVTGFRTVFQRHQDPNATMKIPKEEMFRFSHLVPFYRMSGEEAANVPKDSYELDPAAISKELLQGITEAVEPNGT

SEQ ID NO: 69693 - protein, 387 aa, Zea mays
  Clone ID: UC-ZMFLMO17168G03_FLI.pep
QPASRSQRSAMATAYYERPRGGAVEEADDFDEFDPTPYGGGYDLAVTFGRPLPPSEETCYPCSAPSTSYDAPHYAASEPSPYGHHAKPKPNYGFRPQQEQQPSYGSGYGSRPEPAAEEGGGYGSGFGSGYGRKKQEEESYGSGYGRKPQAEESYGSGGYGSGYGGQTRPEESYGSAGYGSANPQAETYGSGYGRKPQVEESYGSEYGSGFGRKPQIEESYGSGYGRTPQVEESYGSGYGRKPQVEESYGSGYGSRPQGGEEYGSGGGGYGRKAQEETYGSSGYGYGRKNEEQSYGGSGYGYEKKASEEDEGAFGSGGYRKPKPYDEETQGSYGYGEEQPKYQSGGYERPSYGGGEGYYGRKKDDDDSDDEKKRRHSKHHHHGHHYDD

SEQ ID NO: 69694 - protein, 142 aa, Zea mays
  Clone ID: UC-ZMFLMO17179F02_FLI.pep
SEERRRARLERHQRTRERAAKALAEKNERDMQVQREQAERDRIGDTLDFEIKRWSAGKEGNLRALLSTLQYILWPECGWQAVSLTDLITGAAVKKQYRKATLCIHPDKVQQKGATLQQKYIAEKVFDILKEAWNKFNSEELF

SEQ ID NO: 69695 - protein, 360 aa, Zea mays
  Clone ID: UC-ZMFLMO17184C03_FLI.pep
SVTTPVATVLVLSAMAGAALLHLALKSKYDDEIHRKVEMFLETYRTLKPRRYTFSEVRKMTRRFSSRLGQGGFGSVYKGELPNGGVPVPVAVKMLEDSTGEEEFISEVATIGTIHHANVVRLLGFCSERSRRALVYEFMPNASLEKYIRCSSQEQSSLITASKMLEIATGIARGIEYLHQGCDQRILHFDIKPSNILLDYNLNPKISDFGLAKLCARDQSVVALTAARGTMGYIAPELYSRNFGTVSCKSDVYSFGMVVLEMVVVSAKRRKYSPAETEDQNDDVCVPEWIYEEIVTGQEPREMARGERDMVRKLAIVALWCIQWNPPNRPSMTTVVNMLTDSLQSLKIPPKPFVSSFVGQ

SEQ ID NO: 69696 - protein, 589 aa, Zea mays
  Clone ID: UC-ZMFLMO17161G04_FLI.pep
HYRDKSPPINYVVNISSNMQIFPPKDWLIASSVPSKFSPDAIQNVLNELTPETVRIFWESKKFEGKTKLAEPWYGTSYSVEVVPPSIIQKWVGKAPEEDLHLPKRNIFIPSDLSLRSVEEKVSFPAMLRKTQFSRLWYKPDTMFFTPKAYIKMDFHCPLSQSSPESAVLTDVFTRLLMDYLNDYAYDAQVAGLYYVVKPNDTGFQVTMVGFNDKMRTLLETVIGKIAEFEVKADRFSVIKEAMTKEYENFKFRQPYQQVLYYCSLILEDQTWPWDEEFSALSHLEASDLGIFLPHFLSKTFIECYFAGNIEPNEANNIVQHVEDVLFNAPISACKPLSPSQHLAKRIVKLEKGLRYYYPAMCSNHQDENSALLHYIQTHQDNVKQNVLLQLLALVGKQPAFHQLRSVEQLGYIALLRQRNDSGVRGLQFIIQSTVKDPANLDARVENFLNMFESNVYNMSDAEFKSNVSALIDMKLEKYKNIREESAFFYGEISEGTLKFDRKEAEVAALRELKKEELVGFFNDHVKVNAPQKKILSIQVYGGLHSAEYETIVQNAPPPPSCEITDIYGFRRSRPLYGSFRGGVGQMKL

SEQ ID NO: 69697 - protein, 240 aa, Zea mays
  Clone ID: UC-ZMFLMO17168H04_FLI.pep
VIVAIENPQDIIVQSARPYGQRAVLKFAQYTGAHAIAGRHTPGTFTNQLQTSFSEPRLLILTDPRTDHQPIKESALGNIPTIAFCDTDSPMRYVDIGIPANNKGRNSIGCLFWLLARMVLQMRGTILPGHKWEVMVDLFFYRDPEEAKEQEEEAAAAPEFAAVTDYQGADQWGGDQWTSDVAAPPVAPTGADWGAAPAPVPTGDGWDQTVAPVPVDGTVPPVVAPTGWESAAQPTAQGWE

SEQ ID NO: 69698 - protein, 258 aa, Zea mays
  Clone ID: UC-ZMFLMO17169F08_FLI.pep
QGERKALQQLIRARPAGSARRRRMEQYDGLFPPAYVDDSSSLLLVPNANGTAQEERPRARRRRRRAARCGGGGGELDGGGDHKKRRLTDEQVEMLELSFREERKLETGRKVHLAAELGLDPKQVAVWFQNRRARHKSKLLEEEFAKLKQAHDAAILHKCHLENEVMRLKDKLVLAEEELTRFRSAGNHAVSGDGGDVMARAVCSGSPSSSFSTGTCQQPGGGGGGGGDHLGDDDLLYVPDYAYADSSVVEWFSLYGLM

SEQ ID NO: 69699 - protein, 610 aa, Zea mays
  Clone ID: UC-ZMFLMO17174A07_FLI.pep
EEKPDGDATQEEQPKIEENVEENGEKDQSSNSNEVFPDGAQSELLKESNTQNGSFPTQAAESKNEKEVQALPKSSGDATSYTWKLCNSSASTDYIPCLDNEKAIKKLRTTKHYEHRERHCPEEPPTCLVPLPEGYKRPIEWPKSRDKVWYSNVPHTRLAEYKGHQNWVKVSGDYLLFPGGGTQFKNGALHYIDTIQQALPDIAWGKRSRVILDVGCGVASFGGYMFDRDALTMSFAPKDEHEAQVQFALERGIPAISAVMGTKRLPYPSRVFDVIHCARCRVPWHIEGGMLLLELNRLLRPGGYFVWSATPVYQKLPEDVEIWNAMSTLTKSMCWKMVNKTKDKLNQVGMVIYQKPMDNICYEKRSENSPPLCKESDDADAAWNVPLEACMHKLPGGSKVRGSKWPELWPQRLEKTPFWIDGSKVGVYGKPANEDFEADNAHWKRVVSKSYVNGMGIDWSKVRNVMDMRAVYGGFAAALRDQKVWVMNIVPIDSPDTLPIIYERGLFGMYHDWCESFSTYPRTYDLLHADHLFSKLRKRCKLAAVFAEVDRVLRPQGKLIVRDTADTINELESMAKSVQWEVRMTYTKGSEGLLCVEKSMWRPKELDAST

SEQ ID NO: 69700 - protein, 161 aa, Zea mays
  Clone ID: UC-ZMFLMO17176C05_FLI.pep
CYLAYHALCSANNDERESRWRSSVPVVQSVCHCVQLQNLWDGCLGLVKKIYIQGKYIFIRNIEFKAQEIKLTNILNLPIGRVATGRQLDQLLPLHVAGCVLVDTDVVCRALHQFSLLRSEPGQPLLHEILHYLWIVSVYQWINKPANVEVPGSLGCCLVIR

SEQ ID NO: 69701 - protein, 74 aa, Zea mays
  Clone ID: UC-ZMFLMO17174C06_FLI.pep
ANKLLSAQHQKFKQKCFFIISYNAPGFLSLNLRSCLMLCHVMVGLPIDEFSRKKMDATAQELTEEKTLAYSCLE

SEQ ID NO: 69702 - protein, 224 aa, Zea mays
  Clone ID: UC-ZMFLMO17176D03_FLI.pep
LKTTLPSRVHTHKFILPQAQYALPVAKFRHSAPPSQDSCSDLAIPKLFDGFEHAVGINKEARTNQPFLLDLRELGEQVLRQGPAEDVEIRPDPPLVGALREHAVPHLDAPAQRHLRRRLPHRLRRRDDGWVLQHRARLHRRRARRAQRRVGGEVYPLGGAERAEPALPPHRVALHLVDGGAHARHGQQVLQLLAREVADADGARLPGVVQLLHRGPRPDVSIIC

SEQ ID NO: 69703 - protein, 409 aa, Zea mays
  Clone ID: UC-ZMFLMO17184F04_FLI.pep
RISPPNLFKPPKDNVIPSKTSFSNDHLLRAAARSMSAQKELLAEASVEYGYTDPKEVAESTSLGVTETSAIQAQESSPRSALPTSPHFADSRFLEEPVAFEVYSPDRLAGELIFMDSTLVFTAEDLSRAPAEVLGRSSHGTTYKAVLQSGHVLIVKWLRVGLVKHKKEFTKEIKRIGTIRNPNIISWRAFYWGPKEQERLIISDYVNGDSLALYLYESTPRRYSRLSVSQRLRIAIDLARCLQFLHQEKGLPHGNLKPTNIFLAGPGLSPKLVDYGLHRFMTPSGTAEQILNLGALGYRAPELANAAKPAPTFKADVYAFGVIVMEMLTRRSAGDIISGQSGAVDLTDWVQMCSREGRGTDCFDRDIAGLEESPRIMDELLAVSLRCILPVNERPSMKTVCDDLCSITA

SEQ ID NO: 69704 - protein, 100 aa, Zea mays
  Clone ID: UC-ZMFLMO17165F10_FLI.pep
CMSLLKELNEKDNSLKDHRLRVNNLGEQLDLLQKDVQAREVTQMQLKDIVIRIETNIMDEVAKAFEIAMLRGEIRILSTHWTNKTKNLESQVCYISFICS

SEQ ID NO: 69705 - protein, 191 aa, Zea mays
  Clone ID: UC-ZMFLMO17174D09_FLI.pep
QNLVSWARPLFNDRRKLPKMADPRLEGRYPMRGLYQALAVASMCIQSEAASRPLIADVVTALSYLASQPYDPNAALASRKPGGDQRSKPGENGRAVSRNDETGSSGHKTPAKDREDSPRDLPAILNKDLDRERMVAEAKMWGDRERMVAEAKMWGDRERMVAEAKMWGENWRDKRRAEIGQGSLDSVTGNS

SEQ ID NO: 69706 - protein, 168 aa, Zea mays
  Clone ID: UC-ZMFLMO17176E08_FLI.pep
GSAGRGCGLDFRSLAAGAREPDAAKLRVALLLGAPLRRLRWSSGCFGCAQPTPIIAVDEPTKGLRIQGRSVKRHNLSDDFWSSSPHEMENSALQSRHSMSSISTAAQPNDQHASGSSSSPNEFVNQGKLVAIYTCPEHVVPMSIYGALIYNVWLSVPCFLEFSLFRKR

SEQ ID NO: 69707 - protein, 208 aa, Zea mays
  Clone ID: UC-ZMFLMO17180B05_FLI.pep
NPQMHWLYKEQTGVQSHSSHTLYEQRLARPRWVRVHSGRFITVAKATSKQISGPFALGPPSRRADSIGPPIGAVLRQETTVTEKSKSSCRLHRRFLRRRNLVYTRETSRGLEDQDQDQAPAVHHVATDTSMVSWCLDSVLEEYCCCCCLRPADLAACLARTASSRICSPRHSSLQKGVSPLYMKMSQSRPSGLAQSAQASIVGSRLGS

SEQ ID NO: 69708 - protein, 403 aa, Zea mays
  Clone ID: UC-ZMFLMO17185B10_FLI.pep
KARCQKKKISLARWWRKKKYHLVNWNKVCHTKKNGGLGIKNLEALNISLLCKWWWKIENESSLWQKIIVKKYFHGKDLYNIKVRNSDSPVWKDLMKIRAFYLKGRQITTKCGDKSRFWLDSWVNERPLCTIDPELYEICDDKFILVKDARIKNWQLSFRRWLNNENEIRWISICGDCENFEFQDSPDTVQWKWGGKKTFTVKSMYNSLSNNISDLGKKHIWKSKVPPKIKIFMWFLENNRLLTKDNLIRRKWSGDPSCCFCPHAENIEHLFFTCPIARVIWGTVAKCLDTHHIPNNVESCYRWLRKHLNCDNAVHVILISAICWAIWKARNKMCFDHVLVNSPNEIICHAGALVSSWAGLSKKELQDLLQEGAKMLVRAASARGNRILGSGDEMEGMLQPHGR

SEQ ID NO: 69709 - protein, 410 aa, Zea mays
  Clone ID: UC-ZMFLMO17190F07_FLI.pep
WLHELAVNNSVLVKLNFYMTELKVEPADLELLAKNCKSLISLKMGDCDLSDLIGFFQTSKALQEFAGGAFFEVGEYTKYEKVIFPPRLCFLGGLTFMGKNEMPVIFPYSTMLKKLDLQFTFLTTEDHCQLIAKCPNLSVLEVRNVIGDRGLEVVAATCKKLRRLRIERGDDDPGQEEQGGVSQIGLTAVAVGCRELEYIAAYVSDITNGALESIGTFCKNLYDFRLVLLDKQKKITDLPLDNGVRALLRNCVKLRRFAFYLRPGGLSDVGLGYIGLYSGNIQYMLLGNVGESDNGLIQFATGCTNLRKLELRGCCFSERALAVAVLQMPSLRYIWVQGYRASRTGQDLMLMARPYWNIEFAPPSPESAYRVMADGQPCVDTHAQVLAYYSLAGRRPDCPQWLVTLHPASL

SEQ ID NO: 69710 - protein, 189 aa, Zea mays
  Clone ID: UC-ZMFLMO17202A02_FLI.pep
AQQTTKSFLLKKKAALGRRFLRLEWLHHLPGEVRVVPSKVAIGRRLEVAPVAAFLEVKVDDDHARPEIEVLLDNLEDLLVGDRAGAVRVGLGVGGLGEGVYVGGVGLGVGGFGEGVYVGGVGLGVGGLGEGVYVGGVGLGVGGLGLGVYVGGVGLGVGGLGVGVYVGGVGVGFGVGLWGVGAGVYVGGV

SEQ ID NO: 69711 - protein, 127 aa, Zea mays
  Clone ID: UC-ZMFLMO17210B02_FLI.pep
HWGLGKLIAFYDDNHISIDGDTEIAFTEDVSTRFEALGWHTIWVKNGNTGYDDIRAAIKEAKAVTDKPTLIKVTTTIGFGSPNKANSYSVHGSALGAKEVEATRQNLGWPYDTFFVLEDSPMPRSLE

SEQ ID NO: 69712 - protein, 293 aa, Zea mays
  Clone ID: UC-ZMFLMO17192G05_FLI.pep
RRWARSRRAPRGSASATWWRAAATGRSTSTCPPTRAPAPRCARSAAPSRGTASSAPARSAASGSRTSATSRWRSACAPSRRRASASAASSSASQRASPPPTSSTASPVRSSDPSRADSVHRLPLLFSSPHHYLLTHQSTNPCVCAGFLESLWRDIDMGRLDQDPSCETNLVIVSHGLTSRVFLMKWFKWTVAQFERLNNFDNCEFRVMQLGPGGEYSLLVHHTQEELQQWGMSPEMIADQQWRASANRRCWAEECSSFIDTFFEEPYGSSETSSSDEDEAEDKEEETKLLEQL

SEQ ID NO: 69713 - protein, 212 aa, Zea mays
  Clone ID: UC-ZMFLMO17215D09_FLI.pep
RRQLHGQGRRLWAVQDRAGAGQDARQHRRQGQLRVPRPGVLPAADADGQVRRLLLRRRPAGGALRPSGHRPDAAPGDGQPGRVGHAAAQKRRARQHRRPADRWVDTAGVAQEVRRHRGEVPRGVRRGAARHRGRALVPRVRAAVAGGVAGQLRHRQHAASSQECVQIPSQPVDRQRRDRGHRGSELGGPRWYVHEESFFKDGQQRGGQVKLK

SEQ ID NO: 69714 - protein, 158 aa, Zea mays
  Clone ID: UC-ZMFLMO17185E02_FLI.pep
GVLNMTIFRQGKEIDLVVGTDVRDGNGTTRMVNWCGCIIQDPHSAVRALGFLPEEGHGVYVARWCHGSPVHRYGLYALQWIIEINGQPTTDLETFIKVVKGLEDGEFVRVRTVHLNGKPRVLTLKQDLHYWPTWELSFEPETATWRRKIIKALQSARA

SEQ ID NO: 69715 - protein, 169 aa, Zea mays
  Clone ID: UC-ZMFLMO17198G09_FLI.pep
ADPSYWDKISQGGLQRIYEKYTWKLYSERLMTLTGVYGFWKYVSNLERRETRRYIEMFYALKYRSLVSRLMPASASASACQRGSRVRSHSSSLKRVNELLTHLFLESRQARFRCPSISTGKEEEEEAQAGEPSPAFRSVSPQFALLVVYWSYVYLVSKNFGSFSFFFLV

SEQ ID NO: 69716 - protein, 242 aa, Zea mays
  Clone ID: UC-ZMFLMO17210E05_FLI.pep
GRAMEVAAAASYSYYGLEAADDDVDNLRATELRLGLPGTEEAAAAAAEAEEEEPRQAQKVAAPPSTPRGKKRDGVSGVTDPAPPAAKAQVVGWPPVRSYRKSCFLQQAAAAAGAKGKPAAAAPALAKGAPGPAGGGVFVKVSMDGAPYLRKVDLGTCGGYRQLREALEAMFLCFSGPGSGDASGGGGGGSPSDFAVTYEDKDGDLMLVGDVPFGMFIGTCKRLRIMKGSEARLGLGSAKNND

SEQ ID NO: 69717 - protein, 234 aa, Zea mays
  Clone ID: UC-ZMFLMO17199A04_FLI.pep
RFPQHQWYARPFLGVVVPTAVQYNDVYAAGYDFAACFIRIMTSRWKQMLSMSSVGTPRHLILTASARFQWLWMSSSILCVTPPFPKLICREQSLCRYFSTSAATSSSDRGSPRTSSRLLSSPLASSPTRAAAVPSHGRSRRPGPKGENRVGSRNPMGLHVGSVSEYEYRKSKGRSECAGSSGLILPARALGFGGGVDGARGGSLGTRVNGGSSSSGSKEDEEERRRRPARAWAS

SEQ ID NO: 69718 - protein, 329 aa, Zea mays
  Clone ID: UC-ZMFLMO17215G03_FLI.pep
TVFICIDLPPDKEPLDWNTRMKIAAGAAKGLEHLHDKASPPVIYRDFKSSNILLGEGFHPKLSDFGLAKLGPVGDKTHVSTRVMGTYGYCAPEYAMTGQLTVKSDVYSFGVVFLELITGRKAIDNTKTQGEQNLVAWARPLFKDRRKFPKMADPMLQGRFPMRGLYQALAVAAMCLQEQAATRPHIGDVVTALSYLASQAYDPNAPVQHVRSNSSTPRARNPAGWNGDQRSVRSPNHHSPDPRRRDAAGASKYGAEVSRTSSTSDSGRRSGLDDMDLTGSQVGSPAQTGRRREAPRGTDRQRAVAEARTWGENSRERTNGHGSFDSTHE

SEQ ID NO: 69719 - protein, 144 aa, Zea mays
  Clone ID: UC-ZMFLMO17199B09_FLI.pep
QSLFNPLLQAFPSYSALFDDVNILSLAVALPITCSEESGCWLFSLWMGRAQILISPSRHIVTIDSLVNSKPDRGSTCTRCATRGESFGTSRIRGEGWRTPVGGHALSQCAEGLPLLNVGDPPEGWRRGTAISSNARSQRSSWVS

SEQ ID NO: 69720 - protein, 514 aa, Zea mays
  Clone ID: UC-ZMFLMO17211A12_FLI.pep
HSLALNRLLSLSDAPAPPSRSMMAAAAWLCGLLSLLALAGAASAADGAEGEWEPLIRMPTAKGSDAASAPAAEDDEVGTRWAVLVAGSFGYGNYRHQADVCHAYQILQKGGVKKENIVVFMYDDIAHNILNPRPGVIINHPKGANVYDGVPKDYTGDQVTTENFFAVLLGNRSATTGGSKKVIDSKPNDHIFIYYSDHGGPGVLGMPNLPYLYAGDFIKVLKKKHASNSYSKMVIYVEACESGSIFEGLMPEDLNIYVTTASNPVENSWGTYCPGMEPSPPPEYITCLGDLYSVSWMEDSETHNLKKETIKDQYEVVKTRTSNSNKYKEGSHVMEYGDKTFKDEKLSFYQGFDPANANIANMLLWPGPKGAVNQRDADLLFMWKRYEQLNGGTEEKLRALIEIKETVQHRKHLDSSIDFVGRLVFGFEKGPSMLEAVRTSGQPLVDDWDCLKRMVRIFESQCGSLTQYGMKYMRAFANICNSGISEMKMRESSISACSSYNSARWSPMARGHSA

SEQ ID NO: 69721 - protein, 303 aa, Zea mays
  Clone ID: UC-ZMFLMO17214G08_FLI.pep
SLSYGLSLNSLVYFAISISCMLENDMVAVERVNQFSILPSEAAWKIEEHLPSSNWPNHGDIDIKDIKVRYRSNTPLILKGINISISGGEKIGVVGRTGSGKSTLIQALFRLVEPAEGKMIIDGIDICTLGLHDLRSRFGIIPQEPVLFEGTIRSNIDPIGQFSDAEIWQALERCQLKDVVVSKPEKLDAPVADRGENWSVGQRQLLCLGRVILKQTQILFMDEATASVDSQTDATIQKITRQEFSSCTIISIAHRIPTVMDCDRVLVLDAGLVKEFDSPSRLIEQPSLFGAMVQEYANRSSNL

SEQ ID NO: 69722 - protein, 266 aa, Zea mays
  Clone ID: UC-ZMFLMO17215H07_FLI.pep
DDQICIPVLILTIAVCFELKIVSLISTEILNHLINNQNEYCMEVTPKTLADVKGGTLISYEGRVQLLEIAQVSDEHVNEFKSIEKFKIFNTNNLWVNLKAIKRLVEAEALKMEIIPNPKEVDGVKVLQLETAAGAAIRFFDKAIGINVPRSRFLPVKATSDLLLVQSDLYTLVDGFVIRNPSRANPANPSIELGPEFKKVANFLGRFKSIPSIVELDSLKVSGDVWFGSGITLKGKVTIIAKPGVKLEIPDGDVLENKDVNGPEDL

SEQ ID NO: 69723 - protein, 198 aa, Zea mays
  Clone ID: UC-ZMFLMO17202H12_FLI.pep
GSQSMSFGGSVSLNSPTTKDGPVDNKIGRDVQNQTLFSPQVDSSSLLYNMVPNLTSNVADNNISTIPSGSTYLQSPMYGCLDDSSGLLQNTGENDPTTRTFVKVYKSGSVGRSLDITRFSNYAELREELGQMFGIKGQLDDPDRSGWQLVFVDRENDVLLLGDDPWESFVNSVWYIKILSPEDVHKMGKPGNDPRYLS

SEQ ID NO: 69724 - protein, 263 aa, Zea mays
  Clone ID: UC-ZMFLMO17209B06_FLI.pep
EVANYCRERLQVLLRQELRLLGEDLGQISCDVDMKEHWDELFTGCFQRLDDEVSGQASRLVGAVQESRPVAAENVGSTAVVAVVCSSHVVVANCGDSRAVLCRGKEPVELSIDHKPDRKDERARIEALGGKVIQWNGYRVSGILAMSRSIGDRYLKPFVIPKPEVTVVPRAKDDDCLILASDGLWDVVSNEEACKAARRQIQLWHKNNGVTSSLCDEGDESNDPAAQAAADYLMRLALKKGTEDNITVIVVDLKPRKKAKSNS

SEQ ID NO: 69725 - protein, 531 aa, Zea mays
  Clone ID: UC-ZMFLMO17211E07_FLI.pep
RAIAEIVSAMGELSRRGEDVDLNSLKSAACRRYGLARAPKLVEMIAAVPEADRATLLPRLRAKPVRTASGIAVVAVMSKPHRCPHIATTGNICVYCPGGPDSDFEYSTQSYTGYEPTSMRAIRARYNPYVQARSRIDQLKRLGHSVDKVEFILMGGTFMSLPAEYRDYFIRNLHDALSGHTSANVEEAICYSEHSAVKCIGMTIETRPDYCLGPHLRQMLSYGCTRLEIGVQSTYEDVARDTNRGHTVAAVADCFCLAKDAGFKVVAHMMPDLPNVGVERDLESFREFFGSPAFRADGLKIYPTLVIRGTGLYELWKTGRYRNYPPELLVDIVARILSLVPPWTRVYRVQRDIPMPLVTSGVEKGNLRELALARMEDLGLKCRDVRTREAGIQDIHHKIRPDEVELVRRDYAANEGWETFLSYEDTRQDILIGLLRLRKCGRNVTCPELVGRCSIVRELHVYGTAVPVHGRDVDKLQHQGYGTLLMEEAERIARKEHRSKKLAVISGVGTRHYYRKLGYELEGPYMVKCLA

SEQ ID NO: 69726 - protein, 262 aa, Zea mays
  Clone ID: UC-ZMFLMO17217B02_FLI.pep
SLLTRLFTSTHIVMASSSFSSSPSRRLVHLTRHLVSSSSGELSSVGAPAAAASDADPVKSPRSTASRVHAAVLVCLFEDPSSGPRVLLTKRASSLSSHSGEVSLPGGKVDDGDADPKATALREAKEEIGLDPALVSVVTVLEPFLSKNGLTVVPVIGMVPDKALYKPVLNKAEVEDIFDAPLEMFLKDDHRRTRQMNWMGIDIPVQFFDYEADGKKFVIWGLTAHILTRAAAVIFGRKPSFVELPRPKYAGAPVAGTGKSNL

SEQ ID NO: 69727 - protein, 276 aa, Zea mays
  Clone ID: UC-ZMFLMO17199H04_FLI.pep
FIFPGAQPAPHRSFSEEVAALNRYFGGLKSGGNAYVIGDPARPGQKWHVFYATEYPEQPMVNLEMCMTGLDKKKASVFFKTNADGNTACAKEMTKLSGISEIIPEMEICDFDFEPCGYSMNAIHGSAFSTIHVTPEDGFSYASYEVMGLDATALSYGDLVKRVLRCFGPSEFSVAVTIFGGRGHAGTWGKALGAEVYDCNNMVEQELPGGGLLVYQSFCAAEDAVATSPKSVFHCFDGENVESAPPPMKKDYKLANLLCWEEEADAMEEKAGVLDE

SEQ ID NO: 69728 - protein, 313 aa, Zea mays
  Clone ID: UC-ZMFLMO17203H07_FLI.pep
RNSGKKESEGKSLLKLSDEVGDDYDESASPEIVHMSDMDIPLSFDSDYPVHRYRHIITDDQLFRPVLDPQGWDHDIGFDAINFEASQELKKNVSAAITGQMRKDKEDMYIHSECSVSYNAQRGCSLMGGMDMQTASKDLVCTVHGDAKFHNLPWNSIGGGISVTKFGNKYFAGAKLEDSVTIGRRVKLVANAGRMSGCGQVAHGGGVEITARGKDYPVREGSVTAAVSALSFEKETVIGANLQSDFRVGRGSKISVSANLNSRNLGNLSVRTSTSDHAEIALITVVSLIQFILRRRSAADNKDEQQIGTNLDD

SEQ ID NO: 69729 - protein, 174 aa, Zea mays
  Clone ID: UC-ZMFLMO17209B07_FLI.pep
LWCSISTPWDAIWLWSTSRTSWFIRSFLFIWSPGPMSGMGYGPGPELGRYSYGFRGSPMPVSSPWSGGALAENTDNIASRKRRGGPDGLSEGDWTCPKCDNINFSFRSTCNMKKCGAPRPTPGGNTSSSRKDNSNKEAPEGSWTCPECNNLNYPFRTVCNRKGCSYSKPAPANN

SEQ ID NO: 69730 - protein, 519 aa, Zea mays
  Clone ID: UC-ZMFLMO17195B07_FLI.pep
PHSVVRPARKPWPADQTMLARRLAAPDGGRLFSAASSASARGGHAGGDTLGKRLLKLIYPKRSAVVVLQRWADEGRTVQKYQLNRVVRELRKYGRFKHALEICEWMRTQPEMRLLPGDHAVHLDLVAKVRGLASATKFFEDMPERAKGPSTCNALLHSYVQNGAREKAEAMLAEMARVGYLTCALPFNHMMSLYMATGELERVPEMIKELRRYTLPDLVTYNIWLTYCSKKDSVKSAERVFGLMKDDCVVPDWMTFSLLGSIYINAGLHVEGRNALVEMEKRASKKERAAYSSLLTLYASLSDRGNLDRVWNKMRGTFRKFSDTEYKCMLTSLLRFDDIAAAESIFSEWESTSGTRDSRIPNTILSYYIKNGMIKKAESFLDHIVEKGVKPSYSTWEAFVWGYLGDNKTDKVLECMKKALSCLEKWEPNHELATAIFSQIEKTGDIEAAEKLLVIFRDAEYVITEMYNSVLRTYAEAKLMPLIVDERMEQDKVAMDVETKRLLRLTSKYPIGEVSVSMS

SEQ ID NO: 69731 - protein, 125 aa, Zea mays
  Clone ID: UC-ZMFLMO17214H09_FLI.pep
AIFASGSPFDPVEYDGKVFVPGQSNNAYIFPGFGLGLVISGAIRVHEDMLLAASEALAAQATQENFDKGSIFPPFTNIRKISARIAAAVAAKAYELGLATRLPPPRDLVKYAQSCMYTPVYRNYR

SEQ ID NO: 69732 - protein, 377 aa, Zea mays
  Clone ID: UC-ZMFLMO17217E01_FLI.pep
GPPDCRDGAAQKAAAGAVAATIMERSGGGGLKAVVISGLQDLVFDIAADGECVLRPDPVAMADDVPQLELNGHGGDEWDSDEEGLHLVVAIAMGTTTTDIEASKMHHDEHHGGEDPRSQVGKKAAKRKGEKTVSLEELQRYFSGSLKDAAKSLGVCPTTMKRICRQHGISRWPFRKLAKANRSLDKIKRVFESVQGSSQAMAAAPAPPPAAAAASYSQQAPAVAAARRAPALSPCLSSAPRVASSQASCQAPPPPLKEAAWRKPSRGGDASVVTVKASYRGDIVRFRVPSSAGVAMVKREVAMRLGLAPGEFDVKYLDDDNEWVLLSCDADFQECLDVVPALSGASASSGSGTAQPVVRLMVHEVAEVHGSSCGSSD

SEQ ID NO: 69733 - protein, 260 aa, Zea mays; identical to SEQ ID NO: 59256
  Clone ID: UC-ZMFLMO17211C11_FLI.pep

SEQ ID NO: 69734 - protein, 370 aa, Zea mays
  Clone ID: UC-ZMFLMO17187F01_FLI.pep
VKGKVGMRRWFCCTRFNASYREHENERPITPEEKEGNGFSVKSDPIKAPPSIEVPELSFEELKEKTDNFGSKALIGEGSYGRVYYAILDSGKHVAVKKLDASTDPELDNEFLTQVSIASKLKHDNFVEMLGYCVEGNQRLVVYEFATMGSLHDILHGRKGVPGAQPGPALDWMQRVKIAIDAAKGLEYLHEKVQPSIVHRDIRSSNILLFEDYRAKIADFNLSNQSPDMAARLHSTRVLGTFGYHAPEYAMTGQLTQKSDVYSFGVVLLELLTGRKPVDHTMPRGQQSLVTWATPRLTEDTVKQCVDPRLKGEYPPKGVAKLAAVAALCVQYESEFRPSMSIVVKALSPLLQHKPQPPAATTDATAPSDA

SEQ ID NO: 69735 - protein, 280 aa, Zea mays
  Clone ID: UC-ZMFLMO17197H11_FLI.pep
SVIDDVAEYEIPWEDLDIGERIGLGSFGEVYRADWNGTEVAVKKFLDQDLSGVSLEQFKCEVRIMSRLRHPNVVLFLGYVTQSPNLSILTEYLPRGSLYRLLHRPNSRIDEVRRLKMALDVAKGMNYLHSSHPTIVHRDLKSPNLLVDKNWVVKVSDFGMSRLKHHTFLSSKSTAGTPEWMAPEVLRNEPSNEKCDVYSFGVILWELATMRVPWSGLNPMQVVGAVGFQNRRLEIPKDVDPQVASIISSCWDSDPSKRPSFSQLLSPLKQLQHLVVTESC

SEQ ID NO: 69736 - protein, 472 aa, Zea mays
  Clone ID: UC-ZMFLMO17020E10_FLI.pep
GLLSAMSDRQPSEEPEEQVDLEGDDDGMDDDDAGYRRRGSRDDSEEPEEDDDNDERHGEADDDAGMEPEPAGSKGGDDTGKGPDVAGGGPEDEEERSKWDDMLALPPHGSEVFIGGLPRDITEEDLRELCEPLGEIYEVRLTKDKDTKENKGFAFVTFMDKEAAQRAIEDVQDREFKGRTLRCSLSQAKHRLFVGNVPKGLSEEELTNTIKGKGPGVINIEMFKDQHDPNRNRGFLFVEYYNHACADYARQKLSSPNFKVDGSQLTVSWAEPKGSTDASSAAAQVKTIYVKNLPENVSKEKIKDLFDKHGEVTKIVLPPAKAGHKRDFGFVHFAERSSALKAVKGSEKYEIDGQVLEVSMAKPLADKKPDHSHRPGGGPNYPLPPYGGGGYMGDPYGAYGGGGPAYNQPMIYGRGPAPAGMRMVPMVLPDGRLGYVLQQPGGMPPPPPPRRGSDRRDSGRGGEGHSRRYRPY

SEQ ID NO: 69737 - protein, 112 aa, Zea mays
  Clone ID: UC-ZMFLMO17036D11_FLI.pep
IYRHPRPCIYRKWEDSPFPPNDRTGAQSLQMAAKQWMAVAMWRLMVSSSLMPSPRHSSSAPSRRTQACAAPTPSPNTMAPCASFEAVPATAAVRALRRDSSWRTAHPPSLVA

SEQ ID NO: 69738 - protein, 201 aa, Zea mays; identical to SEQ ID NO: 44361
  Clone ID: UC-ZMFLMO17036F11_FLI.pep

SEQ ID NO: 69739 - protein, 530 aa, Zea mays
  Clone ID: UC-ZMFLMO17036H09_FLI.pep
LLGFISLLLAATSSFISGICIDSKYYNSRFSPCTKEEVQESINAEHAIAHARKHLLEVILHHSPRRNLKTSYHNHEGCREGYESFVSHEGLEQLHRFIFVMAVTHVTYSCLTMLLAILKIHKWRKWEDEAFRDNHESFSQIAYESATRRQPALTKSYSFRSWSQNNVVMWLVCFIAQFGQSVVRADYLILRKGFIMTHNLPPTYDFHNYMIRSMEEEFEKIVGVSGLLWGFVVAFMLFNVDGSNLYFWIAILPVTLVLLVGAKLQHVIATLTAEGAKMSTYGPRIQPRDDLFWFKKPEFLLWLIHFVLFQNAFELASFFWFWWQFGYDSCFIKNHLLVYCRLILGFAGQFLCSYSTLPVYALVTQMGSKYKAALIPRRIRETIHGWGKATRKKRRRRRGDDSTVRTETSTVCSLTDDDEDFEDDHHHHHHGPSYETPRAGGRPPYLKIETHRQSGSGHDGPRPGGTPCFHPSGSGSGHAMLLRQASVSAPSSPSYRGGNNVTRSASMPGIAALRTTGSGTPTRVSHEEPT

SEQ ID NO: 69740 - protein, 472 aa, Zea mays
  Clone ID: UC-ZMFLMO17037F07_FLI.pep
PQLRDLDRGVDVVVATPGRLNDILEMRKVTIGSVDSLVANSSITQHIEIITPSEKQRRLEQILRSQDSGSKILIFCTTKRMCDQLARTLTRQFGASAIHGDKSQSEREKVLNQFRSGRSPILVATDVAARGLDIKDIRVVINYDFPTGVEDYVHRIGRTGRAGATGVAYTFFCDQDSKYAADLIKILEGANQRVPRDLEDMASRGGGRGRKRNHWASRPDRGGSRSELDSRYSSRDGLASSGKSESGRGSRGRDDNGSRGRYDPGETDGRSRRSTRGRSRSRSKSDSRSRSPSPKKSRRHEGRRSRTKSRSRSRSRRNHGASHSKSRSPVASRRYEKTASGSARPNSGHAEHKSPPRSHSRDDHVNHSDHKDDHMEDGKMERVDLDRSPSPHDDKSAPYSPVYNGKASGSMSPNGQPEAGAKFVEPSGKPEPASPVRCSKGRDDDEEGIIDEDGEIGEDDPRANAAVQNGNN

SEQ ID NO: 69741 - protein, 373 aa, Zea mays
  Clone ID: UC-ZMFLB73018E08_FLI.pep
LGFFFCLPCPMEESDLGGNLGKQTEEDKAAGESGDEGKIERSQSINLNRVPAVAVEAMSTQGNCETHGAAVPGTKDAGTGKAGQSSGDRQEEKLPKCEQVDYGSEVEGCADDENPGKRAALVTLVGNEYCGDEDERVQVLTIVKKDEHADDIVDRINPGTVAGYSEVKGAVGASAATSAVRPAGSRSSSFHGVTRHRWSGKYEAHLWDSSCRVEGRRRKGKQVYLGSYDTEEKAARAYDVAAIKYWGENTRLNFPISQYGKELEDIRDLSREECVTYLRRRSSCFSRGASIYRGVTRRQKDGRWQARIGLVAGTRDIYLGTFKEEAAEAYDIAAIEIRGKNAVTNFDRSNYVDKGMPCIEGEGLRLLASKPEE

SEQ ID NO: 69742 - protein, 233 aa, Glycine max
  Clone ID: 700874266_FLI.pep
ECEKCYKKVKKLLGKYPQIRDQKFDEKENIVFITVVCCSPEKIRDKLCYKGGGSIKSIEILELPKPKAEKPKADPPKAEKPKAEPEKKKDGGGEKPKAEPEKKKDGGGEKPKAEPEKKKDGGEKPKGDAPKKEAEKPKPGPEKPKDKPAPAPLPVQPHMAAPMAVPVGMLYAPPPCYEGRPVGPGYEYGGPMFCYDGYYARPVYDSYGGGRPCYVNRGDQYFSEENPQGCIIM

SEQ ID NO: 69743 - protein, 106 aa, Zea mays
  Clone ID: UC-ZMFLB73160E08_FLI.pep
HEQGHMLSFQAKTREATIQILELYIVNSYTSKLNTSIFKPYASLHLASPCKTFDTENQCKFMGRNTALPILVDVANEFNGRTIDLDHYTANSEATIAHESYSSRGG

SEQ ID NO: 69744 - protein, 395 aa, Zea mays
  Clone ID: UC-ZMFLB73242A07_FLI.pep
ALPTTTTHQMAGYMSRGPQNGSVYVCNLPPGTDENMLAEYFGTIGLLKKDKRNGRPKIWIYRDKVSNEPKGDATVTYEDPHAASAAVEWFNNKDFHGSTIQVHIAESKSKDAFDNPTNLNTIAGVSEQDEVDNGAGRGRGRGDGPGKAWQQDGDWMCPNTSCGNVNFAFRGVCNRCGAARPAGAGGTGGGGGGRGRGRGNSDARGSSRAGAGAATGGGPPGLFGPNDWPCPMCGNINWAKRTKCNICNTSKPGTNEGGVRGGRGGGYKELDEEELEEVKKRRKEAEEDDGEIYDEFGNLKKKFRSKALHTGSAQTLPGSGRAGWEVEHRGSSEREGRERSRDRGRDDYDEKETRSIDRGDHGRDQRRSQDREREKGRERRDHEYERSRERDRRHR

SEQ ID NO: 69745 - protein, 457 aa, Zea mays
  Clone ID: UC-ZMFLMO17270C10_FLI.pep
LKTASQPKADELRRMQELDGIISSEQAELDRLTKCSSKLKDQASELQQKVENAGGKKLKDQKTKVGNIQSELDKTSSEINRNKVNVTSGEKLVKRLTKGIEESKKDREKLSAETEKMMSMFKEIEKKAFVVQEEYKKTQEMIDNHKVELDKTKEEYTKLKKAMDELRATEVDAEYKLQDTKKLAKEWEMKVKTFKKRLDEIQINVVKHMDQIQKDAVDPEKLKATLGDEQLNDTYDMKRAMEMVALLEAQIKDLNPNLDSIAEYRIKACLYGERVDELNATTQERDDLKKLYDGLRKRRLDEFMAGFNIISLKLKEMYQMITLGGDAELELVDSLDPFSEGVVFSVRPPKKSWKNIANLSGGEKTLSSLALVFALHHYKPTPLYVMDEIDAALDFKNVSIVGHYVKDRTKDAQFIIISLRNNMFELADRLVGIYKTDNCTKSITINPGSFAESMKVV

SEQ ID NO: 69746 - protein, 301 aa, Zea mays
  Clone ID: UC-ZMFLMO17290A11_FLI.pep
CRWFEDEAASVVLRKPASAAARMDSSGEELLKKIRELEVGQAQLKQEMSKLIPGAGERRRSQSVSPRRGVPVPPPPPAKAKAGAPGRRLSGGFEGGQRAWARGSASFPHSSPLQREGRATGAGDASTSARLPERQYSRVLQSMGQSVHILDLDGRIIYWNQSAENLFGYPASEALGQDALMLLVDSHDHNAVNNIFQRISMGESWTGKFPVKNKQGHRFSAVATNTPFYDEDGSLMGFICVSSDSRQLEQIFCKPPTSARSQSESSMTSCDGSCSNTSHRINYPELLGKRPAATAVVPGAS

SEQ ID NO: 69747 - protein, 290 aa, Zea mays
  Clone ID: UC-ZMFLB73156C08_FLI.pep
DGMVFRQNFIIRSYEIGADRTASIETLMNHLQETALNHVKTAGLLGDGFGATPEMSKRNLIWVVSKIQLLVEKYPLWEDTVQVDTWVAAAGKNGMRRDWHVLDCKSGCTILRATSVWVMMNKNTRRLSKMPDEVRAEIGPYFNARAAITDEQSEKLAKPGSTAGGDAMKQFMRKGLTPRWWGDLDVNQHVNNVKYIGWILESAPIAILEKHELASMTLDYRKECGRDSVLQSLTTVAGECADGDTDSTIQCDHLLQLETGADIVKAHTEWRPKRAHGEGTPMGGFPAESA

SEQ ID NO: 69748 - protein, 427 aa, Zea mays
  Clone ID: UC-ZMFLB73196H02_FLI.pep
GRQIMSFESDNGPTHPSTRTPRRWTYQSSLSLFSSSGAGDSSPESGVAAASPQPHRLLHLARHVCCRSSCSCRSVRPSPGVLAGDREVRRFHSHLLGRLCVCSPPRRRRRGTRPPASGAAVPVLLIVAGELCPARSWIASGGGRSSCRCLPFWQSPSFQSFRSLGLDCANWTEPIYADLVRKACGDEERMLALFFDRIGWPTSLPTSEKGSFIKSVLREKLKALEEFSASDSLPLRPGVEKFIDDALGEGVPLAILAAYGRNGEKISRSIAMKLGPERISKIKIVGNVEVEESFYGQLVLGKGVTSGLDEQLVREAQKAASAEKQRIAEKVASILKLSVDITASESSDKVIAALRAGSEYVGCDVQSCILVAGSQSGVLAAERIGMPCIVVRSSFTARAEFHSAKAVMDGFGDTDLTVSKLLSKKWF

SEQ ID NO: 69749 - protein, 174 aa, Zea mays
  Clone ID: UC-ZMFLB73302G02_FLI.pep
AAGSSRRRRSASTSSRACESPATITHEPLSSSDASSRDSRANPQADASEGGHDHARAFPPPEPLSAAPAASDHETRCRNWTQEDPEEADAEPGWGRSKKEARWGREREGGYGDRWIPTASEMKSAPEKKSTLLRLRCRPASPMGTKSTHDARRDHARLRRGRNHRPAGRPNGRL

SEQ ID NO: 69750 - protein, 317 aa, Zea mays
  Clone ID: UC-ZMFLMO17269D10_FLI.pep
ELSSSTRQPSTSNPPSPAQIVTIPARKMARVSNAKKRQGAKPASALSSTDTSTAAKRKAEDDRPVRVYADGIFDLFHFGHARALEQAKMLFPNTYLLVGCCNDELTYRYKGKTVMTQEERYESLRHCKWVDEVIPDAPWVLTQEFIDKHQIDYVAHDALPYADTSGTANDVYEFVKKIGKFKETKRTDGVSTSDLIMRILKDYNQYVMRNLARGYSRKDLGVSYVKEKQLQVNMKINKLRETVKAHQEKLQTVAKTAGLNHEEWLANADRWVAGFLEKFEQHCHNMETAIKDRIQERLGKQLSKGIIAGLVQEPVTA

SEQ ID NO: 69751 - protein, 148 aa, Zea mays
  Clone ID: UC-ZMFLMO17089C03_FLI.pep
RLYNFIFAGLSSPWNMLGHVDGEIYGKQTRYISRRQILENYQAYGDSIIDQYGPSRPNVRQLVKPLLNLFHSEPGNSLWKRKADSALRHCKTVKTFLEETLDAISDSVLDKPVNREPSSDEEYFASVDSLLPPKYTTPMHERLVAAST

SEQ ID NO: 69752 - protein, 257 aa, Zea mays
  Clone ID: UC-ZMFLMO17279G10_FLI.pep
DDDVYGDPKMMMKPMAVPPPAGGGDKKGGGGKKGGGGGNEIPVQIKGNNHGGAGGQPHNAKGGAPGGGAHLGQGKKGGGSAAAVGVGGPMGGMLPQQGMMRPPNILGGAGAGFPSTAQMGGGPMGMPVGHPHMGIMQQSGGGGCGAGGMPGLGFHPGLGGGMHSGADMLQAAAASGNPVAQQQYMALMQQQQQQMMMMQQQQQQHGNGGAGYPAAMGYGYGRPPMHYPMGYPVLPPHSHAEPYNIFSDENANSCSLM

SEQ ID NO: 69753 - protein, 177 aa, Zea mays
  Clone ID: UC-ZMFLMO17280B12_FLI.pep
KISGVKVCFDTENARDSFYRAAVNFVLDDCSRAAKDIGAAKLNGEDPRDFLAGLASNIGLDKFRAATLVCASVATRTRTCFLQCWALEIQGKRPEALDELVKICRIHYIFPPEDNSAEMEMVAAGLEKNLHVAERVHLLYLYRSVCTAGNLKTAAQALGLSLPNENTEGFAMPIRQP

SEQ ID NO: 69754 - protein, 336 aa, Zea mays
  Clone ID: UC-ZMFLMO17270F03_FLI.pep
IGRRRLWGEYRLLLLVPAPIPMVASSQLCERRRLELLVVPEDALAVLGLDVDALPGLAPGRLGNRGRVEVVVVAEDGPDRLGGLHGVVVRHGGEEVVRDVRVRDVVEHAVEDAVVAVHGGQRAAQPVPLARVVVGERRVGVLQVGDEHQPRVHDQQRHGVHAHHPPDPERRRQLVQPERHGHDAGVRDEDLGALPVVVDGAVGVEVAGEARVRPPRRVGRQVQRPPEGELHHDVHQPADRVVVHVRGVPRQRLLLLGHEHLVALQGPRVGVVAPVAVLPREVGHHERRVQHQADHVVVTAASGQSRSGGHRASPLSPLFSCPGEKNERWCLQDLQG

SEQ ID NO: 69755 - protein, 147 aa, Zea mays
  Clone ID: UC-ZMFLMO17271A02_FLI.pep
QTSHEAARVGVVLVEHARLLHARRAVHELRRHHGREPAVRHHGGGRVVRHARARVRHVVAAQHRVRRVVREGAAVHVRALGPRRRLLLGRGLAAAVQRFVGILVLLALLAAAAAAGLVRASLLRGVLLPRRRGALLRLRGRLAFASP

SEQ ID NO: 69756 - protein, 926 aa, Zea mays
  Clone ID: UC-ZMFLMO17282G11_FLI.pep
HITLAGEARERAAGQGIHTHTHRTLPEKREARSEERPATMFWHGVADRLTGKNKEAWNEGKIRGTVRLVKKEVLDVGDFNASLLDGVHRILGWDDGVAFQLVSATAADPSNGSRGKVGKAAHLEEAVVSLKSTTDGETVYRVSFEWDGSQGVPGAVLVRNLQHAEFFLKSLTLEGVPGRGTVVFVANSWIYPHNLYSQERVFFANDTYLPSKMPAALVPYRQDELKILRGDDNPGPYKEHDRVYRYDYYNDLGEPDKGEDHARPVLGGSQEHPYPRRCRTGRRPTETDPNSESRLFLLNLNIYVPRDERFGHLKMSDFLGYSLKAIIEAVLPTLGTFVDDTPKEFDSFEDILGLYEPGPEAPNNPLVAEVRKRIPSEFLRSILPNGSHDHPLKMPLPNIIRSDVLKKAPEFKFGWRTDEEFARETLAGVNPVLIKRLTEFPAKSTLDPSQYGDHTSKITEAHIQHNMEGLSVQNALKKNRLFILDHHDHFMPYLNKINELEGNFIYASRTLLFLKDDGTLKPLAVELSLPHPDGQQHGAVSKVYTPAHSGAEGHVWQLAKAYACVNDSAWHQLISHWLNTHAVIEPFVIATNRQLSVVHPVHKLLSPHYRDTLNINALARQTLINADGIFERTVFPAKYALGMSSDVYKSWNFNEQALPADLVKRGVAVPDQSSPYGVRLLIKDYPYAVDGLVIWWAIERWVKEYLDVYYPNDGELQRDVELQAWWKEVREEAHGDLKDRDWWPRMDAVQRLARACTTVIWVASALHAAVNFGQYPYAGYLPNRPTVSRRPMPEPGSDDYKKLEAGQKEADAVFIRTITSQFQTILGISLIEILSKHSSDEVYLGQRDEPERWTSDARALDAFRRFGSRLVEIEKRIRTMNDSPTLKNRKGPVEMPYMLLYPNTSDVTGEKGEGLTAMGIPNSISI

SEQ ID NO: 69757 - protein, 292 aa, Zea mays
  Clone ID: UC-ZMFLB73190F07_FLI.pep
PVTVTASFRDAGGGDHGVARPARSRRGGPGQRPRAQPRPPGLLRPAFRFGRRQGGARRGLCLRYPGRQWEQCLQGKGQASGRGAGGGVAAGAVVPEEPGRLLLQAVVGETHPPGGQRQGRPVREDQHGRRADRAQGGPHGVRRLRRPLRRRRQALPRPACRSEGPSGHGGWRGGGGGGGPRDRRRLHAGVRGRRGRQGPCRRRPLGDVRGHRQEAARAQELRRAGLVGDAGSWGPGEVCSRLLLLKRALLRQLLVKSPEWRRRGVALSLASFLCVALAAFLLVVLVLGASKK

SEQ ID NO: 69758 - protein, 192 aa, Zea mays
  Clone ID: UC-ZMFLMO17287C08_FLI.pep
AERWTAAQLLEHPFVAAPCHGHGDHEVPRVSPKSTLDAAFWEAEDDDDDADEAVLASASERIKSLACSACALPDWDGEDGWIDALGDQQRVEVCGAVQVARSAPGKVSSVLAVPAGEMDVGGGGGLPCDELEAEDVSFGGEVPGAADASAERQKKRYLILRSHYCHVLSCQLVPCNLPLVVVNNAIKLWVPT

SEQ ID NO: 69759 - protein, 394 aa, Zea mays
  Clone ID: UC-ZMFLMO17314D03_FLI.pep
VTQLSSPKLPESRGSGSYSAGNTHTLTNNHHQPMHPRSPTPHPIQYQSCLPRIQHRQAELLSSAAGVEHAVVEGGDAVRGDALRDEPRPGLVRPRLHQDARGDVVQVGERHDVRGRAPAVVHLREAEARPVGHQQRAVVGRDLVRVDAGGAGLARRPPRELRGHPPLAVLDDPHHLRHRGARHLPRGRRHAHDVVAVAVEAGASARERAVQRGPRVHGEADVDEGVRLEPRRAGAAPPRLGDEHLEGGAPPGARVRRAVLRLVVPDVVGGDVHGEVRQPPGAGVGGREPPHQRRRRVRDRVAAPLRLHRHRAGAGQLPDRGHELRGARAVGDGVAEAEAHDEAAAREGGDLDEQDQRALVLGGRGGREEVVLGHHQRGLQVVHVLERAGGLGLR

SEQ ID NO: 69760 - protein, 438 aa, Zea mays
  Clone ID: UC-ZMROB73033E07_FLI.pep
RRSRRRRAPPARPGRRHTSTLTGGAAPLLASVLLSSILISASLFFSSSRALLLSFSPLPSAASAEPLFVEAKLRQQMRAEERPARGAVPRIAYLVSGSAGDGAALRRTLRALYHPANTYVVHLDLEAPAAERAELAAAVRADPVYARFRNVKVVTRANLVTYRGPTMVANTLHAAAILLREGGDWDWFINLSASDYPLVTQDDLLHVLSELPRQLNFIEHTSDIGWKEYQRAKPVIIDPGLYSLQKSDVFWITEKRSVPTAFKLFTGSAWMVLTHQFIEYCIWGWDNLPRTVLMYYANFLSSPEGYFHTVICNVPEFRNTTVNHDLHFISWDNPPKQHPHYLTLADFDGMVNSNAPFARKFGREDPVLDKIDQELLGRRPDGFVPGGWTYLLNATTEEGRPFAVERVQDLRPGPGVDRLKKLVTGLLTQEGFDDKHCL

SEQ ID NO: 69761 - protein, 166 aa, Zea mays
  Clone ID: UC-ZMFLMO17287G11_FLI.pep
PATPQTAHARERSGVCMDWDCRLDCGLTGTGGSQNRPRTLFSSAKRPTPQLEPSSPHPTTVVATAPARHSIGSLVTQTKKGIPYPRYCLHLRNLLILLQFLLNSWLNSKNGSVKWNQNGNWVQTASKDQIIKVRGLCFLFFYLLQRIFGLQCALYNQNSILSMEMA

SEQ ID NO: 69762 - protein, 403 aa, Zea mays
  Clone ID: UC-ZMFLB73185C12_FLI.pep
IPSPAMAIHPRTTGGRRQPLPLPLKGALLAAIAVATALSVLFVLSFTDTLTFTDTLPYLGFRPRDVDKRDGNRRYLYWGSRVDCPGKHCGSCAGLGHQESSLRCALEEALFLDRVLVMPAKMCLSSVHNTKGVLQSSNATSQQRWETGSCAMESLYDIDLISRTVPVILDNPRSWYEIISRSTKLGEDGLVVHVQGVSRAELKQNSNYSGALLINRTASPLAWFMECKDRTKRSSVMLPYTFLPTMATRKLRDAANKMKEILGDYDAIHVRRGDLLKNRKDRFGVERSLHPHLDRDTRPEFIKKRIAKWIRPGHTLFISSNERTPGFFSSLSDKYRLAYSSNFSSILNPIIKNNYQLFMVERLIMQGARTFVKTMKEFDEDLALCDDPKKNTKDWREPVYTDD

SEQ ID NO: 69763 - protein, 455 aa, Zea mays
  Clone ID: UC-ZMFLMO17278G06_FLI.pep
AAFLGFVVARRKEADALRAEMPPALKLCVDPAKFVMDAVADVFPVDRREVRNPADLAWACVLILEAAVPALADTDPDIGPARPLVPRAARDRARGMARDWKEAAEKKGGVEGAKPPDAHAFLQLVATFAVAEREDRPLYRRIVVSFSWRRQMPRLALTLGLEEQMADIIEELIAKRQQLDAVNFAYEAGLQEKFPPVPLLKSYLEDSKKTSTAASDNSSTSSGQSGSNVNKKEQSALRAVIKCVEDRKLEAEFPLEGLRKQLEELEKAKTEKKKAASSATSGGSSGPATKRIRASTGGPMPPAKAGRLTNNACVSSLPAPTTLTQSPSHASYANTSPSRTSYANTSPSHASYATVSPSHASYATPSPPHASYATASPYPYDRPVGHGVYCTRSPPVIREPYVYPAEEVATVNVGIPMAYSTPPMSYPAAPYGGYGNGMPAYTNGMAPAFHQAYYR

SEQ ID NO: 69764 - protein, 632 aa, Zea mays
  Clone ID: UC-ZMFLMO17054B05_FLI.pep
EHRLQRLIDEADANPNDAAKQSALLHELNKLSPEDVIKRFEERSHAVDSRGAAEYLRALILTNTIADYLPDEQSGRSASLPALLQELKQRVSGNEDKPFMNPGISEKQPLHVVMVDPKSTGRSTRFAQEIFSTILFTIAVGVMWVMGAAALQKYIGSLGGIGASGAGSSSSYSPKEMNKDMMPEKNVKTFKDVKGCDDAKKELEEVVEYLKNPSKFTRLGGKLPKGILLTGAPGTGKTLLAKAIAGEAGVPFFYRAGSEFEEMFVGVGARRVRSLFQAAKKKAPCIVFIDEIDAVGSTRKQWEGHTKKTLHQLLVEMDGFEQNEGIIVMAATNLPDILDPALTRPGRFDRHIVVPSPDVRGRQEILELYLQDKPVANDVDINAIARSTPGFNGADLANLVNIAAIKAAVEGADKLNAVQLEFAKDRIIMGTERRSMFISDESRKLTAYHESGHAIVALNTQGAHPIHKATILPRGSALGMVTQLPSQDETSISKKQLLARLDVCMGGRVAEELIFGEDNVTTGARNDLHTATELAQYMVSNCGMSDAIGPVHVKERPSIEMQSRIDAEVVKLLREAYGRVKRLLRKHEKQLHALANALLERETLTADEINKVVHPYQEEPHLSFQDEEFALA

SEQ ID NO: 69765 - protein, 209 aa, Zea mays
  Clone ID: 700574433_FLI.pep
SIMKNSILNSYIGNALRREREYSSLSTVGNVYLFMYMDGYTEREENIRAQRTLFSHVYLPHAQNQSRSRSRVPRRSLSLNLLRILFLNPHRIQILGHDRSRNLHRSRILILGQSRNRSLRRSRILILGQSRNRSLRRSQILDRIHFPDRIPSQTQNPVPGPTHALRHIQTLALARTLNPNPLRTQLLNPHQSQSQSRRRRQIQHTILHQ

SEQ ID NO: 69766 - protein, 90 aa, Zea mays
  Clone ID: UC-ZMFLMO17035D01_FLI.pep
TTLCKYIYITISLVSLLCAGTRHSYLISYIFMFQNHKPIEERTEKQTLNLALYQLNTTNLHPTILNCSIKLHCRAKIFYHPILLKVPPTH

SEQ ID NO: 69767 - protein, 258 aa, Zea mays
  Clone ID: UC-ZMFLMO17040A09_FLI.pep
RIIRLDAVRADDEWISYSPSQAAVSKERAIESAKAVFLKDYDHLEPYRIHHASRLVAILEAYAIYDQEIGYCQGMSDLLAPLLAVLEDDDEAFWCFAGFMRKARHNFRLDEVGIRRQLNMVARIIKYKDFHLYRHLEMLQAEDCFFVYRMVVVMFRRELTFEQTLCLWEVMWADQAANRAEIANSSWRKLQLGAPPTDDLLLYAIAASVLQKRKLIIESYNSMDEIIRECNSMAGQLDIWKLLDDAHDLVVTLHDRIE

SEQ ID NO: 69768 - protein, 477 aa, Zea mays
  Clone ID: 700619560_FLI.pep
REKRQTAAAMDFHSLSRRELQALCKSSGIRANMSNAAMAEALRCLPAVDRIDEIGSTAPPPVSAMKEQTPDAEEAVGGEQEHGCPLPRGGRARGKRRKAGARKSKTEGDEEEVMVPGPQTLPGPKMTVAREAAAAPVDDAEEAAVGIRTRRSARSKVKVALDQKEEDVQAAAARKEQKDKSCEDSEEHAIVVGVVEEEEVRKPQEGQNVTRRAAPYKTHEDLQPDQRTAEELSMAKKRTRRSTRSKVAAAAQKGQKADSSDTTVGPEIDPKYDEVVPKVEEATKPQEGKNVTKRATAYIYKAHEEVQTGQVTAAPEATAEEVATTKRRRRRSARSKVGAAARKGQKECAADPSDAVNGPTVSDDPKEEQVVEVIEEGTTKHNEEEREQINNVRQFASLPKLEDSPILGIVSKPNTADASDKAPVAHQEATKEDRFTFTGEADVSNLIVNTLDRFAKPVYESRVKEEKKCSECWWMLL

SEQ ID NO: 69769 - protein, 227 aa, Zea mays
  Clone ID: 700102762_FLI.pep
ATSSLTVLRTTAEQKKYIQIYIYLGRSVAEVTMSYWGSPGGAPSWAASRGPSPVVPLLVVAALGWVICQETLMGWYEQVTEVQETVADNAVLLVLGAGVLLLALAVAGNRSEVVLVPAALVLVMFLIQNIVLAALLLLVVVYFAGIYYYRPDRGYGYGYGGGFGGGEWGSGAGTGLGLYMLLLLCLLLCAMFSDSGGSWWIPAVLLVACVLCLNLFSGGKVWGYGYS

SEQ ID NO: 69770 - protein, 193 aa, Zea mays
  Clone ID: UC-ZMFLB73110F09_FLI.pep
GKVAKMHSELLVTLSTELSEVLHRIRKFNLEGNVYQHETLMVGNEEVRGWGSADVSHQLDQHDRAFCKDDEMLDDDTDFGSSLGPIVSWDRMEAECEDRKMLMGDSPKCDKWMLKDDVGEFDAKSILNCGDDDGVGDSKVIKPLMHDDTMVTGPSLVGIHVEGFYAGTKWYDSQGLDSSVDGGDSSFRHGGIV

SEQ ID NO: 69771 - protein, 150 aa, Zea mays
  Clone ID: UC-ZMFLB73112F08_FLI.pep
DAANAAAAAAPPPPPPPVPASAATDAANAAAAAATDAASTATDAANAAAAATDAASTATDAANAAAAATDAASTAAATPDGGYRNGAAVHAGAQSGSADDAREDYATGAGQHAWGRLPTLSTFYQQASDELRVYTDPSVEMSTSFDRVRE

SEQ ID NO: 69772 - protein, 213 aa, Zea mays
  Clone ID: UC-ZMFLB73067F03_FLI.pep
ATSRSPTTSSACCSRRRTRRPARSPGSSSTSTTTPSCSRPSGRSRRRSAWAHTKSMALTHRVILESLRMASIISFTFREAVADVEYKGFLIPKGWKVMPLFRNIHHSPDYFQDPHKFDPSRFQVAPRPSTFLPFGHGVHACPGNELAKLEMLVLIHHLVTGYRWQIVGSSDEVEYSPFPVPKHGLPVRLWRQNNPVDRKGRETDDDHVERIFI

SEQ ID NO: 69773 - protein, 256 aa, Zea mays
  Clone ID: UC-ZMFLB73142A04_FLI.pep
NQPLLISGVDDAREGARSATRSADGNQEEVVAAEIQQESNSVFSRGELRPVLQPAYHGVGETLDSDAATRTGASLQGEVSESSLVRLDGGIGTGVERSCLEDAVSSDEIHGEQEEQEQGSKVNAATGCDEPDGEVKDGALPLAHTAGTEEGEKQFVVWWKLPFKLLHYCAWKVKPVWSFSIAAALLGLVVLGRRMYRMKRKARGLPQIKIAFDDKRASQFADRAAYLKEAFLVARRVPMLRTSSGATLPWSMVQER

SEQ ID NO: 69774 - protein, 294 aa, Zea mays
  Clone ID: UC-ZMFLB73143B08_FLI.pep
MFKYDSTHGPFKGSIRVVDDSTLEINGKKVTITSKRDPAEIPWGNFGAEYVVESSGVFTTTDKASAHLKGGAKKVVISAPSADAPMFVVGVNENSYDPKMNVVSNASCTTNCLAPLAKVVHEEFGIVEGLMTTVHATTATQKTVDGPSMKDWRGGRGAAQNIIPSSTGAAKAVGKVLPELNGKLTGMAFRVPTPNVSVVDLTCRIEKSASYDDVKAAIKTASEGALKGILGYTDEDVVSNDFVGDSRSSIFDAKAGIGLSSSFMKLVSWYDNEWGYSNRVLDLIAHMALVSAKH

SEQ ID NO: 69775 - protein, 405 aa, Zea mays
  Clone ID: UC-ZMFLB73156C04_FLI.pep
ILKQVKTHGHHPSPRAGCCGALCGTKWYIAGGGSKKKRHPETWVFDVLESRWSVCVVPPSSSITTKKGFSMVPLYYRDKIVLVAFGGNKKEPSDKVEVLVVLQNEHCFSWRSAPEVEPLLYDESPPGSRELADHLSSCAPPYPTSSAARSGLAATAENSCGRKPLPDSLLRTSNLGGSSLRRQFRQEEECSSLAQKLQKPIDDDRYKDAADECSEHQPPSATNPKPRNDARRSSPEVVVDAKARRLLGRSSSDMNNHQDARVAALVRRNVALEEQLSAALASKDEAEKNLSLVIDSKDGLEKRLAEKDREVEALREKATGLELAQEEANSLSNTVHADNVRLEREVAFLKAVMDETQKELHSTRGVLAGERARAFQLQVEVFHLKQRLQTMEGRSPAAPRKPQNA

SEQ ID NO: 69776 - protein, 107 aa, Zea mays
  Clone ID: UC-ZMFLB73065E11_FLI.pep
IQMLQGECEVERFPLTLIKTSSSTCLGESRLWKASCVDMESNHWRPKSPNAIRSFNQTHSWPVLCCQPATHLTNRKGQRPLSRKRGCRAAGMGKTISPPAKSLETMW

SEQ ID NO: 69777 - protein, 246 aa, Zea mays
  Clone ID: UC-ZMFLB73100G10_FLI.pep
ELGHHSSRTQQVAFCIHNIAYQGRFARADFDLLNLPDSFLPSFDFIDGHVKPVLGRKINWMKTGIVESDLVLTVSPHYVKELTYGPDKGVELDGVLRTKPLEIGIVNGMDVYEWDPSTDKYTSVKYDATTVTEAKALNKERLQAEVGLPVDSSIPVIVFVGRLEEQKGSDILIAAIPEFVGENVQIIVLGTGKKKMEEELMQLEVKYPNIARGIAKFNVPLAHMMFAGSDFIIVPNSHLFITWRTC

SEQ ID NO: 69778 - protein, 184 aa, Zea mays
  Clone ID: UC-ZMFLMO17084D04_FLI.pep
GFDSASFPSKSARDSVAPVILVQSLLRGGSARAHADGHQPLQARGRCAAPRAVVRRCLRRRLRPVPRRRAAPLPGRPPVPARRRRRTPSLGAQRVRAAGPALGALAAAPRPSRRRAPRRWARGRGRALATPVPGVCRRAVQGGRAGRSRGPPPRPGSRGRDRRDRHGGSSRSPGGREDRRRLRR

SEQ ID NO: 69779 - protein, 315 aa, Zea mays
  Clone ID: UC-ZMFLMO17137G10_FLI.pep
KQTWLMLCDPDDRLSPRPVLARTPDEVIAAKGVKPTLSPNLNTLALVEAAGVKRLLFCGVGCQVQALRSVEKYLGLEKLYVLGTNCVDNGTREGLDKFLKAASSEPETVMHYEFMQDYKVHLKHLDGHIEEVPYFCLPANDLVDVIAPSCYSCFDYTNGLADLVVGYMGVPKYAGVSMTQHPQYITVRNDRGQEMLNLVAGLLESTPTISSGSRQPFVMETVKADDAAKLGKGPSKPAPRFVGDILAFLLNLVGPKGLEFARYSLDYHTIRNYLHVRRAWGKQRAEQHIPGYAKKIVEAYDKDGRIEAMVTQSGD

SEQ ID NO: 69780 - protein, 480 aa, Zea mays
  Clone ID: UC-ZMFLMO17172G07_FLI.pep
AVVHSTYSSLRSMQSSVVMLSSTVAAAAMASLRTLPLPVLVPLVASGLVFLATVLRRLLRRQRPVYLLNYSCHLPDAERQVNLEVCEYFGLKCRRYSDDIADFMRLVYSKSGLGQETFAPPFIYSGKFEKTLAFAIQEAEEGLFAVVEQLLAKSDVSPSDISVLVVACSMFSPMPSLASMIMHRFNMRPDVKSYSVAGMGCSAGTVGIDTAARSLRSRRTPGYALVVVTENTSLNWYFGKNKHMLVTNCIFRVGSAAALVTDVPSRRPDAKYELVRTLRTHHGADDAAFNAALQMEDEEGNLGVALTKDLVRVAGAALRRHITTLGPQVLPVSEMLRYAWRVARAYAAGNSKAAAAEVPDFQRAFEHFCIHSGGKAVIDSIARLMGFGPYVVEPARSTLHRFGNTSSSLVFYELAYFEAKRRVRAGDRLWMLAFGTGFKACSNVWRALRDAAPDADNPWNGCVHRYPVPPPPPSKTHKHA

SEQ ID NO: 69781 - protein, 378 aa, Zea mays
  Clone ID: UC-ZMROB73019B06_FLI.pep
SSSSMGNALKCFTGEEEGHHFHGRRDRYPYYQPQSYSGGDPHPPAAAHQQGLAAPHGFVTFVPVTQAAGPNAGHQQRSSGVHDRRPVASKYESNTEDIDESSAEGLCSAKSYAKANPLLIQVPVLGTTRKFWRLSDKATRITRKLALILRSHHAVGKHLATPLQVSNVWIGSTGGSVKLRGVSFTAKGFGIERVRDDYRQLSRLLHAIIRISGGGDTAIARLPPDYREFLALLGRDTLAMEDEFLIVNNAALLPMKNRTEAFLMLHDRIVKYLGRTDRQKKRRILSGLPYQSDWLDTARANKRINQWVMNVQHEYKGTHQSDMLRLNRNVRSHLHEHKDDDGIEEALYCEWPELLMAMVKLLHQEGELEATDIENKFG

SEQ ID NO: 69782 - protein, 210 aa, Zea mays
  Clone ID: UC-ZMROMO17111B10_FLI.pep
HISVLRQDDGLAKLVLNVSGLELAFLVQQLHHGHEQLGPLAVQGLLDAVVVLVLMQVAPHIPVEPQHVGLVGSLVLVLDVHDPLVDPLVRPGRVQPVALVGEPGEDPPLLLSVRAAEVLHDPVVQHQEGLRAVFHRQQRGVVDDQELVFHGEGVPPKEREELAVVGRQPGDGGITPTGDSDDRVQEPGQLPVVISHALDAEALGGEADAS

SEQ ID NO: 69783 - protein, 275 aa, Zea mays subsp. mexicana
  Clone ID: UC-ZMROTEOSINTE094F09_FLI.pep
QSTEEERYRISPVSYLLVDGIPHEDHMNHTALVLTCTSTRYIEAGIGLAEWFKRDVVTSPFEELHGATLFHESMSSLDADFHDMASEALDAHDNFGIEIAMREFRDLFEGIQSMTYCCGNFGDDKGARAIVKAFPHIKCTVLAPPKIIATKPADGAMINYVEGDMFSFIPPAQTVVLKLVLHHLTDEECVKLLAQCRKAIPPRKDGGKVIIGDIMIDHSGPMLETHLLMDIGMMTMTKGRQRDEKEWSELFTKAGFSEYKILKEFGARVAFEVYP

SEQ ID NO: 69784 - protein, 440 aa, Zea mays
  Clone ID: UC-ZMROB73055D05_FLI.pep
ACTALTAAFAPPPPRSLSCLRAGRGSLHSPQQALEEGMEPGLASRVARSAAQPLSGCLSRHSLSPWLKIQNHIYPMPSLCHKVPSTGKCHASMTTSYMETSDVTDLDWENLGFGLIETDFMYVAKCGTDGIFSKGEVLPFGPIALSPSAGVLNYGQGLFEGLKAYRKTDGSILLFRPEENAIRMLSGAERMCMPAPTVEQFVDAVKQTVLANKRWVPPTGKGSLYIRPLLIGSGAVLGLAPAPEYSFIIFVSPVGNYFKEGLSPINLIVEDKFHRASPGGTGGVKTIGNYASVLKAQKIAKGKGYSDVLYLDAVHDKYLEEVSSCNIFVVKDNVISTPAIKGTILPGITRKSIIEVAQSKGFKVEERLVCVDELINADEVFCTGTAVVVSPVGSVTYMGKRVEYGNQGVGVVSQQLYKSLTSLQMGNVEDWMGWTMQLNQ

SEQ ID NO: 69785 - protein, 597 aa, Zea mays
  Clone ID: UC-ZMFLMO17062B08_FLI.pep
NPRIPWAPEQERAMQRAIRIAAAATRRALSSSAARASPPPPRGPLAPGWGATRWLCSGREALSYDVVIVGAGPAGLAAAIRLKQLCRAADTDLSVCVLEKGSEVGAHVLSGNVFEPRALDELIPKWRQEDSPIRVPVSSDKFWLLTKNQAWTLPSPFDNKGNYVISLSQLVRWMATKAEELGVEVYPGFAASEILYDENQIVTGVATNDVGIAKDGTKRETFQPGVELRGRITLLAEGCRGSLSEKIIRNHKLRERGQGQHQTYALGIKEVWEIEEGKHNPGSVIHTVGWPLDTKTYGGSFLYHLDDRQLAIGLVVALNYRNPFLSPYDEFQKFKQHPAVRKLLEGGTAIQYGARTLNEGGFQSIPYPIFPGGAIIGCSAGFLNVPKIKGTHTAMKSGMLAAEATFKSLVEGSSMELYWENLKKSWIWEELHKARNYRPAFEYGLIPGMVLSALERYIFKGKSPYTLKHGRPDHEATDTANLHAPIQYPKPDGHITFDVPTSLYRSNTNHEHDQPPHLRLRDPTVPERVNVALYAAPESRYCPARVYEYISDEKGDPKLHINAQNCLHCKACDIKDPKQNIEWTVPEGGGGPGYTVM

SEQ ID NO: 69786 - protein, 150 aa, Zea mays
  Clone ID: UC-ZMFLMO17061E10_FLI.pep
NGHLIRSCPYIKENGLIINKDDKHCFRCSKKGHLVKSCPYVKQKGIVLENKIFTNHVARKKQGKKKSSRHEDRLCYICRKKGHQCKDCPIGNYPAPNLSIDSYVTRQSKIATCARKVMSLPSDSTKDIWVPRSLLTNLDGPIKRWGPKYA

SEQ ID NO: 69787 - protein, 309 aa, Zea mays
  Clone ID: UC-ZMFLMO17063F05_FLI.pep
VLKDSIRSSEEALKTSRSEVSKLSKELEEANELNEDLVSQISKLREESNEMQVDLTNKLGEAESLSKALSEDLASVNEMVQKGQEELEATSIELASIAEARDNLKKELLDAYKNLESTTHELVEERKIVTALNKELEALAKQLQVDSEARKSLESDLEEATKSLDEMNNSALLLSKELESTHSRSATLESEKEMLRKALAEQTKITTEAKENTEDAQNLITRLETEKESFELRCRHLEEELALAKGEILRLRRQISTNSSQKPRARGPPEASETLKEQPVNDYNQKTSGVVAGTPQPVKRTVRRRKGGA

SEQ ID NO: 69788 - protein, 298 aa, Zea mays
  Clone ID: UC-ZMFLMO17092B12_FLI.pep
QSLEFLHFFPTTKRRETSQRPETKQHFTMQGDPGYGYGSYGYGYGYGYGAGAAGYDYDMAGYGSGGAAYYSATDRYPAATAAAYEDPLVAGQRQHDVPAPLTGLEFQASDTCPKNYVIFDHTYDRSRVMFHPSLANNFASSPAAGGGGGYDYDRQCYGGYDQNYAGKSAYYVCAAAAADDDGGGASIRQKEDTDEIDALMSTEDGEDDDDDDVLSTGRTPGCRAAGSPDSTCSSGYAAAGAGGGEKKKERMKKMVRTLKGIIPGVDRMDTPAVLDEAVRYLKSLKVEVKKLGARGSSS

SEQ ID NO: 69789 - protein, 120 aa, Zea mays
  Clone ID: UC-ZMFLMO17021A07_FLI.pep
SANGSKQSTVYNLFVLTRLQTWEQNQGYKTSQLLHKSYPKKLEPVLIFYHIQSVPKKLPSNLLLDNSQYGDCTAGCSRRPSVQVSTPKTVRTKISEGRVSITQHRVPASRCGSSHRFQGR

SEQ ID NO: 69790 - protein, 172 aa, Zea mays
  Clone ID: UC-ZMFLMO17041E11_FLI.pep
DHFNASDANADGFLDKTEFNDFLNPSDSDNPKIINLLCKQEIRQRDKDGDGKLNFEEYFTGLHDHIHGYDDENADISQIGNITVAKDRFFKLDKDNDGFISEHELEPVLDKLYLSERYYSRQQAIHAISEADKDHDGRLTLEEMVENPYAFYGSVYLSSDDDDEDYFHDEFR

SEQ ID NO: 69791 - protein, 204 aa, Zea mays
  Clone ID: UC-ZMFLMO17069H06_FLI.pep
LPSPTPAKGAETLACWLGGVGMDEATKKNVEATVLEILRGSDMESVTEYKVRAAASDRLGIDLSIPDRKLFVRGVVEEYLLSLSSKEEAKAEEEGVTGRESKGKEHEEEDEEDDDEEEDEGKGGGKREYDDQGDLILCRLSSKRRVTLSEFKGRSLVSIREFYVKDGKEMPSAKGISMTLEQWEAFCNAVPAIEDAIKKLEDSD

SEQ ID NO: 69792 - protein, 135 aa, Zea mays
  Clone ID: UC-ZMFLB73251D05_FLI.pep
LNLGSYNYLGFAAADEYCTPRVIESLKKYSASTCSVRVDGGTTKFHNELEELPARFVGKFAAILFGMGYVTNSAIIPCLIGKGGLIISDSLNHNSIVNGARGSGATVRVFQHNSPAHLEEVLREQIAGGQPLQHM

SEQ ID NO: 69793 - protein, 545 aa, Zea mays
  Clone ID: 700454468_FLI.pep
EAKVSELMEMYSGKGRVVMLGVDDMDIFKGISLKLLAMEELLRQHPEWRGKLVLVQVANPARGRGKDVAEVQTETYAMVRRINEVYGEPGYEPVVLIDEPLQFYERVAYYVIAEVCLVTAVRDGMNLIPYEYIVSRQGNEKLDRMLRQGKPEEKKSMLVVSEFIGCSPSLSGAIRVNPWNIEAVADAMETALVLPENEKRLRHDKHFRYVSTHDVGYWANSFLLDLERTCKYHSQKRCWGIGFGLRFRVVSLDLTFRKLSLENILMAYRRAKTRAILLDYDGTLMPQAINKSPSTESVRILNSLCRDKDNVVYLCSGYDRRTLHEWFPCENLGIAAEHGYFLRCKRDAEWKTCVAATDCSWKQIAEPVMCLYRETTDGSTIEDRETVLVWNYEDADPDFGSCQAKELVDHLESVLANEPVSVKTTPHSVEVKPQGVSKGLVARRMLVSMKERGQCPDFVLCIGDDKSDEDMFQLIATAACGDSLASKAEVFACTVGRKPSKAKYYLDDAAEVVRLMQGLSYVSEELALANQRDEDEDSSLDDVWE

SEQ ID NO: 69794 - protein, 303 aa, Glycine max
  Clone ID: 700558861_FLI.pep
QPAGILAWPSAGDINPAIRTHAAFLSVWRRYGFTPEGFNLASLSVQHGQKSYPLRPELIESTYWLYKATRDPRYLDAGRDMVASLQYGTRCPCGYCHISDVENHQQEDHMESFFLAETVKYLWLLFDLAVGPDNLVENGPYKYIFSTEGHLLPATPQISLVREHCLYYGAYCRSGDLRQTYFVPESDKDKKESNDTGFYESWTKPTYSSDYTTVEPSAVSGLIKGFCPGLNHGQKFGILYAYPTDERHDYETNQVQQKESTTAVQLQSHSVLVLRDQSSDNLLPEDNSSNHNDSQTNESSDTP

SEQ ID NO: 69795 - protein, 171 aa, Zea mays
  Clone ID: UC-ZMFLMO17218A07_FLI.pep
RLGLTQRISIAVNIADALDYLHHDCGRPTVHCDLKPSNILLDDDMNALLGDFGIARFYHDPESKWAGSISSIGVKGTIGYIPPEYGGGGLVSTSGDVYSFGILLLEILTCKRPTDPLFKDDQDIISFVENNFPDHVFQVIDSHLLEECRSSIQGNNSIHENEINQCLVDLL

SEQ ID NO: 69796 - protein, 356 aa, Zea mays
  Clone ID: UC-ZMFLMO17198B06_FLI.pep
RPHATVPVEIKTAIIDKNKVRGSALDDINGAALHGRQKAVDRAVTVVVQITMLLPHSSSASATATTRGLALAAPPPPPPTARPRRARLLPPRARAETHAAGVGADRAAEVLLQSGLRRESLPRHVAVVMDGNSRWARERGLTPADGHKAGGRNLERVVALSRAWGIRALTAFVCSRENLSRPKAEVDYMMGLSEWLIGDNIDKLSRQGIRLQVIGDAAKMPASLRSAAAQADEATRHNSQLHVMLAICYSGRWDMVQACRELAREAQANRLSPDDIDESVIAGKLATSAAGEFSCPDLVIRTSGEMRLSNFLLWQSAYSELFFTGKMWPDFGEAEYLEALRSFQGRDRRFGQSKLL

SEQ ID NO: 69797 - protein, 249 aa, Zea mays
  Clone ID: UC-ZMFLMO17215B07_FLI.pep
GKLHRPEHPAGARQQEAQPAPAAAAGAPRACDAGDGRRRRRARDGDAAQGVGLHPRRHGFQHRVQGRARRRHRAGRPAHRRERRRRKAQGLRGAGARRRPVPPSQHPPAARLLLGRRREAPHPRLRPQRQPCQHRIQQALRVVVAAAPEPGGAAAHRARRGARAGVHPREEGRAREPEAEQHPSGRRHGAMDRGPGPGPAGVGRGGAALPRGRVGAAVREQAVDALDEQPAGPVTDARAGREPVRVGVR

SEQ ID NO: 69798 - protein, 262 aa, Zea mays
  Clone ID: UC-ZMFLMO17220B07_FLI.pep
CGVILYVMLVGHLPFDDRNIVVLYQKIFKGDTQIPEWLSPGARNLLRRILEPDPAERIAMAEIKAHPWFQEHYVPVLPPYDDDDDDDDSVKQIGGGKTTHHINAFQLIGMASSLDLSGFFEEEDVSQRKIRFTSAQPPEDLFAEIERSATDMGFHVHRGHSKLRLTRNCDRSKNQKNPMSSSSSSFLVCTEVFELSPSLYVVELNKSHGDPALYRQLCQRICGDLGVLEMDQIFGTRPPVADDLAGLALALERRSATPLVAL

SEQ ID NO: 69799 - protein, 146 aa, Zea mays
  Clone ID: UC-ZMFLMO17255G09_FLI.pep
SKPYPFSSMTPSLLPPRLNLPHVEVLPNGLTIIAEQMPVEAISFQLWLRVGSRWEGDEINGTAHFLEHMVFKGTPRLAMGEFERAIESRGAGTNAATSQDYTQFYFTSAPQDFEHLAPLQLDVVLNPTIADGPFERERLVVLEEIR

SEQ ID NO: 69800 - protein, 221 aa, Zea mays
  Clone ID: UC-ZMFLMO17256G08_FLI.pep
QKCLMTSIYLTEPGTKVSYHNQQLQIKQKSRQVITRLAEIDLLVLFPGVQLTDVAIAVLMDQGIETIFLRRDGQFRGRLQGQFATNPLTRIAQYRVLDSTFGTALAQRLILGKVTNQRAILQRRHRDTGKKNNALAEAIDLIGAYRLSLRSGLGNSSRDQLMGIEGICAKHYYQVFQFCLPEGWSFTGRNRRPPKDPVNALLSWGYGVLLARVFSAIVQAG

SEQ ID NO: 69801 - protein, 221 aa, Zea mays
  Clone ID: UC-ZMFLMO17273A03_FLI.pep
GELLHLLCDTLYIYPRQWAVASSVEGGEGGGQRKQGQRKQSSRAKASVSMMGPLPLRRRVGVLLFLALVLLGGGGADAGTTSSYRRKLEATVEMPLDADVFRVPPGYNAPQQVPDSLPAAVAPGHSRRMPPFSPFFFLSNRWMDGWVGHAQVHITLGDQEGTAMIVSWVTANEPGNSTVAYGEDPARMERRADGAHTRYDYFNYTSGFIHHCTLRNLKVHL

SEQ ID NO: 69802 - protein, 339 aa, Zea mays
  Clone ID: UC-ZMFLMO17289F06_FLI.pep
RLGASLHWSYDAAAASLSVAFLAAPPSAGGWVAWGLNPRAQSMDGTQALVAVPSSGGGGAYEVQTYSISGTSLGAPGPLSAYRTSGLAAEVGGDGRVRVFATLVLPNGTGAEVNHVWQVGPYSGGIQIHDTKGDNMNAKGTLNLLTGATAAASGGGSIIRKKNTHGILNAVSWGLLLPMGAIFARYLKTFRSADPAWFYLHVACQLLGYGVGVSGWATGIHLGNLSKGITYSLHRNIGITVFALGTLQIFALFLRPKKDHKYRVYWNAYHHSVGYTVIVLGVVNIFKGMAILDVEQRWKTGYIAAISVLGAVAVALEAVTWGVVLRRRKEESKSYNGTS

SEQ ID NO: 69803 - protein, 304 aa, Zea mays
  Clone ID: UC-ZMFLMO17297H09_FLI.pep
LLPGRGRRRNGGRALFPSGGCCWRWSHSCVPDTVSRRSWSSSPVCASSWNASSWSCSFASTPFAAPVVSAWCSVFCNRAIVRCNQSLFFLQLLRFLWVSVEEKIYHDVPLVSWKNCTAHLEDHSGEQPEQTTNALFPLVIGGNADINIAHRGISITEGDGGNVSKGRLLNGLMISPRVSQDKKAWLTEGGLQLVGECTRSVPASNGMGTSVLRKLEDSPLAIGPSRLHDNVLRILNGNDDPGGQLKLVPGLSKVNNVDTISAALVHVALHLEVAVLGAEVDIGGEHHLDVLLPLGQCPRAAACR

SEQ ID NO: 69804 - protein, 202 aa, Zea mays
  Clone ID: UC-ZMFLMO17315H05_FLI.pep
ALRVVAPGDDAVEELPALAELHDEVHGAVVLARLPQGHDAGAPGQVPHDGHLPPHVLHVDGGPQLPLGDGLAGQQLPRAPVHAQVRHPELAAPQLPVQRVLLLDPAGAHVAPLLPEHRQTLLLPGAGAAVPRLLVGLLLPAGGGREVRRLDVFPRRGGRRAAAVSHGRRARLGVGALGFVRHWALCEWGRKRERGGGGTTGY

SEQ ID NO: 69805 - protein, 122 aa, Zea mays
  Clone ID: UC-ZMFLMO17294F09_FLI.pep
TLPTLSRCLVELEGLHHLPGEVGVVTAEMAVSGGLDEPVAALLQVEVDADHPGPEVEVLLHDLEDLLVGDRAGAVRVDEHGQGLRHADGVRHLHEAAAGEAAGHDALGGLPGHVGAAAVHLG

SEQ ID NO: 69806 - protein, 307 aa, Zea mays
  Clone ID: UC-ZMFLMO17306A02_FLI.pep
FQRKGETSGTTATLVVVDGFTVTVASVGDSRCILDTQGGEVSLLTVDHRLEENAEERERVTASGGEVSRLNLCGGQEVGPLRCWPGGLCLSRSIGDTDVGEFIVPIPHVKQVKLPNTGGRLIIASDGIWDALSSESAAQACRGLRAELAAKLVVKQALKTSGLKDDTTCVVVDIIPSDHCSTPPALSPKKNQNKLKHLIFGKRSHSSVGKLSKSASLGSVEEIFEEGSAMLEERLGSNFPPKANLPPFRCAICQVDQEPFEGLMTDNVGGCCSTPSTPWGGPYLCSGCRKKKDAMEGKRSNRSTTCR

SEQ ID NO: 69807 - protein, 324 aa, Zea mays
  Clone ID: UC-ZMFLMO17312B04_FLI.pep
EARASLVELFSSTTPPSPPVVVPARVNLGHLVYPVRVLGEGAAGVPEGAAAAGADADEGDEHDDVEHGDLVPVLAHLLHDAGLARVALVAEDARGVVPAVAVLVLRPDGHAPAVLARRRRLAAAGLYRREVVLEVVHGSPVVDLGARPGPDDAGECGAPVPGVPHVPLQPRGVVGDAVLPVRPTVHLLAAAACGDGEPEHGEAEEEGDEEHHGGEIQPQRPGHVEAGADEAREGHEQHGEADGEERCLKDGGARGRCRALGQPEARADDRDRGQQRRQVQVADRHVAHAVRVHPGRTLLCSALLLGCWCSSSQLIYLGALHCRL

SEQ ID NO: 69808 - protein, 237 aa, Zea mays
  Clone ID: UC-ZMFLMO17312C04_FLI.pep
QLAYRTTRRDNWIDVEVKVDNVRCDVDSLVSETLMAERGYGSEEKHFPSRVMLQITPTQQSDVLSVSVGKSNDNPTHEFGIEKGFEGSFEPPNAFGLKASVTESLTLAMKPWKFEQSVHGNTATLNWFLHDGVNGREVYSSKPSKISLLQPKAWFRDRYSNAYRPFTKQGGVIFARDEYGDSVWWKVCGAALGQTMNWQIRGWIWLTYWPNKQRTFHNETRWLEFRECLQLPLTKFP

SEQ ID NO: 69809 - protein, 270 aa, Zea mays
  Clone ID: UC-ZMFLMO17326B05_FLI.pep
AGSRRWRCDLGGDERWLSGAAGDDQFDRLPDALLLVIFNRISDVKALGRCSLVSRRFHELVPLVDSVLVRVDCVIPDEPPSSSSSSSTPSSPTASVRARGVFSQIARIVLGGIVKPIQALGQILSPANSASGFPASAASSLSSSSSSSSPLPAGDVSHHSPSEVLRSFKELRHLRIELPAGELGMDDGVMLKWKADFGSTLGSCVILGASSASPSPSPSSAGSDSPSAAPSDDSGHTEPDECDDSGSIPESFYTNGGFKLRVVWSISSLI

SEQ ID NO: 69810 - protein, 238 aa, Zea mays
  Clone ID: UC-ZMFLMO17326G02_FLI.pep
PLARLSNQTQSKEQNPIPSYRSPLGLPVSSTLLPRLAAFRHLLQLGTEPRETRLTEGMESDASTSPRRRSTSCYSDSGDSSCSEPFSECGSDDLSFTPAAAAGIHRLLLSCAAEASEDAISSLVAELECPSQSLDSLRRAAMELRLLAKHNPDNRVRIAAAGGVRPLVRLLSHADPLLQEHGVTALLNLSICDENKATIVEAGAIRPLVHALKSAASPAARENAACALLRLSQLDGAS

SEQ ID NO: 69811 - protein, 182 aa, Zea mays
  Clone ID: UC-ZMFLMO17320G07_FLI.pep
SGSDIYGKREVIQKLRQHLKKRDEMIMEMQTQIADLKNSLNIQVTQSSNLQSQLDAANRDLFESEREIQHLRKIIADHCVTEALSHDKPLQAAHWQPDAANGHSNGYGDGCVDDADLHCISIEKRKVEVERVEMLKKEVVELKEVIEGKDFVLQSYKEQKVELFSKIRELQEKLSAQVPIIL

SEQ ID NO: 69812 - protein, 293 aa, Zea mays; identical to SEQ ID NO: 48478
  Clone ID: UC-ZMFLMO17398G12_FLI.pep

SEQ ID NO: 69813 - protein, 284 aa, Zea mays
  Clone ID: UC-ZMFLMO17425B04_FLI.pep
HRHPWHLSRDSRSRGMDTAAELELGLELEQKPAAGYWSVVGARPCDACAAEPARLHCRADGAFLCPGCDARAHGAGSRHARVWLCEVCEHAPAAVTCRADAAALCAACDADIHSANPLARRHERLPVAPLFGALADAPQPFPSPAPAQGEAVAEDYGSSEAEAASWLLPEPDNSHEDSAADTFFADSDAYLGADLDFARCMDGVKAIGVPVAPPELDIGAGSFCYPEHSMNHILSSSSEVAVVPDAQAAGLPVVVVVSRGEEREARLMRYREKRKNRRFDKTIR

SEQ ID NO: 69814 - protein, 253 aa, Zea mays
  Clone ID: UC-ZMFLMO17367G06_FLI.pep
RKLLLELEELYTIVGRPNVFSYSELRSATENFCSSNLLGEGGYGSVYKGKLSDGKVVAVKQLSQSSNQGKMQFAAEIETISRVQHRNLVRLYGCCLERKTPLLVYEYLENGSLDHALFGKGSLNLDWPTRFEICLGVARGIAYLHEESTIRIVHRDIKASNVLIDADLNPKISDFGLAKLYDDKKTHVITNVAGTFGYLAPEYAMRGHMTEKVDVFAFGVVALEIVAGESNYQNALDEGTTYIFERVWELYEN

SEQ ID NO: 69815 - protein, 142 aa, Zea mays
  Clone ID: UC-ZMFLMO17342H11_FLI.pep
SINHVLSYFINMNKYPQYLYYIDTFGLSEGENVSDARAITMQCEQYDATVHLFIGTRYNPSKITFISLTFTGNHKASYQGLSSLFPFRSVSSSTFIIILSRRSFGHSFDARSPFLQTAPSYTHTFVSKPKPPVTVYVILKTC

SEQ ID NO: 69816 - protein, 261 aa, Zea mays
  Clone ID: 700047582_FLI.pep
AFLGKLLDGEKHEVAFTVTNAMDTWFVDANLHLWLDPRGAATAAGIVSYDAPPLDTATATLPDGPDNGLYYTTAFRHVSASGWVHTPSYGKVTATWTQRLGYENTINFRDSFFQPEVNQTTDAYSAAHVADHAGVLYAQEAQQSFTLYKFVGVVNQTDIDSYTAATKVQLGFSDDRVAAGRSGFWARSLSNSQECARDVDVEDGEAVRESWAARQTYRYEASDACFFRNVTSRGNNVVSDHSDETCVKESPAAAGGIAERA

SEQ ID NO: 69817 - protein, 74 aa, Zea mays
  Clone ID: LIB3898-009-B5_FLI.pep
QGPDTRLEPCRSLQSLVVRLEVSKQGHPLVHHLDTKVLLSIDNSEGSYDLHQKWPRKKWLCTSRTITLVACCCL

SEQ ID NO: 69818 - protein, 99 aa, Zea mays
  Clone ID: UC-ZMFLMO17155G02_FLI.pep
VTPKQLPIVISAKRTGNIARFMNHSCSPNVFWQPVLYDHGDEGYPHIAFFAIKHIPPMTELTYDYGQNQRNSIQMGTHSGFRKSKSCLCWSPKCRGSFG

SEQ ID NO: 69819 - protein, 294 aa, Zea mays
  Clone ID: UC-ZMFLMO17156E04_FLI.pep
EQDMVARTRIYRRRGRNRKLKYTWKSAGHPTVRKRIGDGKQWYTQYNPCVCQQMCGKDCPCVENGTCCEKYCGCSKSCKNKFRGCHCAKSQCRSRQCPCFAASRECDPDVCRNCWVSCGDGSLGEPPARGDGYQCGNMKLLLKQQQRILLGRSDVAGWGAFIKNPVNKNDYLGEYTGELISHKEADKRGKIYDRANSSFLFDLNDQYVLDAYRKGDKLKFANHSSNPNCYAKVMLVAGDHRVGIYAKEHIEASEELFYDYRYGPDQAPAWARRPEGSKKDEASVSHHRAHKVAR

SEQ ID NO: 69820 - protein, 285 aa, Zea mays subsp. mexicana
  Clone ID: UC-ZMFLTEOSINTE55B11_FLI.pep
LPATPGRMFSRPIKTNLKVAESSAFLAYVKSSTPATSSFDSGLQRGDSRLDSLDNHGNCSSATDRSDTGTDVNIWNKEAFEMPVQYPMVCFSSSSMHMERSNEGHNDTSGTPPAYHFPFYYPGMVEHNMALSSVQNFQANINSAQAHTPPAMLHQYNVFSQCHSLPMISSFQFNTSGMSMHSSHLPTQNVWSSASSTPTPDETCNRSERRAAALAKFRQKRKERCFDKKVRYVNRKKLAETRPRVRGQFVRHASNMDIISTGDDISEDEDDDPTSREVDMISSPE

SEQ ID NO: 69821 - protein, 113 aa, Zea mays
  Clone ID: UC-ZMROMO17112E06_FLI.pep
PCFTSIHQLHNHLDSHTSGFQSINSFSFIRNGMQLPVNVGVSRRGSSAIVAASEAMRSSSGLDRTGQEIGLVGFLFAFGFLFKKKENLIFLKLEFSVFHYSAPFFILRFKTKI

SEQ ID NO: 69822 - protein, 331 aa, Zea mays
  Clone ID: UC-ZMFLMO17428C11_FLI.pep
LVRSSVVRNSELVVAGAVLVDDGVDLGVGRGLDGVGCLHGDAAVSLLGGHVARHADVPLLAPLGAPRVLDQPVLGAVRGDPVADRRDAVVQLRPAPAGEDPLGVELEVRATGLDGDGHGLVRHRLLERRLVVGRHVLVAVDGDDRGRRLLAGRLARSVRVRVLRRHPAVLGDVLERVVHEAPVAAGVGLGVAVHQLLLRQRRQVLGLDRVDALHGGDRRERPAATALALVLDVGDGALLPPVDGGRDVARVGVHERRRRRGALPVAAEHAVVRDPGARVVASELVGGHVAEAVEAELVGLVPAVELVDEAHVGLEDVEAARLVAQVPRQRV

SEQ ID NO: 69823 - protein, 314 aa, Zea mays
  Clone ID: UC-ZMROB73002D11_FLI.pep
CLLSVCDYIVQFYPSTQTLPDGTKVEVMATRPRSDIYINLPALEKLDAMLIDILDSFQKAEFWYADAGTRSFGSVTSSSSSRMSCSSSFRRSAHRNDDKWWLPVPCVPDAGLTDKARKDLQQRRDCANQIHKAAVSINSGVLGDMEVPESFMAVLPKSGRASVGDSVYRVMLGADKFSPEFLLDTLDISSEHDALAMADRVEAAMYVWRRKASGSHGKLPWSKVKELAADDDDKNVTLANRAESLLLCIKHRFPGLSQTTLDTSKIQFNKDVGQAILESYSRVLESLAFNIVSWIDDVLFVDRSIRKLSDNLKS

SEQ ID NO: 69824 - protein, 316 aa, Zea mays
  Clone ID: UC-ZMROB73011B07_FLI.pep
ARVSSAATSVLRGRRAAMAMVQAGMGLTRVVVLVGAGVAGSVVLRNGRLAEILGELQGILDKGNKGKDGGGGDGETDLNEALTSQVRRLAMEIRQLANSQPITVLNGGSGQSGVSGLIVPAATVGALGYGYMWWKGISFSDLMYVTKRNMANAVSSMTKHLEQVQSSLAAAKRHLTQRIEKLDDKLDQQKALSGQIRDDVTDARLKLENIGSEIKNIKELVWGLDGKIDSMEAKQDFSCAGVMYLCQFMEQNGGKLPDRLEGSKMTTKRFGGQKFLQGLQLAIESGNCGKDTIDMLLKDADSSDKINRTSSIKSAS

SEQ ID NO: 69825 - protein, 405 aa, Zea mays; identical to SEQ ID NO: 45385
  Clone ID: UC-ZMFLMO17428D01_FLI.pep

SEQ ID NO: 69826 - protein, 208 aa, Zea mays
  Clone ID: UC-ZMROB73014G06_FLI.pep
YAYLFKYIIIGDTGVGKSCLLLQFTDKRFQPVHDLTIGVEFGARMITIENKPIKLQIWDTAGQESFRSITRSYYRGAAGALLVYDITRRETFNHLASWLEDARQHANANMTVMLIGNKCDLSHRRAVSYEEGEQFAKEHGLVFMEASAKTAQNVEEAFIKTAGTIYKKIQDGIFDVSNESNGIKVGYAVPNSSGGGAGSSSQAGGCCS

SEQ ID NO: 69827 - protein, 196 aa, Zea mays
  Clone ID: UC-ZMROB73002F02_FLI.pep
RLLYFVHDILFLVTCSFVDVLFSSLQQSDETPMVWEILLYMYVLYSPDWHYRSTMPTFLFLYGAAFAVVHFFARFQFVFKLHYIGLCFLCIPRMYKYYIQTKDVAAKRLAKLWVLTLTLGTLCWLVDRIFCKKLSHWYVNPQGHAWWHVLMGLNSYYANTFLMFCRAQQRGWEARITYLLGFLPYVKVQKPEKKRE

SEQ ID NO: 69828 - protein, 416 aa, Zea mays
  Clone ID: UC-ZMROB73005E02_FLI.pep
TLNRPTDRPFRSVHPTMEAPPGPGPMELDAPPPAAAAAAIPPAGSDKHKDGEGGDAVTGHIISTTIGGKNGEPKRTISYMAERVVGTGSFGIVFQAKCLETGETFAIKKVLQDRRYKNRELQLMRAMEHPNVICLKHCFFSTTSRDELFLNLVMEFVPETLYRVLKHYSNANQRMPLIYVKLYMYQLFRGLAYIHNVPGVCHRDVKPQNVLVDPLTHQVKLCDFGSAKVLIPGEPNISYICSRYYRAPELIFGATEYTSSIDIWSAGCVLAELLLGQPLFPGESAVDQLVEIIKVLGTPTREEIRCMNPNYTEFRFPQIKAHPWHKIFHKRMPPEAIDLASRLLQYSPSLRCSALDACAHPFFDELRTPNARLPNGRPFPPLFNFKHELANASPDLVSRLVPEHIRRQIGVNFGSS

SEQ ID NO: 69829 - protein, 417 aa, Zea mays
  Clone ID: UC-ZMROB73015C04_FLI.pep
TAPEETTPHRLLRPPIRRARPPARLAPLPFPFLPTSCPANVLPHATALTRAADDGVGIMDKYEAVRDIGSGNFGVARLMRNRETRELVAVKLIERGHRIDENVYREIVNHRSLRHPNIIQFIEVILTPTHLAIVMEYAAGGELFDRIVDRGRFSEDETRYFFQQLICGVSYCHHMQICHRDLKLENVLLDGSPAPRLKICDFGYSKSSVLHSRPKSAVGTPAYIAPEVLSRREYDGKLADVWSCGVTLFVMLVGAYPFEDQDDPKNIRKTIQRIAAIQYNIPDNIRISDDCRQLISRIFVSNPLRRITMREIKSHPWFLKNLPRELTEAVQLSYFRRDNSVSAFSDQTTEEIMKIVKEARTLPKSSRSGYGYSEECSDEEEKEVESEPKEEEEEAECDKTVREVRESGELDMTSLHI

SEQ ID NO: 69830 - protein, 564 aa, Zea mays
  Clone ID: UC-ZMROB73019H08_FLI.pep
PIPIVKNVFIPPDSDGALQVDLEDIMPLCSFLASIDSCKDRITEALETIKPMSSWEVAANAHDGQDHVLHHIRGFGVALDVLINYLSSEYGNAFELARIFAFLSGPPNYGAGQLDINEDQNSGKARGADHILLQEQTSFYRNLATSAVQAGVCVDLFAITNEYTDLTSLKVLSVESGGSLFLYSSTDESTLPQDIYKMLSRPYAFGCVMRLRTSSQFKIVDSYGHFFPDPQYMHVQHINCCDSFATYSYDFEFEKDSQFSRKSSPPIIQIAFKYTVLVHNGDISDLPNSGCRFKYLLERRLRVRTIQYNTTANIWDLYDFVDPDVVLTILVHQVILASLSDALETRLWLQDWLVVVIAQYNKAYKNVTSGGGTEIYNIDVNFSHCSQLQPLSRFVFAILLSPLLQVSSEGIHPDYVTYLQCLLSALEPASLRQAIWPTLISYSSPDVEAEVHQSLSRTVFTSERPIYILDAYKDLLVYYSPTASSEIPFPPPRNCLLRSTVDRLKQERNITPKLVFIHGAHDDTTEFEKYLVEDQTLDGSPLSSSTGFSSFLDEVRSKVAEHGI

SEQ ID NO: 69831 - protein, 649 aa, Zea mays
  Clone ID: UC-ZMROB73020D04_FLI.pep
RVRIVASNAPTPVRDGGAAAVVWFKHDLRIDDHPGLAAAVSEPRRPVVPLYVFDRRILAGYSDKMLELLLFALKDLKMTLKSQDSDLLIGLGNAEDVVLKLVNEVQAGLVFTEEEVEYRVRDVLANVESSLSNGSFSWGSPPKIVAWSAPLYDYKNLGAVPTSHDDFLKKKLPLATPLAAATLPALNLELDTGSLPTLEELKCFLKEITPEDNWAPLKRMPARSILKRTISQRKIKSNATLSTINEENIDDAATMDSVASGKRIINSKFASENSLEVSGGTEITLDALAAYLKYLEGTGNASWQELHDKVRLAETRYGASFYILFGPAIQLGVISRRKAYTETIQYEKDRNAGFLSPFGYSTPTVTSAVDAICSMEWYWLLASKSQVCIEGKYSIRIWRWKGYLVQYTFLGNEGPPVLLVHGFGAFLEHFRDNIDKIAATGHRVWAITLVGFGKSEKPNVNYSELFWSELLRDFIVEIVREPVHLLGNSIGGYLCAIAAGLWPSLAKSLVLLNSAGSVVPNYSFIPLSEERRTSWISRLQAQLLLLFLRSRAEGILKEYYPTRTERVDKPLLDQIVRASYDPGAAKVLESVFNFNLSIPLNFLFDSFGGKILVIQGMKDPLTKSEAFVTMLREHCSKVQIRVKCRSCST

SEQ ID NO: 69832 - protein, 455 aa, Zea mays; identical to SEQ ID NO: 58715
  Clone ID: UC-ZMROB73004D06_FLI.pep

SEQ ID NO: 69833 - protein, 440 aa, Zea mays
  Clone ID: UC-ZMROB73012G07_FLI.pep
VLLREPRLRGVQRPAPPRRVHALDLRPRVGRPPRRVRRRAGRAGRLGGVGAQPVGRRHGGRASARGGALPRRRRHVGRADVQRVRVRARGARAHRVPGVGPRRRARRRRPRQGLRDARPRRRRRRRRGRAAEPGVAGRRRRLQRRRPGAARHGGGQPRRQGQAGPAEGDHRSRRSRQRHQEAQYPWSPERRELGPAAAHGRHLREVPQDVPGGGPGVVLPPRHLPADRLRRRRLRLGHRHEARQGVQGRHLHRPPQHRHRSLRSRHPSSSGAVPAAEEGAQVPRVLEHVPPLGGVRRHRAGRREHLQGHEHPGRGAAVEDSLHRRRLRAARRRRGAGGRHVGRRPQAAQGRRQDLQQRTQRPPAAFRLRVSGLSIVFTGLLSLVACVTTIVGLEFAGVLACRLVLYVRFGRSSIALHTYMHTWHFCVCVCIPFPSLPVLC

SEQ ID NO: 69834 - protein, 400 aa, Zea mays
  Clone ID: UC-ZMROB73028H04_FLI.pep
ARAAVRGVFASERRLCFHIFHDLPISTTTISAASASATHDIPFAEAVKGAALQLFGFTEAISIGRRSPEKLFKIIDLHDALSDLLPDVSDIFAASKVAESIYVQAVEIRSRLADAVRGILSEFENAVLRDPPKTAVPGGTIHPLTRYVMNYSSLICDYKVTLSELIISRPSASARLSAEGNELAPSLADLELPELENQLPLASHIVWIIVVLEHNLEGKAALYKDPALSHLFMMNNVHYIVHKVKDSPDLWSMIGDNYLKRLTTKFTMAATNYQRTSWLKILNCLRDEGLHVSGGFSSGISKSALRERFKSFNAAFEDAHRVQSGWCVPDNQLREELRISIAEKLLPAYRSFLGRFRHHIENGKHPELYIKFSVEDLEIAVSDFFEGVPPSPHNRRKSHG

SEQ ID NO: 69835 - protein, 85 aa, Zea mays
  Clone ID: UC-ZMROB73012G10_FLI.pep
ETARHYYISQKINNYITTSATFHVEYEPSSSRVLADRSNPQTGWWFWLRVPFPECPPPPHLKPSLNVWAILPRVEEPIKPCQKDL

SEQ ID NO: 69836 - protein, 542 aa, Zea mays
  Clone ID: UC-ZMROB73006B02_FLI.pep
TIEVYSGDTLAVRAVNLARYNVTLHWHGLRQLRNGWADGPEFVTQCPIRPGGSYTYRFTVEGQEGTLWWHAHSSWLRATVHGALIIHPRRGVPYPFPKPHTEAPVILAEWWRRDPIAVLRQSMITGAPPNVSDALLINGQPGDLLPCSSQETSIIPVVAGETSLLRIINAAMNTELFVSLAGHRMTVVAADAMYTKPFETDVVLLGPGQTTDVLVTAHAAPGRYYLAARAYASAQGVPFDNTTATAIFQYKNAPGCPTTSGAGAGAGAGAGTFSGPVGRSSRSSGYLGRAGPQPMLPFLPAFNDTNTATAFSNRLRSPVPVKVPGPVTQEVFTTVGFGLFNCRPGPFCQGPNNTRFGASMNNVSFQLPDTVSLLQAHYHHIPGVFTDDFPALPPVFFDFTSQNVPRALWQPVKGTRLYRVRYGAVVQIVFQDTGIFAAEEHPMHIHGYHFYVLATGFGNYDPRRDAARFNLVDPPSRNTIGVPVGGWAVVRFVADNPGVWLVHCHIDAHLTGGLAMALLVEDGESELEATVAPPLDLPICVL

SEQ ID NO: 69837 - protein, 330 aa, Zea mays
  Clone ID: UC-ZMROB73006D07_FLI.pep
NVAAAAQERRRAGGDGAVGGLAAPADVLLASAAAAAAVRDRVVAGRAAQLGLQHGGGAGRRYGYGRARVGRHARRPRGRGLPRGPRRRPRLRAVGARRLLPARRRHAAGLVRHPRGRRARRPPPAARAPPPQLLAALPAPLRGRGRTRAGPRRRAPRRARARPARRRAGEDGCDSAAGRGHCAGAAGLVPRRDGHPRVRGRVGRRRGALVVVGRQRHVTVRTRGGTGAQQEVWMDERRIGGESETTTSRGKPMEKCPSASSVDLVLIAASVKAGCLPCTCRIFVAFAILELVLKVPRVQIKVSAATCPRLNTTRFIWLGGVCLERIKISL

SEQ ID NO: 69838 - protein, 85 aa, Zea mays
  Clone ID: UC-ZMROB73001D10_FLI.pep
CLLTDNNGIQLLISYGWAIRVLNRLHLYYQFWLYRLHMTTDQSWIIVNTSNGRQNTDTQTHRHILLCSSFPKLPNARIYTMEIWN

SEQ ID NO: 69839 - protein, 363 aa, Zea mays
  Clone ID: UC-ZMROB73006E05_FLI.pep
ARSPFSLRRWDSKKLLVWLVVLLTLLVLAVLGARKAHEAWREAARRRSGAWKMTAFQKLDFSADDVVECLKEDNIIGKGGAGIVYHGVTRGGAELAIKRLVGRGCGDHDRGFTAEVTTLGRIRHRNIVRLLGFVSNREANLLLYEYMPNGSLGEMLHGGKGGHLGWEARARVAAEAARGLCYLHHDCAPRIIHRDVKSNNILLDSAFEAHVADFGLAKFLGGGGATSECMSAIAGSYGYIAPEYAYTLRVDEKSDVYSFGVVLLELITGRRPVGSFGDGVDIVHWVRKVTADAAAAEEPVLLVADRRLAPEPVPLLADLYRVAMACVEEASTARPTMREVVHMLSTSAAAQPDVPHALCKVVD

SEQ ID NO: 69840 - protein, 93 aa, Zea mays
  Clone ID: UC-ZMROB73016E03_FLI.pep
ERFIRPTGLRFTKAHVTHPELKCTFNLDIISVKKNPNGPMYTSLGVMTRGTIIEVNVSELGLVTPAGKVVWGKYAQVTNNPENDGCINAVLLV

SEQ ID NO: 69841 - protein, 488 aa, Zea mays
  Clone ID: UC-ZMROB73020G11_FLI.pep
AEGEFEPAMARPRPAAATLLLVTFLLAAAAAETTDVISGGGGMVGVDGTRFVVGGAAGGRPVYFSGFNAYWLMLVASEPARRDKVVAAFRQAADHGLNLARTWAFSDGGDTPLQAAPGVYDEAMFQGLDFVVAEARRHGIYLLLCLANNFHDFGGKRQYVQWARDAGHRLATDDDFFNSTVVKGYYKNHVKTVLTRVNTLTGVAYKDDPAILGWELMNEPRCDAEPTGAMVQAWVEEMAPYVKSVDGGHLVTAGLEGFYGAGAHESKDLNPWRIYYGTNFVETHRARGVDFATIHLYPDAWLWGCAADAQRAFLRNWTRAHARDAALYLRKPLLVTEYGKFLWEGVAGANRTQRDAFLRLVLDSIYASAARGGPLVGGAFWQLLDDGMDTLRDGYEIILPDDQLAATIIATHSRQLADLSLVTAEDVREEEAAPLRRRRRKSAHGKIHHVLSVGGGTSSDDSYYTQRLLHIFLLRLISLFESISSLFQ

SEQ ID NO: 69842 - protein, 106 aa, Zea mays
  Clone ID: UC-ZMROB73001E12_FLI.pep
IRYNNTANLSAVSVQSRKGGKKKERYRTTKLVKDNRSAHNNAGCCQAKLYPITKPAWHGLQLQRRLPKPFIILLSVHLLWSSSQSLIKHTHPAAAMLAGNSRARGR

SEQ ID NO: 69843 - protein, 262 aa, Zea mays
  Clone ID: UC-ZMROB73005A03_FLI.pep
EVQPRNTKYMSLGDGRGLCMECLGSAVMDTSECQPLYHSIRDYYEGMDMRLDQQIPVLLVERQALNEAMEGESKGPHHMPETRGLCLSEERTVSSILRRPRIGGNRLLGMRTRPQKLTRRCEVTAILVLYGLPRLLTGSILAHELMHGWLRLKGYRNLNAEVEEGICQVMSYLWLESEILPSSSRHAQPSSSSSSSSYPATSSEKGGISHTGKKLGEFFMHQIANDTSTAYGDGFRTAYAAVNKYGLRQTLSHIRLTGGFPV

SEQ ID NO: 69844 - protein, 419 aa, Zea mays
  Clone ID: UC-ZMROB73045E08_FLI.pep
ADICHAYQIMKKGGLKDENIIVFMYDDIAHSPENPRPGVIINHPQGGDVYAGVPKDYTGRDVNVDNFFAVLLGNKTALRGGSGKVVDSGPNDHIFVFYSDHGGPGVLGMPTYPYLYGDDLVDVLKKKHAAGTYKSLVFYLEACESGSIFEGLLPNDINVYATTASNADESSWGTYCPGEFPSPPPEYDTCLGDLYSVAWMEDSDFHNLRTESLKQQYKLVKDRTAVHDTFSYGSHVMQYGALELNVQRLFSYIGTDPANDGNTFIEDNSLPSFSKAVNQRDADLVYFWQKYRKLADSSHAKNEARKELLEVMAHRSHVDSSVELIGSLLFGSEDGPRVLKAVRAPGEPLVDDWSCLKSIVRTFEARCGSLAQYGMKHMRSFANMCNAGILPEAVSKVAAQACSSIPSNPWSSIHKGFSA

SEQ ID NO: 69845 - protein, 227 aa, Zea mays
  Clone ID: UC-ZMROB73049A01_FLI.pep
AMEIRQLANSQPITVLNGGSGQSGVSGLIVPAATVGALGYGYMWWKGISFSDLMYVTKRNMANAVSSMTKHLEQVQSSLAAAKRHLTQRIEKLDDKLDQQKALSGQIRDDVTDARLKLENIGSEIKNIKELVWGLDGKIDSMEAKQDFSCAGVMYLCQFMEQNGGKLPDRLEGSKMTTKRFGGQKFLQGLQLAIESGNCGKDTIDMLLKDADSSDKINRTSSIKSAS

SEQ ID NO: 69846 - protein, 157 aa, Zea mays
  Clone ID: UC-ZMROB73050D11_FLI.pep
PAVHMAPEDVRWMVGAWRERIIVCSGKYGLAHGLVKAFMDCGAKAVISSSIEPPDSQTIVYHGMDVNGSLENGKFVIGDEEADESEPEPVSPVSDWEDSDVEKGGNHDMDDEEYLAQFMCLMYDKLFREGVTVDTALQQALRSHPKLKYSCHLPHVL

SEQ ID NO: 69847 - protein, 406 aa, Zea mays
  Clone ID: UC-ZMROB73079A02_FLI.pep
MKLVLAVVLSLFFSVLGLLCLAAACRRGRKRCDELPVVKQVSSFDEPAVSGPFSFQTDSTTWVADVKVATSVPVVIFEKPLLSLTFADLLAATSNFDRGTLLAEGRFGPVYRGFLPGGIQVAVKVLVHGSAIGDQDAARELERLGRIKHPNLVPLTGYCVAGVQRIAIYEYMESGNLHNLLHDLPLGVQATEDWSGDTWEDNTGGVATTEIVTPEGTATWMFRHKIALGAARALAFLHHGCIPQIVHRDVKASSIYFDCAMEPRLSDFGLSMVAGTRADLLHHSPGYAPPEFSGSENAAATAKSDVYSFGVVLFELVTGKKPLGDEYPGVQKEASLVSWARAMVKASLAPSIIDPKIRDTGPERQMEEALRIAYLCTAELPSKRPAMQQIVGLLKDIEPKVEEEGD

SEQ ID NO: 69848 - protein, 345 aa, Zea mays
  Clone ID: UC-ZMROB73079D01_FLI.pep
TNGSSTAKRPKVPVTVTSYTVADLQVATNSFCEDSLLGEGSLGRVYKAGFPNGKVLAVKKVDDSALLSLYGGGEDAFLELVSNVSRLRHPNIVPLTGYCVEHGQRLLVYEYVGNGTLRDVLQHCLSDDEGASKKLTWNTRVRIALGTARALEYLHEVCIPPVVHSRTFKASNILLDEEYSPHLSDCGLAALTTVVSPEAVGSFGYSAPELAMSGTYTAKSDVYSFGVVMLELLTGRKPLDSSRERSEQSLVRWAAPQLHDIDLLARMVDPALDGLYPSKSLSRFADIIAICVQPEPEFRPPMSEVVQQLVRLMQRAAIIRRQSDDLGYSYRVPDRDGGAAAGDVL

SEQ ID NO: 69849 - protein, 322 aa, Zea mays
  Clone ID: UC-ZMROB73057C11_FLI.pep
FLASQTIVTIPPLGLAFAAVSASEMELHLCLRLHVRLTPAAKPPPAPAVLPVPASRRLRMGGSYGVALRRHTRRSNRAIHTSLADGEQGVAVDAVKERSVSVILLSGGQGKRMGASMPKQYLPLLGLPIALHSLKTFCQLKEVKEVVVVCDPDYIDVFEGSIKNLQLPLKFARPGKERQDSVFNGLQEIDGDSELVCVHDSARPLVSSEDVKKVLEDAAVHGAAVLGVPVKATIKEANSDSFVIKTLDRKTLWEMQTPQVMKPNLLKDGFELVKRDNHEVTDDVSIVEYLKHPVYITEGSYTNIKVTTPEDLLLAERLMNEK

SEQ ID NO: 69850 - protein, 124 aa, Zea mays
  Clone ID: UC-ZMROB73075F12_FLI.pep
LWSLLFLHHIRDIKDPEHPYSLEQLNVVTEDSIELNDESNYVRVTFTPTVEHCSMATIIGLCIRVKLVRSLPPRYKVDIRVAPGSHATEAAVNKQLNDKERVAAALENPNLLDMVEECLSPTFD

SEQ ID NO: 69851 - protein, 514 aa, Zea mays
  Clone ID: UC-ZMROB73077C01_FLI.pep
PPQFPDAHQNWLIASRFASRLTGIKENTKFQTKPDGDGDGEQAPGGLKRLVAETKDAHGVKQVYVWHAMAGYWGGVTPTAGTAMERYEPALAYPVQSPGVTGNQPDIVMDSLSVLGLGLVHPRRVRDFYGELHAYLASCGVDGVKVDVQNIIETLGAGHGGRVAITRAYHRALEASVARSFPDNGCISCMCHNSDMLYSARQTAVVRASDDFYPRDPASHTVHVASVAYNTVFLGEFMQPDWDMFHSLHPAAEYHGAARAIGGCPIYVSDKPGNHNFELLRKLVLPDGTVLRAQLPGRPTRDCLFSDPARDGASLLKIWNLNKCGGVVGVFNCQGAGWCRVTKRTRVHDASPGTLTGTVRADDVDAIARVAGDGGGWDGETVVYAHRTRELVRLPRGVALPVTLGPLQYEVFHVCPLRAVVPGFSFAPVGLLDMFNAGGAVEECDVISNVGGKAMALRVRGCGRFGAYCSREPARCLLDSAEVEFSYDADTGLVSVDLPVPEQELYRWTLEIMV

SEQ ID NO: 69852 - protein, 298 aa, Zea mays
  Clone ID: UC-ZMROB73051H09_FLI.pep
TRRRRRSSRPTKTGGRRCSTARYALVGRATSKADRKSTSTSTRSRPARSDAAGRSTSRYAWSPAGWDGDLSQRERQTAASWPAARRDPASRRSRSRLRAPDARWRSTSVDTSASRLRSRRLAQWTSPLIVSAMSAAAASAAAGPSSSSEVSPAWKQLQHRAAAAARSAPPPPPPSSRKLRTMPSRHSELGSGSSSLSPPPGGADGRRSAGETRSSWRSKRRFSRDLGGAAGDGSICAALISAQHKRRIKLGGWLWQTGSGTAALEPSVSVFSADRLRRTHPYPSPAIDSFFFVLSYRF

SEQ ID NO: 69853 - protein, 574 aa, Zea mays
  Clone ID: UC-ZMROB73060H07_FLI.pep
FSGQIPATLGNLAWLEALSIPRNRLTGRLSRELFQLGNLTFLDLSENNLTGEIPPAVGNLLALHSLNLSGNALFGRIPTTIGNLQNLRVLDLSGQKNLSGNVPAELFGLPQLQYVSFSDNSFSGDVPEGFSSLWSLRNLNLSGNSFTGSIPATYGYLPSLQVLSAAHNHISGELPAELANCSNLTVLELSGNQLTGSIPRDISRLGELEELDLSYNQLSGKIPPEISNCSSLTLLKLDDNHFGGDIPASVASLSKLQTLDLSSNNLTGSIPASLAQIPGLLSFNVSHNKLSGEIPAMLGSRFGSSSAYASNSDLCGPPSESECGVYRRRRRRQRVQRLALLIGVVAAAALLVALFCCCCVFSLMGWRRRFVESRDGVKKRRRSPGRGSGSSGTSTENGVSQPKLIMFNSRITYADTVEATHQFDEENVLSRGRHGLVFKACYSDGTVLAILRLPSRSADGAVVIDEGSFRKEAESLGKVKHRNLTVLRGYYAGPPPDVRLLVYDYMPNGNLATLLQEASHRDGHILNWPMRHLIALGVSRGLAFLHQSGVVHGDVKPQNILFDADFEPHLSDFG

SEQ ID NO: 69854 - protein, 401 aa, Zea mays
  Clone ID: UC-ZMROB73077C05_FLI.pep
APRAGTLLVLDRSTLAYQLLLWLARRRERERERDATAMDRAALTVGPGMDMPIMHDGDRYELVRDIGSGNFGVARLMRNRADGQLVAVKYIDRGEKIDENVQREIINHRSLRHPNIIRFKEVILTPTHLAIVMEYASGGELFERICNAGRFSEDEARFFFQQLISGVSYCHSMQVCHRDLKLENTLLDGSTAPRVKICDFGYSKSSVLHSQPKSTVGTPAYIAPEVLLKKEYDGKVADVWSCGVTLYVMLVGAYPFEDPDEPKNFRKTIQRILGVQYSVPDYVHISPECQDLISRIFVANPSTRITMPEIRSHPWFLKNLPADLVDDSATTTSKQYEEPEQPMQGMDEIMQILGEATIPAAGSRGLNQFLNDGLDLDDDMEDLDSDADLDLESSGEIVYAM

SEQ ID NO: 69855 - protein, 529 aa, Zea mays
  Clone ID: UC-ZMROB73049G04_FLI.pep
PEPSAPPAPLLPSPPPPAPLPPSPPPPALSPPPPDALPPSLPPSPLPYPTRSPPQAPPPPLTTDQPRVQPRVYPSPPPPSLPPPPPPTVSPPAPAPSNSPSPSPAPAAQAPGPARVAAYSPPPPRIAPPPPPHYHGKSHYTPHSPVKSHSNSSHAASGSGKNIEISREAATTIVALAGLAMLSFIGATIWFVKKKRRRIEPPATLPTQQPAPPPPPNYIPSSAGSSLASDGFYLRSPGYPFMRYSTGSHGFPYSPADSGIGYSHMLFTPENLAAITDDFAEDNLLGEGGFGCVFKGILPDGRPVAVKKLKIGNGQGEREFKAEVDTISRVHHRHLVSLVGYCIAEGQRMLVYDFVPNNTLYYHLHVSETSLDWRTRVKIAAGAARGIGYLHEDCHPRIIHRDIKSSNILLDNNFEAQVSDFGLARLAADSNTHVTTRVMGTFGYLAPEYALSGKLTAKSDVYSFGVVLLELITGRKPVDASQPLGDESLVEWARSVLTKAIEHREFGDLPDPRMENRFDENEMFHMIVA

SEQ ID NO: 69856 - protein, 116 aa, Zea mays
  Clone ID: UC-ZMROB73075H04_FLI.pep
TLVEPARKQLNRKRRSCMEDGCSYMGTYRELCKHVQKKHPTANPRAVDPLHAYRWKRLLFRSSLHDMICSTTSEAMRRFCSHMLQIEEVVAALREGGDHRGATNDDQLIHDLLTSR

SEQ ID NO: 69857 - protein, 457 aa, Zea mays
  Clone ID: UC-ZMROB73062A04_FLI.pep
CSLNNSSECENHTPSNDEISEPESNLEMAKTDQGGDVPSGEKVLKKPDKILPCPRCNSMDTKFCYYNNYNIKQPRHFCKSCQRYWTAGGSMRNIPVGAGRRKSKSSSASCRSVLIPVPGSSSVANPGGEASLFPLSVKANQAAVSFGPDSPLCTSMASVLKIGGGGEQVKSCSPASAAAQPRNGETQTQTCAPSSAATTPSDGPGNGLQKGAESAHQNQNQNQNGIIGHSNGVTPVHPIPFFPGPPFVYPWSPAWNGIPAMAAAVCAAPATAEAAISSEHGTASSTVQWNVPPAIVPVLPPGFCGPIPVPVIPPPSVWPLITPWPNAAWSAPWLGPSASVPPGSSRSSGSSTCSDSGCGSGSPVLGKHSRESRPQGDEKAERRCLWIPKTLRIDDPVEAAKSSIWTTLGIEPGDRGMFRPFQSKHGRQQELQASGAARALQANPAALSRSQSFQETT

SEQ ID NO: 69858 - protein, 206 aa, Zea mays
  Clone ID: UC-ZMROB73076A08_FLI.pep
VPMYLQKNLFTNILNEEEFWTHTDRAIIKAYEKTDQAILSHTPDLGQGGSTAVTAILVNGRKLWVANVGDSRAVLLKGGEPIQMSIDHDPNVERSVIENRGGFVSNMPGDVPRVCGQLAVSRAFGDRNLKSLLRSEPDIKIEDIDHTAELLVLASDGLWKVMNNQEVVDLAKRYKDPYAAAKQLTVEAQKRDSKDDISCIVVRFKA

SEQ ID NO: 69859 - protein, 135 aa, Zea mays
  Clone ID: UC-ZMROB73080A06_FLI.pep
AKIVPSIGQLLETAEIQKVLFLETPERISSALRPYWAKAIEGRAHVVQAQPDMLELVPPATSKGNGVKVLLNHLSISPDEVMAIGDGENDIEMLQLASFGVALANGSDKTKAAANVIGATNDEDGVAQAIYEYAF

SEQ ID NO: 69860 - protein, 220 aa, Zea mays
  Clone ID: UC-ZMROB73070H09_FLI.pep
AWLQERSVMQELIRQHLLRAQSRMKRHADKHRSERTFQEGDWVYLRLQPYVQASVMPRAHHKLSYKFFGPYKILDRIGQVAYRLALPASSRIHPVVHVSQLKLAKGFKDPEPLPLPDDIPEISVPLQIIQSRGITKGSRLVQQVLVSWSGLPAELATWEDREALQQCFPFAPAWGQAGLPEGGNVKDFDMSAQQQETNVPEGRTHRVRRSNPRVYGPEWV

SEQ ID NO: 69861 - protein, 284 aa, Zea mays
  Clone ID: UC-ZMROB73058F10_FLI.pep
QELVDCDTSYNQGCNGGLMDYAFEFIINNGGIDTEKDYPYKGTDGRCDVNRKNAKVVTIDSYEDVPANDEKSLQKAVANQPVSVAIEAAGTAFQLYSSGIFTGSCGTALDHGVTAVGYGTENGKDYWIVKNSWGSSWGESGYVRMERNIKASSGKCGIAVEPSYPLKEGANPPNPGPSPPSPTPAPAVCDNYYSCPDSTTCCCIYEYGKYCFAWGCCPLEGATCCDDHYSCCPHDYPICNVRQGTCLMGKDSPLSLSVKATKRTLAKPHWAFSGNTADGMKSSA

SEQ ID NO: 69862 - protein, 323 aa, Zea mays
  Clone ID: UC-ZMROB73055D11_FLI.pep
RPGFLAVPECSTAIHVRLDSSSGWPLHCPGSSATHDPRVSEDLLGGEPPPLVAADHAPHQVLGGGRHPAEEPGREARAAAQHGRQHLRGAVAAEGERAAGEQRVHHHAGAPHVRLGAVLAAGHHLGRHVVGRPHKALGAPEPTGAHPRRRPEVRQARARRRLGLVLLVVVAPGGGVDEDVLGLHVAVGDAAAVAERERLRDLRDDGGGHGLRHGRAAAAAHPLQQVRARAQVHDHVRPRLVLVRRVHLHHARVARAGELCQLRLQLRELAVQVVAQPRPVHGLDGVGLPGGAGRAAVDHPEAAAPDLLADLVVPLQLRAHASV

SEQ ID NO: 69863 - protein, 399 aa, Zea mays
  Clone ID: UC-ZMROB73078A10_FLI.pep
AETPPPPAVQLAKAVAEPKTPPPPPPPQHRQPARKTPGSGGSERDGATPRSTGSAGMPEVSHLGWGHWFTLRELEEATDGLTEENVIGEGGYGIVYKGTLHDSTLIAVKNLLNNRGQAEKEFKVEVEAIGRVRHKNLVRLLGYCVEGAYRMLVYEYVDNGNLDQWLHGDVGEVSPLTWDVRMNIMLGTAKGLAYLHEGLEPKVVHRDIKASNILLDQQWNARVSDFGLAKLLWSEKSYVTTRVMGTFGYVAPEYASTGMLNERSDVYSFGVLIMEIITGRSPVDYTRAAGEVNLVEWLKTMVAERKAEEVLDPKMAEKPSPKTLKRALLVALRCVDPDANKRPKMGHVIHMLEMDDLLFRDDKKPGRDVHPHGSDRYSSKEEGSISKREHHHHHHHRHR

SEQ ID NO: 69864 - protein, 176 aa, Zea mays
  Clone ID: UC-ZMROB73050C04_FLI.pep
AAASSIHPLSPPRFASSADSSSLGRPRPLFRRASSPEMANARSGVAVNDECMLKFGELQSKRLHRFLTFKMDDKFKEIVVDQVGDRATSYEDFTNSLPENDCRYAIYDFDFVTAEDVQKSRIFYILWSPSSAKVKSKMLYASSNQKFKSGLNGIQVELQATDASEISLDEIKDRAR

SEQ ID NO: 69865 - protein, 95 aa, Zea mays
  Clone ID: UC-ZMROB73059F10_FLI.pep
LFLFLAGREDRHDREGGQHQGRVLLAGPLRQAPGEAQRRGPHPLRWIWYASPLCPSRYYARGLQCVGSSWWRRCRFSLFRYVACLLLILNLFETY

SEQ ID NO: 69866 - protein, 192 aa, Zea mays
  Clone ID: UC-ZMROB73066F08_FLI.pep
GLGMTLSSFSAFATAATQLGAFGTLLNSTLRLRLLGLGHLSLLRLLLILGLLDALLDLTKSSFSSSISDFRLLSSLLLDHFQGSTHNGPRVWLLGGAAPLLDSFSMDVLLVLLPVHCCPGKLCRLQAVVEVALAFRVGKKENLRISTNKPDAFPRIDLLATEAAEFRLQHHLLGFKKSSLKTFERSGRRPRG

SEQ ID NO: 69867 - protein, 310 aa, Zea mays subsp. mexicana
  Clone ID: UC-ZMROTEOSINTE003G02_FLI.pep
DTDPGIDDSMTILMAFRAPSVEIIGLTTIFGNVDTKGATRNALLLCERAGCPEVPVAEGSHEPLKGGKPRVADFVHGSDGIGNLFLPAPSAKKVEESAADFLINKVSEFPGEVSVLALGPLTNVALAIKRDPSFASKVKKIVVLGGAFFAAGNVNPAAEANIHGDPEAADIVFTSGADIVVVGINITTQVCLTDEDLLELRNSKGKHAAFLYEMCKFYRDWHAKSDGFHGIFLHDPVSFTAVLHPEYFTFKKGVVRVETQGICTGHTLMDQGLKKWNSENPWSGYKPISVAWTVDVPKVISFIKKLLMAP

SEQ ID NO: 69868 - protein, 125 aa, Zea mays subsp. mexicana
  Clone ID: UC-ZMROTEOSINTE011F09_FLI.pep
FSKSLTYHQVLFLCNEGGIWLCTFLAIMKVELYTELFGCKAGNFPINYLGIPIHFKKLRNRDWARVGERFEKRLSSWKGKHLSIGGRPTLINSVLSSLPMYMMSFFSIPKGVIKTLDYFRSRFFW

SEQ ID NO: 69869 - protein, 140 aa, Zea mays
  Clone ID: UC-ZMROMO17009C06_FLI.pep
APALKRRRIGIDRETRRGQTRRHHRKTPVLRTGMSRHGHGSLRPALERDGSDDHLVVDGSQGSANEGADPEDPMVVPGVIPVVDDGSAKAPSWVDASASNGDGGKVDQEHREPNWQWGKDRNMGVPGIPLGIGGREDGVG

SEQ ID NO: 69870 - protein, 127 aa, Zea mays subsp. mexicana
  Clone ID: UC-ZMROTEOSINTE001F12_FLI.pep
SCFYLQLLQVQLRPSERRADVAEGVFPVSQVRQPTIEERSHLTYLSHPVNTEGCARSIVHITIFSPAKVITGSGNKEELAVSDRRNPQDSNIEVSGAVGVPSKLQASFAISLLSSSENLNHPLVHYI

SEQ ID NO: 69871 - protein, 290 aa, Zea mays subsp. mexicana
  Clone ID: UC-ZMROTEOSINTE001H01_FLI.pep
FDSEDARERDRLKMVLHRIYGKFMVYRPFIRKAINNIFYQFIYETEKHNGIAELLEIFGSIINGFALPLKEEHKLFLVRTLIPLHKPRCTTMYHQQLSYCITQFVEKDCKLADSVIRGLIKYWPITNSTKEVLFLGELEEVLDATQPGEFQKCMVPLSHQIARCSNSPHFQVAERVLFFWNNTHFENLVKQNSKVILPIVFPALEKNINGHWNQVVRSLSLNVRKLFSDRDPQMFNECLRGYEEDKDREKEFRLKQELAWKRLDEIASAKVTSGEAVLVSPTLHRQPSVL

SEQ ID NO: 69872 - protein, 207 aa, Zea mays subsp. mexicana
  Clone ID: UC-ZMROTEOSINTE014A11_FLI.pep
ETERGEGDSVSIDVPFEELCDEDKITAFFRRLLNEWTQEVDGMPEAERRTAKGKAAIATCKQCTRYLDPLFKQCKKKALPSDVRQALLEVVKCCRRRDYLAAVDNYIKLAIGNSPWPIGVTMVGIHERSAREKIYTNSVAHIMNDETTRKYLQSVKRLITFCQRKYPTDPSRSVEFNSLANGSDLQSLLAQQNAKNSEETLRLVAAS

SEQ ID NO: 69873 - protein, 218 aa, Zea mays
  Clone ID: UC-ZMROMO17055H05_FLI.pep
ILMEEEEKAQTGIIVAMDQEVVGIISVSDPIKPNAREVISYLKSMNVESIMVTGDNWGTANAIGKEVGIEKIIAEAKPEQKAEKVKELQLLGKTVAMVGDGINDSPALVSANVGLAIGAGTDVAIEAADIVLMKSNLEDVITAIDLSRKTFFRIRMNYVWALGYNVIGIPIAAGVLFPSTRFRLPPWVAGAAMAASSVSVVCWSLLLRYYKSPKKFDN

SEQ ID NO: 69874 - protein, 267 aa, Zea mays
  Clone ID: UC-ZMROMO17100E09_FLI.pep
FSKILKLAAIRIRNLCERVQCVEQTERVYNVFKQILEQQTTLFFNRHIDQLILCCLYGVAKVCQLELTFREILNNYKREAQCKPEVFSSIYIGSTNRNGVLVSRHVGIITFYNEVFVPAAKPFLVSLISSGTHPEDKKNASGQILGSPKPSPFPNLPDMSPKKVSASHNVYVSPLRQTKLDLLLSPSSRSFYACIGEGTHAYQSPSKDLAAINSRLNYNGRKVNSRLNFDMVSDSVVAGSLGQINGGSTSDPAAAFSPLSKKRETDT

SEQ ID NO: 69875 - protein, 360 aa, Zea mays subsp. mexicana
  Clone ID: UC-ZMROTEOSINTE004E11_FLI.pep
SKTTSWLKRFIGRAKKPAMTWPFPFVEERLFVLTIQAGVEGFHIYVGGRHVTSFPYRPGFTLEDATGLFVKGDVDIHSVYATALPSSHPSFSLQQVLEMSEKWRSRPLPKGPVSLFIGILSASNHFAERMAVRKTWMQAPEIKSFEAVARFFVALNSRKEVNVMLKKEAEYFGDIVILPFIDRYELVVLKTIAICEYGVQNLTAANIMKCDDDTFVRVDVVLRRIKLNNGDKPLYMGNLNLLHRPLRTGKWAVTDEEWPEDIYPPYANGPGYVISGDIAKFIVSQHANQSLRLFKMEDVSMGLWVEKFNSTNPVQYSHSWKFCQYGCLENYYTAHYQSPRQMLCLWDKLVRGQASCCNYR

SEQ ID NO: 69876 - protein, 243 aa, Zea mays subsp. mexicana
  Clone ID: UC-ZMROTEOSINTE014F10_FLI.pep
DRGFTFLRYNLTVAYHRTNLLVRYGRWSRDPNGGPLESLGYKQGYRVDVDIPDQTWVEACSFHDVLIFNTGHWWWAPSKFDPIRSPMLFFEKGRPIVPPLLPPAGLDLALQNMISFANKATRPNAVKFFRTQSPRHFEGGDWNEGGSCQRNQPLSSKEVEEIFSLDNNSTNVEARLVNQHLVKALQQSSFRVLDITRMSEFRADAHPSTTGGKKHDDCMHWCLPGPTDTWNDLLALSLESLES

SEQ ID NO: 69877 - protein, 212 aa, Zea mays
  Clone ID: UC-ZMROMO17066H08_FLI.pep
PAREGLKGQEHLLEALPGVGVDEVPVAVEKLGRLEEGEDEQFRLVDEMDVQEHPDLAQMVAGPAAAEVASRADDGGRLVCPAVHSSRSPVKRVLQWAGDGVVVFGRGEEEAVGVADLGAERLDGGREARAAVRLEVGVEHRQVGDVEVVDAQPRDAVLAHLRGWIIAKLVYPFLYIYKYGVSARKEQTYVPARMSPLCQEALRMEPLMAATR

SEQ ID NO: 69878 - protein, 123 aa, Zea mays
  Clone ID: UC-ZMROMO17102B07_FLI.pep
LKAGLAKLGSKLSEAEVKQLMEAADVDGNGSIDYVEFITATMHRHKLERDEHLFKAFQYFDKDNSGFITRDELESALIEHEMGDTSTIKEIISEVDTDNDGRINYEEFCAMMRGGMQQPMRLK

SEQ ID NO: 69879 - protein, 133 aa, Zea mays subsp. mexicana
  Clone ID: UC-ZMROTEOSINTE012F08_FLI.pep
VLNLECITLQIHGDPEAADIVFTSGADIVVVGINITTQVCLTDEDLLELRNSKGKHAPFLYEMCKFYRDWHAKSDGFHGIFLHDPVSFIAVLHPEYFTFKKGVVRVETQGICTGHTLMDQGLKKYVFFFLSNS

SEQ ID NO: 69880 - protein, 204 aa, Zea mays
  Clone ID: UC-ZMROMO17104C10_FLI.pep
DELWEELIRQCLQKPEMVGNLLEHTVGNLDPLYIVSLVPDGLEIPRLRDRLVKIVTDYRTETSLRNGCNDILKADCVNLLVKYYHEARRGVYMVSMDEEVHGNRADDGSSRGHERSSSVRALDIKSRTRCGARCCLCFDPLPIQDISVIVFYCCHAYHLSCLEGGLDSMRSNSGQDSDGGMDDEDGSPSGQSRMRCVLCTTAAS

SEQ ID NO: 69881 - protein, 338 aa, Zea mays subsp. mexicana
  Clone ID: UC-ZMROTEOSINTE002D07_FLI.pep
NACHDNIVHQQKVLTRIHRDDEDKSSSDWASQPLQQTHETDTNRLVHLLDLGARATASSRSVLVHAAGASHVGTRALVHLGDDGVAKALQLLHLVIELVRLGELVGVQPADGRVDGVLDLLLVVGSQLGRDLLVLDRVAHVVGVVLQRVLGLHLLLVLLVLRLVLLGVLHHLLDLLLGQTALVVGDCDLVLLPRRLVLGRHVQDAVGVDVEADRDLGDTTGSRWDAGELELPKQVVVAGPGPLALVHLDQHTRLVVRVGGEHLLLLGGDGGVPRDKDGHHSSGSLQTQRERSDVKQKQVLHLLVALTTEDSSLDSSTIGNGLIRIDVLAQLLAVEEVL

SEQ ID NO: 69882 - protein, 407 aa, Zea mays subsp. mexicana
  Clone ID: UC-ZMROTEOSINTE004H12_FLI.pep
PNRNSFTAPQYKSCLAPPQPARTATGPSRRSPGNGSWAGAVMGAAGSRLEKALGEQFPEGERYFGLENFGNTCYCNSVLQALYFCVPFRDQLLEYYANNKNTGDVEENMLTCLADLFSQISSQKKKTGVIAPKRFIQRLKKQNEIFRSYMHQDAHEFLNFLLNELVDILEKEHNAARESLQNLSLQKNSNGPIDGQPNGSHKELAVTWVHKCFQGILTNETRCLRCETVTDRDETFFDLSLDIEQNSSLTSCLKNFSSTETLNAEDKFFCDKCCSLQEAQKRMKIKKPPNILVIHLKRFKYIEQLQRYKKLSYRVVFPLELKLLNTVDNSDLEYSLFAVVVHVGSGPNHGHYISLVKSHNHWLFFDDENVEMTDESMVQAFFGSPQEFSGNTDNGYILFYESLAERS

SEQ ID NO: 69883 - protein, 161 aa, Zea mays subsp. mexicana
  Clone ID: UC-ZMROTEOSINTE016C03_FLI.pep
PCIGFAMLLMDLSGRRFLLLGTIPILIASLVILVVSNLIDLGTLAHALLSTVSVIVYFCCFVMGFGPIPNILCAEIFPTRVRGLCIAICAFTFWIGDIIVTYSLPVMLNAIGLAGVFSIYAVVCLISFVFVFLKVPETKGMPLEVITEFFAVGAKQAAAKA

SEQ ID NO: 69884 - protein, 96 aa, Zea mays
  Clone ID: UC-ZMROMO17017H06_FLI.pep
ADYVDEYLRIGESTAIESLRKFVKAICEVFGPEYLRAPNEDDTTRLLSIAEQRGFPGMLGSIDCMHWKWKNCPTAYQGTYCGHVKEPTIILEAVAS

SEQ ID NO: 69885 - protein, 240 aa, Zea mays
  Clone ID: UC-ZMROMO17068H03_FLI.pep
LDMQKLNEIYRYKTEEYSYDAVNKFNIYPDQISPWLVEWIPPKGGYFIGNLQPAHMDFRFFSLGNLWSIVSSLATTHQSHAILDLIESKWSDLVAEMPLKICYPALENQEWKIITGSDPKNTPWSYHNGGSWPTLLWQLTVACIKMNRPELAAKAIEVAERRIATDKWPEYYDTKRARFIGKQSRLYQTWSIAGFLVAKLLIEKPDAARILWNDEDAEILNASSTNRKRGKKVLKKTYIV

SEQ ID NO: 69886 - protein, 333 aa, Zea mays subsp. mexicana
  Clone ID: UC-ZMROTEOSINTE016H03_FLI.pep
HRGRGGGKGKGGRMGGQWLGEGMPSSNLQCFLDCTTPTVETHILPKTNGRLPTDAWHHAEMDSVEYFNLADLWEQYYEWSAYGAGATVQLPGGDRVVQYYVPYLSGMQLYTNKVLTASRSFGEDNGMDLWSDDEDNEKMSRSWSSTSDESLFNCDVLWSNRKRPGHLYFEFFEVGSPYGRVPLIDKVYELSQGFPGLTSLKSAELSPVSWMSVAWYPIYHIPYQRSVKDLSACFLTYHTISSSFQDHGLETMTTDCCHPVANGKQNGHMDKKSNTVSLPPFGLAAHKIQGSLWTNPMTGDRRKMDFLFSAADSWLKQLGVQHHDFNFFITHPM

SEQ ID NO: 69887 - protein, 96 aa, Zea mays
  Clone ID: UC-ZMROMO17114E08_FLI.pep
DEQHLDEALQRIFQYGLGGGIPRRNAPILQKIREEVTDDGKYSLVLVFEAKALELSDFEKRQAKFTSFFGPGIKAEIDAGKGGGDLYEVRLISDTV

SEQ ID NO: 69888 - protein, 261 aa, Zea mays subsp. mexicana
  Clone ID: UC-ZMROTEOSINTE003C05_FLI.pep
LRTSTPEQLFGERLSAINTLLPLVRFPLMHLSILKRMERSNLANNIQAFRQLVAEAIEFSHAGQLMPTACECERFQHRRSSYKELQYISDGDSNGVIYYAGTSFGKHQWMNPVLTKNITVVASSPNSRHTDPKALVSKNYQGTCFAGPCVENGKRVSWWMVDIGQEHQLMCNYYTVRQDGSTAFMRSWAFQGSMDGRNWTSLRVHDSDPTVCYPGQFASWPIVGPAVLLPFRFFRVALTGPAVGCTWNLCICFLELYGYFH

SEQ ID NO: 69889 - protein, 166 aa, Zea mays
  Clone ID: UC-ZMROMO17026D05_FLI.pep
RLPGLLPAAVRLRGEVGRAAVAGLGVHHRGGRGPAPAPGEPAAVLQGEPVPGDVADGVRRGHDGRVHAAALLQRRGGLPGRARLLAAHRLLPRRDVRGAEEGAAVELPVGVPADAQPRLPRHLHRRRSRVHRRHRVRPQSLPPVQVLLIRFTAYGRRSSMWYIGIY

SEQ ID NO: 69890 - protein, 131 aa, Zea mays subsp. mexicana
  Clone ID: UC-ZMROTEOSINTE010H06_FLI.pep
RKDAAGSTMNPYKAAQVSSDCSPLLEAGQAESLGTELLGMVPSREEEIKLKEYREDVVSTFVVDDYVILQFKGSTFTGSWKSFSSPKISSTFLVVIAIVSNGIVVRVARVLSTNVVVHCEAKWVISKGLRF

SEQ ID NO: 69891 - protein, 294 aa, Zea mays subsp. mexicana
  Clone ID: UC-ZMROTEOSINTE017C07_FLI.pep
GCAILMHNKVLSVVGILQDEVDPMVSVMKVEKAPLESYADIGGLDAQIQEIKEAVELPLTHPELYEDIGIRPPKGVILYGEPGTGKTLLAKAVANSTSATFLRVVGSELIQKYLGDGPKLVRELFRVADDLSPSIVFIDEIDAVGTKRYDAHSGGEREIQRTMLELLNQLDGFDSRGDVKVILATNRIESLDPALLRPGRIDRKIEFPLPDVKTRRRIFQIHTSKMTLADDVNLEEFIMSKDEFSGADIKAICTEAGLLALRERRMKVTHADFKKAKEKVMFKKKEGVPEGLYM

SEQ ID NO: 69892 - protein, 72 aa, Zea mays
  Clone ID: UC-ZMROMO17085H11_FLI.pep
MLETRRAVIGGEVIAKAIGRVMGDGEDAEAIREMAKELGEKARRAVANGGSSYDDVGRLVDELMARRRSVKV

SEQ ID NO: 69893 - protein, 125 aa, Zea mays subsp. mexicana
  Clone ID: UC-ZMROTEOSINTE001A04_FLI.pep
AEEANAAVEALNGTEVGDRKIKVNVTESFLPNIDRSAPEPEALFVDSQYKVYVGNLAKTVTTEVLKNFFSEKGNILSATVSHIPGTSKSKGYGFVTFSSEEEVEAAVATFNNAELEGQLIRVNRA

SEQ ID NO: 69894 - protein, 91 aa, Zea mays subsp. mexicana
  Clone ID: UC-ZMROTEOSINTE034H03_FLI.pep
APLQHLIAEGLLHSGSEAKKLAEDIATRWVRTNYAAYKATGAMHEKYDVEACGESGGGGEYKPQTGFGWSNGVVLSFLEEFGWPEGKEIAC

SEQ ID NO: 69895 - protein, 125 aa, Zea mays subsp. mexicana
  Clone ID: UC-ZMROTEOSINTE025C04_FLI.pep
RLRVQLHHPSRGVHPAVVLDRGVRKLQHVPGDRHDVARDVPGAGPPQDVFGALLRLHHPQRPLQRAQRGGHRDGNGYPRPDTRWVFTPLGYVCGLNILPVGLLLGKNLHPTGKRVLERSTVTHTR

SEQ ID NO: 69896 - protein, 438 aa, Zea mays subsp. mexicana
  Clone ID: UC-ZMROTEOSINTE029E02_FLI.pep
EKLSVWTNMCRFMSNDGLGPPLGNEEGVFSDTGWYGTNQFSVDVIFGNRMKQYECLTKDSSVAAAVFVPFYAGFDVARYLWGYNITTRDAASLDLVEWLMNKPEWSVMGGRDHFLVAGRITWDFRRLTEEEADWGSKLLFLPAAKNMSMLVVESSPWNSNDFGIPYPTYFHPAKDAEVFLWQDRMRSLERPWLFSFAGAPRPGDPMSIRGQLIDQCRSSSLCKLLECDLGESKCHSPSTIMKMFQSSIFCLQPQGDSYTRRSAFDSMLAGCVPVFFHPGSAYVQYTWHLPKNYTTYSVFIPEDDIRSGNASIEERLKSIHPDVVKQMREEVINLIPKVIYADPRSKLETLKDAFDVSIEAIINKVTKLRRDIIAGQEDKDFIEENSWKYSLLDDGQRTIGPHKWDPFFSKPKDKGGDSSGSSAEAAKNSWKSEQRGQD

SEQ ID NO: 69897 - protein, 212 aa, Zea mays subsp. mexicana
  Clone ID: UC-ZMROTEOSINTE038E07_FLI.pep
SLFITSSFFGTVVFIGTTLFALQQLSGINSVFYFSSTVFRSVGVPSNLANICMGISNLSGSIVAMLLMDKLGRKVLLSGSFLGMAFAMGLQAVGANHQYLGSACVYLSVGGILLFVLSFSLGAGPVPGLLLPEIFPNKIRAKAMALCMSVHWIVNFFVSLMFLRLLEQLGPQLLYTIFSSVCVVASIFVRRHVLETKGKTLQEIEVSLLQPQ

SEQ ID NO: 69898 - protein, 246 aa, Zea mays subsp. mexicana
  Clone ID: UC-ZMROTEOSINTE032D11_FLI.pep
QQYKWLEQFAEEYQCDNSLWLFPNFSFSLATARFYLECDAASEGSDDADKSTSLDLMKQALMLHPMVLRKIVDKAPLKDSSWTQILRNVFFGSAKPGSPSLEHMINIYVERHYIMWRFPELQNLLKEAALLVIESLKQDNREALDWACVRKEAFSSDKNEYSHLLVSDFTDTTPSLPPEELRPFMVGPGMLHEMPPVEQEAGPERLRAPREVAGRNPAVVFLESLLPWVDYGDNHQGANDDDNDDD

SEQ ID NO: 69899 - protein, 194 aa, Zea mays subsp. mexicana
  Clone ID: UC-ZMROTEOSINTE025G05_FLI.pep
AYCRVLVRYKEELTRPFDEAASFLSSIQAQLSDLCSGGSSPAATATHSDDMMGSSEDEQCSGDTDVPDMGQEHSSHLGDHELKEMLLKKYSGCLSRLRSEFLKKRKKGKLPKDARTVLLEWWNTHYRWPYPTEEDKVRLAAMTGLDPKQINNWFINQRKRHWKPSEDMRFALMEGVAGGSSGTTLYFDTGTIGP

SEQ ID NO: 69900 - protein, 269 aa, Zea mays subsp. mexicana
  Clone ID: UC-ZMROTEOSINTE032G04_FLI.pep
AYKNIVAADDFPAELRKKITRVIDVTKLKAKYGQYEAQRKLFAEHDVFLGDDRIINRLPKILGKTFYKTTLKRPVPVVLKPKARKVDGKRTKPQKKEGEVNAATPAEIAKEIEKALGSALVSLSPSTNTAVRVGFSDWTPEQIAANVEAVAGAVVEKWVPQQWRNVKSIYIKGAETAALPIWMTDELWLDEKDVIADSEGKASEKANIGKKRKNVEEQAEAAPAAKKAKKAAKEEKPKPDSNDDKLDQQISDRKTRLRSAKAKAAKASE

SEQ ID NO: 69901 - protein, 188 aa, Zea mays subsp. mexicana
  Clone ID: UC-ZMROTEOSINTE025H05_FLI.pep
TTSERGTRGGRRERRRLSPLGVPVPQPLVCCLPACKKEFVMASKRILKELKDLQKDPPTSCSAGPAGEDMFHWQATIMGPPDSPYAGGVFLVNIHFPPDYPFKPPKVSFKTKVFHPNINSNGSICLDILKEQWSPALTISKVLLSICSLLTDPNPDDPLVPEIAHMYKTDRPKYESTARSWTQKYAMG

SEQ ID NO: 69902 - protein, 178 aa, Zea mays subsp. mexicana
  Clone ID: UC-ZMROTEOSINTE030A03_FLI.pep
GVAERRGIPAAAFVEDVEAYLRQAGLDVNSALAFLQERLQQYKIVEMKLLAQQRDLQAKIPDIEKCLDIVSTLQAKKDLGEALIADFELSEGIYSCAKIEDTDSVCLWLGANVMLEYSCDEANALLKKNLENAKASLEVLVADLQFLRDQQTITQVTIARVFNWDVHHRRSKQAVKEP

SEQ ID NO: 69903 - protein, 392 aa, Zea mays subsp. mexicana
  Clone ID: UC-ZMROTEOSINTE033A08_FLI.pep
LIQEGKFEWRKDREDVHMNIEAALIERVGEPAKKLHTARSRNDQIVTDLRLWCRDAIDKILIRIKQLQVSLVILASKYVDLIVPGYTHLQRAQPVLLPHLLLSYVEQLERDAGRLVNCRERMNFCPLGACALAGTGLPIDRFQTAKDLKFTAPMKNSIDAVSDRDFVLEFLAANSIAAVHLSRIGEEWVLWASEEFGFLIPSDKVSTGSSIMPQKKNPDPMELVRGKSARVVGDLMTVLTLCKGLPQAYNRDLQEDKEPLFDSVKAVLGMLEVCTEFAQNISFNSKRIQSSLPAGYLDATTLADYLVKKGVPFRTSHEIVGRSVALCVNKNCQLAELELADLKSVHPVFEDDVYEYLGVENAVNKFISYGSTGSEQVKKQLEDWRIQLGVSS

SEQ ID NO: 69904 - protein, 218 aa, Zea mays subsp. mexicana
  Clone ID: UC-ZMROTEOSINTE020B02_FLI.pep
EPPPAPAPAASKKNSASVGAKRKGGPGGLNKVCGVSPELQAIVGEPAMARTEIVKQLWAYIRRNNLQDPNNKRKIICNDELRLVFETDSTDMFQMNKLLSKHIRPLESKNDSKPEAKKLKPQGDEPISSVETDVNQLPLMVSDALATFFGTGEREMVHSEAVKRVWDHIKSNDLEDPENPTVILCDSKLKQLFGRESLTAHGVSELLSDHLYTQSTNI

SEQ ID NO: 69905 - protein, 439 aa, Zea mays subsp. mexicana
  Clone ID: UC-ZMROTEOSINTE033D04_FLI.pep
GIVNNGCNKLDCSFYCVSCGKINWLMRSLQKQLAIAREARRVDVLCERLSLSHKMVKGSERYKEITSIISSAAKTLEKEVGGALDQVSAITGRGIVNRLTCGAEVQKLCSSALEIVDSTVDSILEFESNNSPKLLGTQPQILFDEITPFSVVIVLNYQDSIGKEQVDGSKVWHRSAKVCNYSSEPTCHILRPNTRSLVSGLSPSTEYFFKVLPFSSVQGFTEWEAKCSTRSLDHGSSQCSTQNSESMCLKEDPMKHQKKDLNVQNHQRTIQYDSPKGSTNSSENNLLCDRYSKRAKVARLDGASDNDESQLPPTSEVLPFASSNYSPSEAPSKPDLLIGTPDSASKNYVEQQYEYCVKVVRWLEHEGHMDNDFRVKFLTWFSLKATSQDRRIVGALVDVLIGDPASLVAQLVDAFKDIIYTKEKPFQTQQKDARCKIWH

SEQ ID NO: 69906 - protein, 322 aa, Zea mays subsp. mexicana
  Clone ID: UC-ZMROTEOSINTE036B01_FLI.pep
ENVAREIINHRSLRHPNIIRFKEVVLTPTHLAIVMEYAAGGELFDRICSAGRFSEDEARYFFQQLICGVSYCHFMQICHRDLKLENTLLDGSPAPRLKICDFGYSKSSLLHSKPKSTVGTPAYIAPEVLSRREYDGKMADVWSCGVTLYVMLVGAYPFEDPDDPKNFRKTIGRIVSIQYQIPEYVHISQDCRQLLARIFVANPAKRITIREIRNHPWFLKNLPRELTEAAQAKYYKKDNGAPTFSDQTVEEIMKIVEEARTPPQSPAPVAGFGWAEEEEQEDGKKPEDDEQDGEDEQYDGEDEYDKQVKQVHASGDFRHLIK

SEQ ID NO: 69907 - protein, 102 aa, Zea mays subsp. mexicana
  Clone ID: UC-ZMROTEOSINTE039C08_FLI.pep
LIFFSLYSAKQWKRMVTKATFVGAGFTRKPPKYERFIRPTGLRFTKAHVTHPELKCTFNLDIISVKKNPNGPMYTSLGVMTRGTIIEVCQTFFTILCSTLCS

SEQ ID NO: 69908 - protein, 119 aa, Zea mays subsp. mexicana
  Clone ID: UC-ZMROTEOSINTE042H08_FLI.pep
CGICCDIQVHLHAGTDEPLNITFMRAPSSALLKIDVPLMFIGEDASPGLRKGAYFNTIKRTAKYLCPADIVPPYIEVDLSELDVGQKLLMRDLKVHPALKLLHSPDQPICNFTGSRSPE

SEQ ID NO: 69909 - protein, 159 aa, Zea mays subsp. mexicana
  Clone ID: UC-ZMROTEOSINTE030B07_FLI.pep
ADIYGSSGCIGNLRKSQSLPDSKPKRSLRKKSLDSSTGNRRRWQSSLEAMEKNVSISVSLEGNISSIPNSIVNDSKTLMENGVDTSFINHAAKEWTEMRRQWVGHQAEVPRKAPQEPVISWSATYDDLLSTSERFPQRIPLSEMVDFLVDIWHEEGLYG

SEQ ID NO: 69910 - protein, 94 aa, Zea mays subsp. mexicana
  Clone ID: UC-ZMROTEOSINTE033F03_FLI.pep
FLFQACVGEILDEQRVGLAGGAQPFSHHLFKHPPRLLCPPGVEQNLNARGVADDGRPALRLHLRPHPHAPSTSPARASQYMTVVKVTALGATRR

SEQ ID NO: 69911 - protein, 97 aa, Zea mays subsp. mexicana; identical to SEQ ID NO: 56889
  Clone ID: UC-ZMROTEOSINTE021A01_FLI.pep

SEQ ID NO: 69912 - protein, 290 aa, Zea mays subsp. mexicana
  Clone ID: UC-ZMROTEOSINTE024A09_FLI.pep
CFLLFTASPRVRAFSVALLQLRRRRRRRPTPVAEPFIALLAGDEHPPQQVFHPQKAKMIKRRYFRQDHGDNSGSSSSSSSDCDSDNDLAEEAVSSEEVEEQEEEEAVKEESGEEEEGELEQQIVEGSSGYQSEDNSWNDVDGASIDDDEHSSPRDEERHEISLPIMKSSGANADSAKSADNTDDAVDADFPNCILKCKSVFKCKLCPRIMCLNVEMVKIHLKSKRHARSEKLLGEGRLKLMLNSDGELEEEQETHAERHARTIALSQQVQKQKKDSGRQRQNRRKKKVSG

SEQ ID NO: 69913 - protein, 182 aa, Zea mays subsp. mexicana
  Clone ID: UC-ZMROTEOSINTE027C02_FLI.pep
QMTGYVSTRYYRAPEIMLTWQKYDVEVDIWSAGCIFAEMLEGKPLFPGKDHVNQFSIITELLGSPPEDVIHTICSENTLRFVQSLPRRERIPLSQKFKNADPAAVDLLERMLVFDPKKRISAAQALAHEYLAPYHDPSDEPVAAEKFDWSFNDADLPVDTWKIMMYSEILDYHNVDQNDPSL

SEQ ID NO: 69914 - protein, 133 aa, Zea mays subsp. mexicana
  Clone ID: UC-ZMROTEOSINTE033G04_FLI.pep
RRLRPHHRHRRRRRKACWTRSRRSYPVATRSRKTLPPPPPRRPSTRHRRRRRTPRSTSAALMARRACWARSWTRYPATTRARVKKTARTPPASTRPAPKVAACACPSYVLAGRALLGARSEALRWRVCASGLL

SEQ ID NO: 69915 - protein, 349 aa, Zea mays subsp. mexicana
  Clone ID: UC-ZMROTEOSINTE040B03_FLI.pep
ADDLLPDLLQGRVTVRGRPDEDAVLCTPCATYSMKFVGTSNSMFLIPPGEPSAKCLRPDNTSGNANALAATIKLAPGSIELVRVAPRLDKLKSLLRERPYILDEDIGDDDLQHKNKEGLYTWQDLCKLIQASDGELLDALNALSAVDIDGFWRTVDASSVNTILDMILHNSVLRDWPLKAMPESDVLSVMGSDGFTHNIVTHCLNRFGTKVEQEARSFWSLDEKRVCLQFARRALGAGKMKLSNFMEKWKRSIPSGMCCPDLQMLEGEVLCEKLGAETWVHAFSVTDLPLAPAERFAALFRERAKWEWKDLQPYIRDLHVPGASSEGLLIKYTRRSQPNAEAEPIFTAR

SEQ ID NO: 69916 - protein, 231 aa, Zea mays subsp. mexicana
  Clone ID: UC-ZMROTEOSINTE043C09_FLI.pep
STGAFIGASRYASATMIPPSIISRGVGWQGIGLLLDSFFGTANGTSVSVENIGLLGLTRIGSRRVVQISAGFMIFFSVLGKFGALFASIPLPVFAGMYCLFFGYVGGVGLSLLQFCNLNSFRTKFIMGFAFFMGLSVPQYFNEYTAVASYGPVHTGARWFNDMINVPFTSKPFVAGLVAYILDNTLQVKESAVRKDRGNHWWEKFRSFKKDARSQEFYSLPFNLNKFFPSV

SEQ ID NO: 69917 - protein, 196 aa, Zea mays subsp. mexicana
  Clone ID: UC-ZMROTEOSINTE024C02_FLI.pep
TRSSESASDVTENTNSNCKQAGSKCCSAESSSTIQVRFWQDIPILVMVSMLAYFCFLEQLLVTDLQSRALAISLPFSCVLGLLSSMIASTMVSKSYLWAYASFQFAIVILFAHIFYNVLKVNPVLAVLLSSFTGFGIAISTNSLLVEYLRWRARRNQRLAQQAANAAHHQESGNDGGNDNDGAQQGHDPNSGNNAV

SEQ ID NO: 69918 - protein, 275 aa, Zea mays subsp. mexicana
  Clone ID: UC-ZMROTEOSINTE031C04_FLI.pep
SADGTYALKKVLVQSDQHLELVQQEIRVSSQFSHPNLLPLLEHAIVAVKGVQDGSQNYEAYLLFPVHLEGTLHDITKTMLEKKEFFPTITVLQIFRQLCSGLKHMHSFDPPYAHNGVKPDNVLITQRKQSHLAILMDFESAGPARKTIRSQAEALQLQEWASEHCSSHYRAPELWECPSHADIDERTDIWSLGCTLYAMMYGKSPFDYELDESSGESLHSVIKNVQIKWPEEAGSTYPDSLRQFITWMLQPHPAVRPHIDDIIIHVDKLVMKYSN

SEQ ID NO: 69919 - protein, 239 aa, Zea mays subsp. mexicana
  Clone ID: UC-ZMROTEOSINTE040G09_FLI.pep
MILSKEEMEEVVMKRCWLARYWGLAVQYGIYPDISMSKHEYWSSLAPLPFEYVTSAGQRAKDGSEAEGNGLEDVDKLVHDLTVTAGEGNVETMLAVDKGLQELAFLKVEDAVLFALAQHHRTNVAGAADPDIKSSGDEKFTEAFDLSKEEEEDVQFKQAWLIFFWRRAKTNNVEEDIAEERLHMWIDRHGQQPTSHDAVDVEQGIHELRKLGIEQLLWELSRHEANLAKDSPSDVEDLT

SEQ ID NO: 69920 - protein, 331 aa, Zea mays subsp. mexicana
  Clone ID: UC-ZMROTEOSINTE028C02_FLI.pep
LKSVIQGFLPGIILKIFLILLPTILMAMSKIEGHTSLSGLDRKTATKYYIFLFVNVFLGSVITGTAFQQLDNFIHQSANKIPEVVGESIPMKAAFFMTYIMVDGWSGIAAEVLRLKALVIFHIKNAFLVRTEHDREQAMDPGSLDFYNCEPRLQLYFLLGLVYAVVTPMLLPFIIVFFSLAYLVFRHQIINVYTQHYESGAQFWPDVHMRLIIALIVSQILLLGLLSTQEAEKSTVALLPLPVLSIWFHYVCKGRFEPAFVKFPLQDAMVKDTLERAHDPTLNLREYLKGAYVHPVFQKNDIYKVIAVDEEEKNPMVVTKRQSRMNAPAGS

SEQ ID NO: 69921 - protein, 126 aa, Zea mays subsp. mexicana
  Clone ID: UC-ZMROTEOSINTE031C10_FLI.pep
HTFLQKSFQELLRKQNGDRAIWEYPFAVAGVNITFMLIQMLDLQSVKPRSLFGAVFLKLLSENDQAFDILYCITFKLMDQQWLDMHATYMDFNTVMKSTRRQLERELLIEDIQRIEDMPSYRLLAR

SEQ ID NO: 69922 - protein, 197 aa, Zea mays subsp. mexicana
  Clone ID: UC-ZMROTEOSINTE034D09_FLI.pep
DCWEVADTHCSSFFPGYKFPLDLVLRIDRYIALLSGFSVPPGCMRTCLVAVNSNSVNSSFNIECGDATDANFEKYNLSRGSVAGILTLDTVADYLPRRGPLKQRRTGIAYIANVAVRKEERRKGIAKMLVQEAEARARSWGCRSMALHCDVNNVAALRLYRNQGFKCIRVPEGAKWPEPKIAKGAEYNFMMKLVAKA

SEQ ID NO: 69923 - protein, 354 aa, Zea mays subsp. mexicana
  Clone ID: UC-ZMROTEOSINTE041A10_FLI.pep
TETRESASSSAELPWGSGDSSEDKRLGFVELARSMGISQDTHESMATDAANYLCHQLQHLLGPISSATSQSGPWEERSAMVRLTQKLQKYKRNKRWRQRRRKHVAELFQKERADYDRVDQEADEWRAKQIAKDIAKRRVESMQQIARKKTNEERKRLESELELALMVEKLQELRSIRVQKMKKQGHFLPEEDDKYLERVKAAVEEEERQAASAARTDAVKDAILTAEESRKPLQYTNSQEGDSERPKSGPSEDEDQGDGGMSERNNQASQKTEHEDEGHRFEGKGHGHHDPVSNLPFEFYHYYHGSDYDMGTLIEVRRMWDSFIRPGGSRIPGHWVQPPPPADEVWASYLVQHK

SEQ ID NO: 69924 - protein, 238 aa, Zea mays subsp. mexicana
  Clone ID: UC-ZMROTEOSINTE043H01_FLI.pep
FLGLFFMAGSILLIFLTLLAGSRNTTPLNEVYFLQADTGNIPGAPSTSRWTFWNLCGVTDGGRNDCGSSHPAFPLDPPSHRNFDTTENVPSQFIGTNHYFLMTRFMFPFIIIGLFFAVVSLFTGLLAMCTRIGSYLSGFVAWLALTFQVITTCLMTAVFVQARHAFNSNGQNSKLGVKAFAFMWTASACLFLSCLMYCLGGAVGRKDDGYSGRKERRRGFFNSARSNSVRSQKKESYA

SEQ ID NO: 69925 - protein, 113 aa, Zea mays subsp. mexicana
  Clone ID: UC-ZMROTEOSINTE021D11_FLI.pep
DWLKTMVSTRNSDGVVDPKIPKKPSSRALKKALLVALRCVDPDALKRPKISHVIHMLEVDDFPYRDDRRGTRAPGQARLPETPAGGSGRPETDSSGNGGSTQAEPFRWRNPEA

SEQ ID NO: 69926 - protein, 469 aa, Zea mays subsp. mexicana
  Clone ID: UC-ZMROTEOSINTE031F10_FLI.pep
YKPSLNDVSSYLILYWVPTRRDGKVGDPLMAISDGPVMAAFPSVSDVHLEQKSSDVYCGLGIYYGGYEGLSLYRWYRESSDGTRLHIDGADSVTYEVTDADYSCRLLFGYTPVRSDGISGEEKLSEPSDVILPELLKIETLNFKGNQVERETLTAAEQIPYSEIQQHIWKNYKKEMKYQWFISNGSGGDQSFEPLATQCSRSYKVRFEDIGRCLKCECFVTDVFGRSSELVSAVTAPILPGRPKIEKLEIEGRGFHTDLYAVQGTYSGGKEGKSKIQWLRSMVGSPDLISIPGETGRTYEANVDDVGYRLVAIYTPVREDGVEGQPVSVSTEQIAVEPELYREVKQKLDDGSVKFEVLCDKDRTPKKAQVMGHLERRVLEVNRKRIKVVKPGSKTSFPSTEVRGTYAPPFHVELYRNDQHRFKIVVDGDTEVDLMVQTRHMRDRIILTIRGLAQKFNSTSLNTLLRIEA

SEQ ID NO: 69927 - protein, 193 aa, Zea mays subsp. mexicana
  Clone ID: UC-ZMROTEOSINTE034E09_FLI.pep
RDRRLPHLLAPVPGSASGPSPSPTPFRSRRPAQHPETPAAPRTHKVIMSGMASDDSPAQVNVEGDVSEKKVELEDQNEVGGMPSRQEEEAAIKKKYGGILPRKTPLISKDHERAYFDSADWALGKQGGVPNKPKGPLEALRPKLQPTQQNARARRTSYASADSDETLNLSPEDLVPQGEPSQQGEPVEDKNKE

SEQ ID NO: 69928 - protein, 258 aa, Zea mays subsp. mexicana
  Clone ID: UC-ZMROTEOSINTE041G09_FLI.pep
LVDAVKNVYDGLKRLHLERKIELFTPHSEAVFATSYPPSACVFKEELMPYMKPLLDFFAMIGSPFYVNAYPFLAYISDPEHIDINYALFKPNKGIIDPNNSLHYDNMFDAQVDAAYAALHAAGYDNMEVRVAETGWASSGDQNEAGASSENARTYNFNLRKRLFLRTGTPLKPKRPVKAYIFALFNENQKPGAGSERHYGLFLPDGRISYDIGVSGLLPSSASSSVLSIKNVQAGGWILQHWATVLLCSFHFLGAIVT

SEQ ID NO: 69929 - protein, 165 aa, Zea mays subsp. mexicana
  Clone ID: UC-ZMROTEOSINTE047A07_FLI.pep
DDQESGSLFTNSNWFAFDEDKALNDGLVSSEASPSPNSEISALKEDDEHDEVILGEIIDEIKGSEPTLPFSNKDADKESGSTGLANGTVDKFEDDIRPPTPDVKESQPEFVEWKEEEAEPGDVAEKDTAVPDIEVENEKQLDSMDDVMLCDAKLGEEKKSDELGI

SEQ ID NO: 69930 - protein, 231 aa, Zea mays subsp. mexicana
  Clone ID: UC-ZMROTEOSINTE049E03_FLI.pep
SRPAVMATEQAAENYTVEDLVALNPYNPDILNDLEKFVNEQVSSQTYNLDANLSLLRLYQFEPERMSIQIVAHILIKALMAMPAPDFSLCLFLIPEHVQMEEQFKVLIVLSHYLETARFSQFWDEAAKNRHISEAVPGFEQAIQSYAIHVLSLTYQKVPRPILVEAINIEGLALDKFLEYHAANSGWVIEKGGQSQVIVLPRNEFNHPELKKNTADILPFEHVTRIFPVLG

SEQ ID NO: 69931 - protein, 355 aa, Zea mays subsp. mexicana
  Clone ID: UC-ZMROTEOSINTE072A06_FLI.pep
EILGIQDERYWPLMSPLPSYGYGREHKGPRYGSLIHGQDLKHVTITGHNGTINGQGQSWWVKFRRKLLNHTRGPLVQLMRSSNIIISNITLRDSPFWTLHTYDCKNVTISETTILAPIAGAPNTDGIDPDSCENVVIKNCYISVGDDGIAIKSGWDQYGIAYGRPSANITIQNVVIRSMVSAGVSIGSEMSGGVSDVLVENVHVWDSRRGVRIKTAPGRGAYVTNVMYQNITFENVRVGIVIKTDYNEHPDEGFDPKAVPTIGNISYTSIHGHRVRVPVRIQGSAQIPVKNVTFHDMSIGIVDKKHHVFQCSFVQGQVIGYVFPVPCKNLDLYDERRGLVKQSTLQNISDIDYSF

SEQ ID NO: 69932 - protein, 188 aa, Zea mays subsp. mexicana
  Clone ID: UC-ZMROTEOSINTE047C01_FLI.pep
SSKKIEEQNEQLHQSRVQHSHMNDVCLIRIFIDTFVIRKLVERTDVQLIAQHATNATKSSAKLRPFLRFVGNKLKCAPKLFVLIGKPFQERSFLLNLQLSIGRWITEMTLVSFLLFIQMFDNSFSSCSILKHISVDIKVFPHYQCFHSAHFKGFQCVINTKHILTRILTNFFKILSNQLFLLYELHIC

SEQ ID NO: 69933 - protein, 147 aa, Zea mays subsp. mexicana
  Clone ID: UC-ZMROTEOSINTE059C11_FLI.pep
GRDPSTDFRGAGFISLENLLFFAKTFSASFQRLLNKQCGNRATWEYPFAVAGVNITFMIMQMLDLQSTKPRTFVRAIFIQMLSEDEWAFDLLYCVAFVVMDKQWLDKNASYMDFNEVLKSTRAQLERELMLDDVIRIEDMPSYSLLC

SEQ ID NO: 69934 - protein, 194 aa, Zea mays subsp. mexicana
  Clone ID: UC-ZMROTEOSINTE059E11_FLI.pep
CFELTLEISDTKWPKADELPIIWEHNRMSMLNLLASLIKSGVHGRIFAADTGRPVPGSVMIKGIDSKVSASSTFGDYHRIVAPGETYEVVASMRGFRQKSTRIRLEQEAVSLDFILDPDGADGQTKLLPRSNDRGCRCDNDNAAKPFHVHEAHLWLYLLIVSVLLALYVVFKRKTVPRLLAYRHSSSLRRPVAV

SEQ ID NO: 69935 - protein, 110 aa, Zea mays subsp. mexicana
  Clone ID: UC-ZMROTEOSINTE063C05_FLI.pep
PNEISTLAEFTHPSKLRKLEDGTSVPGMVNSSHAVYTVPLQAVGPSGPSGSYSAGSVNLQQPGNEEQLTPDVESALLQQVLQLTPEQLSSLPPEQQQQVIELQKMLSVSK

SEQ ID NO: 69936 - protein, 161 aa, Zea mays subsp. mexicana; identical to SEQ ID NO: 60868
  Clone ID: UC-ZMROTEOSINTE072A11_FLI.pep

SEQ ID NO: 69937 - protein, 166 aa, Zea mays subsp. mexicana
  Clone ID: UC-ZMROTEOSINTE059G10_FLI.pep
SVVPLLWRWRRSSRLLLLLPVLYIYSFPSQIVTDVHSACLIVPGIRSRPCPRSTMKVVAAYLLAVLAGNASPSAEDLTGILESVGCEVDNERMELLLSQLSGKDITELIAAGREKFASVPCGGGGVAVAAGAPAAGGAAPAAEAKKEEKVEEKEESDDDMGFSLFD

SEQ ID NO: 69938 - protein, 161 aa, Zea mays subsp. mexicana
  Clone ID: UC-ZMROTEOSINTE064F05_FLI.pep
KKFLYLPVQQLAHPTGALLVLWITNREKLRAFVEKKLLPSWGVEDSTVFYWLKVKPDGSLIGDLDLFHHRPYECLLLGYINVNANAKKGSNFKLLERSQVIMSVPGAHSRKPPLEKLLSEYIPGPKPSRCIELFARELFPRWTSWGNEPLHFQDTMYFSET

SEQ ID NO: 69939 - protein, 357 aa, Zea mays subsp. mexicana
  Clone ID: UC-ZMROTEOSINTE069C11_FLI.pep
LPFPEYTDPRYGPLNLTVKLPDGALKPDLGPKTYIAYGFYQELGRGDSVTKLHCDMSDAVNILTHTAQVPYARYQLEKIEETRKKMKEQDLQELYGVSELNLSSPFTDSRNISADEMSKTSCLDVNDVPPVNTESEVQSGAGQCSDYIDKDRSYAGMHNGERTGGALWDIFRREDSDKIQDYLRKHATEFRHIFCNPVKQVIHPIHDQTFYLTEEHKRKLKEEYGVEPWTFEQKLGEAVFIPAGCPHQVRNLKSCIKVAMDFVSPESVNECMKLTGEFRRLPPDHRAKEDKLEIKKIALHALNQVVNFLDPSSEWSKSWFAQPKNKKKAGAEEQEKPKRKRGRPCRKSNDEAAGDRH

SEQ ID NO: 69940 - protein, 140 aa, Zea mays subsp. mexicana
  Clone ID: UC-ZMROTEOSINTE045C04_FLI.pep
PWFCNCTNDLNSQGQAVFATGSPFDPVEYNGKIHVPGQANNAYIFPGFGLGVVMSGAIRVHDDMLLAASEALAQQVTEENFEKGLIYPPFSNIRKISAHIAASVAAKAYELGLASRRPRPKDLVKYAESCMYSPIYRNYR

SEQ ID NO: 69941 - protein, 323 aa, Zea mays subsp. mexicana
  Clone ID: UC-ZMROTEOSINTE045C05_FLI.pep
VAYVLPMTPCLLYGLYYGGFLIQFLIEKMGMMGSLPKPYGYFVPDVIVGAVVGLVVGWCFGPLSPVASRWLSKTSIIHGFLQITVVALAISSQLFPYSTGAPKRVVLQHTFVTDANNIVDSSYGFSVVDSNSLEFLFNNAPEAAKWLKDNSELSFEEKYRSDRSSWLALYPVPFLFSGSLKFQAQTEEIKKYYQHFPQLAVQEIWDNNGQRRVHLKLALGSLSEIWTSVLNITGPLSNWSFADNMLPAPQTVSGGPPSYICRLSGKSDVDWSFWLEANSSESLRVDVAVLDQYLVDSTKKLKSLFPSWADLTAFTTFFSTYHL

SEQ ID NO: 69942 - protein, 262 aa, Zea mays subsp. mexicana
  Clone ID: UC-ZMROTEOSINTE047H03_FLI.pep
SLAEHNTLSRGAHRTAQCTDDDHETLNSTRTHQTYQSRATTVPHTRVASLKPKTRRRDANATRPFTSRPCLLQPEIWMLLTSGFLTSALGTVTVSTPFSSAALTSSVLAFSGRRKRRTNWPLLRSTRCHLSPLSSFSLLRCPLMSSTLPSSTSTFTSSFFTPGRSALNTCASGVSFQSMRALAKAAVSEAAADDGDDGTMERNMLSKGSKRSTENGSNTLLRLTSDISASLLAAWCVRVRTAEVELCPVDWRISVRVACCDG

SEQ ID NO: 69943 - protein, 168 aa, Zea mays subsp. mexicana
  Clone ID: UC-ZMROTEOSINTE060E11_FLI.pep
VEDLKYCLPGTSIVVTATNFCAPNYGLPADAGGHCNPPNHHFLLPIQSFEKIALWKAGIMPIQYRRVKCLREGGVRFSVNGRHFFFTVLISNVGGAGDVRSVKIKGTELGWLPMGRNWGQVWHINCDMRGQPLSFELSSSDGKTLTSFNVVPKDWEYGKTYTGKQFLL

SEQ ID NO: 69944 - protein, 541 aa, Zea mays subsp. mexicana
  Clone ID: UC-ZMROTEOSINTE047H11_FLI.pep
RELEPEEYTKWSQSFKEANSSLNDREWKVAEVCQKLEHSLEILGVSAIEDRLQDGVPETIEILRQSGINFWMLTGDKQSTAIQIALLCNLISSEPKGQLLHINGKTQDEVARSLERVLLTMRITSSEPKELAFVVDGWALEIILSRYTEAFTELAVLSKTALCCRVTPSQKAQLVKLLKSCDYRTLAIGDGGNDVRMIQQADIGVGISGREGLQAARAADYSIGKFRFLKRLILVHGRYSYNRTAFLSQYSFYKSLLICFIQILFSFLSGIAGTSLFNSVSLMAYNVFYTSIPVLTTVLDKDLSEKTVMQNPEILLYCQAGRLLNPSTFAGWFGRSLYHAIIIFLITIHAYANEKSEMEELSMVALSGSIWLQAFVVTLEMNSFTSVQLLAIWGNLIAFYALNFFISSIPTSGMYTIMFRLCRQPSYWITLVLISGVGMGPVLALKYFRYTYRPSVINILQKAERSRGPMYTLLNLESQLRSDSMMVAGSTAPAKNKSSVYEPLLSDSPMASRRSLAPASSFDIFQPAHSRTSHPRNIKAN

SEQ ID NO: 69945 - protein, 240 aa, Zea mays subsp. mexicana
  Clone ID: UC-ZMROTEOSINTE057B06_FLI.pep
LLERYMEVQGLWHLLKLSSLISTQKKQYLAKRSWLHSLNILLAWLHLISLSVMKVMLLWLTTTATWLKFWLDEGIRCCYVISGLLLALTIFRALCRRYFGHKRTIRPNAKRLYPLFLNRGNMSWDAFSSKVHMVQKGFMGEPKELRPGRGEFHENPSTCICERTDGKAVARAKSQDDQVLNSVADQGKGIGEPAVPNHTDEEAGEPDDDGDVPADKEVVDAEMVDDVLAGDPELEQILSD

SEQ ID NO: 69946 - protein, 184 aa, Zea mays subsp. mexicana
  Clone ID: UC-ZMROTEOSINTE061B12_FLI.pep
VQSLSIYLASVSSILGARTIWWTRCCIPGFNSLSQKFSYSSLSPAFFFTSTITRGGVSSNISAPIVNGPLTPSLVPSRQMRQSFLRNLKLFSFAMSSNLVMISDMGSAEMNLTSSPFSSNNPDKLNPLENDMISKALRLAGRGREPRGLWLSSDNIEAGQDEIDESESDPDSSPSTFGGGRGGG

SEQ ID NO: 69947 - protein, 116 aa, Zea mays subsp. mexicana
  Clone ID: UC-ZMROTEOSINTE073E01_FLI.pep
THVKWYKNGEFLSPDDEKVVREKLLSHHPRAEEKIGCGLDGIMVDRHPEFKSRCLFVVRTNGDWEDFSYHKCLRAYLQKKYPSYSDKFLKKHLVNKSSNLFRVQKKAMVDPLPAGS

SEQ ID NO: 69948 - protein, 174 aa, Zea mays subsp. mexicana
  Clone ID: UC-ZMROTEOSINTE048F05_FLI.pep
QTWTTLPSMNRARQMCSGFFMDGKFYVIGGKSERHNEILSCAEEFDLESSTWRLIPDMAQGLNGGSGAPPLVAVVNNELYAADYATKEVRKYDKENNAWITLGLLPGRYTSVHGWGIAFRSCGDMLIVIGAMSAGGSGVIEICSWVPNNGLPDWKIIGTRRSGSFVYNCAVMSC

SEQ ID NO: 69949 - protein, 454 aa, Zea mays subsp. mexicana
  Clone ID: UC-ZMROTEOSINTE058D05_FLI.pep
RVLTRISDKLQLHSMADIKKESLALHEMVISSGGEPDACVDEMSSLLKKLKDCVVTEAPTTETPNAQSTSIKHTSPIIPDEFRCPISLELMQDPVIVSSGQTYERSGIQKWLDSGHKTCPKTQQLLSHTSLTPNFVLKSLIAQWCEANGIELPKNKANSRDKKAAKSSDYDHAGLVSLMNRLRSGSQDEQRAAAGEIRLLAKRNVNNRICIADAGAIPLLVNLLSSTDPRTQEHAVTALLNLSIHENNKASIVSSHAIPKIVEVLKTGSMEARENAAATLFSLSVVDENKVTIGGAGAIPPLINLLCDGSPRGKKDAATAIFNLCIYQGNKIRAVKAGIVIHLMNFLVDPTGGMIDEALTLLAILAGNPEAKAVISQSDPIPPLVEVIKTGSPRNRENAAAILWSLCCTDIDQTRAAKAAGAEDALKELSDSGTERAKRKASSILELMRQAEEA

SEQ ID NO: 69950 - protein, 114 aa, Zea mays subsp. mexicana
  Clone ID: UC-ZMROTEOSINTE061E12_FLI.pep
VFVPELDSTNPKLMTESRIIRIARGSGRPVRDVIDMLEEYKRLAKIWGKMKGLKIPKKGEMSALSRNMNVQHMSKVLPPQMLKQIGGMGGLQSLMKQMGSKEMSGMFGGMGGER

SEQ ID NO: 69951 - protein, 181 aa, Zea mays subsp. mexicana
  Clone ID: UC-ZMROTEOSINTE067G04_FLI.pep
QAEAAQQQPTPSILFPLLASLPRRIPPPSAVPVPFRRASSPEMANARSGVAVNDECMLKFGELQSKRLHRFLTFKMDDKFKEIVVDQVGDRATSYEDFTNSLPENDCRYAIYDFDFVTAEDVQKSRIFYILWSPSSAKVKSKMLYASSNQKFKSGLNGIQVELQATDASEISLDEIKDRAR

SEQ ID NO: 69952 - protein, 281 aa, Zea mays subsp. mexicana
  Clone ID: UC-ZMROTEOSINTE070B10_FLI.pep
RAAAERAQQEARKRAERAAVERAATEARERQAAAAAAAATAAAAAASREKQSTPDDLESFFGVGSRANSAPKQRAPTPTVDSMFGFGAQGRGTTNGSQRAASTSAPVRKVASATSFGDDLSDLFGAPASSDVFQEVEGESEERRRARLERHQRTRERAAKALAEKNERDMQVQREQAERDRIGDTLDFEIKRWSAGKEGNLRALLSTLQYILWPECGWQAVSLTDLITGAAVKKQYRKATLCIHPDKVQQKGATLQQKYIAEKVFDILKEAWNKFNSEELF

SEQ ID NO: 69953 - protein, 228 aa, Zea mays subsp. mexicana
  Clone ID: UC-ZMROTEOSINTE046B06_FLI.pep
GDGNAPAPAVEASCSWSGDGIGKSNGGGKRDDRHRMRQYRSQLEQEVKKLQRQLEEEVDLHVALADAVTQNVAPILKSSMKLPHKAQELLINIASLEITVSNLEKKLNDLYYQLCHERNERLLAENNQGCLPSTSSDEHQSLSTCTCTWEEHISSLRDLKFGGSESMRSMRQDLFPELEDDQDMGEDPEGQQIVSLNRLLEKHRDSSLNRLLEKHRDEEVPFMLTLPL

SEQ ID NO: 69954 - protein, 65 aa, Zea mays subsp. mexicana
  Clone ID: UC-ZMROTEOSINTE058G10_FLI.pep
ANTSQREHYGGTVHLFIGTGRSLCKITFMPFIFTIDLRTTQRGLDRLFPFKSVPFSTAEPKLPCA

SEQ ID NO: 69955 - protein, 249 aa, Zea mays subsp. mexicana
  Clone ID: UC-ZMROTEOSINTE061H02_FLI.pep
KKEAQRRVQHVGVQGPFIRSKWSHIPITFSQEDLQLKDHPHNDAMVISCVIKGFLVHNVLVDTGSAADIIFAKAFTQIQEPDDKIHDATHPLYGFGGRQIVELGKIKMPVTFGYIHNTRTEQVVFDIYPYNAIIGRGTLNAFEAILHLAYLCMKIPSKQGPIAVHGSQEAARRAEGSWTDSKAIHNIDETGAYQQYKHKREKATLADQPKPMLLCEDIVEQKVLLGSQLSDEQEKILLRFLFNNKYVFA

SEQ ID NO: 69956 - protein, 260 aa, Zea mays subsp. mexicana
  Clone ID: UC-ZMROTEOSINTE068C01_FLI.pep
AMKMGVEVYHNLKSIIKKKYGQDATNVGDEGGFAPNIQENKEGLELLKAAIEKAGYTGKVVIGMDVAASEFFGEKDKTYDLNFKEENNDGSNKISGDSLKDLYKSFVYEYPIESIEDPFDQDDWSTYAKLTDEIGQKVQIVGDDLLVTNPTRVAKAINEKTCNALLLKVNQIGSVTESIEAVRMSKRAGWGVMASHRSGETEDTFIADLSVGLSTGQIKTGAPCRSERLAKYNQLLRIEEELGDAAVYAGAKFRAPVEPY

SEQ ID NO: 69957 - protein, 139 aa, Zea mays subsp. mexicana
  Clone ID: UC-ZMROTEOSINTE073F02_FLI.pep
LLCELDSICPIFCHLFANLNVETLVAGDRYLKPFVIPKPEVTVVPRAKDDDCLILASDGLWDVVSNEEACKAARRQIQLWHKNNGVTSSLCDEGDESNDPAAQAAADYLMRLALKKGTEDNITVIVVDLKPRKKAKSNS

SEQ ID NO: 69958 - protein, 214 aa, Zea mays subsp. mexicana
  Clone ID: UC-ZMROTEOSINTE058H03_FLI.pep
VRCCDEVDPIARDIGAVNTIVRRPDGKLVGYNTDYVGAISAIEDGIKASESEPTDPDKSPLAGRLFVVIGAGGAGKALAYGAKEKGARVVIANRTFARAQELANLIGGPALTLADLENYHPEEGMILANTTAIGMHPNVNETPLSKQALRSYAVVFDAVYTPKETRLLREAAECGATVVSGLEMFIRQAMGQFEHFTGMPAPDSLMRDIVLTKT

SEQ ID NO: 69959 - protein, 471 aa, Zea mays subsp. mexicana
  Clone ID: UC-ZMROTEOSINTE068D10_FLI.pep
ASLVDPPLPSPRFKMQIFVKTLTGKTITLEVESSDTIDNVKAKIQDKEGIPPDQQRLIFAGKQLEDGRTLADYNIQKESTLHLVLRLRGGMQIFVKTLTGKTITLEVESSDTIDNVKAKIQDKEGIPPDQQRLIFAGKQLEDGRTLADYNIQKESTLHLVLRLRGGMQIFVKTLTGKTITLEVESSDTIDNVKAKIQDKEGIPPDQQRLIFAGKQLEDGRTLADYNIQKESTLHLVLRLRGGMQIFVKTLTGKTITLEVESSDTIDNVKAKIQDKEGIPPDQQRLIFAGKQLEDGRTLADYNIQKESTLHLVLRLRGGMQIFVKTLTGKTITLEVESSDTIDNVKAKIQDKEGIPPDQQRLIFAGKQLEDGRTLADYNIQKESTLHLVLRLRGGMQIFVKTLTGKTITLEVESSDTIDNVKAKIQDKEGIPPDQQRLIFAGKQLEDGRTLADYNIQKESTLHLVLRLRGGY

SEQ ID NO: 69960 - protein, 322 aa, Zea mays subsp. mexicana
  Clone ID: UC-ZMROTEOSINTE076H11_FLI.pep
SLSGHTAPTDDNSRQQLGQPATAAHSRLTTNRLVHLLDLGARAAAAGRGVLVHAASAAHVFTRALVHLGDDGVAEALQLLHLVLELVRLGELVGVQPADGRVDGVLDLLLVIGRQLGRNLLVLDRVAHVVGVVLQRVLGLHLLLVLLILRLVLLSVLNHLLDLLLGETALVVGDCDLVLLPRCLVLGRHVQDAVGVDVKAHGDLWHTTGCRGDAGELELAQQVVVACPGPLTLVDLDQDTGLVVRVGGEYLLLLGGDGGVPRDQHCHNSSSSLQTQGQRGDVQQKQVLHLLIALTAQDGSLDSSTIGDSLIGVDVLAQLLAV

SEQ ID NO: 69961 - protein, 154 aa, Zea mays subsp. mexicana
  Clone ID: UC-ZMROTEOSINTE086E09_FLI.pep
KALVLPPRKTLAPTTMKGKANASKKDEGRLRAGSGGAGKRKKAAASGKPKRPPSAFFVFMSEFRQEYQAQHPGNKSVAAVSKAAGEKWRSMSEQEKQPYVDQAGQKKQDYEKTKANIEKESTSSKKAKTDDDDGSKSEVDDEDGGSDEDNDDDE

SEQ ID NO: 69962 - protein, 152 aa, Zea mays subsp. mexicana
  Clone ID: UC-ZMROTEOSINTE096C09_FLI.pep
PPYLSPRTSGNTTLLYLAAKIDSLRKYASSTGTGCLLYTKHTNARRGDDATRSFLLLEDAADGAIAVNMPNCLPHKVRHRKHSQLREAFVFRQQDGVCHNNFLKDASRQPFNRGRAEKSTMLIHKSSKGISMSEYKGSKLFKPNKASCYFLK

SEQ ID NO: 69963 - protein, 347 aa, Zea mays subsp. mexicana
  Clone ID: UC-ZMROTEOSINTE100A03_FLI.pep
FDHVSVSLTQLHTVPNRREAFADYAEFCFHAFGDRVKNWFTFNEPRCVAALGYDNGLHAPGRCSGCPAGGNSTTEPYLVAHHLILSHAAAVRRYRDKYQLHQKGKIGILLDFVWYEPFSDSNADQAAAQRARDFHLGWFLDPIVHGRYPYSMQEIAKDRLPLFSDEEARMVKGSIDYVGINHYTSFYMKDPGTWNLTPVSYQDDWHVGFVYERNGVPIGAHANSYWLYIVPWGINKAVSYVKETYKNPTMILAENGMDQPGDVSITQGVHDTVRIRYYRDYITELKKAIDDGARVIGYFAWSLLDNFEWRLGYTSRFGLVYVDYKTLKRYPKDSAFWFKHMLSKKRS

SEQ ID NO: 69964 - protein, 140 aa, Zea mays subsp. mexicana
  Clone ID: UC-ZMROTEOSINTE102H03_FLI.pep
LQLETAAGAAIRFFDKAIGINVPRSRFLPVKATSDLLLVQSDLYTLVDGFVIRNPSRANPANPSIELGPEFKKVANFLGRFKSIPSIVELDSLKVSGDVWFGSGITLKGKVTIIAKPGVKLEIPDGDVLENKDVNGPEDL

SEQ ID NO: 69965 - protein, 122 aa, Zea mays subsp. mexicana
  Clone ID: UC-ZMROTEOSINTE107G12_FLI.pep
SALFDRQQEYVKRQTRFVSRKPAKTIVATIEVVAESMSLKVHSQNYKLRLEGASWNRTSQFAVVLEVFQVAPSLFMVDVRKVAGDTLEYHRFYKNLCSRLDSIIWRPIEVSAKSKLLRTTTC

SEQ ID NO: 69966 - protein, 299 aa, Zea mays subsp. mexicana
  Clone ID: UC-ZMROTEOSINTE100D02_FLI.pep
FVPHLLSKTFLECYVQGNIEPSEAKSIVEEIENTIFTTPNSLFKSMSPSEYLIKRVIMLENDLKCYYQTEGLNQKNENSSVIQYIQVHQDDAILNIKLELFSLIAKQPAFNQLRTVEQLGYITSLSLRSDYGVLALQVVIQSTVKDPSYLDVRVDEFFKMFESKIYELSDKDFKRNVKSLIDSKLEKFKNLWEESHFYWGEIEAGTLKFDRVESEVAMLRELKKEEFIEYFNQYIKVDAPQRRTLSVQVFGGNHLVEFKKAINEADPPKMYRITDIFGFKRSRPLYSSLKGGPGRIPMD

SEQ ID NO: 69967 - protein, 165 aa, Zea mays subsp. mexicana
  Clone ID: UC-ZMROTEOSINTE103B12_FLI.pep
GKTAQEVVNEVRRQFIERPGIMDYKEKPDYGRCVAIVASASLREMIKPGALAIISPMAVGIVFRILGHSTGQPLLGAKVVASMLMFATVAGILMALFLNTAGGAWDNAKKYIETGALGGKGSESHKAAVTGDTVGDPFKDTAGPSLHVLIKMLATITLVMAPIFL

SEQ ID NO: 69968 - protein, 212 aa, Zea mays subsp. mexicana
  Clone ID: UC-ZMROTEOSINTE082C07_FLI.pep
GTRNAAAAAASAAISAADGRVHAEPNAGHRVDGAEQQQHAGWWCTFQRRQWRRHRRVYLDVPADGQRHRRGCRVPGERAERATFHELPGTGGAASRAAAWARRRRRRGQRRRGAHGDPRRPQCVPDTGGNGSRGQSWRGRRRRRVWPAAAARWRARRPAREHEHQRLVAADRGVVTEDTMHRSGVAFDLFFVLVSFFFLAFLFVVSFLSHPS

SEQ ID NO: 69969 - protein, 432 aa, Zea mays subsp. mexicana
  Clone ID: UC-ZMROTEOSINTE087A08_FLI.pep
VMKKYNPKLVYPVQSRGNVANLRDIAMDSLEKFGVGIVDPDKIYEFYNDQHSYLSSVGVDGVKVDVQNVLETLGRGFGGRVAVTRKYQQALEESIAQNFKTNNLICCMSHNSDSIFSALKSAVARASEDFMPREPTLQTLHIASVAFNSLLLGEIFIPDWDMFHSKHESAEFHGAARALSGGGVYVSDKPGVHDFSVLKKLVLPDGSILRARYAGRPTRDCLFTDPVMDGKSLMKIWNLNNFTGVIGVFNCQGAGQWVWPVKQTAYVPTNINITGQLSPSDVESLEEIAGDDWNGETAVYAFGSCSLSRLQKHQSLEVSLSTMTCEIYSISPIKIFSEVVQFAPLGLIDMFNSGGALDNISSVADSSATTVHIRCRGPGRFGAYSDTRPELCRVDEHEVEFTLAEDGLLTFYLPPSSSQDNLRHVEIVYKAS

SEQ ID NO: 69970 - protein, 249 aa, Zea mays subsp. mexicana
  Clone ID: UC-ZMROTEOSINTE092F05_FLI.pep
AFLAVVTGMAALVFIRFIVHDHDNLFVAAEAAHALGIGVLIYKLTKEKTCAGLSLKSQDLTALFLAVRLYCSFVMEYDIHTILDTATLVATLFVIYMIRFKLRSTYMVDKDNFALYYVVLPCAGLALLIHPSTSHNIVNRISWGFCVYLEAVSVLPQLRLMQNTKIVEPFTAHYVFALGVARFLSCAHWVLQVLDTRGRLLTALGYGLWPSMVLLSEIVQTFILADFCYYYVKSLVGGQLVLRLPSGVV

SEQ ID NO: 69971 - protein, 292 aa, Zea mays subsp. mexicana
  Clone ID: UC-ZMROTEOSINTE100D07_FLI.pep
PSIPKEQHNSVAHFLESRGMLEEALDIATDPNYRFDLAVQLGSLEVAKEIAIEAQSESKWKQLGELAMSTGKLEMAEECLLQATDFSGLLLLYSSLGDAEGITKLASMSKELGKNNVAFLCLFMLGKLEECLQLLVDSNRIPEAALMARSYLPSKVSDIVSIWKKDLQKVNSKAAESLADPAEYPNLFEDWQIALNVEATVAPKRGVYPPAEEYMTYAERSNDSLVEVFKSMNVEEVPSDNGDPVHEVIEDDGVEGSMEDVVEVEPDDSTDGGVLVNGNDGEEHWVLTPDQQ

SEQ ID NO: 69972 - protein, 314 aa, Zea mays subsp. mexicana
  Clone ID: UC-ZMROTEOSINTE108E03_FLI.pep
REPRFYTKVFKEGHSFDQDGGSFELSLVTCKCIGAYVKNKKNQNQICWLWEKVKSTEDRDFQRFLDNVQYKTSGILRYERVFGEGFVSTGGIETTKEFVGMLDLKPGQKVLDVGCGIGGGDFYMAANYDVHVLGIDLSVNMVSFAIERAIGRKCSVEFEVADCTTKDYPENSFDVIYSRDTILHIQDKPALFRSFFKWLKPGGKVLISDYCKNPGKPSEEFAAYIKQRGYDLHDVKAYGQMLKDAGFHNVIAEDRTEQFLNVLQREIGEVEKNKDAFLADFTQEDYDDIVNGWNAKLKRSSAGEQRWGLFIATK

SEQ ID NO: 69973 - protein, 530 aa, Zea mays subsp. mexicana
  Clone ID: UC-ZMROTEOSINTE077B05_FLI.pep
ILEAPKEEEVSLLLEIFGICLTGGKEVNNAIVSSIQDLAKSFSNYHDEVLVKREELLQFTQSAISGLKRNADIVRIDSEALDLWKKLHEKEASRAQSIGDPDKVTEKTSTIESFKEALNEVRFCSRMEELLLKKKTINTGDSLEIHSQKVEKLKVLATSLANSSSKAEKRILDHRRQKEEALNFRAKKENEVIAVEKDLTAEISELEKQRDELEAQLKKVNISLNAAVGRLKQTREERDQFHEANNQMIFTLQAKENDLSKSIDSCNMEASVVKTWVNFLEDTWQLQLSYNEQKETKTNDELERCTSSFLKLTKHHLSYFKEVLSPSIERIRTYVDNLAVLNSREESIEHGGDDEISEQTSPQKSLEEEYLETEKKIVTAFSIVDRMKKMFYSEQAANSRQDDAEVRTLFSEIEKLREVFESVERPTLDIEVRKAKDPMKDKSGSNRSAKDKSESSHSPVQVPSSPKDVPVESPKSPVKPEQTLDPDSEFAKLELEFGKVNRDHEEIGGWDFDELEEELRADISKSANPK

SEQ ID NO: 69974 - protein, 165 aa, Zea mays subsp. mexicana
  Clone ID: UC-ZMROTEOSINTE092F07_FLI.pep
RTHQARGCAWAPGPPHPLSPSGTRPCTYDCTAYCRQTKAQKEYHVVNSDERSLAAESRSASVPASIVPNSSPISSSVRPRVSGRHVKKNTHESDDAGVEKEAAADGDGAGQRQEGHGDDDARHAVARHADRVAQRAHPQREDLRGVHRRHGPEADGEERHEGQSG

SEQ ID NO: 69975 - protein, 325 aa, Zea mays subsp. mexicana
  Clone ID: UC-ZMROTEOSINTE097B02_FLI.pep
RVHHKHLVSLVGYCISGGKRLLVYEFVPNNTLEFHLHAKDRPAIEWPARLKISLGAAKGLAYLHEDCHPKIIHRDIKASNILLDFQFEAKVADFGLAKFTTDNNTHVSTRVMGTFGYLAPEYASSGKLTEKSDVFSFGVMLLELITGRRPVDTTQTYMDDSLVDWARPLLMRALEDGEYDALVDPRLGKDFNPNEMARMIACAAACVRHSARRRPRMSQVVRALEGNVSLEDLNEGVRPGHSRFFGSYSSSDYDSGQYNEDMKKFKKMAFNNNYTSSQYSAPTSEYGQIPSASSSEGHQTQEMESGAMKKGGYSGGYSSGYSGAS

SEQ ID NO: 69976 - protein, 178 aa, Zea mays subsp. mexicana
  Clone ID: UC-ZMROTEOSINTE103F04_FLI.pep
LWHAYRSKSTWAIFSRHPRLTEPGKMGRGGVVLQSDKRRRHYLRVGLDEVNTLLDVLLQVDEAGVDQLLLVLVDLTDGEDLLNTVGAELDLGGEEVNALVLVQGRLDEGGLNDTLLALGGAEEGLSEASTGHGHGESGRAGTVLGLDDLITTELDAVDEGVTSLTGDRSVVGLREEGN

SEQ ID NO: 69977 - protein, 335 aa, Zea mays subsp. mexicana
  Clone ID: UC-ZMROTEOSINTE087B06_FLI.pep
RMLPSAAPSFLRLPRPTSRLRRATQVAAAGGEADVLPGPGAEGEAAVPGRLEEQRDEPLAGSQLDIGGLAFQGDVGGGFTGGGAGSGASGGGGDGNKMLDRGINTAIVLAASTYALTKLLTVDQDYWHGWTIFEILRYMPEHNWSAYEEALKANPVLAKMMISGVVYSLGDWIAQCYEGKPIFDFDRARMFRSGLVGFTLHGSLSHYYYHICEAIFPFKDWWVVPAKVAFDQTVWSAIWNSIYFVVLGFLRLESPTTIYSELKSTFWPMLTAGWKLWPFAHLITYGVVPVEQRLLWVDCVELVWVTILSTYSNEKSEARNSDSTSTPDASKDNSR

SEQ ID NO: 69978 - protein, 337 aa, Zea mays subsp. mexicana
  Clone ID: UC-ZMROTEOSINTE097E05_FLI.pep
VRSHDVAYWARSFDQDLDKACIEQYSQRCWTTGFGLNFRVIALSPGFRRLSLEHLASSYKKANRRMIFLDYDGTLVPQTSHDKSPSAELISTLNSLCSDMKNTVFIVSGRGRDSLSEWFASCENLGIAAEHGYFIRWNRAAEWETSFSGIYSEWKLIADPIMHVYVETTDGSFIEPKESALVWHYQNTDHDFGSCQAKELVGHLERVLSNEPVVVRRGHQIVEVKPQGVSKGISVDKIIRTLVSKGEVPDLLMCIGNDRSDEDMFESINRATSISELPAAPEVFACSVGPKASKANYYVDGCDEVIRLLKGVTAVSLQKDTAGHSHAAFEDTLEVVS

SEQ ID NO: 69979 - protein, 226 aa, Zea mays subsp. mexicana
  Clone ID: UC-ZMROTEOSINTE101B07_FLI.pep
MSRIIRMQKNSIEVNSKDGLLLGNNLEDLQLLDPCVERADSVPEAEEAMLLAFVHAVQKLGLHSKHGIDEPPIGDLVKLRGYKVVLPDNLRPDSFLPGHGLLELEPVLLTFVASPFQTEMVGEYRPQLLPLEEIPVAAIEGLVLGERIHGGPDLVLGDKVGVGGVAEALPSDPRAGPPERRALLPADGGVDAEAADEVHGAARGVSEDGGGAVHGPADGAVAAGDL

SEQ ID NO: 69980 - protein, 282 aa, Zea mays subsp. mexicana
  Clone ID: UC-ZMROTEOSINTE104A11_FLI.pep
RNQKEVGLALQKLFEDGVVKREDLFVTSKLWPGNHAPEDVQEDLCSALEDLRLDYVDLYLIHGPIRIQKGTMFIPENLIPTDIPATWGAMEKLYHAGKARAIGVSNFSCKKLQDLLAVARVPPAVNQVECHPVWQQDKLRKLCQSTGVHLSAYSPLGSPGSPGYSGPNVLSNPVVMSVAERLQKTPAQVALRWGIQMGQSVLPKSADRTRIGENFDIFDWSIPHDLMAKFSAIKQVRLLKVEFVVHPNSGYNTLEDLWDGEVEYEDERTENQDHSDFLRCFS

SEQ ID NO: 69981 - protein, 291 aa, Zea mays subsp. mexicana
  Clone ID: UC-ZMROTEOSINTE087E02_FLI.pep
VKCNMQVDPSKYRDITSAFGVMLHEQGPRGLFRGWMATLVGYSCQGACKFGFYEFFKKCYSDIAGPENAERLRTLIYLAASASAEVIADVALCPMEAVKIRVQTQPGFARCLVDGLPKIVQSEGAFGLYKGLLPLWGRQVPYTMMKFACFETIVEMVYKHAVPKPKDQCSKPLQLAVSFAGGYIAGIFCAAISHPADNLVSFLNNANGATVADAVRTLGMWGLFTRGLPLRIIMVGTLTGAQWAAYDAFKVFVGLPTSGGVVRSCAAVPPIRAKRVHREDVLNQRRVDVPH

SEQ ID NO: 69982 - protein, 109 aa, Zea mays subsp. mexicana
  Clone ID: UC-ZMROTEOSINTE101D08_FLI.pep
SPGVKIYTANNVREELQDAQRDFIRASVGVSRKGKLLAPKILHCFARGFVDDNSFPIWISHFLPQQQATFVDHCVSQRRQSLLGTRTFGVVPFDSRFRYLFLPDAGSLN

SEQ ID NO: 69983 - protein, 231 aa, Zea mays subsp. mexicana
  Clone ID: UC-ZMROTEOSINTE104C08_FLI.pep
VLLDGSPAPRLKICDFGYSKSSVLHSRPKSAVGTPAYIAPEVLSRREYDGKLADVWSCGVTLFVMLVGAYPFEDQDDPKNIRKTIQRIAAIQYNIPDNIRISDDCRQLISRIFVSNPLRRITMREIKSHPWFLKNLPRELTEAVQLSYFRRDNSVSAFSDQTTEEIMKIVKEARTLPKSSRSGYGYSEECSDEEEKEVESEPKEEEEEAECDKTVREVRESGELDMTSLHI

SEQ ID NO: 69984 - protein, 176 aa, Zea mays subsp. mexicana
  Clone ID: UC-ZMROTEOSINTE098E10_FLI.pep
PVIACTMQPKQPKHTQKEAHVVFTIIKSKRHANEQHIIILCYTCLFCHLDPEKVDAELGPGAAVGVQHVERLRVPGPHHPLELGPHVHEVALAGGGGSRAHVVAVGEHTGAHGDRLHGAQHPPLVRAAVPPQCVAALAAVAVRAPGGLLHQRRLLTWSPLVVMVTSLLRRCGCLLA

SEQ ID NO: 69985 - protein, 129 aa, Zea mays subsp. mexicana
  Clone ID: UC-ZMROTEOSINTE104D07_FLI.pep
GTTDACNRAKLSHNAVSIAGLRRVATRSEASLANAVAGQPVAVSIEAGGDNFQHYKKGVYNGPCGTNLNHGVTVVGYGQEAAGGDRYWIVKNSWGQGWGDGGYIRMKKDVAGKPEGLCGIAIRPSYPLM

SEQ ID NO: 69986 - protein, 293 aa, Zea mays subsp. mexicana
  Clone ID: UC-ZMROTEOSINTE101H01_FLI.pep
LEHDCGVHRGIGYFLEPLILLGLFSRAPISIRLKGITNDTKDPSVDTFRTTTLHMLKHFGVPLDGFNLNIDSRGSPPLGGGEVFLRVRNINSTLTAANWVDEGMVKRIRGVSFSTRVSPQLENRIIYAARGIFNRFIPDVHIHTDHRSGSAGGRSPGYGVSLVAETTTGCLLSVDVTVSYPSVDEINEESEKPELTSPEDLGVQAASMLLEEVAQGGVVDSTHQGLLFILCALCPPDVSKVRVGQLTPYGIETLRNIRDFLDVKFIIKPDPNSNTVTLKCVGAGVKNLARKIS

SEQ ID NO: 69987 - protein, 295 aa, Zea mays subsp. mexicana
  Clone ID: UC-ZMROTEOSINTE104E05_FLI.pep
RLLRLDELQLSEAEKARVYQFYIPVFLWCEDQVIEHRAKYSEGDDIPPLVIGVSAPQGSGKTTLVFALDYLFQVAGRKSATLSIDDFYLTAKEQNELRDRYPGNALLELRGNAGSHNLQFSVETLESLMKLTKEGIKMKVPRYDKSAFGGRGDRADPSVWPEVEGPLEVVFFEGWMLGFKPLPNEVVKAVDPQLEVVNNNLEAYYDAWDRFIDSWIVIKIREPSSVYQWRLQAEIAMRADGKPGMSDEEVMDFVSRYLPAYHAYLPKLYKEGPNGSKPDHLLVIDINEGRNPIWG

SEQ ID NO: 69988 - protein, 427 aa, Zea mays subsp. mexicana
  Clone ID: UC-ZMROTEOSINTE094H01_FLI.pep
RDPGQLTDPDSFVNGPYSLSVSSPLHPPKFRSLEITSNFGSVAKQYFSDCHSLNLLFSDSSTGVANSTVISLDHPYSKKHVAGDDVINSWVPGKGQGIMKPDIMVPEAPRVVLPLVTSSNIKLELDKKKELVTTQLRNTVSDLSLAADDLIIPWNELILKEKIGAGSFGTVHRADWHGSDVAVKILMEQDFHPERFREFMREVAIMKSLRHPNIVLFMGAVTEPPNLSIVTEYLSRGSLYKLLHRSGAKEVLDERRRLNMAFDVAKGMNYLHRRSPPIVHRDLKSPNLLVDKKYTVKVCDFGLSRLKANTFLSSKSLAGTPEWMAPEVLRDEPSNEKSDVYSFGVILWELMTLQQPWCNLNPAQVVAAVGFKGRRLEIPKDLNPLVAVLIESCWANEPWRRPSFANIMDTLKPLINKVPAQLIRSDS

SEQ ID NO: 69989 - protein, 235 aa, Zea mays subsp. mexicana
  Clone ID: UC-ZMROTEOSINTE101H12_FLI.pep
SEPCRPPTDGESGLLRADLSKGITESSARFPKLLIDGPYGAPAQDYREYDVLLLIGLGIGATPLISIVKDVLNHTQHGGSVSGTEPEGSGKAKKRPFMTKRAYFYWVTREEGSFEWFRGVMNEVAEKDKDGVIELHNHCSSVYEEGDARSALIVMLQELQHAKKGVDILSGTSVKTHFARPNWRSVFKHVAVNHENQRVGVFYCGEPVLVPQLRQWSADFTHKTNTKFEFHKENF

SEQ ID NO: 69990 - protein, 135 aa, Zea mays subsp. mexicana
  Clone ID: UC-ZMROTEOSINTE080E09_FLI.pep
GCKQFLGFMTLCTSGKEPKTIGRNDAIPPSLPSRMNLEAGGSFAELLLLSFGQKGYEANRDQAANRTRTKRTSNGFVPRTKTTPTGLAFRTRGGLPRHDLTWKPNQSLIKPRPGGFFRRDAHATTSTGLYTCLLR

SEQ ID NO: 69991 - protein, 134 aa, Zea mays subsp. mexicana
  Clone ID: UC-ZMROTEOSINTE095A05_FLI.pep
QLLFAAISLAVMSSTADFASVSAFCYLITTTVLQCVWSLTVAIVDIYALLVKRCLRNRRAVTLFSIGDGITWLVSLSGACAAAGITVLIDADLIMCSENPCASFQTAVAMGFMCCFSLLPSFLLNFYSIASSHG

SEQ ID NO: 69992 - protein, 233 aa, Zea mays subsp. mexicana
  Clone ID: UC-ZMROTEOSINTE115G10_FLI.pep
RSEARKTASLSGPLSLPTRASANSLSAPIRSSGGFVDSSGDKSKRSVVEIKGRFSVTSENVDLAKVQEGPLSSLSRKSPEGSLLRKSASTGDCLINTKLMRNANQLKEFCNSSVSSSVLIPHLNNLVQQTMFQQDVIMNLLSNLQQDEKVDRTQPGISSQVRTMENGKVADTANSEKERSLLVKISELQSRMITLTDELIAAKTKHVQLQQELNALYYREEIEDIRDEDIEET

SEQ ID NO: 69993 - protein, 398 aa, Zea mays subsp. mexicana
  Clone ID: UC-ZMROTEOSINTE080H05_FLI.pep
LDLGGTNFRVLRIQFGGKEQRIVKQESKTVSIPQHLMSRGSNELFDFIAAALAKFIASEGEGFYLPEGMQRQLGFTFSFPVKQNSVASGTLIKWTKGFAIDEMVGKDVVAELNKAIKRQGVDMEVTVLVNDTVGTLAAGRYVDNDTVAAVILGTGTNAAYIEHMDSIPKWCGPPPESGNMVINMEWGNFRSTHLPLTEFDVALDAESLNPDEQIYEKLISGMYMGEIVRRVLLKMAQDASLFSDNVPLELEVPYILRTYHVLMMHQDTSPDLRTVGNKLKEVFRIEDTCFKTRKLVVDVCEVVASRAARLAAAGIHGILKKLGRDVASPDKQKTVIAVDGGVYKHYTFFAQCMESTLRDLLGEGVASSLVIKLAEDGSGTGAALLSASYSQRLQAVDD

SEQ ID NO: 69994 - protein, 357 aa, Zea mays subsp. mexicana
  Clone ID: UC-ZMROTEOSINTE106A11_FLI.pep
DGFSFSTVLSGLAVTASLASGLQVHAQLVKSGFCDDVCVGNSLVEMYMKSKCLADGVMAFAEIRCKDVVSWTGLAAGCLHCGEPAKAIGILGQMMLDGVMPNNYTFATSANACASLTDLDEGRKVHGYVIKLGDDSDVGVNNALIDMYAKCGSVACAHKVFQSMQQRPVISWTAMIMAFAHNGRAREAVEVFDNMLLRGVAPNRVTLVCVLYACSQGGFVDEGWIYFNAMKDKFGIQPGEDHYACMVDLLGKAGQIEEAEELISGMPFRPGVLVWQALLGACHLHGNEAVGRRAAEHALALENDDPSTYMLLCNTLAGQHDWDGARSVRVLMGSQTLKLPGSSWFQSMSDRSQACIR

SEQ ID NO: 69995 - protein, 251 aa, Zea mays subsp. mexicana
  Clone ID: UC-ZMROTEOSINTE080H06_FLI.pep
VVIYQKPASNSCYAERKTNEPPLCSERDGSRFPWYAPLDSCLFTTAITTSDERYNWPVPWPERLDVSYASVPDDSASNKEKFEADTKYWKQLISEVYFSDFPLNWSSIRNVMDMNAGFGGFAAALIDQPLWVMNAVPIGQPDTLPLIFNRGLIGAYHDWCESFSTYPRTYDLLHMSNLIGNLTNRCDLIDVVVEIDRILRPGRWFVLKDTLEMIKKIRPILKSLHYEIVVVKQQFLVATKSFWRPGKPAST

SEQ ID NO: 69996 - protein, 290 aa, Zea mays subsp. mexicana
  Clone ID: UC-ZMROTEOSINTE091B10_FLI.pep
LLNHTNIFQRTIYIPQPTWGNHPKVFTLSGLNVRSYRYYDPATCSLHFEGLLEDLGSAPSGSIVLLHACAHNPTGVDPTIEQWEQIRQLMRSKSLLPFFDSAYQGFASGSLDKDAQSVRMFVADGGELLMAQSYAKNMGLYGERVGALSIVCKSADVAVRVESQLKLVIRPMYSNPPLHGASIVATILRDSEMFNEWTLELKAMADRIINMRQQLFNALKSRGTPGDWSHIIKQIGMFTFTGLNSEQVAFMRQEYHIYMTSDGRISMAGLSMRTVPHLADAIHAAVTQLK

SEQ ID NO: 69997 - protein, 244 aa, Zea mays subsp. mexicana
  Clone ID: UC-ZMROTEOSINTE116B03_FLI.pep
EMLRSRGSFKNGTLADPCAPRGYSRNEGASRSTLENQYVNNGTGNFTECISSSQLLLQKGKEKCQYQQCHLGSTFVPELRGYFLGTENFYFTSKFFGLKKSSSLSDFMFAGEQFCNQHLSSLRKKHPNRSDEDFSRYCFSMAYIVALLHDSLGVPLDDKRIEYSNQVGDIQVEWALGAFITLMQNTSLKPLHTTAESTHSNRPLFAVLGMFLLCGVLFVSRWRKPKTKIIYDLEKGRYIITRIS

SEQ ID NO: 69998 - protein, 106 aa, Zea mays subsp. mexicana
  Clone ID: UC-ZMROTEOSINTE116C04_FLI.pep
KTTDHIQAHSKKPQLPLLLAHLMLLDQKLSINQFIPGIWYSREAPVAAVLKSFGRSPLLVSQVLLAVDGRVCILSVVSHSRYVQVNDRSFHLVDHVLQDAHLWWVG

SEQ ID NO: 69999 - protein, 430 aa, Zea mays subsp. mexicana
  Clone ID: UC-ZMROTEOSINTE117G10_FLI.pep
SRKIAVFLLINTAYMFVEFGCGFVSDSLGLISDACHMLFDCAALAIGLYASYIARLPANGMYNFGRGRFEVLSGYVNAVFLVLVGVLIVLESFERILEPREISTSSLLSVSIGGLVVNIIGLVFFHEEHHHAHGGTCSHSHSHSHHGHEHHQHHGHEEHKHHNHDHHGANNVKACCDHHGDDNHRHDHHGNSKSEGIHNNIMDNTCKEKHSHGHEHHHYEHSEHCHQSREHSHQNCNNITVEQQLLDIPLSNISSHDTESHSSKEGLRPSDSGNSNKPGHRHHIDHNMEGIFLHVLADTMGSVGVVISTLLIKYKGWLIADPICSVFISVMIVSSVIPLLRNSAEILLQRVPRNHEKDLAVALDDVMKIEDVLGVNNVHVWNLTNTDTVGTFQLHVSAEADKSSIRNKASRIFQEAGVQDLTIEIECVKR

SEQ ID NO: 70000 - protein, 512 aa, Zea mays subsp. mexicana
  Clone ID: UC-ZMROTEOSINTE120H06_FLI.pep
GERARMASFVGAMAISDLVKTTLGPKGMDKILQSTGRGRNVTVTNDGATILKSLHIDNPAAKVLVDISKVQDDEVGDGTTSVVVLAGELLKEAEKLINMKIHPMTIIAGYRMALECARDSLLKKTMDNKENTDKFRSDLMNIAMTTLSSKILSQDKEYFAELAVDAVLRLKGSTNLESIQILKKPGGSLKDSFLDEGFILDKKIGIGQPKRIENAKILVANTAMDTDKVKIYGARVRVDSMSKVADIEAAEKQKMREKVQKIIAHGINCFVNRQLIYNFPEELFADAGILAIEHADFEGIERLALVTGGEIASTFDNPESVKLGHCKVIEEIMIGEDRLIHFSGVAMGQACTIVLRGASEHVLDEAERSLHDALCVLSQTVNDTRVLFGGGWPEMVMAKEVDELARKTPGKKSHAIDAFSHALQAIPTIIADNAGLDSADLISQLRAEHHKENSTAGIDVITGTVGDMQKLGIQESFKVKQAILLSATEAAEMILRVDEIITCAPRRREDRM

SEQ ID NO: 70001 - protein, 339 aa, Zea mays subsp. mexicana
  Clone ID: UC-ZMROTEOSINTE118A11_FLI.pep
EVQKPQNKGKGKVSVASELSQQQMILLCFSKKLASLAENVSDDLQKEGFKGKTLTLKLKTADFEVRTRAVTTRNYIDSKEDILVYATKLIKAEMPISLRLMGLRMSQLHDEKDDPSTSTQKTLDIFFRSSNCNSNGNGTNVQRTTNSPGQDNDSISLTAKEEYLALDAGTSVSTGQQEFFLHDEICFIPEQQRSLDNDIKEAVLSDPLGGTKSDDVSSSAKVTPAKKLDEPDPLISPKAVSSSSKPDQQSWIDGYICSICGFELPPGFEEERLEHSDFHLAETLQQEEAVDGTRLISNESWLAERTRSTAPTPKKKLKSSKEGKHIPIDSFFTKCNKSP

SEQ ID NO: 70002 - protein, 647 aa, Zea mays subsp. mexicana
  Clone ID: UC-ZMROTEOSINTE118B09_FLI.pep
ITLSASANKLSKLKERADEYTALIMEELDRDSLGYIELEDLKALLLQSPSQVVARSTTHSSKLSKALSMKLASNKDTGPFYHYWQEFMYFLEENWKRIWVMTLWLSICIGLFIWKFIQYRNRAVFHIMGYCVTTAKGAAETLKFNMALVLFPVCRNTITWIRSKTKIGAVVPFNDNINFHKVIAAGVAVGVVLHAGAHLTCDFPLLLHASDAAYEPMKPFFGDKRPPNYWWFVKGTEGWTGVVMVVLMTIAFVLAQPWFRRNKLKDSNPLKKMTGFNAFWFTHHLFVIVYALLIVHGTCLYLSRKWYKKTTWMYLAVPVLLYVSERILRLFRSHDAVRIQKVAVYPGNVLALYMSKPPGFRYRSGQYIFIKCSAVSPYEWHPFSITSAPGDDYLSVHIRTRGDWTSRLRTVFSEACRPPSDGESGLLRADPSKGITETNARFPKLLIDGPYGAPAQDYQEYDVLLLIGLGIGATPLISIVKDVLNHIQLGGSVAGTEPEGSGKAKKRPFMTKRAYFYWVTREEGSFEWFRGVMNEVAEKDKDGVIELHNHCSSVHQEGDVRSALIVMLQELQHAKKGVDILSGTSVKTHFARPNWRSVFKHVAVNHENQRIGVFYCGEPVLVPQLRQLSADFTHKTNTKFEFHKENF

SEQ ID NO: 70003 - protein, 276 aa, Zea mays subsp. mexicana
  Clone ID: UC-ZMROTEOSINTE117B06_FLI.pep
EHCEMHAPWEETKKSQPWWQVADVDGLASLVAERAMENIVNNDLPRPTQTVRVHGPQVKGPENKDDYGMSVVSGGQEPDPVHDTMECSYSVSSTTNDMNSSDGGRWQHHERNNVSGDARGSYSSTNSTPGSKPTYQDASERAKLLDALRHSQTRAREAEIAAKKAYDEKDHVIKLLFRQASHLFACKQWLKMLQLENICLQLRFKEHQIATMFPDLPWMLVKEKVAPSQEHNEGARKKGKRPNRKGGLCDAVAFAVGVGIVGAGLLLGWTLGWLLP

SEQ ID NO: 70004 - protein, 181 aa, Zea mays subsp. mexicana
  Clone ID: UC-ZMROTEOSINTE117B12_FLI.pep
VSPSSGHGSHRRGAVHGPELAAGLRGPTQRGARRRGRRAGVLGRHRGRVRAELRGAAPGRLQADPLRRALRREPLLGLRRRRLVGVRRRGLLGVREAVLRPRHQQLRGGAGVRPLHAGGVARLHRHRLRPRRLRQQRRRLHHLQLQPAGQRRRREPLLDCHAYYNYIYTLNINFSMHAYYK

SEQ ID NO: 70005 - protein, 318 aa, Zea mays subsp. mexicana
  Clone ID: UC-ZMROTEOSINTE119E09_FLI.pep
LAMPLNIDIDLFKLDIDELIADYSKENCTSLFEFKRVWMGKKFSYIYEGRPKTNSGLFMQSLFLHCIGHLTSQSSLHQRLAGLYCLYCLYECQPYKPQFKIYLSLEECRQLKDIVVMAKQNGLQLVPALVKRMLDKDMFLFGYMNLINDNGDKQVEELTALQNKQVKFACDKLFANSQAERYMHMDLGAEFELDTIKKLSKEYAEAKELALAEASQTVEVEDAKHLLQSERLLGDKIDEVVKEWDVQKEGFYERTGLSSSPGDQLMAVDNDESGAQCHKDGSCGDQLMAVDNDESGVQDHEDLDDEDDGFAELELLLE

SEQ ID NO: 70006 - protein, 200 aa, Zea mays
  Clone ID: UC-ZMFLMO17223D05_FLI.pep
ISESTALQAIHQLELDDSVTSTYNISEADAVIALHSKLKKNYQIQAVLKSQDIPVFLVKTNSLPQITRALRALVDDHMDEVIDYNDKEEARSSEETDALEEARLAIEQVVIPKGESVQLLPRPSSIISSQVGLVESFSLKWEVVGQEPKACVRILPHFAPKQVEAVARETPAEPADSDWESHDDSDHTQSGITRLPFLPD

SEQ ID NO: 70007 - protein, 323 aa, Zea mays
  Clone ID: UC-ZMFLMO17221C01_FLI.pep
LMFEPDALRWLARAGVSRATAVLQVCSSIAFDKGVESCLKYIEAVPWSESEEEKLKHVFARCTFGESVSKDVLARLQQQCASGSEDLAVQLVESITSGANNGARKEMQSLVSGLLSRSSVYHKDLSGVNKGGLYRICRSCLSSLVELFMEDSEGGQAMAPSGSRPMIERISQQTENLNWLLDILLNNDMAEEYVELWGTQEELIRMHERASPMFRYELSRVSASVFMALGRGRIQCPSDTRSQLFRGWFRPMLVDFGWLQRCSKGLDVRVLEENLGQALLTLPLHLQQSLFVEWFQCFASRGTGGCPNLSRAFQVWWRRSFVN

SEQ ID NO: 70008 - protein, 190 aa, Zea mays
  Clone ID: UC-ZMFLMO17223D07_FLI.pep
AAFYSSSSSSTCRSLYTHIHRMSAKIPKQHAVVAQHEAFPVIKELDGVEIGGDVVGSLVAHPALPSVCGLEQHAAATSSPGLLLRAVAHVQDPKPPALHLHLLKIFSYPGSSAEEEATTAHQQPKSTVRSPPHVLNPPCHRPVVGLPERLPGLPRQIEVPSAGHSHVASVGRSVHRVESPSVVACTANAT

SEQ ID NO: 70009 - protein, 165 aa, Zea mays
  Clone ID: UC-ZMFLMO17223D08_FLI.pep
FFIQVVEITKGSKVKYELDKKTGLIKVDRVLYSSVVYPHNYGFIPRTLCEDNDPMDVLVLMQEPVVPGSFLRARAIGLMPMIDQGEKDDKIIAVCADDPEYRHYNDISELSPHRLQEIKRFFEDYKKNENKEVAVDAFLPATTAQEAIQYSMDLYAQYILQSLRQ

SEQ ID NO: 70010 - protein, 266 aa, Zea mays
  Clone ID: UC-ZMFLMO17221F08_FLI.pep
GLDPLQLVGAVGLVVRRQRQRRRAAPAAQQRAAVAAVGHHDAALLHDGHHGGGAHVVALVRVAAAGGAPAGRHRLGVHPREAAFHRGGPGRRGAGAGGGGELLGEQVVHPVPARLGHVRAAVAVEHPVEVAPPAAAGLALHGEGLAHGHGVLHLPPAAGHRRGPVLPRHEQLPGLEAPLPRGICGCRASSRRVLPPPGLRGPAAPLGARPGPRLRLRPGHRCRRYGRVAAHLRHRHEPTTATAREASTATCTSRQNGTRTAAREQL

SEQ ID NO: 70011 - protein, 175 aa, Zea mays
  Clone ID: UC-ZMFLMO17221G12_FLI.pep
KWNYSLMILAPTSAVPQFAISISRKPHNSDQSIPSKDLIQGAIFRKIIGCYHPDVIKLTTMQSGDENHNILLFQLCIKTTTQLPVTVIYKDKNPRPHGISLEEHLRSLLDQILLDPREQELHRHLALAVLGRGDLHLVHLGGVLQEQLQPAPEFESEMHRHRSRGCELVPRLRVS

SEQ ID NO: 70012 - protein, 239 aa, Zea mays
  Clone ID: UC-ZMFLMO17223B05_FLI.pep
SACSQLGDLRFGLWVESFMGYVGVDLDDHLRTALVDLYTKSGRMDRAFDLFRGLRSRDVVSYSAMIVGCGMHGKLNEAVGLFKEMSKARIDPNAVTFVGLLSAYSHAGLLEEARACFTSMTSRYRINPSMEHYTIMVDILGRCGKLEEAFQLVMQIPVCPDASVWGALLLACRLHNNIELGEVVASKCFELEPEESGYYILLGNIYAQAKKWDKVKGLRKMMAERGLSKTPGSSWVHVA

SEQ ID NO: 70013 - protein, 52 aa, Zea mays
  Clone ID: UC-ZMFLMO17227C08_FLI.pep
LRKGKKTYLLPGRDLKLTDGCQFNKLGFKDVLGSQDNFLSTRYRRGHSNIEI

SEQ ID NO: 70014 - protein, 116 aa, Zea mays
  Clone ID: UC-ZMFLMO17223C10_FLI.pep
TDNGYMTTVTNLKNPVNKWRCGATPISYYYFIRLMGRKASHVALECALQSHPNMVKFSPLIQPLLRQFPASAVCSLQSLRAASPAKSELAEIVPQEKSPKDSIQPMSPSPRYSTSR

SEQ ID NO: 70015 - protein, 113 aa, Zea mays
  Clone ID: UC-ZMFLMO17227G03_FLI.pep
CYGSGAIGGIFAPMLGIASIVSVAMARHFHLLFPSQIPEPAVMAIAGMGALVAATVRAPLTAILLTIEMTDNYFVILPLLVTCLVASVVAEALGGKPIYTVLLERTLAKQNRG

SEQ ID NO: 70016 - protein, 266 aa, Zea mays; identical to SEQ ID NO: 69722
  Clone ID: UC-ZMFLMO17230B08_FLI.pep

SEQ ID NO: 70017 - protein, 107 aa, Zea mays
  Clone ID: UC-ZMFLMO17229E09_FLI.pep
GFAWAREHGLAAVGLKSGELHVRRDFVPSFFLFEKFMSVLAALAAIGVLAVLIAVHELGHFAAARLQGIHVTRFALGFGPPLLKYQGAETEYSIRAIPLGGYVAFPD

SEQ ID NO: 70018 - protein, 120 aa, Zea mays
  Clone ID: UC-ZMFLMO17230A04_FLI.pep
QCNRPRPCPRGDQCYGPGDRGSRHSLSLWFQRLVAAFFLTGQVFLHILQGRINRRNTLEQMNMVGPESMAIALITAGFVGMVFTIQVAREFIYYGATTTIGGVLSLSLTRELAPVLTAVV

SEQ ID NO: 70019 - protein, 190 aa, Zea mays
  Clone ID: UC-ZMFLMO17235D02_FLI.pep
LEQVQQKCIGATTLDEYRKHIEKDPSLERRFQPVKVPEPTVDETIQILRGLRERYELHHKLRYTDDALIAAAQLSYQYISDRFLPDKAIDLIDEAGSRVRLRHAQLPDEAKELDKELRQITKQKNEAVCGQDFEKVYCYLVQRRQRRSAPTSLATPIWLIPSIMLFPFEINILLPILPFVSSSCFLFYNL

SEQ ID NO: 70020 - protein, 203 aa, Zea mays
  Clone ID: UC-ZMFLMO17253D11_FLI.pep
SLTIFLWAKTMANQNFPAQNHPQTVVIVGASGGIGLGFVRYFLEQVPFPVKIWATYRQAIAELDHLAKENPDRLTLVPLDITEESQIAQFSQQLGKTEVNWLINCVGILHVEDNPPEKSLRHLQPSQLQQYFAVNSIGPVLLAKHFLPHLRHASPSVFATISAKVGSIGDNQLGGWYGYRASKAALNMLLKNTAISIRGMLRG

SEQ ID NO: 70021 - protein, 122 aa, Zea mays
  Clone ID: UC-ZMFLMO17253B08_FLI.pep
VNNCQYGKKAIAVEINWSWQRFNDISGEAMHEMLALRQEVFVVEQGCLYLDADGLDKQSWHLFGRTNDQQLVAYARLNFPNTRYPEPSFGRVLTSKAIRGMGAGRKIVAACIQKSLREYPNL

SEQ ID NO: 70022 - protein, 367 aa, Zea mays
  Clone ID: UC-ZMFLB73172G05_FLI.pep
KSMELRHVYNYVRVFSSTDNKTNQHCISPRSLREAISAVVLVTVGDTSWASGIVLNKRGLVLTNAHLLEPWRFGRTSPSDLQASFAGEHLNAGENKSLQPQQGKISNEDAVKHKVSSFNLGFKRGKRISVRLDHEERQIWCNASVVFISKGPLDVALLQIEKVPVELNTIRPEFVCPTAGSPVYVVGHGLFGPRSGLHSSLYSGVVSKVVQIPANQLSHLARAEADNMDIPVMLQTTAAVHPGASGGVLVNTHGLMVGIITSNAKHGGGSTIPHLNFSIPCKLLVAVFEYSANGNLVVLEQLDKPNEVLSSVWALAPSSSPFVRSSPEKGKEEKVLEFSKFLSDKQQALKSNVDLKELFRYKTPSKI

SEQ ID NO: 70023 - protein, 77 aa, Zea mays
  Clone ID: UC-ZMFLMO17169G10_FLI.pep
VCRLSFCGSKSHSQPSFLRLLAFRVTRTLPERRNKVLLCSLFSRLPPSRLSLFGCHLLAWCVAACSSRFSSNRWHTL

SEQ ID NO: 70024 - protein, 163 aa, Zea mays
  Clone ID: UC-ZMFLB73028B10_FLI.pep
NELNTPVSSSTTASRAVVSPGLLQINQRTCLQNRLCNGHGIIRKRSYVQRKTGAVQWKVQRALSCCRAVAVHLAVALPHNILQLGRQASVELLELQSVPLRLLELDYMQGWGYLENLSCNIQIALSTCFRVLHPHLVFFLLNIKAKRLCSFFDLCDYLFRGAL

SEQ ID NO: 70025 - protein, 311 aa, Zea mays
  Clone ID: UC-ZMFLB73034C03_FLI.pep
FILKNPPEQKKGGKDKKAMRRAEKERLKEGEAADEEQKKLKKDAKKKGSKDSTAKGLKKKATTATGSDEDHSSSPTRSHDGDKAAADDDDDDVQWQTDTSIEAAKQRMQEQLSAATAEMVMLSTEETEKKMKQATHKDGSTNGSAKEIPNDKPAVTKPSPYEELIGDIKASLGSAPTPTQLKAVLASSTLPPQDVMNALLEALFGGVGKGFTKEVVKNKKYLAVAVPDEGAQTLLVQAIEAFGGKCNPEALKEVPVVLKALYDGDILDEETIVDWYNDAVAAGKDSQVVKNAKPFVEWLQSAESDEEGDDE

SEQ ID NO: 70026 - protein, 163 aa, Zea mays
  Clone ID: UC-ZMFLMO17221E05_FLI.pep
KKIFIIISTATPSAQRESFESRTIGFACVCIEVTQVQVQQCKHRKHHCLFVHASQGPPTAQCSGYHISHAVQAARVSTSASPGPLGRNRINTLITKAKEVFFLCDGGKWHLVYEKGYSTVAMLGMCLFLVLVLDWFSLLAGFSLRDQILGGQIQSVVTVRRRI

SEQ ID NO: 70027 - protein, 153 aa, Zea mays
  Clone ID: UC-ZMFLB73008A07_FLI.pep
TMVKAVAVLGSSDGVKGTIFFTQEGDGPTTVTGSVSGLKPGLHGFHVHALGDTTNGCMSTGPHYNPASKEHGAPEDENRHAGDLGNVTAGADGVANINVTDSQIPLTGPNSIIGRAVVVHADPDDLGKGGHELRKSTGNAGGRVACGIIGLQG

SEQ ID NO: 70028 - protein, 102 aa, Zea mays
  Clone ID: UC-ZMFLB73008E08_FLI.pep
KRETRFTSKCPPKEIIRKIEEAAKPLGFGVQKKNYKLRLEKVKAGRKGNLNVATEVAPSLHMVQVRKAKGDTLEFQKFYKNLSKTLKDVVWKSEDLQMRAAS

SEQ ID NO: 70029 - protein, 161 aa, Zea mays
  Clone ID: UC-ZMFLB73031E03_FLI.pep
KRDVPIILFYRRMDSCFTLFLLLNTNAYFFHTDLLCTDVVEQREQKIFYQDSHVMIFSFQLLGDMLLDRSNAAVMMRYVSSKDNLMILMNLLRDSSKNIQIEAFHVFKLFAANKNKPPEVVNILVTNRSKLLRFFAGFKIDKEDEQFEADKEQVIKEISAL

SEQ ID NO: 70030 - protein, 234 aa, Zea mays
  Clone ID: UC-ZMFLB73033H08_FLI.pep
CHRHRRRRRRCRPCSVPAAMGNTCVGPSAAGRNGFLANVTLWRPRGDDPAPAPALPPPPSPASDKAPDPVTIPESEHSSHHSSRSTDLPPAPASQPQDNPTAKKPAPKVKRVQSAGLLADSVLKRDVNTARLKDIYTIGKKLGQGQFGTTYLCVEKATGREFACKSIAKRKLLTEEDVEDVRREIQIMHHLAGHANVVSIVGAYEDAVAVQLVMELCAGGELFDRIIQRGHYSE

SEQ ID NO: 70031 - protein, 123 aa, Zea mays
  Clone ID: UC-ZMFLB73049D01_FLI.pep
AGVVAVARVRDGERDGRPADGRAGARVGPRRPRPGPVHGVRPGQDRLPAGHEPRVHRGGLQRQHARAARPQLPARRRPRAPRRRRHGRVPLRPRLRAAAHPLARLRHRRRHRRVRRLRHGLAN

SEQ ID NO: 70032 - protein, 64 aa, Zea mays
  Clone ID: UC-ZMFLB73050B02_FLI.pep
RPSSFEALFHLGYNDLQTKDMKVTPSSFYHVNMNINKKVKEYRRILRSKGNNCYISIIHLSLSS

SEQ ID NO: 70033 - protein, 132 aa, Zea mays
  Clone ID: UC-ZMFLB73068F04_FLI.pep
DRKLKCTSAQLHSSKRIYSPNAYRGFAREFIKDLERMRPRAILDIIKSGENFRISTTTRMPEQGTCERCGYISSQKLCKACVLLDGLNRGLPKLGIGSTKAGARADSDGKQRTKRSERNTSSLQGKHGNFDF

SEQ ID NO: 70034 - protein, 123 aa, Zea mays
  Clone ID: UC-ZMFLB73051C01_FLI.pep
QRLFLDLTKASARFDITSGSLFLCGASRLAQDFFFSRRPDVETFCDICPDVTVSFQQQIVGPFSFRVESSVAIDPRSQDHFVRVDDPIFAIDWALKVLGSAKATAWYSPKHQEAMMELRFYET

SEQ ID NO: 70035 - protein, 207 aa, Zea mays
  Clone ID: UC-ZMFLB73062H12_FLI.pep
PPQFCIITEYMSGGSLYDFVHKQHNVLNLTTLLKFAVDVCRGMCYLHERGIIHRDLKTANLLMDNDHAVKVADFGVARFQDQGGIMTAETGTYRWMAPEVINHQPYDSKADVFSFAIVLWELITSKIPYDTMTPLQAAVGVRQGLRPGLPKKTHPKLLDLMQRCWEADPSDRPAFSDILAELEDLLAQAQGTSGKTVQDPSNSNAKD

SEQ ID NO: 70036 - protein, 234 aa, Zea mays
  Clone ID: UC-ZMFLB73093H06_FLI.pep
GDGLILHASNLFRTSVPPVVSFNLGSLGFLTSHNFEGFRQDLRDLIHGNNTLGIYITLRMRLRCEIFRKGKSMPGKVFDVLNEVVVDRGSNPYLSKIECYEHNHLITKVQADGVIVATPTGSTAYSTAAGGSMVHPNVPCMLFTPICPHSLSFRPVILPDSARLELKIPDEARSNAWVSFDGKRRQQLSRGDSVRISMSQHPLPTVNKSDQTGDWFRSLIRCLNWNERLDQKAL

SEQ ID NO: 70037 - protein, 134 aa, Zea mays
  Clone ID: UC-ZMFLB73088B11_FLI.pep
ASGKFFHSFTAQLLVVQHKKEPLFVNCSWCTFSTLRCVLLWTTKPRCANHNGAGGKRQSKKKILQGISTVRSRASCLAPVGELDTLVNGRLELDLEAFQPLLLEVVELTQTKHFLHSILAEPNLGGKERQLCHS

SEQ ID NO: 70038 - protein, 120 aa, Zea mays
  Clone ID: UC-ZMFLB73095B03_FLI.pep
AKALKTYSATTLHVEGNKHELHEKIQDAVAAYFNAISMEVEHVPSKVSIGALLSKQGPKFLPVARCFLSDALRLEPTNRMAWFYLGEVHKQDGRLADAADCFQAASMLEDSDPVESFRSL

SEQ ID NO: 70039 - protein, 113 aa, Zea mays
  Clone ID: UC-ZMFLMO17225G10_FLI.pep
SEIYLIRANLSQADLVKANLSRTVLYEANLDGADLKGTRLFYGTWDQASPRSRNHIPNYETGEYTGAVVENANFSKTKNMSEEQRCYCCAWGGTLTRKTIPGGCEGIENRLDR

SEQ ID NO: 70040 - protein, 104 aa, Zea mays
  Clone ID: UC-ZMFLMO17225H04_FLI.pep
QHFWPDFSDFLGDRGRIQARTPCILPSPMSNQPSPGGLIKLSVGDVVSGGLRVYRDHFKSYLWLAGQSYLWLLIPFAITGLVMLAIAGLAAVMEPIAVGGIIVL

SEQ ID NO: 70041 - protein, 142 aa, Zea mays
  Clone ID: UC-ZMFLMO17228D11_FLI.pep
DGTITVNVFDDPASSTTLPMTEGGPSINAVQVPLLTLDSALVKLGLPQPQVIKIDTQGNELSILRGAAQTLAKVDVLFLECWLYRGYGPKTPLLTEIAHWLLPFNFRLWDVSEPYRGPQGELTTLDCIFINTAAGLVPNWYY

SEQ ID NO: 70042 - protein, 289 aa, Zea mays
  Clone ID: LIB3607-003-C7_FLI.pep
HLISKMSTMRAKRANITSRYDNAPHVHAHGRTRLASSHVGLDRVAVPREPVVVPRPEHDAPVLGGVLDHRQHLRNEVARRHEPAASGLGRGGEAEEHPPRPDGRPLRPRLRQAAHASARAVLARRVVVELHPHVVEQPRGERGAQRRVRERALRRSRQVHGPPRAPAPGVGLEEPGQVVPVHAPAALDVEVDAVEDGVAEGPGLGPPAAAAEVVVPEVRRDAPGVGPGREPVAADAPSDGEQDLDAHALARLDVRAHARAPAARRVAVARQVQRRRLAPAERREEGHVD

SEQ ID NO: 70043 - protein, 231 aa, Zea mays
  Clone ID: UC-ZMFLB73264E03_FLI.pep
KTIPAGSLTPLQVLAARERGPFAALVVRVRLAPVLDDAVSLGERAAQAVVAQVQLLQRGQPLQRQRHGAPDEVVGQVQVRHLRREHQLAQVEVEVVPRQVHLADGPAGGEQVGGVARQLVVGEVHGVDLVARVVARDRARQLVVRQDQRPELPLHQPRRDAARQLVVPEVQRPEAGQVGERRRDAARQLVAGEVHRVEAAQPRQGLRDGAGHVGVGDGQELQVGQRGQAGR

SEQ ID NO: 70044 - protein, 181 aa, Zea mays
  Clone ID: UC-ZMFLB73162F12_FLI.pep
HPLTHTQSGQFTFIFYFFLNDTSFFVLYLFFKSLINDNSCLGLGWNYPCDLWSVGCILVELCSGEALFQTHENLEHLAMMEKVLGPLPKHMIVRADRRAEKYFKRGVRLDWPEGAASRESMKAVWKLPRLQNLVMQHVDHSAGDLIDLLQGLLRYDPNERLKAHEALQHPFFTRCIRRCGF

SEQ ID NO: 70045 - protein, 236 aa, Zea mays
  Clone ID: UC-ZMFLB73152D07_FLI.pep
GPAKICEILKDSNHRVRKAIDDEVSRSNQPFVWAFNLQLPKDNFSAIFYFVSLEAIPEGSLMDQFLKGDDAFRNSRLKLIANIVKGPWIVRTAVGEQAICILGRALSCKYVQGSNFIEVDVDIGSSIVANAIVHLAFGYITTLTVDLAFLIESQTEPELPEKLIGAVRFSELNPGSAGLFERRSEEHQESTQSRPVGFWQGFSQLLNNQGNTREPSPNLQNTNGTLRKEEANEDAK

SEQ ID NO: 70046 - protein, 230 aa, Zea mays
  Clone ID: UC-ZMFLMO17126A12_FLI.pep
VFSWENRMKVVTGTAKALAYLHEAIEPKVVHRDIKSSNILIDDEFNGKVSDFGLAKLLGSDKSHITTRVMGTFGYVAPEYANTGMLNEKSDVYSFGVLLLETVTGRNPVDYSRSSNEVNLVEWLKTMVANRRAEEVADPSLEARPSIRALKRALLVALRCVDPDSEKRPKMGQVVRMLESEEVPYREDRRNRRSRTGSMDIESIAEGSNSAEFGKKVERTGSSISDRSQP

SEQ ID NO: 70047 - protein, 234 aa, Zea mays
  Clone ID: UC-ZMFLMO17126B07_FLI.pep
STPPSKVQLSINSLSYAAWCPFSSNFRPIFETVSTMYPQVHHFAVEESSATPSLFSRYGVRGFPAILLVNETTMVRYRGSKDLSSLVEFYKETTGLDPVAYIDVVVQQESTASLRSVAPWDRSPLEMAKDEPPYLLVAVVFIILKAAARLVPAAMSHLRAFLAVRVQNLNLGIRRGSNQVLERALNVLDVRRLCSELGLSNRATDLRKGASNARAWASSFASVSLGEPSSSRQA

SEQ ID NO: 70048 - protein, 315 aa, Zea mays
  Clone ID: UC-ZMFLMO17129C08_FLI.pep
ATSTNGIQENVEVIEVASGSPLPGMKQQLDDSVRIPKATIDILKDQVFGFDTFFVTSQEPYEGGVLFKGNLRGKPAKSYEKITSRLQNKFGDEYKLFLLINPEDEKPVAVVIPKQTLQPETTAVPEWFAAAAFGLVTIFTLLLRNVPVLQENLLSTFDNLELLKDGLSGALVTGLIIGVHEIGHILAARESGIKLGVPYFVPSWQIGSFGGITRIVNIVRNREDLLKLAAAGPLAGFSLGFVLLLLGFVLPPSDGLGLVIDPTVFHESFLVGGLAKLLLGDVLKEGTQLSINPLVLWAWAGLLINAINSIPAGEL

SEQ ID NO: 70049 - protein, 313 aa, Zea mays
  Clone ID: UC-ZMFLB73180H04_FLI.pep
SWLLGRRGPSGFSWSSTADQVTQGISAAGLTAIVTGASSGIGAETARTLALRGAHVIMAVRSLPAAQAVKDAVLAQAPGAKLDVMELDLSSMASVRAFASQFIDRGLPLNILINNAGVMAIPFALSKDGIEMQFATNHVGHFLLTHLLLDTMKRTSHESNLEGRIVNVSSEGHRLAYREGIRFDKINDESVYSSIGAYGQSKLANILHANELARRFEEDNVNITANSLHPGSIITNLLRYHSILDVLHRTLGKLVLKNAEQGAATTCYLALHPHVKGVSGKYFCDCNLYEPSANAKDMELAKRLWDFGVELIT

SEQ ID NO: 70050 - protein, 217 aa, Zea mays; identical to SEQ ID NO: 65920
  Clone ID: UC-ZMFLB73167C04_FLI.pep

SEQ ID NO: 70051 - protein, 232 aa, Zea mays
  Clone ID: UC-ZMFLB73167D10_FLI.pep
QEKIKLLGEQYGALRRTRGDGNCFYRSFMFSYLEHILETQDKAEADRIMVKIEECKKTLLSLGYIEFTFEDFFSIFIELLESVLQGHETPIGPEELLERTRDPQVSDYVVMFFRFVTSGEIQRRSDFFEPFISGLTNSTVVQFCKASVEPMGEESDHVHIIALSDALGVPIRVMYLDRSSCDTGNLSVNHHDFIPSANDSEGDAATTPAPATEKPYITLLYRPGHYDILYPK

SEQ ID NO: 70052 - protein, 210 aa, Zea mays
  Clone ID: UC-ZMFLMO17150E06_FLI.pep
QNTFAMLSTFNEVDMTNLMKLRSDYKDEFVTKHGVKLGLMSCFVKAAVSALQNQPIVNAVIDGDDIIYRDYVDVSVAVGTSKGLVVPVIRDADTMNFADIEKGINNLAKKANEGALSIDDMAGGTFTISNGGVYGSLLSTPIINPPQSSILGMHSIVQRPVVVNGDILARPMMFLALTYDHRLIDGREAVFFLRRIKDVVEDPRRLLLDI

SEQ ID NO: 70053 - protein, 224 aa, Zea mays
  Clone ID: UC-ZMFLMO17159F01_FLI.pep
ISSCSFFFLQYFLNLFLKFLPVQKEFLEDVVLEENHGLPCFLFGHSTGGAIVLKAALDPSVELHVEGVVLTSPAIHVQPSHPIIKVVAPIFSMLAPKYRVSALHKRGPPVSRDPEALKMKYSDPLVYTGPIRVRTGNEILRISSFLQRNLSRVTVPFLVLHGTADTITDPRASERLYQTSMSTNKSIKLYDGYLHDLLFEPERDDIANDIINWLSARLSVLQRW

SEQ ID NO: 70054 - protein, 592 aa, Zea mays
  Clone ID: UC-ZMFLMO17179A04_FLI.pep
LYSPGPPPPPLRLLSPRRRYPSFLGSSPLPHQPHPSAPNAAPTLASRHAFRSRAAMGNCCRSPAAVAREDVSSSHFPASNAKKKPHQARNGGAGGGQKRLSVLGDEGCEVVGIDDKYVLDRELGRGEFGVTYLCMDRDTKELLACKSISKRKLRTAVDVEDVRREVAIMRHLPKSPSVVSLREACEDDGAVHLVMELCEGGELFDRIVARGHYTERAAASVTRTILEVVQLCHRHGVIHRDLKPENFLFANKKENSPLKAIDFGLSIFFKPGEKFSEIVGSPYYMAPEVLKRNYGPEIDIWSAGVILYILLCGVPPFWAETEQGVAQAILRGNIDFKREPWPNVSENAKDLVRHMLEPDPKLRLTAKQVLEHHWLQNAKKAPNVPLGDIVKSRLKQFSRMNRFKRRALRVIADHLSAEEVEDIKDMFKTMDTDNDGIVSYEELKTGIAKLGSHLAESEVQMLIEAVDTNGRGALDYGEFLAVSLHLQRMANDEHLRRAFLFFDKDGNGFIEPEELREALVDDGASDIIEEVVNDILQEVDTDKDGKISYEEFVAMMKTGTDWRKASRHYSRGRFNSLSMKLIKDGSVKLGVE

SEQ ID NO: 70055 - protein, 356 aa, Zea mays
  Clone ID: UC-ZMFLMO17197G01_FLI.pep
DSLDEMLLGRFLVGIGIGVNTVLVPIYISEVAPTKYRGTLGTLCQIGTCLGIIAALSLGIPSESDPHWWRTMLYAACVPGILIVAGMQFAVESPRWLAKVGRFDDARKVVESLWEPSEVEKSMEEIKAVVLNDDSRGSWSDLLVEPHNRVALIGGSLFFLQQFAGINGVLYFSSLTFRDVGITNGALASLYVGIINFGGALVASNLMDKQGRKKLLIGSYLGMAFAMFLIVYGISFPLDEGVAHSLSIAGTLLYIFTFAIGAGPVTGIIIPELSSARTRSKVMGFSFTVHWICNFLVGLFFLELVNKFGVGAVYAGFGGVSLLTALFAYNFIVETKGRSLEEIEMSLSSATPGKQE

SEQ ID NO: 70056 - protein, 191 aa, Zea mays
  Clone ID: UC-ZMFLMO17201D11_FLI.pep
DPSELRRLALRKDEIHSSLRGGSYHQMRNGSREFMSTLANYKIPIAVVTTRPRKVIEEAIEAVGVRSFFDAVVTAEDVYRGKPDPEMFLYAAQLLSFIPERCIVFGNSNSAVEAAHDARMKCVAVASKHKIYELSAADLVVKQLDELSVIDLKNLADIESPEFGMEPEPEMEEEEEVPPPSTSVGIDDLFW

SEQ ID NO: 70057 - protein, 264 aa, Zea mays
  Clone ID: UC-ZMROB73015E02_FLI.pep
LTPSANRRALTLSICAVSHSLPPPPPPYATQKAPQDSPLLKTHSMASATGVSSSEMAVDHATGPGAVDKPRFDALTPNEMSGGRPQFRKVPVPQHRFAPLKRCWMEIYTPVYEHMKIDIRMNLKARRVELKTRQDTPDVSNLQKCADFVHAFMLGFDIADAVALLRLDDLYVDSFEIKDVKTLRGEHLSRAIGRLSGKGGKTKYAIENSTRTRIVIADTKIHILGSFVNIKVARDSLCSLILGSPAGKVYSKLRAVSARLAERY

SEQ ID NO: 70058 - protein, 157 aa, Zea mays subsp. mexicana
  Clone ID: UC-ZMROTEOSINTE117G07_FLI.pep
GGLVRQKMKYLRFLRKRMNTKPSHGPIHFRAPSKILWRTIRGMIPHKTKRGEAALARLKTYEGVPPPYDKTKRLVIPDALKVLRLQPGHKYCLLGELSKEVGWNYHDTIRELEEKRKEKAKVAYERRKQLAKLRLKAEATAEEKLGSQLDILTPIKY

SEQ ID NO: 70059 - protein, 145 aa, Zea mays subsp. mexicana
  Clone ID: UC-ZMROTEOSINTE117D04_FLI.pep
HAQCGMDGPSIIDSYIVPFIIYITYVREHKEIRTLRTLFDSCTLLHYYTYNNISYIWLWQKSFVGSVARPPLNYFADGHTMDACASVLFCSPVAHSHCSCFLFLGWVGGGCADHANAIYTDSIAQKDSKKERIKRGGRKERNNGD

SEQ ID NO: 70060 - protein, 187 aa, Zea mays subsp. mexicana
  Clone ID: UC-ZMROTEOSINTE117F07_FLI.pep
IFQEVYEADWKSKFEAAGIWYEHRLIDDMVAYALKSEGGYVWACKNYDGDVQSDFLAQGFGSLGLMTSVLVCPDGKTIEAEAAHGTVTRHFRVHQKGGETSTNSIASIFAWTRGLAHRAKLDDNARLLDFALKLEAACVGTVESGKMTKDLAILVHGSSSVTRSHYLNTEEFIDAVATELRSRLGAN

SEQ ID NO: 70061 - protein, 335 aa, Zea mays; identical to SEQ ID NO: 63820
  Clone ID: UC-ZMFLMO17306E03_FLI.pep

SEQ ID NO: 70062 - protein, 331 aa, Zea mays
  Clone ID: UC-ZMFLB73094B04_FLI.pep
AGSHSGAVLELSDGYLSQSPTTDMNAGKLVMFGGGNPEFSASTHALLNKDCELGRGGFGTVYKTTLRDGQPVAIKKLTVSSLVKSQVEFEREVKMLGKLRHRNLVALKGYYWTPSLQLLIYEFVSGGNLHKQLHESSTTNCLPWKERFDIVLGIARSLAHLHRHDIIHYNLKSSNILLDGSGEAKVGDYGLAKLLPMLDRYVLSSKVQSALGYMAPEFACRTVKITEKCDVYGFGVLILEILTGRTPVEYMEDDVVVLCDVVRAALDEGKVEECVDERLCGKFPLEEAVPIMKLGLVCTSQVPSNRPDMGEVVNILELIRCPQDSPETELG

SEQ ID NO: 70063 - protein, 159 aa, Zea mays
  Clone ID: UC-ZMFLMO17249E03_FLI.pep
FSWQVSSPEYRHFVILSRNVLAASVAINSTVSSCKEPGYFAFHILTDAQNFYAMKHWFARNSYKNAAICVINYEAIILEKLPKYTIRQLYLPEEFRVLIRSIKRPTENTRMKYLSLFSPSHFVIPEIFKYLNLDASTTLEYICTHIRIIEYRLICRKLI

SEQ ID NO: 70064 - protein, 216 aa, Zea mays
  Clone ID: 700240365_FLI.pep
PAGPTHFRNLDIPGMDRYLDFWNLMAYDYAGSWDPTSGHQANLHGSLDNPTSTPFSTDAAIDHYTRNGVAPSKIVLGMPIYGRAFENTDGPGRPYNGIGEGSWENGIFDYKVLPLQGSQEIYDQATGSSYCYNPQTRKLVSYDTPHAARVKAGYVKQWGLGGGMWWESSGDKEGQDSLIGIVVNEFGGPQALQRKDNCIDYPQSKYDNLKNGFPNN

SEQ ID NO: 70065 - protein, 386 aa, Zea mays
  Clone ID: UC-ZMFLMO17089B02_FLI.pep
VVLCSQGEKHSMASVYGGCLALQDGGVPIKFPVAGIEMGLVLDTQEFGGDGSPLILSDITGAEDGSGDMDLKIAGNESGISAFQMDTKVVGITLPVMEKALLQAREGRQHILNSLRFTSAISILLAVVFMLISSGIALYALFKGTATMPRMFPDFSRLSSPFELFTAVPVIVVAFTFHFNVHPIRAELSKTSDMKVAVRVSLVLCAAIYAAVGFFGFLLFGDATMADVLANFDRSSGAGVPQALNDAARLSYALHLVLVFPLLLFSLRVNVDELLFPGRRPLAADTRRFVSLTAVLMAVLYVLAIAIPSIWTLFEYSGSTFAVTISLIFPGAIVLRDVHGIAKRKDKALAATMIVLAVVTSSIAIASNIMSSISDEDRGGHVAGRR

SEQ ID NO: 70066 - protein, 321 aa, Zea mays
  Clone ID: UC-ZMROB73068C09_FLI.pep
GNLKNGTPIAIKKLAAESKQGISEFLTEINVISNVRHPNLIKLIGCCVEGSNRLLVYEYAENNSLANALLGPKNKCIPLDWQKRVAICIGTASGLAFLHEEAQPRIVHRDIKASNILLDKKLLPKIGDFGLAKLFPDTVTHISTRVAGTMGYLAPEYALLGQLTKKADIYSFGVLLLEMISGESSSKSTWGPNMHVLVEWTWKLREEGRLLEIVDPELEKYPEEQMLRFIKVALLCTQATSQQRPSMKQVVNMLSNQTEIDLQNVAPPGVLKEPRQRTGGFGGLIADTSSSQSTKGNPAESYSTQTNMNSSQFSTTDVSPR

SEQ ID NO: 70067 - protein, 405 aa, Zea mays
  Clone ID: UC-ZMROB73066A10_FLI.pep
KGGAKQLRRRRDTRRLRPRHDTTPGGGGYYVNQRRPATDNFLATDSPCFTRGGRAGTSSDGEPAHELPLLIVFLLGGAGGRPLRVAALAAGHHGGLGVEHQVRHCAEGPGEGGGRGAVGPLLQHLVHHLGLVLHRAEHVGAGRARGGARHGKAVGPVALGHAHHAGPAEKVVQPAEGLLVGAPEEHAQVVAASGVGGQLVQRQAVPPADELAHLAVAVAGEVREHAVDGGPLLQPLDRDDGELLPDGPHVRQGGEHGQVDVVGARRLGRAHAAGDELAEGVHRGEVLQAKDPLLELLRGPPLQLVGVQAARVVVAAHGGGHHVAVVGAAVVRELVEEVGRGRVQASRRRSREGLEHQDRVVRHQRAAALAADDGVLHPLAVTHAAHGGHHGARVLLQAVRHRHVG

SEQ ID NO: 70068 - protein, 421 aa, Zea mays
  Clone ID: UC-ZMROB73078G10_FLI.pep
EAREDVHAPAHQLRPQRRALLRHRQPHAHRRRGGRQLRQAIHRQHARHFTGADHERAPHDGPQPRLPGLRHGDRALHQHAGHVRQHHRRGRPRVRPDDDQEQHPASPTGPAAVQRHRRGVQLLAQFPQPEQRALPGARAGGGGPAPAVHRGARHGPVPVHQPDVPGPQRHQVRGVRQQQLLLPPPDRAPRGALPAPLRRRAPGRLPHGPAAPVQLHGHPAQQHVRAARHAGGAAPLQRLRGAGAAGHQHPGRREPPAAPARLQLLRGRPRVRQLRPGERPARVQPRRPRRAQHHQRAHRRLGRRPVPRRQPGRVADALPLRRALELGPVHGVACQRRPAAEREDVAPAIRPPKMLMTTGRLSPDRGVDGHLGRFSCFLHVCLLPFLTMFGTIWFGLFNYRVPIFGECLDFAILAESPFETC

SEQ ID NO: 70069 - protein, 334 aa, Zea mays subsp. mexicana
  Clone ID: UC-ZMROTEOSINTE042D07_FLI.pep
RPKAFGEVTVASNVPGAELLDENISSEGESSDDESDGFDSDDEMDLTPTPPGTEENMEGSSVANKHDADGDTKEEDDASDDEDGTDQDDSNSDSDELDDDSDVDVDTDISDEDEGDDDELKESINGSEDEALDQNEDSEEEDKSKGSGSKAQKRKFHDYIGQLSSADASLRVLKRLATAKKAEEPSDETGKILSDEDFKRIKELKAKKEAKLALAQHGLIKGGDTRSVTFKMPSSDQLSRKRVDPLELEAHVRRKMSKEERLAMVKAGREDRGPYMARAAVKQKKTGGLSNKQKQHKKRMPLAATRAKAARSRQEKKQQRKRSGNQFRGRKAWK

SEQ ID NO: 70070 - protein, 71 aa, Zea mays subsp. mexicana
  Clone ID: UC-ZMROTEOSINTE043C07_FLI.pep
KAYATPAGRSSLVHYQSSGTHYHTRLLKQKSKCMCLRRELKAERHKSYPDDGEWSLLSVLLCVTSGAKMTS

SEQ ID NO: 70071 - protein, 217 aa, Zea mays subsp. mexicana
  Clone ID: UC-ZMROTEOSINTE059B04_FLI.pep
SCKKCLASARWAIANRTDACFIRVIGSELVQKYVGEGARMVRELFQMARSKKACIVFFDEVDAIGGARFDDGVGGDNEVQRTMLEIVNQLDGFDARGNIKVLMATNRPDTLDPALLRPGRLDRKVEFGLPDLEGRTQIFKIHTRTMNCERDIRFELLARLCPNSTGADIRSVCTEAGMYAIRARRKTVTEKDFLDAVNKVIKGYQKFSATPKYMVYN

SEQ ID NO: 70072 - protein, 344 aa, Zea mays subsp. mexicana
  Clone ID: UC-ZMROTEOSINTE047D03_FLI.pep
WWIILLRAYTKTTGDLTLAETPECQKGMRLILSLCLSEGFDTFPTLLCADGCCMIDRRMGVYGYPIEIQALFFMALRCALQMLKHDNEGKEFVEKIATRLHALSYHMRSYFWLDFQQLNDIYRYKTEEYSHTAVNKFNVIPDSIPDWLFDFMPCQGGFFIGNVSPARMDFRWFALGNMIAILSSLATPEQSVAIMDLIEERWEELIGEMPLKICYPAIENHEWRIVTGCDPKNTRWSYHNGGSWPVLLWLLTAACIKTGRPQIARRAIDLAERRLLKDGWPEYYDGKLGRYVGKQARKFQTWSIAGYLVAKMMLEDPSHLGMISLEEDRAMLKPVLKRSASWTN

SEQ ID NO: 70073 - protein, 191 aa, Zea mays subsp. mexicana
  Clone ID: UC-ZMROTEOSINTE047D04_FLI.pep
PRDHQLVRHRDGSQVLLHSIIRLLRGGFRCNLRLQPARRPRAPGDHRLQISAPKRRDGRDASDGRRGGHRRHLSGGEERQRARRVAAHLRAGAGLLRPRDGGAHRRLRLAAPLLPHHHVLPPRGRRTPVLLPLERPNAHTIRSIIFTRSSTMIQWSVPSDTLFSVSLLYISAALLSRSRVIWCYNTLLAAS

SEQ ID NO: 70074 - protein, 136 aa, Zea mays subsp. mexicana
  Clone ID: UC-ZMROTEOSINTE073E08_FLI.pep
SDTCIEDGELCDTSSVKKRMDKVAGANGLEGVSIECANLLNNGIDVFMKQLIGSCIELVRARSRHGKLRHETLKQQLCRKLINGVSVHNHVPGQSSVIPPETNSISMQDLKAVIELNPCLLGINASLLHEKINSYD

SEQ ID NO: 70075 - protein, 382 aa, Zea mays subsp. mexicana
  Clone ID: UC-ZMROTEOSINTE096E05_FLI.pep
LNVPPGRWLTAPFNLTSHMTLFLADGAEILGITDEKYWPLLPALPSYGYGRERKGPRFGSLIHGQNLKDVVITGHNGSINGQGEVWWMKHRRRILNNTRPPLVQLMWSKDIIVANITLRNSPFWHLHPYDCTNVTVSNVTILSPVSGAPNTDGIDPDSCQDVLIENCYISVGDDAIAIKSGWDQYGIAYGRPSSNISIRNVTARSLVSAGISIGSEMSGGVANVTVENVRIWESRRGVRIKTATGRGGYIRNISYRNITFDNVRAGIVIKVDYNEHADDGYDRTAFPDITSISFKGIHGQGVRVPVRAHGSDVIPIKDISFQDMSVGISYKKKHIFQCSYLEGRVVRPVFPKPCENLDVYDEQGQLVKRAVALNSTELDYDI

SEQ ID NO: 70076 - protein, 245 aa, Zea mays subsp. mexicana
  Clone ID: UC-ZMROTEOSINTE077E03_FLI.pep
FLYALIWQHLLFSVTEPSQRVKPVAASDIMWAEAMGKLECMDSADRERLWPQLVQGFKDLSHRLKLQDEVLVSDTDRLSMTHSNVKKLQRHFQADTYPWIQRLKQQELAIQRRLLRFVRIVEALENRGYRCPLTKEEADLYERLVVILKRLKGHNADLSKRVNTLVSTSRLLASSGGAGGSVYIPSSAKVDERSVTELLEALQQQTEAVAKLGNVLKRDIRDMEIIQSEGTDMAEDNVGRRAQKI

SEQ ID NO: 70077 - protein, 522 aa, Zea mays subsp. mexicana
  Clone ID: UC-ZMROTEOSINTE109D11_FLI.pep
NIMIRGYCSLGQLEEAVRLLKKMSGSGLQPDVVTYSLLIQYYCKIGRCAEARSVFDSMVRKGQKPNSTIYHILLHGYATKGALIDVRDLLDLMIRDGIPFEHRAFNILICAYAKHGAVDKAMTAFTEMRQNGLRPDVVSYSTVIHILCKTGRVEDAVYHFNQMVSEGLSPNIISFTSLIHGLCSIGEWKKVEELAFEMINRGIHPDAIFMNTIMDNLCKEGRVVEAQDFFDMVIHIGVKPDVVSYNTLIDGYCFVGKMDESIKQLDRMVSIGLRPDSWTYNSLLNGYFKNGRVEDALALYREMFRKDVKFCAITFNIMLHGLFQAGRIVAARELYMKMVDRGTQLRIETYNTVLGGLCENSCVDEALRMFEDLRSKEFELDVRTFSIVINALLKVGRIDEAKSLFSAMVLRGPVPDVITYSLMIKSHIEEGLLEESDDLFLSMEKNGYAADSHMLNIIVRRLLEKGDVRRAGTYLTKIDEKNFSLEASTAALLIPIVSEKKYQKEVKFLPEKYHSFMQPRDD

SEQ ID NO: 70078 - protein, 408 aa, Zea mays subsp. mexicana
  Clone ID: UC-ZMROTEOSINTE078G10_FLI.pep
CVSSFGADQFDDTDQAERAKKGSFFNWFYFCINIGSFISGTMIVWIQDNTGWGIGFAIPTIFMALAISFFFSASNKYRFQKPGGSPLTRVCQVVIAAFRKWHIEVPHDTSLLYEVDGQTSAIEGSRKLEHTNELEFLDRAAVISSADLKSESFTDPWKLCTVTQVEELKILIRMFPIWATTIIFSAVYAQNSSMFIEQGMVLDKRIGSFNIPPASLSTFDVISVIMWVPLYDRILVPLARKFTGREKGFSELQRMGIGLVLSILAMVSAALVELKRLEIARSEGLIHEKAAVPMSILWQIPQYFLVGAAEVFTCIGQVEFFYDQAPDAMRSLCSALALITVSLGNYISSIILTLVSYITTQGGDPGWIPDNLNEGHLDQFFWLIAGISFVNLIVYMGCAVRYRYKKAS

SEQ ID NO: 70079 - protein, 289 aa, Zea mays subsp. mexicana
  Clone ID: UC-ZMROTEOSINTE096C07_FLI.pep
LRAVFEDADKFYLVMELCSGGRLLDEIAREGKFSEQRAAIVIKDLMAVLKYCHEMGVVHRDVKPENILLTKAGKVKLADFGLAARVTNGQKMFGVAGSPAYVAPEVLSGSYSEKVDIWGAGVLLHVLLHGSLPFQGGSLDAVFESIKTLELDFSSTPWESISVLGRDLIGRMLNRDVSCRMTADEVLSHPWVVFYTECPLKVVAANLCLPNKVIAPKIPWGRHKSECDSLSDASQRSEDQDECGIVDALAAAITRVRISEPKRSRLCSPAITIQQECSSNLKNNLCTAF

SEQ ID NO: 70080 - protein, 305 aa, Zea mays subsp. mexicana
  Clone ID: UC-ZMROTEOSINTE116F06_FLI.pep
ESIMDDAGDTFKDLVGSAYYVAPEVLKRHYGAEADIWSAGVILYILLSGVPPFWAENEDGIFDAVLHSHIDFSSDPWPSISNGAKDLVKKMLRQDPKERLTAAEILNHPWIREDGEAPDKPLDITVISRMKQFRAMNKLKKVALKVVAENLSDEEIMGLKEMFRSLDTDNSGTITLEELRSGLPKLGTKISESEIKQLMEAADVDGNGTIDYAEFISATMHLNRLEKEDRILKAFEYFDKDHSGYITVDELEEALKKYDMGDDKTIKEIIAEVDTDHDGRINYQEFVAMMRNNTPEIVPNRRRMF

SEQ ID NO: 70081 - protein, 280 aa, Zea mays
  Clone ID: LIB3068-042-C9_FLI.pep
RNAHNTVSQYDVLQRQRHVRSSLSKNRDQRVDTPHAHTATEMSNPCGDHQFLMNIRTNHTRSTHNRYHSNLATTCRTRNNLSGSADRHNSLNSLLTAPIYNWTQLKSPRVGPHIARHAHTYPPLDPTGSHVPVSPQSAGPLRSMALDLLRPGVPGMQPVGDLRTAKSAILFGVVNGLFLPPLLEPCLCTAGALCDGGGDHAEQRYYQLANCVLTMLGVALLFVDMALSRAVHQASPLWPPTLRATVWLTKTLTCGTLQFGVNLVYFCLKMLCARLLLVFA

SEQ ID NO: 70082 - protein, 296 aa, Zea mays
  Clone ID: UC-ZMFLB73143E02_FLI.pep
TTITMGRTPCCDSKGIKKGPWAPEEDKLLVDYVQANGPGNWRILPKLAGLNRCGKSCRLRWTNYLRPDIKRGPFTPEEHNSILQLHAVVGNKWSMIAAQMPGRTDNEIKNYWNTHMKKPPAPPPATRPSGRPPGSRPRRASPCSRPRPPRRSPPPPPPPRRPPSPPSMRRHPTSSCASGTPRSGILSAAQPRSRGTVRRRARRALACRRCCLSSAVAVTIPRPRRPTRLRPRRTTATRRSWTWRWRSSRCCTAGSARSRRSRRPTCSLRRTAAFSLRLRSSFARSHCQSSDIRVVD

SEQ ID NO: 70083 - protein, 120 aa, Zea mays
  Clone ID: UC-ZMFLMO17234A12_FLI.pep
VQNLNLEIEERERKSGKRKGKVKGLRVGRLLGSRPIWPVAPARPIPFSPCAGSADVWDLRVSRLVHRQRRRMRRKRDPWSSGVLVGDPFAAASQLPRRTRFPLWLFAGRPCNSGSGRRQL

SEQ ID NO: 70084 - protein, 228 aa, Zea mays
  Clone ID: UC-ZMFLMO17016B06_FLI.pep
STGTHQLAVQEFSFFAASICSLCSCFHRPLRPPVGKEDCRVQRGLASPLHQPQGNPCEYRIVSMHAAAKHEQAAGRLQSNLNPPPKKKNIDQVGNAVTDNYYDNIGTVTYWWTHAMISDRTYKAILRWCNFSSSSISRPCNRAMSYAMNHEFGDIDQYSIYTPSCAAAAARANATVLRFKNTLVRRRRSSGYDPCTETYAERYYNRMDVQRAMHANTTGIPYRWTACR

SEQ ID NO: 70085 - protein, 325 aa, Glycine max
  Clone ID: 700797474_FLI.pep
GKQFSNPSCQRQTIPEQTMDPKVRRIVDKQSHEEGEFSPENGAFVNNRHDTQAEFSKPAKQHANSDDSNHNRGASPGRSPTRDSGELNQGRALLLASPGKKSPGQKASEPPAPKHGQGFSKSPSPNSMPKRIKKGRGFTERYAFARRYRTPSPERSPPHSYRYGDRNIRRNFDRNTSYRSYSGRSPPRRFRSPPGGRNRPRYQSRRSRSRSISGSPVRGRFRERDRSRSPRRSPSPEDRLPLISDRLKSRLGPRSDEGLRDRGRSRSRSKSRSKGSSHSRSPDATPPKRYDKRTSVPRSRSRSSSASGQKGLVSYGDASPDSGSR

SEQ ID NO: 70086 - protein, 531 aa, Zea mays
  Clone ID: UC-ZMROB73017E08_FLI.pep
PCGTASRTPAALAKSSQQMETTAHAAASGTIQNARHRTSALKLCYHLAVSNAMYLLLAPAAAAAAHWLSRHSAAELAGSARSAAAANPPLAVALLVLGAVLATAYLMQRPRGVYLVDFACYKPGGEHVVTRETFMRQSEAAGVFTGDNLAFQRKILERSGLGQGTYFPKAVLNSPPNPCMAEARAEAEAVMFGAIDQVLAKTGVRARDIGVVVVNCSLFNPTPSLSAMIVNHYKLRGNVASYNLGGMGCSAGLISIDLAKQLLQVHRDTYALVVSMENITLNWYWGNNRSMLMSNCLFRMGGAAVLLTNRRSERRRAKYQLVHTVRTHHGADDRAYRCVFQEEDETGRVGVALSKDLMAVAGEALRTNITTLGPLALPMSEQILFLASLVARRVFGARGVRPYIPDFKMAFEHFCIHAGGRAVLDTIEKNLGLSAWHMEPSRMTLYRWGNTSSSSLWYELAYTEAQGRVRRGHRAWQIAFGSGFKCNSAVWRALRTIDPAKEKPAGGNPWVDEIHNFPVEVPKVESVVMSS

SEQ ID NO: 70087 - protein, 247 aa, Zea mays
  Clone ID: LIB3115-024-G6_FLI.pep
RFNKDVRTCTKLERAVCVCVRHFLDHGEGAGAGGGEVHDGGAAAAGGVGHAAEEGAEEPEHHRRGRQGDAGAVRVTVGPRPRAGAGGGEVHDGGGAAAGGVGHATKEGAEEPGHHRRGRQGAAAGVRVAIGPRPRDGVVVAPEDTDATAAAAGARRWVRDEGPQQELLGLPRLPAGQRLGGWTHARPPASRACAGASQGRSLLKREERKSSLAAVSLFGRNIFVPLPHVRSCMILPPFFYLPHFSKK

SEQ ID NO: 70088 - protein, 128 aa, Zea mays; identical to SEQ ID NO: 41881
  Clone ID: LIB3137-005-A9_FLI.pep

SEQ ID NO: 70089 - protein, 513 aa, Zea mays
  Clone ID: 700095525_FLI.pep
RARKRRGQKSRTGFLPPPEEMELFYELLLTAAVTLLAALLLATLFAANDSHRRTDRAAAAIAEEVAEEERIIEVDEVMRSEGMAAVAPSEADGWVEAEKAPAVVVAEVKEPESLPEEEGVPVKAVREVRLAAEVEEGEDGGGGVKRPDLTSATVVAAVGAEASQLVSGAEVVPKEVSGAAGLEERTVQDVVVNQYDLGAEVALVPVEVLEAGPDKQGVEVVGVAQVPPLETEAAEVKQHHLVAEAAPAEDVLDVGLVDKSVRAIEVRPNELDSETVLEEILDAVLEEEEQVEHELPAGAAPQPVLDVPLAGKGELKHHQPVEEAAEVHEDVQCKQEAECEAQTVDQQQELVPEEESVAGKNDDVNVIHECSFSDEVVTELPVGEVTSQGLPKDDPEADMEFEEWEGIERSEVEKRFGAAAAFAASGAGAAALSKLDSDVQLQLQGLLKVAIDGPCYDSAQPLTLRPSSRAKWSAWQKLGNMNPEIAMEKYMNLLSETIPGWMMNETLCMHVVL

SEQ ID NO: 70090 - protein, 241 aa, Zea mays
  Clone ID: 700213241_FLI.pep
SHRPSLRRLQTLTRALTSSSPQAMASSPTPKKVLVPIANGTEPMEAVITIDVLRRAGADVAVASVEPGATSVAASWGIKLTADALLADLADDEFDLISLPGGMPGSSTFGECKVLEKMVKKHVEKGKLYAAICAAPAMTLGTWGLLNGLKATCYPSFIDKLPSEVHAVESRVQIDGKCMTSRGPGTAMEYSVILVEQLYGKEKAKEVAGPMEDCLIILRRKKVMGPENSPNTGASLRRMKT

SEQ ID NO: 70091 - protein, 216 aa, Glycine max
  Clone ID: JC-GMLE01810049D12_FLI.pep
RSAGQSFACFLTPGMNIRLVGEANDYVGKGIAGGELVITPVDKTGFEPEDAAIVGNTCLYGATGGQVFVRGRAGERFAVRNSLAEAVVEGAGDHCCEYMTGGCVVVLGKVGRNVAAGMTGGLAYFLDEDNTFIPKVNGEIVKIQRVSAPVGQMQLKSLIEAHVEKTGSTKGAAILKDWEKYLSLFWQLVPPSEEDTPEANAKYDTTTADQVTYQSA

SEQ ID NO: 70092 - protein, 249 aa, Glycine max
  Clone ID: JC-GMST02400018G05_FLI.pep
LSGEKQRTQRSYDFTGVVSWFAAKCDLILLLFDPHKLDISDEFKRVIACLRGNDDKIRVVLNKADQVNTQQLMRVYGALMWSLGKVLNTPEVTRVYIGSFNDKPMDEGFVSPLGQDLFEKEQNNLLADLMDIPKKACDRRINEFVKRARSAKIHAYIISHLKKEMPAIMGKAKAQQRLLDNLEEEFAKVQREFHLPAGDFPNVEHFREVLSGYSIDKFEKLKPKMIQAVDDMLGYEIPELLKKFRNPYD

SEQ ID NO: 70093 - protein, 102 aa, Glycine max
  Clone ID: UC-GMFLMINSOY001B06_FLI.pep
YRQLVLHLPPSEPRLLAPSLRTHTHFHRPNGRCSDGRLILDFLAESLGLLYLKPYLGFKNGAVTRWNIEQGVNFAVARAMALDRGFFEEKGLIVDVTANFSL

SEQ ID NO: 70094 - protein, 454 aa, Glycine max
  Clone ID: UC-GMFLMINSOY010A09_FLI.pep
GFIKPLGQAKESNLICHLTPWDIAMMSLHYIQKGLLFKKPATLVDPQDFMENLLEKLKHSLSLTLFHFYPLAGQLVTQKTQDPPSYTIFVDCNNTSGARFIYATLDITISDILSPVDVPPIVHSFFDHHKAVNHDGHTMPLLSIQVTELLDGVFIGCSMNHTIGDGTSYWNFFNTWSEIFFQTQAQGLEYDATVPISRHPIHNRWFPDGCGPLINLPFKHEDEFIDRFESPKLRVRIFHFSAESIAKLKARANSESKSKTSEISSFQSLSAHVWRSVTRARKLPNDEITSCKLAISNRSRLEPPLPHEYFGNAVDVVSTAGFTAGELLEKDLGWAAWKVHVAVANQNDKAVRQKLKEWLKLPVVYQLGVHFDPCTVTMSSSPRFNMYGNEFGMGKAIAVLSGYANKNDGNVTAYQGYEGEGSIDLEICLSPDAVSALESDEEFMEAASVANFLH

SEQ ID NO: 70095 - protein, 880 aa, Glycine max
  Clone ID: UC-GMFLMINSOY018F09_FLI.pep
SMGASRKLQGEIDRVLKKVQEGVEVFDSIWNKVYDTDNANQKEKFEADLKKEIKKLQRYRDQIKTWIQSSEIKDKKVSASYEQALVDARKIIEREMERFKICEKETKTKAFSKEGLGQQPKTDPKEKAKSETRDWLNNVVGELESQIDNFEAELEGLSVKKGKSRPPRLTHLETSITRHKAHIKKCEFILRLLDNDELSPEEVNDVKDFLDDYVERNQDDFDEFDDVDELYSSLPLDKVETLEDLVTIPPGLSKVAPSLSLKNTLTVSASQSASASQTSEQADDTTSQDSNSDIVAKTPPCKSGGISSATSTPVDHATPVSVNVSGHNLSSAPVAVLPGSNSVRNVLENTNVINSSSVNQSTSTNEEEINSFPSRRPSPSLSDATLLKGRSSLSNQATASIPLGSGNMVSSNGALGSVSSASEIAKRNILGADDRLGSSGMVQPLVSPLSNRLILPQAAKANDGTVLVDSSTVNEAASGRVFSPSGVPGMQWRPGSPFQNQNDAGQLRGRTEIAPDQREKFLQKYQQVQQGNSTLLNMNSTLLNMPSLVGGNHKQFSAQQQNPLLQQSGIGLGVQSTSLVGISSASLQQPPNPVHSPSSQQPLMPGVSIDADVGNSKIEEQQQHQNFPDDSTTESTASTGIGKNLINEDDSKSAFALDSPAGVSASLPESAQTSRDIDLSPGQPLQPNQPTGNLGVIGRRNGAEHGAIGDNFSGSSVSSGGVRDQLYNLQMLEAAHFKIPLPKDSERPRTYTPKHPTITPPSYPQVQAPIVNNPAFWERVGLEPFGTDTLFFAFYYQQNTYQQYLAAKELKKQSWRYHRKYNTWFQRHEEPKIATDEYEQGTYVYFDFHIANDDMQHGWCQRIKTEFTFEYNYLEDDLLV

SEQ ID NO: 70096 - protein, 364 aa, Glycine max
  Clone ID: UC-GMRONOIR009A05_FLI.pep
LFNVLIRQNKVVDAVVLFRELIRLRYKPVTYTVNILIRGLCRVGEIDEAFKLLKDLRSFGCLPDVITYNTLIHGLCLINEVDRARSLLREVCLNGEFAPDVVSYTMIISGYCKLRKMEEGSLLFDEMINSGTAPNTFTFNALIDGFGKLGDMASALALYSKMLVQGCLPDVATFTSLINGHFRVRQVHQAMDMWHKMNEKNIGASLYTYSVLVSGLCNNNRLHKARDILRLLNESDIVPQPFIYNPVIDGYCKSGNVDEANKIVAEMEVNRCKPDKLTFTILIIGHCMKGRMPEAIGFFDKMLAVGCAPDEITVNNLRSCLLKAGMPGEAARVKEVLAQNLTLGTTSSKKSYHETTYVSIPVAV

SEQ ID NO: 70097 - protein, 226 aa, Glycine max
  Clone ID: UC-GMRONOIR009F06_FLI.pep
HPSEMGVISWRVLWVWWLSIWWLVDRRLLNRWLVNRRFLHWGLVNWRFLYWWLVNWRLLYWWLVHWRLLNWWLVYWWLLNWGLVNWWLLNWGLVNWGLLNWGLVHWWFFNWGLVHWGFFNWGLVNWGFFNWGLVHWWFLNWGLVHWWFFNWGLVHWGFLNWGLVHWWLLYWRLINWGVFNWRFVNRRLLNWGLINWWFLKWEACTLGDSHSLQELEGIELECKEQH

SEQ ID NO: 70098 - protein, 477 aa, Glycine max
  Clone ID: UC-GMRONOIR017C12_FLI.pep
ILHTPRVFFSFPEKLLVWLVKVLETWTILVAIVCILVFVLKEIVMGGKSSKGSGRRYDFGASSSSRDNNYGGYHPQSPYPSYQTPQHPRASAPFYDYAQPKRKLDKKYSRIADNYRSLDEVTAALANAGLESSNLIVGIDFTKSNEWTGKRSFNRKSLHDIRSGQNPYEQAISIIGKTLSAFDEDNLIPCFGFGDASTHDQDVFSFYSEERFCNGFEEVLTRYRQIIPSLKLAGPTSFAPIIEMAMTIVEQSGGQYHVLLIIADGQVTRSVDTQNGNLSPQEQNTIDAIVKASEYPLSIVLVGVGDGPWEMMREFDDNIPSRAFDNFQFVNFTEIMTRNVDSTRKETDFALSALMEIPSQYKATLELGILGSRRGHSPDRVALPPPLYSRTSSSISTKSTRSNSFQQRTPTHTSYDSSVHTETSSSSLYDNKVCPICLTNAKDMAFGCGHQTCCECGEDLQFCPICRSTIHTRIRLY

SEQ ID NO: 70099 - protein, 873 aa, Glycine max
  Clone ID: UC-GMRONOIR030A10_FLI.pep
KCGVLLIAKMFGIFDKGQKIKGTVVLMPKNVLDFNAITSIGKGGVIDTATGILGQGVSLVGGVIDTATSFLGRNISMQLISATQTDGSGNGKVGKEVYLEKHLPTLPTLGARQDAFSIFFEWDASFGIPGAFYIKNFMTDEFFLVSVKLEDIPNHGTIEFVCNSWVYNFRSYKKNRIFFVNDTYLPSATPAPLLKYRKEELEVLRGDGTGKRKDFDRIYDYDVYNDLGNPDGGDPRPILGGSSIYPYPRRVRTGRERTRTDPNSEKPGEVYVPRDENFGHLKSSDFLTYGIKSLSHDVIPLFKSAIFQLRVTSSEFESFEDVRSLYEGGIKLPTDILSQISPLPALKEIFRTDGENVLQFPPPHVAKVSKSGWMTDEEFAREVIAGVNPNVIRRLQEFPPKSTLDPTLYGDQTSTITKEQLEINMGGVTVEEALSTQRLFILDYQDAFIPYLTRINSLPTAKAYATRTILFLKDDGTLKPLAIELSKPHPDGDNLGPESIVVLPATEGVDSTIWLLAKAHVIVNDSGYHQLVSHWLNTHAVMEPFAIATNRHLSVLHPIYKLLYPHYRDTININGLARQSLINADGIIEKSFLPGKYSIEMSSSVYKNWVFTDQALPADLVKRGLAIEDPSAPHGLRLVIEDYPYAVDGLEIWDAIKTWVHEYVSLYYPTDAAVQQDTELQAWWKEAVEKGHGDLKEKPWWPKMQTTEDLIQSCSIIVWTASALHAAVNFGQYPYGGLILNRPTLARRFIPAEGTPEYDEMVKNPQKAYLRTITPKFETLIDLSVIEILSRHASDEIYLGERETPNWTTDKKALEAFKRFGSKLTGIEGKINARNSDPSLRNRTGPVQLPYTLLHRSSEEGLTFKGIPNSISI

SEQ ID NO: 70100 - protein, 624 aa, Glycine max
  Clone ID: UC-GMRONOIR030E10_FLI.pep
QISPPSQQPPQSSSATHQGGHHRHTSSGHHRSSGMTASSSRAPNRTRTGDDLHIGKYKLLKTIGKGNFAKVKLAKHVPTGVEVAIKIIDKTALNQSSLQKLFREVRIMKQLDHPNIVKLYQVIESETTLFLVMEYASGGELFDYLVAHGRMKEKEARAKFRQIVSAVQYLHSKNVIHRDLKAENLLLDADMNIKIADFGFSNTFSPGNKLDTFCGSPPYAAPELFQGKKYDGPEVDVWSLGVILYTLVSGSLPFDGQNLKELRERVLRGKYRVPFYMSTDCENLLKKFLVLNPIRRGTLEMIMRDKWMNMGYEEDELKPYTEPTKDVRDERRILKLQAFGYTLQQIHESLERERFDEIFGTYLLMKEAKKHDAQGQSLGGSGPNATAESPFNQSMGPTVPQSHGPTVSNAKNSRRSSSNAEQIQPQQHAITSHSVINQQSAAPIQQISATPQAIPSRQSQTAPGQVTFRTAQFTSRQPTLSVQPQAYIHPIQSANVRNITATSSASSGGRKGSAPAGRVPLPNLGLRHGINQPGVSYRYAPPVPGSGSSEKPNGGSSSARGAPPPTFFNQQLQTPIAPNPISAKLVAKATHQMNSNLISTSSVMQKKHFSRPTRAINKGGADGR

SEQ ID NO: 70101 - protein, 450 aa, Glycine max
  Clone ID: UC-GMRONOIR031D10_FLI.pep
ALTSSERDVIAMSGVDTAVYFVFLTTVLSILVLSGVILLPVLLPLSVTDHGMKTQTTSNGTFSELDKLSMANITAKSSRLWGFFIACYWVSIVTFALLWRAYKHVSWLRAEALKSPDVKPEQFAIVVRDIPHVPQGQTRKEQVDSYFRDIYPETFYRSMIVTDNKVVNKIWESLEKYTKKLARAEAVYAGSKTTAKPEGTRPTNKTGFLGLVGKKVDTIEYCNEKINELEARLESEQKVTLREKQQDAAVVFFSSRVVAASASQSLHAQMVDTWSVFDAPEPNQLIWPNLKIKYFQRELRQYLVYFIVALTIFFYMIPITFISALTTLDNLVKYLPFIKPIVNIKALKTVLEAYLPQLALIIFLALLPKLLLFLSKFEGIPTESHAVRAASGKYFYFTVLNVFIGVTIGGTLFKAFKRIREHPTLDEISSLLAESLPGNATFFLTYVALK

SEQ ID NO: 70102 - protein, 462 aa, Glycine max
  Clone ID: UC-GMRONOIR031D11_FLI.pep
GTSLAASSLPRAAHTKRLLLYYCLTMADAHGTDKNIEVWKIKKLIKALEAARGNGTSMISLIMPPRDQISRVTKMLGDEFGTASNIKSRVNRQSVLGAITSAQQRLKLYNKVPPNGLVLYTGTIVTDDGKEKKVTIDFEPFRPINASLYLCDNKFHTEALNELLESDDKFGFIVMDGNGTLFGTLSGNTREVLHKFSVDLPKKHGRGGQSALRFARLRMEKRHNYVRKTAEHATQFYINAATSQPNVSGLILAGSADFKTELSQSDMFDPRLQAKILNVVDVSYGGENGFNQAIELSAEILSNVKFIQEKRLIGKYFEEISQDTGKYVFGVDDTLKALEMGAVETLIVWENLDMNRYVLKNSATGEVVIKHFNKEQDANQSNFRDPESNADFEVQEKLSLLEWFANEYKRFGCTLEFVTNKSQEGSQFCRGFGGIGGILRYQLDMRSFDDFSDDGGVYDDSE

SEQ ID NO: 70103 - protein, 813 aa, Glycine max
  Clone ID: UC-GMRONOIR042H06_FLI.pep
EFCLQLMAQILLHGTLHATIYEVDKLKIGGGNFLTKIVQNIEETVGIGKGVTKLYATIDLEKARVGRTRIIEKEIKNPRWYESFHIYCAHMASNIIFTVKDDNPIGATLIGRAYVPVQEILHGEEIDRWVEILDEHKNPIHGHSKIHVKLQYFDVSKDRNWALGIRSPKFPGVPYTFFSQRRGCKVSLYQDAHVPDNFVPKIQLSGGQTYQAHRCWEDVFDAITKAQHLIYITGWSVYTEISLVRDSRRPKPGGDETLGELLKKKAREGVRVLMLVWDDRTSVPLLKKDGLMATHDQETEEYFRGTEVHCVLCPRNPDDGGSFVQDLEISTMFTHHQKIVVVDGELPSGDSNKRRIVSFVGGIDLCDGRYDTQFHSLFRTLDTAHHDDFHQPNFGGSSIKKGGPREPWHDIHSRLEGPIAWDVLFNFEQRWRKQGGKDLLVPLRDLEDVIIPPSPVTYIDDHETWNVQLFRSIDGGAAFGFPETPEDAARVGLVSGKDNIIDRSIQDAYVNAIRRAKNFIYIENQYFLGSSYDWSADGIKPEAIDALHIIPKELSLKIVSKIEAGERFSVYVVVPMWPEGVPESASVQAILDWQRRTMDMMYKDVVQALRAKGIVENPRNYLTFFCLGNREVKKQGEYEPPERPDPDTDYIRAQEARRFMIYVHAKMMIVDDEYIIVGSANINQRSMDGARDSEIAMGAYQPFHLAARQPARGQIHGFRMSLWYEHLGLLHDSFLHPENEECIKKVNQIADKYWDIYSSESLEHDLPGHLLRYPIGVSNEGVVTELPGFEFFPDTKARVLGDKVDYLPPILTT

SEQ ID NO: 70104 - protein, 1036 aa, Glycine max
  Clone ID: UC-GMRONOIR058A01_FLI.pep
NVFFPFMGEHAIPQCFQHLMAKKLLFLLTLLEILLCGQSKFMVYNTSQGIVPGKLNVHLVAHTHDDVGWLKTVDQYYVGSNNSIQGACVQNVLDSMVHALLADKNRKFIYVEMAFFKRWWRDQSEAVQDVVKKLVSSGQLEFINGAMAMHDEAVTHYIDMIDQTALGHQFLKEEFGVTPRIGWQIDPFGHSAVQAYLLGAEVGFDSFFFGRIDYQDRAKRKKEKSLEVIWQGSKSLGPSAQIFAGAFPENYEPPSGFYFEVNDASPIVQDNMQLFDYNVQDRVNDFVAAALLQANITRTNHIMWTMGTDFKYQYAHTWFRQLDKLIHYVNMDGRVNALYSTPSIYTDAKYATNESWPIKTDDFFPYADRANGYWTGYFTSRPAIKRYVRLMSGYYLAARQLEFFRGRVNSGPNTDSLADALAIAQHHDAVTGTEKQHVANDYSKRLSIGYKEAEELVSSSLACLVESPLLTRCQNPVTKFQQCPLLNISYCPASEVDLVQGKNLVIVVYNSLGWRRNEVIRIPVIEANVRVHDSNGIEIESQLLPQAEKYVDLRNYYVKAYLGQTPPKAPKYWLAFTVSVPPLGFSTYTVSTAKRTGSTRSSVDIYKSSEKSKFDVGQGNLKLTFSMDQEKCTNYVNIRNLVEEQVELSYLYYSGYNGTNQKDPQNSGAYIFRPNGTHPINHEKKVPLTVLHGPVLDEVHQQINPWIYQITRLYKGKEHVEVEFIVGPIPIEDGIGKEVATRISTTMETNNMFYTDSNGRDFIKRIRDYRTDWDLEVNQPAAGNYYPINLGIYTEDNKTEFSVLVDRAIGGSSLQDGQIELMVHRRLLLDDSRGVDEALNETDCVGDDCRGLTVQGKFYYRIDPLGEGAKWRRTFGQEIYSPLLLAFAEKDDKDDWMNSRVLTFSGIDSSYALPDNIAIITLQELDDGTVLLRLAHLYEIEEDKDLSVIATVELKKLLPGRKIKEVKEMSLSANQERTEMEKKRLAWKVEGSSGSKQVSRGGPVDPKELNVELAPMEIRTFILDFDDVSNQLFDAL

SEQ ID NO: 70105 - protein, 718 aa, Glycine max
  Clone ID: UC-GMROPIC006G10_FLI.pep
KEREEQIQHSDTHKVTLPMMLIGDGAGCRKVLVGVKLDPRSRELLTWALVKVAEPGDLVIALHVLDSITEGTASLLSLVKTFDSVLGVYEGFCNLKQVGLRLKVCRGGSVRKALVQEAKAFGVSTVILGTSKSYHTIRSSAWVAKYCAKKLPKCISVFSVDNGKIAFRREANGNCSDREKLCEGSSLSSKSLVVYTNKNMKSCGSCALQEGSGTEFEQGLCEDVEKENPLALVPFKKLEDAPCFSVVVDNSKPKPGWSLLRHVFHHKKHNHKSSSMKNTFVFQRALRQPNCHSSAVVHPDHKQISFKQIDDSPLDGVSGAIVPFESATTTLFTLPSICSGLSSLPEELLVLQEKYSSLCRLYRLQELLSATSNFASDNLIGRGGCSYVYRGCLPDGEELAVKILKPSENVIKEFVQEIEIITTLRHKNIISISGFCLEGNHLLLVYDFLSRGSLEENLHGNKVDCSAFGWQERYKVAVGVAEALDYLHNGCAQAVIHRDVKSSNILLSDDFEPQLSDFGLASWGSSSSHITCTDVAGTFGYLAPEYFMHGRVTDKIDVYAFGVVLLELLSNRKPINNECPKGQGSLVMWAIPILEGGKFSQLLDPSLGSEYDDCQIRRMILAATLCIRRVPRLRPQISLILKLLHGDEEVIRWAEQEVIAPQELDGCDEEPVPTNIQSHLNLALLDLEDDTISISSTEQSVSLEDYLQGRWSRSSSFD

SEQ ID NO: 70106 - protein, 760 aa, Glycine max
  Clone ID: UC-GMROPIC011D08_FLI.pep
KKKNYSRTATTTDNKRTTTLVFKSMKMLPPPTAGGASHSGAGDRTVVVGMKMDSHSTELLTWALFKVAQPGDVVLALHVLGNDEIVNREGKSSLFSLVKAFDSILAVYEGFCNLKQVDLKFKICRGSSVRRILVREANAYSATHIIVGSSQGLHIIRPCISVARYCAKKLPKDCWVLAVDNGKIVFKREGSPATRAELKGLDQDHKTRLLGSIHRTISKGSKVLDDDGTGIHEKGCGNGEYSDHSLAKAFLDSKEFVEKKRCSICASEEESCGDASDENNPLAIVPVQTNDAASKPGWPLLRKTIVSDKKCSEKSLLRQISVVQWAMQLPSRDLSYAAHQDHKANNCDQNKDQFLALDSKSGALVPVDAEIGTASSPERNSRSIPKELEGLHEKYSSTCRLFEYQELVLATSNFLPENLIGKGGSSQVYRGCLPDGKELAVKILKPSDDVLKEFVLEIEIITTLNHKNIISLLGFCFEDGNLLLVYDFLSRGSLEENLHGNKKNPLVFGWTERYKVAMGVAEALEYLHNNEGQSVIHRDVKSSNVLLSEDFEPQLSDFGLAKWASTSSSHIICTDVAGTFGYMAPEYFMYGKVNDKIDVYAFGVVLLELLSGRKPISGDYPKGQESLVMWASPILNSGKVLQMLDPSLGENYDHEEMERMVLAATLCIRRAPRARPLMSLISKLLGGDPDVIKWARLEANALEAPEMLDGEACPPSNLQSHLNLALLDVEDDSLSMCSVEQNVSLEDYLRGRWSRSSSFD

SEQ ID NO: 70107 - protein, 424 aa, Glycine max
  Clone ID: UC-GMROPIC013G04_FLI.pep
PIQSMASSLSPSPSSLDQTLRDVDDYVLENGSEGLSRDTLHYVYELVKNGNVAFRENRMEEAINFYSRANNIKSGDPIILSNRSAAYIRISQYFMHRTPSSSERRPLSGLEPTTLAELGLKDAEKLVELQSNSAKSYLLKANAFLLLEKYEKARDVILSGLQVDPFSNSLRASLQNLESVSSSSRGMSTHGHPERNDDFDCTLCLKLLYEPVTTPCGHSFCCSCLFQSMDRGNKCPLCRTVLFISPRTCSISVTLKNIIQKNFPEEYAERKQEHDSLIKAGVDLLPLFVMDVVIPCQRFPLNIFEPRYRLMVRRIMEGNHRMGMAILDSTGSLAEFACEVEITECEPLPDGRFYIEIESRRRFRIIHSWDQDGYRVAEVEWIQDIMPPEGTSERDTLQQQTYNAVEDARSWIARAKEAARHGNF

SEQ ID NO: 70108 - protein, 411 aa, Glycine max
  Clone ID: UC-GMROPIC014B05_FLI.pep
RSLQKLSKDLKETQQDRDKVVQELNRLKQHLLEKASEDSDKMDEDSKIIEELRDSNNYLRAQVSHLGRTLKQALASQEELKMANDSEILKSKEAINDLNKKLANCMSTIDAKNIELLNLQTALGQYYAEIEAMEHLERELAHAREEIAKLSQLLKEADHRADVSRNEKEEILGKLSQSEKVQTEWRSRVSKLEDDNAKLRKVLEQSMTRLNRMSIDSDYLVDRRIVIKLLVTYFQRNHSREVLDLMVRMLGFSDEDKQRIGGAQHGSGKGVVRGVLGLPSRLVGGLLGGNSTDTAANAGSDNQSFADLWVDFLLKETEEREKRESSENTGKAMENSSDKSPYTIPVTPPFSNRRFDAGTPSAFQITPTNQNISRPPRGYFQHSEHFDSEFSTVPLTSSDGKTTSSNQHPRY

SEQ ID NO: 70109 - protein, 795 aa, Glycine max
  Clone ID: UC-GMROPIC015G02_FLI.pep
FPFSHNGGFSRQPSIRHPHKRRRSRLRPRLQYPSPVGFRFGLIQRRRRPKRRRFVSQGVDTKSERGNRGVAVGPARRGNRGPVDPAERLHGAAHREAPLQLGGPTPPLRHVLKRCGILARMKGAMYVSFEGAEDLPGGGGSKYGTSVKREMAMDPSRDIILAFMQNGEPLAPDHGFPVRMIIPGFIGGRMVKWLKRIVVTEHECDSHYHYKDNRVLPSHVDAELANDEGWWYKPEYIINELNINSVITTPCHEEILPINSWTTQRPYVIRGYAYSGGGRKVTRVEVTLDGGETWHVCTLDHTEKPNKYGKYWCWCFWSLEVEVLDLLGAKEIAVRAWDEGLNTQPEHLIWNVMGMMNNCWFRVKTNVCKPHKGEIGIVFEHPTQPGNQPGGWMAKEKHLEKSQKPKPTLKKSVSTPFMNTSSKMFSISEVKKHSNPDSAWIIVHGHVYDCTRFLKDHPGDTDSILINAGTDCTEEFDAIHSDKAKKLLEDYRIGELITTGYTSDSSPNNSVHGNSEFTHLAPIKETTTPPSRSVALNPREKIPCKLVSKTSISHDARLFRFALPSEDQLLGLSVGKHIFLCATIDGKLCMRAYTPTSSVDEVGFFDLLIKVYFKGVHPKFPNGGLMSQHLDSLPIGSMLDVKGPLGHIEYTGRGNFMVHGKPRFAKRLAMLAGGTGITPIYQVAQAILKDPEDHTEMHVVYANRTEDDILLREELDEWAKIHNDRFKLWYVVEIAKEGWKYSVGFITESITREHLPKASRDSLALTCGPPPMIQFAVQPNLEKMGYDIKNDLLVF

SEQ ID NO: 70110 - protein, 305 aa, Glycine max
  Clone ID: UC-GMROPIC019F04_FLI.pep
ANGVEPPKRSGNLWLCKTTSDGSSEFIDLDILVSKLSCNDIEELRCAVGELRLLAKQNSQNRMLIAEVGAIPHLVDLLYAPDAGTQEHVVTALLNLSINVDNKERIMASEAVPGILHVLENGSMEARENAAATFFSLSRVDENRVAIGASGAIPALVTLFCEGSQRGKVDAAKALFNLCLSQGNKGRAIRAGIVPKLIEMLTEPDGDMRDEALTIMAVVANHSDGQAAIGSMNVVSTLVELVSNGSPGNKENATSVLLLLCNGDPFYLSIVSSLGLVNPLLDLAGNGSERAKRKASQLLELIGNH

SEQ ID NO: 70111 - protein, 162 aa, Glycine max
  Clone ID: UC-GMROPIC028F03_FLI.pep
SSNIISCSKHLSTTTAYTLISHLHKGVRSTHNPNPLYAFTLNFDYLSPSYYSLISSLDFVSIPKSTREAMANHNWQQPMLAEMAAQDANNTWELVPLPPNKSTVGCHWIYTMKIAPYGTIDRYKARLVAKGYIQIFGLDYCDTLSPVTKMTSIHLFHAMAAI

SEQ ID NO: 70112 - protein, 393 aa, Zea mays
  Clone ID: UC-ZMFLB73252E09_FLI.pep
NSICDSLARALRSCHSQPFSFVEEGDTGASGMISLAEYLGTNVADHIPETPNNLSEEMVRCMAGIYCRLADPPLVHHGSSSSPSSSFSSTSAISPQYVGDMWSPKYRREATLDSRLINPFHVDGLKEFSGPYNTMVEVPMISRDSRRLKEAEDLLQTYKLILYRLEAVDLRRMTDEEKIAFWVNIHNALLMHAYLKNGVPQNNLKKTSLLVKAACKIAGRNINAAVIQSIVLGCNTHCPGQWLRTLLYPRIKSKVSKAGHEWRAFAVAQPEPLLRFALCSGSHSDPAVRVYTPKRLFHQLESAKEEFIRATAGVWKEQKLLLPKLVEAYAKDVKLSPQGLVDMVQRYLPESMRMAVQRCQHGGRSSGKVVEWVSYNPAFRYLLARDLAFPHLS

SEQ ID NO: 70113 - protein, 462 aa, Zea mays
  Clone ID: UC-ZMFLB73263H10_FLI.pep
KVEEHTAMGKGKRSRKQMAAADEDDIHDLSSEDEDYSLEDDISDNDTSLQGNISGKRGQYSKRKSRNVDSIPLMEGEGRTLRVLGFNHAQRAMFLQTLNRFGFQNYDWKEYLPRLKGKSVEEIQRYAELVMAHLVEEINDSDYFSDGVPKEMMRVDDVLVRIANISLIEEKMAATGPGKITNIFPNYLLYEFQGLSGGRIWKAEHDLLLLRGILKHGYARWQYISDDRENGLFEAARRELHLPSVNEIIGAQLNEANGNLEGAQEGQANTTSMSHYKEIQRKIVEFLRKRYHLMERALNMEYAVIKKKIPVPDDITEQGVPAGHAPFIPDISELLRELPNLEPISTNELVSEGTAGQLQVPHLYNKMCGVLEESGAYALSSFFGDKSASSSLANSLRQFETVCENVVEALRPHQNGTGSAIKEELVDAATKAAAAAAPQQDSGHDAPHGQSSTAKADMEIDG

SEQ ID NO: 70114 - protein, 202 aa, Zea mays
  Clone ID: UC-ZMFLB73286E04_FLI.pep
EAPVSSNCAVERLFLKLQRLSKGLQKWGQRKVGNIKVQMEMAKEILHRLEIERDSRDLSEQEWLRRKLKLHCLGLASLERTIARLRSCILYLQDGDANTAFFHQQARFRKKNFIPKLNVGDQIAVSQEDKQAVVLDFYENLLGKAEEPIYTVDLAELGIQQIELSQLDAPFMEAELWATIKDMPMDKAPGPDGFTDHFYKSC

SEQ ID NO: 70115 - protein, 310 aa, Zea mays
  Clone ID: UC-ZMFLMO17037B06_FLI.pep
LVNKFYYQILLFICLLTSKQISQVSLSLVFDRGVKSCVRYLDAVPWSESEEETIKRLMSQHPSYKAALRNLLAARLQPAERPASSAEAELVVELADSITKGTNNNARKELRNRICHSCLNSLARLLGEESPEPDQTSLPSVGRGGVPVPPPETETESIYRLVEDINWLLQILIDRQMGEEFVELWADQTSLSGVHGRASPMVRHELSRISATVFIAMGSGRLQCAGARRFGVFQAWFRPMLADFGWLRRYPKGLNVTALEEGIGQALLTLTLEQQQALFLEWFGAFGSHGRECPDLMRAFQVWWRRSFVR

SEQ ID NO: 70116 - protein, 359 aa, Zea mays
  Clone ID: UC-ZMFLMO17118H03_FLI.pep
LDIPVQVNKLQRQLQEEIDLHMALTDAITYNAALILKASMKLPDKAHELLISISSLETAITKLEEDLHHLHYQLCDARNERLLAENKPECLLPTASDCQPSTACDCTREEPEQTLRYSRFKDYHQVEDGLSTEPEDQQDDEKDAEDGEHVSLNMLMQEACSMENEGKEDQKIDALTFSQPNFKKSDMSGNLWNNPNQLSEEMVRSMKDIFLHLSASPKISREEPFANSSSSAERLSGSTLTTLSDSSIIASVLRSPSIDWNNGDGIIDDVRNFDPYNVKGKEARRDVGSYCSVAEVSWMYIGNEQLEYASGALKKFRFLVEQLSKVDPSCMNCDEQIAFWVNLYNALIMHVSLFGIRCP

SEQ ID NO: 70117 - protein, 334 aa, Zea mays; identical to SEQ ID NO: 64475
  Clone ID: UC-ZMFLMO17236G06_FLI.pep

SEQ ID NO: 70118 - protein, 513 aa, Zea mays; identical to SEQ ID NO: 57054
  Clone ID: UC-ZMFLMO17248B10_FLI.pep

SEQ ID NO: 70119 - protein, 75 aa, Zea mays
  Clone ID: UC-ZMFLMO17238G04_FLI.pep
YVNILFIHQADRIHTKYTQTVHLTLQQTVHVHSAVVSYTLNCSRSTGRVARPGTRPYVLSSIAKRLNQAPSSLVP

SEQ ID NO: 70120 - protein, 153 aa, Zea mays
  Clone ID: UC-ZMFLMO17253F10_FLI.pep
TLVFSTVMVSLIGQGLSLPWVVKKLQLSKPSPLAQKIAMLQLNLVTAKAAQGELKYLLEAGSLPKFLYEELFADYQARIANSEQELREFYNQRNLIFSEGEVEKKYIDGLYRRLYIAEKSAINDALAKGILADDISDEYLQVLNEKLLALQDD

SEQ ID NO: 70121 - protein, 120 aa, Zea mays
  Clone ID: UC-ZMFLB73011C04_FLI.pep
TPLPSVCFQTVSEMSTFHFSVLGGLRSVLRCIHQDPTCSGSNCLQDQTKAAPECGGTVLMLKVRNISIQSETDRSLSVCPVDGASSTIRLSLSASCTSMDFISWPRKQCRPFDFLCLWCG

SEQ ID NO: 70122 - protein, 914 aa, Zea mays
  Clone ID: UC-ZMFLB73017G11_FLI.pep
YLQNLDLSRNSIQGPIPASWADLPVFNLSLQGNRIFGTLPKELGRMPKLKSIQLEGNQLAGSIPPELGNIISLQRFFISANNITGELPSTFSRLTNMTDFRVDGNSISGKIPSFIKNWQSVNRIDMQGTLMSGPIPPEISLLKNLTELRVTDLSGPRMKFPPLQNALHLTEVVLRNCSIYGEIPSYLGQMQYLKVLDLSFNKLTDKVPENFGAMIALQYLYLTDNMLTGDLPAWMLKNKASNKVNMDISYNDFTGNPPSECQQANVNMVSSFSSSNNNSLQPCLRKNLPCTTRPRHSSLFINCGGKSVVVDGNTYEDDSSQIGTSMYSVSDDKKWAYSSTGDFVGNENADYIARNTSKLNLAYPELYTEARLSPLSLKYYGLCMENGEYTVKLHFAEIVFTEDRTYSSNGKRVFDVFIQGVKVLEDFDIKDESGGVHRATIKFFATNISENTLEIHFYWGGKGTTAIPYRGVYGPLISAISVTKMGRNHHGLSTGVAVAIVIVATCLAVIVLISLYFKVFRKKNIKGNGRQFFYQGRKTATSELQTRAQYFFSLKEIESATKHFDPANKIGEGGFGPVYKGTLANGTIVAVKKLSSKSSQGNREFLNEIGIISALRHPNLVRLFGCCIDGDQLLLIYEFLENNSLGRALFGRTEHQLKLDWPTRYNICLGTAKGLVYLHEESALKIVHRDIKPSNILLDGKMRPKISDFGLAKLNDDCGRVSTRIAGTVGYMAPEYATRGCLTRKADIYSYGVVALEVVSGMSNTNSMSNEEYLHLLDWAERLKQQGKLLEMVDRRLGSDYSQEQALRLLDVALLCTSIQPTQRPRMSSVVKMLCGEIPVEIVPADDDLSEDLRLNIAQSRQSIDNSQTNWSQYSVNNSQTNWSETLSSDRSVLPHSSKDSGYLPSSSSLSVKL

SEQ ID NO: 70123 - protein, 515 aa, Zea mays
  Clone ID: UC-ZMFLB73001C11_FLI.pep
SGYLATSLFYFHFTFNLFSSIASSAVAVSIAVSCSLFLVLLLLTMDAGTYSISSEKSHTAAAARPPLQEAGTRPYMPSLSTGSRNPSAKCYGDRFIPDRSAMDMDMAHYLLTEPRRDKENAVAASPSKEAYRRLLAEKLLNNRTRILAFRNKPPVSENVSAAITASSHHAKLVKQRRHIPQSAERTLDAPELVDDYYLNLLDWGSNNVLSIALGDTVYLWDASSGSTSELVTIHEDSGPITSVNWAPDGHHIAIGLNSSDIQLWDTSSNRLLRTLRGVHEERVGSLAWNNNILTTGSMDGKIVNNDVRIRNHVVQTYEGHSQEVCGLKWSGSGQQLASGGNDNLLHIWDVSMASPMSTAGRNQWLHRLEDHMSAVKALAWCPFQSNLLATGGGGSDRCIKFWNTHTGACLNSVNTGSQVCALLWNKNERELLSSHGFTQNQLTLWKYPSMVKMAELSGHTSRVLFMAQSPDGCTVASAAADETLRFWNVFGDPEVAKPAAKASHTGMFNSFNHIR

SEQ ID NO: 70124 - protein, 573 aa, Zea mays
  Clone ID: UC-ZMFLB73017H01_FLI.pep
SAIVKSFSCRGREGFANMALAGTSKVVLGCIAFGIFWVMAVFPTVPFMPVGRTAGSLLGAMLMVLFRVISPEDAYAAIDLPIIGLLFGTMVVSIFLERADMFKYLGNLLSWKSRGSKDLLFRVCIVSAFASALFTNDTCCVVLTEFILKVARQNNLPPQPFLLALATSSNIGSAATPIGNPQNLVIAVESGISFGQFLLGVFPAMIVGVLTNAAILLLYFWKYLSVEKDQEGGQPTGPEVVADDEVTSHRFTPARMSHVSSLNPDDMDCVSEPIIRSNSVSTTGNENLRSRSINSEADIQLAIKSLRASSMSHEMVEVSTVPDRRDEGASSRKFTRTASQQRSVIIEDLAPSPEINGEKEKETEVAEKRWKVLVWKTAVYLITLGMLIALLMGLNMSWTAITAALVLLALDFTDAQACLEKVSYSLLIFFCGMFITVDGFNKTGIPNTLWELVEPYSRIDSAKGVALLAVVILILSNVASNVPTVLLLGTRVAASAASISHGSERKAWLILAWVSTVAGNLTLLGSAANLIVCEQARRAQFFGYNLTFWSHLRFGVPSTIIVTAIGLLIVISY

SEQ ID NO: 70125 - protein, 560 aa, Zea mays
  Clone ID: UC-ZMFLB73017H11_FLI.pep
FGKASGMAPRARVAVYKVLYRLFGGYVADVVAAIDQAVQDGVDILNLSVGPNSPPTATRTTFLNPFDAALLSAVKAGVFVAQAAGNGGPFPKTLVSFSPWITTVAAGVDDRRYKNHLTLGNGKLISGLGVSPATHGNMSFSLISAADALLGSSASKYSALDCQRPELLNKRKVQGKILLCGYSFNYISGTASIKKVSQTARSLGAAGFVVAVENSYPGTKFDPVPVSIPGILITDVSKTEDLIDYYNSSTVRDWAGRATAFKATAGIADGLAPTLYNSAPQVALFSSRGPDVKDFSFQDADVLKPDILAPGNLIWAAWAPNGTDESNYAGEGFAMVSGTSMAAPHIAGIAALIKQKNPKWSPSAIKSALMTTANTLDKGSHPLRAQQYTASEMMTLSRATPFDCGSGAVNPKGALDPGLVLDASHEDYITFLCSIPDVNQSEVSNIAGSACNSNSKGQRPFDLNIPSIAVSQLRGTVVVKRTVTSVSDETETYTIMTRMPPEVALEVTPPAVTVVPGASREITVTLTARSVTGTYSFGEIAMKGDRGHLVRIPVVAMGFK

SEQ ID NO: 70126 - protein, 631 aa, Zea mays
  Clone ID: UC-ZMFLB73020H11_FLI.pep
PKGNKGNQRTRRMKFMKLGSKPDAFQSDGADVRYVVSDLATDVVVHVGEVKFYLHKFPLLSKSGKLQRLVLKAAEDETDEVRIDDLPGGAKSFEICAKFCYGMVVTLSPHNVVAARCASQYLEMTEDMEKGNLIFKIEVFINSSILRSWKDSIIVLQSTKALSPWSEELKVVGRCIDAIASKTSADPANVTWSYSHSSKKGGACAEIVEPAGKPSIAPKDWWVEDLCELDVDLYKRVMVAIKSKGRMSPELIGEALKAYAVRWLPDSYDALVAEDYMRRNQCLVETIIWLLPSDKSSGCSCRFLLKLLKVAILVGGGEHVKEELIRRISFQLHKATVKDLLLPATSPNDGTYDVRLVHNLVQRFVARTALSHNGGFIEKSDEKMIELNFEQESILSVGELVDGYLSEVASDQDLSLSMFVELATAVPEVARPVHDNLYYAVDAYLKEHPDINKSEKKKICSLVDVKKLSADASVHATQNDRLPLRLVVQVLFFQQLRAGPSKELALIDNGEHACTRPTQDQCDRGERRIPKHPNSLNKQVTSLSARESQQHRISEHRGGRNSFKDQLGGLLLQSRSRRIFDKLWSSKGQGEHGGKGSETSGSSQSPPLSAKPAEVKPSPLPPLRGRRYSVS

SEQ ID NO: 70127 - protein, 677 aa, Zea mays
  Clone ID: UC-ZMFLB73013B05_FLI.pep
AAPAFAAALSADGLSLLAFKSAVTDDPSMALSSWSDADADPCRWLGVTCVNSSSSDGLRVVGVAVAGKNLSGYIPAELGSLAFLRRLNLHGNRLSGTVPAALANATALHSLFLYDNRLTGPFPAALCGIPKLQNLDLSQNALTGALPLELGRCKQLERLLLAENALSGNIPAAVWQDMVGLQMLDLSSNNLTGAIPAELGKLAALAGTLNLSHNHLSGGVPLELGRLPATVTLDLRFNNLSGEIPQSGSLASQGPTAFLNNPGICGFPLQVPCRVAPPSSSSLPPPPPSSSATTNGGAGGARLPIKTSLIVLISVADAVAVALVGVIVVCVYWKVCDRRRAAKDKGDDSEYEEGCGLFPCPCCMRADACGDSSSECSEVDGKCNGGGGTGEGGYLVAIDKGFRMELDELLRSSAYVLGKGGKGIVYKVVVGNGTTPVAVRRLGGGTAAPERYREFAAEAGAIGRVRHPNIVRLRAYYWSADEKLVITDFVNNGNLATALRGRSGQPSLSWTLRLRIAKGAARGLAHLHECSPRRFVHGEVKPSNILLDADYNALVADFGLARLLTIVGCTDVYSVAGSGGIMGSGLPYARPAALTDRSCSAYRAPEARAPGGAQPPSQKSDVYSFGVLLLELLTGKPPEHASPSASSSSMPGHNGQRELEQQAPELVRWVRQGFEGA

SEQ ID NO: 70128 - protein, 891 aa, Zea mays
  Clone ID: UC-ZMFLB73013E07_FLI.pep
ERSRISARAGGRAAMHLKLWKPLSHCAALLLDKKNRPPRTPPAGAGAGSGGGRRLQESKLREALEEASEDGSLAKSRDVALLDGGDGGAEEGSVGRSRSLARLHAQRDFLRATALAAERAFQSPDALPVLEEALAKFLVMYPNYASASDVDRLRADEYPHLDKVCLDYCGFGLFSYLQSCNPADSSAAFTLSEITANLSNHALYGAAEKGTAEHDIKNRIMDYLNIPESEYCLVFTVSRGSAFRLLAECYPFGTNKRLLTMFDHESQSVNWMTQVARDKGAKAYSAWFKWPTLKICTTELRKLISTKKRRRKDSATGLFVFPVQSRVTGAKYSYQWMALAQQNHWHVLLDAGALGPKDMDSLGLSLFRPDFIITSYYRVFGADPTGFGCLLIKKSVMACLQSPSGGTGAGLVRIVPVFPQYLSDSVDGFDGVLDGLEDDNIIPIEEGSASNSHHASQLPAFSGAYSSAQVREVIESEMDQDSSDRDGASTIYEESESVSVGEVMKSPVFSEDESSENSFWVDLGQSPPGSDHSEQSSKGKLGSPLPASWFSGRKKASPKVPSKLSRSPVHDKHVLSFDAAVRSVSQEPGPVEVVPEEDHSRNGIKNIHISEIEEDNRDGKVNKRFVKFSCANGPAEGSATSVFGTCTARENGSTSEICSETQAETKESAIRRENEGDFRLLGRREAHNGRFNGGGRFFGVEEPERVSSMGRKVSFTMDDSRLCRNSDAGETSGYAMADDNDDDAYSDYDEAQDGRKEPEIVCRHLDHVNMLGLSKTTLRLRYLINWLVTSLLQLRLPDSGDGEGAAAAAAPPLVYIYGPKIKYDRGAAVAFNVKDCGSGTSLINPETVQKLAEKEGLSLGVGFLSHIRLTDSQRHGAADVGLSSSSSPAAA

SEQ ID NO: 70129 - protein, 266 aa, Zea mays
  Clone ID: UC-ZMFLB73017B01_FLI.pep
YYYTVVYSRLVVGHAHDDIHAHPFVIIVCSFIRASELRVARRQIRWGSGVVLVGEDVEEGEGLGDGELEPELGPVVVVQDGAEGVLLQRVVDLPRCHPHLRRKARLAGALLVLPRRRVDVGPAEARGLEDAVELVRGVVVEEEGQSRADSTHRVPVPGRQPEQLPPEVLVHSVVVADEDVPADGLAPRQRLRRRQRLEPLLVRGRRRALALGVLLPAVLPGAALLVAAAGVAVVVVVVVARRPPGGLVEVVQTQTQTQTSGKGGAE

SEQ ID NO: 70130 - protein, 504 aa, Zea mays
  Clone ID: UC-ZMFLB73019D05_FLI.pep
TPLRLPTTPGSTVARSRSLPSHAMVADRLRLALLLSACLCSAWARPRLEPTIRLPSERAAADDAVGTRWAVLIAGSNGYYNYRHQADICHAYQIMKKGGLKDENIVVFMYDDIAHSPENPRPGVIINHPQGGDVYAGVPKDYTGREVNVDNFFAVLLGNKTALRGGSGKVVDSGPNDHIFVFYSDHGGPGVLGMPTYPYLYGDDLVDVLKKKHAAGTYKSLVFYLEACESGSIFEGLLPNDINVYATTASNAEESSWGTYCPGEFPSPPPEYDTCLGDLYSVAWMEDSDFHNLRTESLKQQYNLVKDRTAVQDTFSYGSHVMQYGSLELNVKHLFSYIGTNPANDDNTFIEDNSLPSFSKAVNQRDADLVYFWQKYRKLADSSPEKNEARKELLEVMAHRSHVDSSVELIGSLLFGSEDGPRVLKAVRAAGEPLVDDWSCLKSTVRTFEAQCGSLAQYGMKHMRSFANICNAGILPEAVSKVAAQACTSIPSNPWSSIHKGFSA

SEQ ID NO: 70131 - protein, 460 aa, Zea mays
  Clone ID: UC-ZMFLB73042B05_FLI.pep
VGLGITEQGLRIQISYLSKYSPKGTANKQRTLLAQGARNGDPMQFEARKMLINIAELRLTSPVLLLVLVLGSPVRLDDQEDLLPDERAVFVVDDLALPPHPVRQALDLHQHVHVFPDDHRAPGPQDPVHLQEDAVHLTPVLVQGEHRIRMDEVVGPRVGRHALAPVLVASDEAALVDGPERGRVRHGRDHVHDPQRVAGQRQRRGEPAQARVHVQHVAVPPLLLELAGHRLVVPDPPPPQLRVLRERPGRDAPDSAAGDPGRHGREPLRPSLHRAAGDVAGLGDLRQRRYAGLHLVVPCRVRVLARAEGPGRLGGLAAGVVVGLLPDGDVAGLLDLGPAEAPGDGLDGLLLGVEVLLGPLPPLPVLVPVDRRPGQDPVPSGTQHPVDLDQVQSIVELPGDEAAGAVRHVEGAGRVGEAVGREHADHGRHASLQRELHLRLVRVPRRERHGQDVPRQQVRA

SEQ ID NO: 70132 - protein, 315 aa, Zea mays
  Clone ID: UC-ZMFLB73042B10_FLI.pep
CPLITAAAAAAMEASSKKLQAFILTLLLVLSTAVTPILSLSVPDDEVACDCDKPKAPKPSHPPKTKPSHPSPSPKPKNPKPPKGSTGYPAPGHQPPKSPSYPPVVGPPKGPVTRPPVMRPPVVGPPKGPVTRPPVTRPPVVGPPVTYPPITGPPTTPPVVGPPVTYPPITGPPTTPPVVGPPVTYPPITGPPATTPPVTGPPVTYPPGGGGGSSTPCPPPPSPTPTPSSPTCPADSLKLGACVDLLGGLVHIGLGDPVVNKCCPVLEGLVELEAAVCLCTTIKLRLLNINLYLPLALQLLLTCGKTPPPGYTCTV

SEQ ID NO: 70133 - protein, 463 aa, Zea mays
  Clone ID: UC-ZMFLB73038G01_FLI.pep
GTKPEALYKVKDPMLRRFVEKCLVSSSQRLSARELLEDPFLQGDDVAVSLDGGDYHVPTKYVRQPSYLGHTYSNGSMVSNGFSESMDEDALSEDCEDDDMKGQDGIDLFNENEDEPLGNVDITIKGRKSEDGGIFLRLRISDNDGRVRNIYFPFDVEADTALSVATEMIAELDITDHEVTRIADMIDGEVSALVPDWRPGPGIEEAPDTSYCHNCGSNVSSCGSLYAYMSSGRRGCQCAELHGRFEEITFQADGEQCDLQESAGSSDDGGGQTEHYVKSNESTHVNGLVQMGRRDLSNQLCFSSFQEQSCSYNRYENDTNHHVNGFDIKHEVKIAKYKARKMAQFKRAIHPSLDFDNAYGVNRGKPSLNKLQSFHVGKNHNFRVPTCDRSPGKVSTDYHSDLNSQVLQSRHPDPGAQRARHCEVNAAGSSTECMFTGRRYYTGAQLPPNLPRTKSVPLNAVDA

SEQ ID NO: 70134 - protein, 408 aa, Zea mays
  Clone ID: UC-ZMFLB73040B02_FLI.pep
CSRAYSHDWTECPFVHPGENARRRDPRKHPYTAVPCPNFRRPGGCPSGDSCEFSHGVFESWLHPSQYRTRLCKEGAACARRICFFAHDEDELRHVPHNSGAGLLSPRASSSIDMTAAAAALGLLPGSPTRHFVPPPLSPSAANNGGGAAAHWLQGSRLRSSFNARDAQADDLGSLLEWESQYLGALSLPQSSRSQPRLSTGLTIRPTAVAPSYLEEMYASDMAMSPRFTNDQGHSVFSPAHKSALLNKFHHQQKGLLSPVNTNRMYSPRGLDPSIIHSPFGGMSPRSPRTMELTSPLSVRVGVGAAVTPRDMLDQFSSLNKHQVPSVGSPRNLNASWGNIGTPKSKVDWGVDDDELVRLRHPVQHGNTEDEPDVSWVQSLVNHAELNGKRGEMASMASPSINKPDLSF

SEQ ID NO: 70135 - protein, 766 aa, Zea mays
  Clone ID: UC-ZMFLB73023G10_FLI.pep
AQHKFKQANVVHQPAARDTRQMTDVQEDLINGLASNSSCERPSIFQKSSLQYADDPDQQETFRPLAGTRAASPHLLSTHASDMNLDGPLVNSRRNLSISPPLDVFSRNVSPKRALERLPPSHSVLGPDPRKFTDRNGRLRWGLDDGAQRPTISMLDEEYRKQSARELIDAYGNCQGRDADERLPKVQRLDPNGMASRSSARNWLTSEEEEYSWEDMSPTLTDRVSSSMPSFPPGTMRTGFPGANAGLLESDVGRHNFPSQATRLSVDGSPFNLEDRFSTASHVNMSTRRYPSNFGVQNGALLKFQNSEHALNHGRIATMPAPPWQQPTGLPLQMQAPQHSSALDRLPQPADSEMPVKRLDIRGTYNGLNVDRSLAEKHRSSPARAPTEWLPLHHTPSQTLPLIIPETKHVRSASDSLEISSFVSQGASSSVFVPHHQYDALDRKTGTRNLAQPPYQHQDLLLPSQQNQGTILGNQVHPHLPQQLHPHSHPHHQETFRSFAPGMTVSPFQGQGGNATMTPVSVLPTFSVPPAVPPYGVLSAPGFPMPPLPPGPPPVPLQMGSSSSQVGGPQPFVSGLLSNLMRHGVISLEPPSQSQDSVGVDFNVDLKVRNEPVINALYQDLSRQCKTCGLRFKCQEEHRAHMDWHVTKNRNSKNRKQSSRKYFVTVEEWLRAAETVGNDGVPAFVPSDPVPDRKEEREIAVPADEEQTACALCQEPFEDFYSDETDEWMYRGAVYMNAPDGNIDGLERSRLGPIVHAKCRSGPSNT

SEQ ID NO: 70136 - protein, 717 aa, Zea mays
  Clone ID: UC-ZMFLB73040C01_FLI.pep
AEAVSDFAKSKSLSQQRQYLPIFTVRDDLLQVVRENQVVVVVGETGSGKTTQLTQYLHEDGYTTTGVVGCTQPRRVAAMSVAKRVSEEMETDLGDKVGYAIRFEDVTGPNTIIKYMTDGVLLRETLKDADLDKYRVVVMDEAHERSLNTDVLFGILKKVVARRRDFKLIVTSATLNADKFSKFFGGVPVFHIPGRTFPVNIMFSKTPCEDYVEAAVKQAMTIHITSGLGDILIFMTGQEEIEATCYALAERMEQLISSSTKTIPKLEILPIYSQLPADLQAKIFQKAEEGARKCIVATNIAETSLTVDGIFYVIDTGYGKMKVYNPRMGMDALQVFPVSRAAADQRAGRAGRTGPGTCYRLFTESAYQNEMLPNPVPEIQRTNLGNVVLLLKSLRVENLLDFDFMDPPPQENILNSMYQLWVLGALNNVGGLTEIGWKMVEFPLDPTLAKMLLMGEQLECLDEVLTIVSMLSVPSVFFRPKDRAEESDAAREKFFVPESDHLTLLNVYLQWKSNQYRGDWCNDHFLHVKGLRKAREVRSQLLDILKTLKIPLTSCHMEWDVVRKAICSAYFHNSARLKGIGEYVNCRNGMPCHLHPSSALYGLGYTPDYVVYHELVLTTKEYMQCVTAVDPQWLAEMGPMFFSVKETDTSLLDHKKRQKEEKTAMEEEMEKLRRQQAEAARMEKEKEREKRAKQQQQVAMPGLKKGATYLRPKRMGL

SEQ ID NO: 70137 - protein, 350 aa, Zea mays
  Clone ID: UC-ZMFLB73025C03_FLI.pep
SDAETGMSEEDILLQDEICKSRLMSIKREEEQYMRERDRYELEKGRLIREMKRLRDEDGSRFNNFQILHHRYALLNLLGKGGFSEVYRAFDLVEYKYVACKLHGLNAQWSEEKKQSYIRHAIREYNIHKTLVHPNIVRLWDIFEIDHNTFCTVLEYCSGKDLDAVLKATPILPEKEGRIIIVQIFQGLVYLNKRGQKIIHYDLKPGNVLFDEVGVAKVTDFGLSKIVENDVGSQGMELTSQGAGTYWYLPPECFDLSKTPFISSKVDVWSAGVMFYQMLFGKRPFGHDQTQERILREDTIINARRVEFPSKPAVSNEAKDLIRRCLTYNQSERPDVLTIAQDPYLSYAKR

SEQ ID NO: 70138 - protein, 209 aa, Zea mays
  Clone ID: UC-ZMFLB73037C01_FLI.pep
NFDLLDLVNLYVTSVGPVGRALPPAMISLLGHIITVFYLVYSSLLQYVHHLQWKYSLGSFNLLGHTAPAQAASLLVLGPFVDFWLTNKRVDAFNYTSIVTFFIVLSCIIAVGTNLSQFICIGRFTAVSFQVLGHMKTVLVLTLGFFFFGKEGLNFHVALGMFLAVIGMIWYGNASSKPGGKERQVYSTPSEKTQKHGVLSSQSELDQKV

SEQ ID NO: 70139 - protein, 103 aa, Zea mays
  Clone ID: UC-ZMFLB73040H10_FLI.pep
VISSSSSKRKRGGPGGLNKVCAISPELQTIVGETAMSRTQIVKQLWAYIRQNNLQDPDDKRKIICNDELRVVFETDNTDMFKMNKLLAKHITPLDPSTDFYFF

SEQ ID NO: 70140 - protein, 434 aa, Zea mays
  Clone ID: UC-ZMFLB73046D09_FLI.pep
LPPPCLLPRRPALPPSAPAMGTGRRGGGGGGVFHRLLALSSLLLLASGEVVFEERFEDGWETRWVESDWKRSEGKAGRFKHTAGRYSADPDDKGIQTTIDARHFAISAKFPEFSNKNRTLVVQYSIKFEQDIECGGGYIKLMSGYVNQKKFSGDTPYSLMFGPDICGTQTKKLHLILSYQGQNYPIKKDLECETDKLTHVYTFILRPDASYSLLVDNRERESGSMYTDWDILPPRKIKDVHAKRPKDWDDREYIEDPDEVKPEGYDSIPKQIPDPKDKKPDTWDEDEDGIWKPRMVSNPAYKGPWKRKRIKNPNYKGKWKTPWIDNPEFEDDPDLYVLKPLKYIGIEVWQVKAGSVFDNILICDDPEYARKVVEETWGANREAEKEAFEEAEKERKAREDREGQKAKDDGGRHRIHRRHKKHYRDHWDDYHDEL

SEQ ID NO: 70141 - protein, 518 aa, Zea mays
  Clone ID: UC-ZMFLB73055E03_FLI.pep
PRQTHTRGRGRRREGRAALASMAAAVLAPKPPPPLPTRAFPSSSPSRFAPAFISPRHPLRRLLLRPIPCASSPSSVLMPNPDLETEPAHDGDGDGDEAPPESRPRRIALFVEPSPFAYVSGYKNRFQNFIKYLREMGDEVIVVTTHEGVPQEFHGAKLIGSWSFPCPWYQKVPLSLALSPRIIAEVARFKPDIIHASSPGIMVFGALIIAKLLCVPLVMSYHTHVPIYIPRYTFSWLVKPMWLIIKFLHRAADLTLVPSVAIGRDLQAARVTAANKIRLWNKGVDSESFHPRFRNMEMRSRLTNGEPEKPLVFYVGRLGVEKSLDFLKRVMDRLPGARIAFIGDGPFRAELEQMFSGMPVVFTGTLQGEELSQAYASGDVFVMPSESETLGFVVLEAMSSGVPVVGARAGGIPDIIPEDQEGRTSFLYTPGDVDDCVGKIKRLLSSEELREAMGRAARKEMEKFDWRAATRKIRNEQYSAAIWFWRKKRAQVLRPLQWVLRLLRRTMPGAADAAAKQS

SEQ ID NO: 70142 - protein, 315 aa, Zea mays
  Clone ID: UC-ZMFLB73068E05_FLI.pep
RTKRRGGGRRRRRSEATGMSRKEAEPAGQDGSSSSATDGGGGSGSGRELADALARRRLYREVTLALHSGLRDAKADFSFLRARGLRSLLGFLRSTASAADDALLLLFRHSQSIPDLQVIPVLFQNSLHQPKQDPVVTLDHIFGTEPMKITSPPTGSEIALALRVLEGCCLLYSRCTALAHKYKAVKVLLNILASRGPTEQGVCLDTLISLMLDSPSNQMDFEEYSGLEKVAELLKDVQVEKHIRLKCGEFLLLLIGHVFVKENSPIHEQMKNLFGEQCASLIWAASRFGSTLDAEQRQTTLQIQAMRVVESLEPY

SEQ ID NO: 70143 - protein, 684 aa, Zea mays
  Clone ID: UC-ZMFLB73052H05_FLI.pep
RETTPDDSQVNEVESDLKETLSLNYEEARALLGRLEHQRGNFDAALQVLQGIDIRSLRPRMTTAIAESVKPRMPPRSSRRKSSQVNGMLMHMSMHSVSLLLEAILLKAKSLDTLGRAADAAEECRTIIDIIESAWPYGVPDGTSEECKLIDIFHSALEYLPKLWMRSGCFDEAIIAYRRALAKPWNLGSQRSAKLQKELAVSLLYCGVEVKFPQEFSQERNLVTPGNNLEEAILLLLMLTRKLFLREIQWDPDLVNHLVYALSLSGHYEVLASHLEMLLPGTYTRSERWYILALCYSAAGMDDSALNIIRNGFSVLERKGKPHVPSLLLGAKLCCKNPKHASEGIKFANKAMKSFRSRDLHFISTTKHFLGVCYGPFSRSSTSYLDKSRLQDNALRLLQDAATTAKYNPEIMYSLAWENAMQRKLNAAVESATECLEMVMGGSVSAWKLLILVLSAQQNLQEAEAVADFAMDEAEKNDQLDILRLKAQIQASRGQFKSAVETFRVLLAAIQVKKEVWKLTTCNEVKCLQKLEMDAWLDLASIYSKLEAWHDSNICLDKAISIDFYYPKCWHVRGLLLEAQFLHKEALMAFSFALSIDPDYVPGMVCMAGILRNIGGDSLSIARTYLRNALRLEPTNHRAWLSLGLVLKAEGSLQEAADCFQAAYELRELSPIQDFSEQLPIMLH

SEQ ID NO: 70144 - protein, 649 aa, Zea mays
  Clone ID: UC-ZMFLB73051A03_FLI.pep
PPLRLLHLRLHPLHPRPAPPPPDHGGQAAGVPRRRQLLPAPRQDELARVGLRARRLHRLHGLRLLQRHLRLHPQRRAQRLLRAGPAVHEARDRKILLPAHRHVLRGAAVQHGAARVLGHGGREPDQAGAREDVRRRAPQRDRLVRRGRERQRARGRQASAGRPERALRHRGPHLRHRPELGADAGGLHRGVRPPVAPRARAPRRVPARRGRHRAAEDVHEGLLGGPGGRARQGHADRGRGRGQPAHRGRVQRGAQDHGAVRGQPARPAPALLLEGADRRQRLRRGAVPAVRVLRAGAVVRGVAGEARRVRLLAHHPRVHGADGVRERRRRDADAGAGLHQGRARDAVGVRDDRPQDGGGARRRGRGAGAGAAEGRGGAEARGLLVPVAAGHPGVPRPEPPCARREDAGAGGAERVRQELGAGSGAAVLRAHVRARAPGRQGRAQVQPAGAAARGGGGTAGAVPVRGEHPREHRVRARGRDGGGGGGGGGAGERAPVHRGAAGGVPDAGGRARGAAVGGAAAADRDRARAGEAGGHRAAGRGDQRAGRRVGAVRAGGAGARGVRAHHHRGGAPAGHGARRAHHRGHRRRQGGGAGVALAPAQAPSRRVLRADAAAAAADGRGGRARAVDLVQRGRVGRNGWMDGFGSSRD

SEQ ID NO: 70145 - protein, 543 aa, Zea mays
  Clone ID: UC-ZMFLB73059E05_FLI.pep
EDGGGIMIGPPRPPPPSARGEGDDGDGMIGPPRPPPADDEDVDDDEDDDEEEMEDDGEGGFNRIPLSNEIVLRGHNKVVSALAVDHTGSRVLSGSYDYTVRMYDFQGMNSKLQSFRQLEPFEGHQVRSLSWSPTSDRFLCVTGSAQAKIYDRDGLTLGEFVKGDMYIRDLKNTKGHISGLTGGEWNPKSKETILTSSEDGSMRLWDVSDFTSQKQVIKPKLVRPMRIPVTSCAWDHEGKRIVGGIGDGSIQVWTIKAGWGSRPDIHVEKTHTEDITGVKFSTDGQSLLSRSMDSTLKIWDLRRMKTPLKVFEDLPNHYAETNAAFSSDEQLIFTGTSIEKDGDNGGLLCFFDRKKLELVSRVGISAHYSVIRCLWHPRINQVFATVGDKKEGGTHILYDPSISQRGALVCVGRAPRKKSVDDFEVQPVIHNPHALPLFRDQPSRKRQREKILKDPLKSHKPEAPVNGPGFGGRVGTTKGSLLTQYLLKEGGLIKETWMDEDPREAILKYADAAEKDPKFIAPAYSQTQPKPVFAESDSDNEEK

SEQ ID NO: 70146 - protein, 227 aa, Zea mays
  Clone ID: UC-ZMFLB73066G01_FLI.pep
RSSIAKCVAVLCLAAGDQKCASTIEMLKGILKDDSTTNSAKQHMALLCLGEIGRRKDLSNHVQIENIVIESFQSPFEEIKSAASYALGNIAVGNLSKYLPFILDQIDNQQKKQYLLLHSLKEVIVRQSVDHTGQSELQDSNIEKILALLFNHCESEEEGVRNVVAECLGKISLIEPKKLVPALEVRTSSPAANTRATVAIAIKYSIVERPEKIDEIMYSKISTFLIK

SEQ ID NO: 70147 - protein, 420 aa, Zea mays
  Clone ID: UC-ZMFLB73053A07_FLI.pep
GLQKKKAKTIRRLGETLESSAEPPSSTMLRAAAAAAAIFPARFAAAPAVAAAEELRSPLLRVIGTLRDGRGSVLLGRRVRFCSNSSASDTEAAVAEAEAKAEDASAAEGEADSKASSAIVPTSTNIDDCLSVIALPLPHRPLFPGFYMPINVKDQKLLQALIENRKRSAPYAGAFLVKDEEGTDPNIVTGSDSAKSIDDLKGKDLLKRLHEVGTLAQITSIQGDHVVLLGHRRLRITEMVEEDPLTVKVDHLKEKPYNKDDDVMKATSFEVISTLREVLRTSSLWKDHVQTYTQHIGDFNYQRLADFGAAISGANKLLCQEVLEELDVYKRLKLTLELVKKEMEISKLQQSIAKAIEEKISGDQRRYLLNEQLKAIKKVEVTDTALLALIENYCREAGVRNLQKQIEKIYRKVCKITSAY

SEQ ID NO: 70148 - protein, 394 aa, Zea mays
  Clone ID: UC-ZMFLB73067D07_FLI.pep
VLGRGKNKELVVGPGPQDPRCSSAARMPGLPLPQSLNQNIGCEYAYPGSTGQAFRQQLRTALSPDEKLTAEKDLALYCKPVELYNIIQRRAMKNPLFIQRCLLYNIHARRKKRIQITISLSGSTNTELQTHYVFPLYVLLARPTSNLSLEGHSPIYRFSRVCLLTSFSEHGNKDNSEATFIIPDVKSLSTSRACNHDIIFISCGQVGQSNGEDNCSGNHVEDSSLQMLEGKCSWGKIPTNLLASSLESCVNLSLGHIVELASKVTMRPSFLEPKFLEQDSCLTFCSHKVDAVGSYKLQLCMSAQEAGARDMSLSPYSSYSYNDVPPSSLSDIIRLRSGNVLFNYKYYNNTMQETEVTEDFSCPFCYVRCGSFKGLGCHLNSSHDLFHYEFWVDI

SEQ ID NO: 70149 - protein, 650 aa, Zea mays
  Clone ID: UC-ZMFLB73051E08_FLI.pep
LNVSYTLTDHSSHAGMPSRAAIRMKPPSFSVSLTTASQLHDAIDRLLSLLRADASHAPAARAIAAAVASLRPPSTLLSNRILHLLSSHPATLPDALALLSSLPSTDVCSYNTLVAALGRSPRGLASARALFDRMPRRDHFSWSAIVSAHVRHGQPRAALAIYRRMLREPGGSGADNEFTASSALAAATAARCARAGRELHCHVVRRGIDADAVVWSALADMYAKFGRLDDARSVFDRMPVRDVVSWTAMLDRYFDAGRDGEGFRLFVRMMRSGILPNEFTYAGVLRACAEFTSEKLGKQVHGRMAKSRTGDSCFAGSALVHMYSKYGDMGTAMRVFRGMPKPDLVSWTAMISGYAQNGQPDEALHCFDMLLSSGFRPDHVTFVGVLSACAHAGLVDKGLGIFHSIKDKYGIEHTADHYACVIDLLSRSGLFERAEDMINTMPVKPNKFLWASLLGGCRIHKNVRLAWWAAEALFEIEPENPATYVTLANIYASVGLFDEVENMRRTMELRGITKMPASSWIEVGTRVHVFLVGDKSHPQAEEIYALLKKLYVKMREEGYVADTGFVLHDVEDEQKQQDIGYHSERLAVAFGIIATPKGSPIKVFKNLRICGDCHTTIKLISKIVQREIIVRDSNRFHHFKNGSCSCRDYW

SEQ ID NO: 70150 - protein, 160 aa, Zea mays
  Clone ID: UC-ZMFLB73070C02_FLI.pep
VSKTSYEAGNACGCVSASSIHVLVLLMVSGVSSQRYCSCILARFSSHHSLACISLNFSRLNRTRRSSLIPPGKARIVIYTPGSSSSTHSLSWSLALLTDTESSPDLSISSGDELVLIDASIDEVSVLAPLILDSFGVDARPIESQHWCPWWWWWWWRPVQ

SEQ ID NO: 70151 - protein, 346 aa, Zea mays
  Clone ID: UC-ZMFLB73055A08_FLI.pep
ADIWRLSLSYLTPLSLRCAVELGIPTAIYRHGGAASAAELVTALSLPSTKLPFLRRLLRLLAASGVFTVDKQSSEEERYRISPVSYLLVDGIPHEDHMNHTALVLTCTSTRYIEAGIGLAEWFKRDVVTSPFEELHGATLFHESMGSLDADFHDMASEALDAHDNFGIEIAMREFRDLFEGIQSMTYCCGNFGDDKGARAIVKAFPHIKCTVLAPPKIIATKPADGAMINYVEGDMFSFIPPAQTVVLKLVLHHLTDEECVKLLAQCRKAIPSRKDGGKVIIGDIMIDHSGPMLETHLLMDIGMMTMTKGRQRDEKEWSELFTKAGFSEYKILKEFGARVAFEVYP

SEQ ID NO: 70152 - protein, 560 aa, Zea mays
  Clone ID: UC-ZMFLB73061A02_FLI.pep
QHKHSSSSSSSRQEESKAEGSLPPSLFHQVRRAAMGARRRLQADAPPGHRHRQGAPAPDWSAGYLNGWLSQPTPVFGLRLWVLIGIAVGAAIVLVLLLIFVCLSRRRRRRRLAANPYYPADTKLLKKHLQQQATPTPTPTKDIQEIVRRQQEPAVQLAKAVPQPQPQPQTPPPPPPPQHRPPARKTPGSGVSATTSGGSERDGATPRSTGSGAGLPEVSHLGWGHWFTLRELEEATGGLAEENVIGEGGYGIVYKGTLHDSTLVAVKNLLNNRGQAEKEFKVEVEAIGRVRHKNLVRLLGYCVEGAYRMLVYEYVDNGNLDQWLHGDVGEVSPLTWDIRMNIMLATAKGLAYLHEGLEPKVVHRDIKASNILLDQQWNAKVSDFGLAKLLCSERSYVTTRVMGTFGYVAPEYASTGMLNERSDVYSFGVLIMEIITGRCPVDYTRAAGEVQLVEWLKNMVAERKAEEVVDSKMAERPPPKTLKRALLVALRCVDPDANKRPKMGHVIHMLEMDDLQFRDDKRPGAGRDGRRPQGPDRYSSKLGGGREPQQARAPASVQMR

SEQ ID NO: 70153 - protein, 228 aa, Zea mays
  Clone ID: UC-ZMFLB73070D04_FLI.pep
CLLRYYFQAVTAPMSTLNAIAVEAYKKYILVSLIVNGQVPSFPKYTSISAQRSMKNHAQIYFELSTSYSNGRYTDLETFVESNSAAFQSDNNLGLVKQVLSSMYKRNIQRLTQTYLTLSLEDIARSVQLETPEDAEMHVLRMIEDGEIHATINQKDGMVSFHEDPEQYKSVEMVEHIDSSIQRLTALSKKLASIDENMSCDPSYLLKTGRDRGRFDYDDFDSVPHKYF

SEQ ID NO: 70154 - protein, 587 aa, Zea mays
  Clone ID: UC-ZMFLB73076H09_FLI.pep
LDQTFDPSPRAPAMSLSSARQRRATAASPPTDDGYAKDAKDRRRRPGGDGDSEDEGIKWFLPFLALGLLRHMSASSNLIHDCDEVFNYWEPLHFLLYRSGFQTWEYSSDFALRSYLYLFFHALVAGPASLIFGEHKVRVFYSVRIFLGLISTITETVLVVALSRRYGKRLACYVLAMLCLSSGCFFASTSFLPSSFSMYAVTLSSALFLLEKYAGAVSVAAAGVILGWPFSILVFLPVTVYSLIRGSFRRVFLSGFVTSLCFLVLSFVADYYCYGRLTFSVFNLLKYNVIGGGESHLYGTEGFSFYFRNGFNNFNFAFILALLFLGVVPFARKKYAPDLLIVVSPVYIWLAFMSLQAHKEERFLYPIYSLICVAAAAVIDSLPDFFHDKYSSDQSIFEKIAKGLRPLILGFILCASHSRTFSMLNGYGAPLQIYQHLEHHDDTGPGSILCVGSEWHRYPSSFFIPSYISEVRWIDDGFRGLLPFPFNETLGGTTAAPSYFNNKNKAAEGQYLKDIGACNLLVELDLRRPYPSRGSDLSTWEALAALPFLDRELSPALYRSFFIPYRWQQNNVFGLYKLLRRLHPDHA

SEQ ID NO: 70155 - protein, 777 aa, Zea mays
  Clone ID: UC-ZMFLB73091G06_FLI.pep
SVGMRHEGPGLSIRHDAAGSMAGAIFMSNSVTRDQCFQASIFGLPLEYRSFVSHIRKGMPLFLFDYTLRKLYGVFEAASDGGFNINSDALRSVRRSYPSQVRINIIWKCKPLSEDEFFPAIEDNYYRPRKFYFDLSYEQVVRLYELFGNKRVGRPIHDYQKNECLQTNRSSKGIPDKESLTPDPHSSNQSRLLVPNISEIIRYSTPTSIHTDLPLNVEAYPSTLMPLGTEVNGAKIAPTFSSHSDQIEPFSQSEFFPAASMTDAVSTQVSAPCSETNNQLVGQSHPLPHNYPQNIFSAGFTAQDPIEGSKFVANQLYSLCRDYMHDGLLTSGYGTQNRTYKGMNHLNSTCPPYDPLHPFLPVSNNFDYQAQCDIYSNQGCPDTCNDICAYECECLSEEVVAAEELNQRGISTCPQVLGWDGKAVSAIHQQNMCSTDYFQISDRDEDSENDQMKHGTHSNASDSSDRENGIVDPRHTQHAVGTENNTKDQCSQPKKGVFSRLSVRKELTSQDATGSTLNQLVSSLVRKTEQWSHNNRPIEDGLIIPLIGEQADCSHAALNLLSELELDKDVSIEPQLPFLNFKRRSEAGKVDANLGKEISGKMKRRKLVRPSLGENNDSTNFGEQLIGNCTQDKNQNHQESENHFDIDLNIPAAPIDDGPVEVNRIAVCPSVVIKVQTEKPYEIDTNKVNSNVMETTEEHDPSSAPTQKVIPDFNMADLNTMDESKLRTILEHTSSLLQALAEVKNGESNNCEQAKSSFEDKKVNMAYSDGATKSECD

SEQ ID NO: 70156 - protein, 579 aa, Zea mays
  Clone ID: UC-ZMFLB73094D07_FLI.pep
SKVVYIALNVIQVSMIEAYLRANKMFVDKHEPETERVFSSYLELDLSEVEPCVSGPKRPHDRVPLKEMKSDWHACLDNEVGFKGYAVPKEQQGKVVKFDFHGRPAEIKHGSVVLAAICSSTNTSNPSVMIGAGLVAKKACELGLEVKPWVKTSLTPGSVVATEYLKHSGLQDYLNQQGFHVAAHGCATCVGNSGDLDGSVSAAITENDIVAAAVLSANRNFEGRVNPLTRANYLASPPLVVAYALAGTVDIGFEEEPIGVGKGGKEIFLRDIWPSNQEIDEVVESSVQTHLFKKVYDSIMERNPRWNQLPVPKEALYPWDDRSTYIRKPTYLEGMSMTPPGPPTVTEAYCLLNLGDSITTDHISYSGKIPEGTPAAKYLLEYGVEPKNFSSYGGRRGNNEVVMRGAFANMRIVNKLLNGEAGPWTIHVPTGEKLYVYDAAMKYKSEGHDMVIIAGSEYGSGSSRDSAAKGPMLLGVKSVIAKSFERIHRSNLVGMGIIPLCFQAGEDADSLGLTGRERYTIHLPTSTAEISPGQDVTVTTHDGRSFTCTLRLDTQLEVTYFNHGGILPYMVRNLAAQMK

SEQ ID NO: 70157 - protein, 253 aa, Zea mays
  Clone ID: UC-ZMFLB73078A07_FLI.pep
AAACATRAPLVASTAASIRQAKSMSGQQDHASKSSSSSISSSTQESEEEAPVRSVTIGSLLAQANSTSGHSLGKRLSHLGSIPYTPRVNGKIPNVGNATLDHERLLERLGTYGLAEFQIEGDGNCQFRALADQIYHNPDYHKHVRKAVMKQLKEFRKQYESYVPMEYKVYLKKMKRSGEWGDHLTLQAAADRFGAKICLLTSFKDTCLIEIVPRDLTPTKELWLSFWCEVHYNSLYGIDDLLTRKTKKKHWLF

SEQ ID NO: 70158 - protein, 360 aa, Zea mays
  Clone ID: UC-ZMFLB73078B07_FLI.pep
APDGGVMCVEEPKDAERFGFGDPGVEEPAKFPLAQMERVCENTTSADFRQKLSNFVPVIRSGDWSDIGGRQYMEDTHVCIPDLAKNFGFPSLDNEVVSFYGVFDGHGGKDAAHFVCDNLPRMIVEDSDFPLQLEKVVRRSFMQIDCQFAETCSLHRASSSGTTALTAMVFGRSLLVANAGDCRAVLSRCGTAVEMSMDHRPCSLSEKLRVESLGGYVDDGYLNGLLGVTRALGDWHLEGMKGAGETGGPLSADPELKMTTLTKDDEFLIIGSDGIWDVFSNQNSVDFARKRLQEHNDVKLCCREIVEEAIRRGATDNLTAVLVSFHLEAPPRIRVDRPGRVERSISAEGLNSLRILLGRQ

SEQ ID NO: 70159 - protein, 527 aa, Zea mays
  Clone ID: UC-ZMFLB73095A08_FLI.pep
DLSNNNLYGKLPTFASKSAVVKTAGNPNIGKDAPAPTAGSGGSNDSLSGGGSSGSIGNNGGSSPSSVGVIVGSVAGTVVGLGLVAALGFYCYKRKQKPFGRVQSPHAMVIHPRHSGSDDMVKITVAGGNANDGARASETYSQASNGPRDIHVVESGNMVISIQVLRNVTNNFSEENILGRGGFGTVYKGELHDGTKIAVKRMEAGVMGNKGLNEFKSEIAVLTKVRHRNLVSLLGYCLDGNERILVYEYMPQGALSQHLFEWSEKNLRPLEWKKRLSIALDVARGVEYLHSLAQQTFIHRDLKPSNILLGDDMKAKVADFGLVRLAPADGKCVSVETRLAGTFGYLAPEYAVTGRVTTKADVFSFGVILMELITGRKALDETQPEDSMHLVTWFRRTQLNKETFRKAIDPVIDLDEETYASVSTVSELAGHCCAREAHQRPDMGHAVNVLSTLSEVWKPADPDSDDSYGIDLNMSLPQALKRWQAFEDSSHFDGATSSFVASLDNTQTSIPTRPPGFADSFTSADGR

SEQ ID NO: 70160 - protein, 165 aa, Zea mays
  Clone ID: UC-ZMFLB73090F05_FLI.pep
DPGKQSADPPRHPPPPRHGRPRRPPLRAAPARSNDESGSDLGGTSPTTAPSSWSTKNPPSRALSSDVNLRIQRLCQAGDLACALRLLGSDGGVDVRSYCTVVQLCGEERSLEATKRAHALIRASSVAATGGKRERLWEEVNAGVPEMRRPGRGKDGVRWNASSSC

SEQ ID NO: 70161 - protein, 476 aa, Zea mays
  Clone ID: UC-ZMFLB73080H01_FLI.pep
ALHHHFLYSRYHSHHHSSIVTEPITSVIHPFAEHMVYYVLFAIPMLSTLYMGNASVLGIVLYIAYIDFMNNMGHCNFELVPRWMFQLFPPLKYLMYTPSFHSLHHTQFRTNYSLFMPLYDYVYSTMDKSSDQLYETSLRGAEETPGLVHLTHMTDLQSVYHLRIGFASVASRPSATGAMWWYMWVLWPVAWLSMALAWAYGSSAFVVERIKLGKLRMQTWAVPRYNFQYGLSWERESINGLIERAILDADARGVKVLSLGLLNQAKQLNGGGELFRHRYPKLRVRLVDGSGLATAVVLRSIPRDAKQVLLHAGPSKVACATAAALCERGVQVVMNPNKEYDMLKSQIADSKASYLERRSDNHHTPQVWLVDSIDDEEQKMAPKGAVFVPISQFPIKKIRKDCTYLSTPAMKIPETMQNIHACENWLPRRVMSAWRIGGILHALEGWTVHECGDAMVHADKAWSAAIRHGFVPLTKA

SEQ ID NO: 70162 - protein, 259 aa, Zea mays
  Clone ID: UC-ZMFLB73106B11_FLI.pep
RAPSSSRTHGRLGGTGAGEDRPEGGGDLRLAAQGVGQHRPHPRRRGDLQGVDPGAGGGARGHLGAAAAEHRPGGPGPRRVPGGRRGVPRQGARRRLLPVRVARVQLLHLGPAQERAGLGVAPAQLLGRQGRRHPQRVGRVGGQPLAVPRPPGRRLPRPPLRQQARGVHQGAPAAQQVRRRRQPRRPGHQGPGHQGAPGAAGSRAQAAPGEARCCCTLFLNVVVVGGALNYTTHRRRAPNAVPCPCVRASINSRRPTFNE

SEQ ID NO: 70163 - protein, 249 aa, Zea mays
  Clone ID: UC-ZMFLB73096G06_FLI.pep
INRIIHLKAGGVESNLKRWTSMSQSQDTVDMPTLPGERHVVMQEPGGYYDNVGYVHERVNANPCSTSDVDMAKVQVDVDMAKVQGDCLDAIALQLLLKLKRHLKVVYSLDDARCQSFSLKEPPKSGETFSRQNIPFNVSSTNISLPSCLQDVASVYQDFKTVLHEDSMDFAVFIPSVQIRKRPTPRNTANPTPRSTTRVRRTAASSVTKARGGARGDDSDDSDDDDWTGGPRVLDFSGGGRVTRQRVQV

SEQ ID NO: 70164 - protein, 472 aa, Zea mays
  Clone ID: UC-ZMFLB73099C12_FLI.pep
SSSPSPSQPDMVSDGARGLLGAYELGRTLGEGNFGKVKQARHRGSGGQFAVKIMERARVLSQRADEQICREIATLKLLAHPNVVRLHEVAASKTKIYMVLELVNGGELLDRIAASEGKLPEQEARRLFQQLVDGVSYCHEKGVCHRDLKLENVLVDRKGNIKISDFGLSALPQHLGNDGLLHTTCGSPNYIAPEVLQNRGYDGSLSDIWSCGVILYVMLVGHLPFDDRNIVVLYQKIFKGDAQIPEWLSPGARNLLRRILEPDPAERIAMAEIKAHPWFQEHYVPVLPPYDDDDDHDSVKQIGAGSKTTHHINAFQLIGMASSLDLSGFFEEEDVSQRKIRFTSAQPPEDLFAEIERSATDMGFHVHRGHSKLRLTRNCDRSKNQKNPMSSSSSSFLVCTEVFELSPSLYVVELNKSHGDPALYRQLCQRICGDLGVLEMDQIFGTRPPVADDLAGLALALERRSATPLVAL

SEQ ID NO: 70165 - protein, 527 aa, Zea mays; identical to SEQ ID NO: 56976
  Clone ID: UC-ZMFLB73106C01_FLI.pep

SEQ ID NO: 70166 - protein, 417 aa, Zea mays
  Clone ID: UC-ZMFLB73116H01_FLI.pep
CTWKQRLQELHEAARGLLLAQADERGVVDERAAERAVGLHVVEGALEDDAGAVGDGREVQHGALVSSGAPGLVGHLDRGARRVGLGGHGARAAVARVSHGEGEAVGPPRHGADLLHERALPAAHQLDGARALGHGEVRGVHVLDGLGRDDHPGGERREVVLDVGRDEHAPGRAGQEVGALLEPAVLEQVVSPRPPGERGRVQRTDGDAVDERAAGRVLLHARVVDDQRHRVHLRLECPGVRVPAVAAVDGLHRQHAPLGAHRHVQPLPLRLRARPRRAERDGVVGAARHGQALPDRRLVAQPHRVRALRHHQQHVPLLVPRLDVLHEAGRLPPRDGVGARHHRAVHQRRLGRAILEVAVREKTVSDDRGSRRRQRAHGGDEQQRDAAHLRSPSSGCAAASPPPPPPLQLRLTRRTAL

SEQ ID NO: 70167 - protein, 234 aa, Zea mays
  Clone ID: UC-ZMFLB73113C03_FLI.pep
YKSHLSWPPIFASSWDESVSLRWGDLGLSVSHIFRPVPGCCTMLGPMNIEVKQRKVVAVGRKRTARPTENTCPEELAESSEEVKTDTDRNVLVMFDILRRKKSAKLENLVLNRLSFAQTVENVFALSFLVKDGRVEITVDDSGHIVRPRNAPAASAIASGEVSYSHFVFRFDLKDWKLMKEVVTEGEELLPHRTSQSNLCNEENDQPNLEVRAQIMPIRKKSSCLSELPVVPAE

SEQ ID NO: 70168 - protein, 150 aa, Zea mays
  Clone ID: UC-ZMFLB73122D05_FLI.pep
VVPEMTSSSSMPNLAIAKDGNTNVLPFEFRALEVCLESACRSLEDETSTLEQEAYPALDELTSKISTLNLERVRQIKSRLVAISGRVQKVRDELEHLLDDEMDMAEMYLTEKLTQQEISEASSRAEVDDPSQTEEDSLGSTLMTQKIISI

SEQ ID NO: 70169 - protein, 414 aa, Zea mays
  Clone ID: UC-ZMFLB73098B08_FLI.pep
LVDTNFLHYVGVLRLQVKDLRYQQSFTWGGTEIKVWFGKVEDLPVYFLEPQNGMFWVGCVYGKNDESRFGFFCHSALEFLLQKGSSPDIIHCHDWSSAPVAWLYKEHYALNGIGNGRIVFTIHNLEFGAHHIGKAMAHCDKATTVSDTYSKEVAGHGAIAPHYYKFHGIRNGIDPDIWDPYTDKFIPVHYTSENVVEGKSAAKKALQQMLGLQQTDTPVVGIITRLTVQKGIHLIKHAMHRALERNGQVVLLGSAPDPRIQSDFTNLASKLHGEYHGRVKLCLTYDEPLSHLIYAGADFILVPSIFEPCGLTQLIAMRYGSIPVVRKTGGLYDTVFDVDNDKDRAQAQGLEPNGFSFEGADSSGVDYALDRAITTFYDARDWFNSLCKRVMEQDWSWNRPALDYMELYHSARKS

SEQ ID NO: 70170 - protein, 736 aa, Zea mays
  Clone ID: UC-ZMFLB73120C10_FLI.pep
SGAFYISHLHLCRDSSKHPGNQKPIIPPTRNNTSHHNYYSGSSTFRSSIRLYPELLDAERDRVRELADHQPVLADGDPPHAVPVRDAEPVAHADAHLHARHAARGHVHLLERHQLPRGRVRAGGSVRGRGRRVVHEHGVRAVAVADIAHVHVHRDREALAPRVRHPHGADGARKRRVEEGGGGRGGVAAAGEAHGELRRRVRERVRELGVAEPVPERVDRRARVEPVRPAGVPARRVRAHRHVCHRHLLQVVLMVPCHRQLRTWIMVSEDDVGNRLSSGLAGVADPQDPIDPGVVLRERDVDGTARHEHEDDWPLGRLGHGGDELGLSPREEKGGPVQALGLHPLVEARDDDGGVGLARRLDGRGDGLVPAARDVGAAGLVRNPRGVRGDALQRRGVAAGLARVVPDHGDGGVGVRADDGDDAVRGGAEREHVPVVPGAAPVLEEHDALARRVERQVLVLPGAHVRGAQAPERPGRGVPVEHAEPHLHGDGVEERGVDVGVGDLARGDGGAGVEREERPAVEVEAGAERGGGGVLGGARVVLVAEEDVDGVAVGDDVAVQAPAPADGAAQERRVGARGHAVDLVVGAHDAGGAAVLDAGAEGDVEGVLQVLRRHHGVEVEPVRAAPLVQVVRREVLAAGGELEAVAVAAVRGGVGLLEAAHVGGGVARRDGGVLAGRLLAAAPPRVPEDVHVRGPEGEARPPAVVHGARLVGHRLQLHESSSVYNNIIMDEWICQP

SEQ ID NO: 70171 - protein, 812 aa, Zea mays
  Clone ID: UC-ZMFLB73111H01_FLI.pep
KTLSATMACTSAGGRAATQKKKEQRHTRTHTYGSINTTKNQQRRTIDGTRSGHTRVQVLFFFPRISSPPSSSPWRSLLDVDGQRLAVPLLEALEHGVHELALADADEHLVALLAGGLEPLAGQEHAAELLAHEAVQRERPAVRDPVRHGGGALGDRHAGGLHLLGQHRAELLLEPGDLGEHGGLPLRVAAAEGVVHQHGAQLLHQRQAAAGRVLRVREHGLAVDGADQLLLAEAGAGELARGVHGQHLLGHLGHGVLHRRLDVLLEVAQVHGLAQRHDVGGRHELQDVDRLGGLPGRDEAQGVHVLVVLLRALHVVGDGVAQVLELGAVGGHGDLGALEAVVQAGVAAAGQVGGEPVVVELVDELGELREHELADVGDGEAGVVHGHADGGALEVAAVQRLAAVDVDDRVVVHGVDLALDGLGGGADDLDLGAQPLRRRAERVPVLLGLQQRVQLVQLLGLLHEGAAIQDVLHDGRGLDGPRVVLQLVGQVVRVLGLAVHDLAEDGGQDLRQDGQDVGVVHHGGRERGAHGRAVDDGEALLGVELEEAALDAGDLERLGGVHLPPVDGDGLRVGAARDEAGDVGERDQVARRGDGAPERQAGADTGVEQLRDGLEDLEADAGVALEEGVDAHQHRRAGDLRRQRVPVAAGAEDSGVEMPEQLDLERGPVLGAAVGGAAEAGGDAVDVAAVGDAVEDPLAAGLDAGAGLLVELDGDAGRVLGGGDGGHLADAEGGTLDLDHGLPGLRHHALHLVQVAPGQLRRRRAPVQRVALHDGAVARHCCAAVWLVGAARWQEVGGGGLVPVEKKSRRSG

SEQ ID NO: 70172 - protein, 556 aa, Zea mays
  Clone ID: UC-ZMFLB73106B10_FLI.pep
HDLEEQYKEAKSTIKEKEYVIFNLLKSEKSLVDCAYNLRAELENAAADVSGLFSKIERKDRIEDGNRSMVQRFRSQLTHQLDALHKTVSSSVMQQEDHLNEMEHDMQSFVSSKDEAAQGLREGVQKLKVLHGSGITALDELAGEIDMNSRTTFERLNSQIQSHTSALENCFGGIASEADNLLDELQRSLSKQEERLAHFAVKQREGHLRAVEASRSISKITAGFFHSLDVHASRLTSILEDTHSVQDQQLLDLEKKFEECAANEEKQLLEKVAEMLASSNARKKKLVQTAVGSLRESAVNRTSHLQKEISTAQDLTSSVREKWGFYMEETEKNYAEDTKAVDSGRSCLAEVLVECKAKATVGAQQWKNAEDSLFSLGKGNVESVDSIVRTGTEANELLRSKLSSAASATLEDIDVANEALLSSIDSSLKLDRDACANIGAVLTPCHGEMRELKGEHHHKVVEISESAGKCLEEEYLVDEPSCSTPRRRRIDLPGVESIEELRTPGYAELLKSFREARGSWKLANGDVTGHLPEAAQDPASSPPPAVGSRTPLVGRN

SEQ ID NO: 70173 - protein, 441 aa, Zea mays
  Clone ID: UC-ZMFLB73163H09_FLI.pep
WVTFHHNSALNVSYNQFSGPVPDNLVKFLSSTTNSFDGNPGLCISCSTSDSSCMGANVLKPCGGSKKRAVHGRFKIVLIVLGSLFVGAVLVLILWCILLKSRDQKKNSEEAVSHMFEGSSSKLNEVIEATECFDDKYIIGKGGHGTVYKATLRSGDVYAIKKLVISAHKGSYKSMVGELKTLGKIKHRNLIKLKESWLRNDNGFILYDFMEKGSLHDVLHVVQPAPALDWCVRYDIALGTAHGLAYLHDDCRPAIIHRDIKPSNILLDKDMVPHISDFGIAKLLEQPSTAPQTTGVVGTIGYMAPELAFSTKSSMESDVYSYGVVLLELLTRRAAVDPSFPDGTDIVSWASSALNGTDKIEAVCDPALMEEVFGTVEMEEVSKVLSVALRCAAREASQRPSMTAVVKELTDARPATGGGRSLSKSKQGKPGSQSNSSAYRQ

SEQ ID NO: 70174 - protein, 719 aa, Zea mays
  Clone ID: UC-ZMFLB73168A03_FLI.pep
LLPSSISSPPPYPIPRGGRGWKRVTMAALEAAREWAGSVIPPELAAAAGGDPLAALAATAAALVAGLLIIAVWFRSGGGTPSKPVATPVRPPPVKVDADADVDDGRKRVTIFFGTQTGTAEGFAKSMAEEARARYEKAVFKVVDLDDYAQEDEEYEEKLKKETVVLFFLATYGDGEPTDNAARFYKWFTEGKEKEVWLKDLKYGIFGLGNRQYEHFNKVAKVVDELVEEQGGKRLVPVGLGDDDQCIEDDFTAWKELVWPELDQLLRDEDDTTGASTPYTAAIPEYRVVFIDKSDLSFQDRSWTLANGTGVIDIQHPCRSNVAVRKELHKPASDRSCIHLEFDISGTGLVYETGDHVGVYAENSVQTVEEVERLLDLSPDTFFSIHADAEDGSPRKGGGSLAPPFPSPCTLRTALLRYADLLNPPKKAALLALASHASDPAEAERLRFLASPSGKDEYSQWITASQRSLLEVMAAFPSAKPPLGVFFAAIAPRLQPRYYSISSSPKMAPSRIHVTCALVYGPSPTGRIHQGVCSTWMKNTIPLEYSEECSWAPIFVRQSNFKLPADPSTPIIMIGPGTGLAPFRGFLQERLALKQSGAELGTSILFFGCRNRNMDYIYEDELQTFLEEGALSELIVAFSREGPTKEYVQHKMVEKATDIWNIISNGGYLYVCGDAKGMARDVHKMLHTIVQEQGSLDNSKTESYVKSLQMEGRYLRDVW

SEQ ID NO: 70175 - protein, 373 aa, Zea mays
  Clone ID: UC-ZMFLB73177F01_FLI.pep
DAAQMEAIRKQASKLREQVARQQQAVMKQFGGGYGADGVFADEAEAQQHSKLEKLYISTRAAKHFQRDIVRGVEGYIVTGSKQVEIGNKLCEDGKKYGTENTCTSGSTLSKAALSFAKARSMMEKERGNLLKALGTQVAEPLRAMVMGAPLEDARHLAQRYDRMRQEAEAQAIEVSKRQMKLREASGNSDMISRLEAAESKLQELKSNMGVLGKEALAAMTAVEGQQQRLTLQRLIALVESERNYHQKVLQILDQLEREMVSERQRIEGAPPPVVESSMPPPPAYEEVNGIFMRNTVAELVETVEYFLAEAIQSYRAESDTELNLSAGDYIVVRKVSNNGWAEGECRGRAGWFPYDYIEKRERVLASKVAQVF

SEQ ID NO: 70176 - protein, 372 aa, Zea mays; identical to SEQ ID NO: 57048
  Clone ID: UC-ZMFLB73178G12_FLI.pep

SEQ ID NO: 70177 - protein, 322 aa, Zea mays
  Clone ID: UC-ZMFLB73177G04_FLI.pep
RLTYQTFPTPMDSQVFSKIKPGPNQTEHLRLLQLGPGPNDSNRIPWLKGTKLPLDADRQTSSAPGESACKCNHTNYSAGAVSALVSVTLPESVDSDLPLPSDLPSLTVSFASNPAVEPPSSPSLPSFFVSDSAISSTNSLNFLQFSTEPNLMANISSLSSPSAKSAACQTHDLSLPACSCIFVVEATRWFAQILSVLAWRMTRRTLPVCLCLRSLTAPVPRSFHWLPSLSNRYSFAFMSSRTSSSSSPVVTATSSSRTMGATWAPVSSSSPAAAAAEASSSSSPASGRSTTGSLSAMRWVIAARFDSNFEEDATAGQGRNSP

SEQ ID NO: 70178 - protein, 246 aa, Zea mays
  Clone ID: UC-ZMFLB73156A09_FLI.pep
KPRLLIPAAAEGRAMPKRTTHTYSSEDALPEGPESDLFVYYCKHCASHVLITDTQLQKMPKRKTDRAHVLDKAKHLSRLNVKEAGKVMLKRGEGKLEKQFRMSCVGCDLFVCYRSEEDLEVAPFIYVIDGALSSVAAETNPHDAPVPPCITQLEGGLVQVAIEVEDRAQRSAITRVNADDVRVTVAALAARGEANSELLEFMGKVLGLRLTQMTLQRGWNNKSKLLIVEDLSARQVYEKLLEAVQP

SEQ ID NO: 70179 - protein, 679 aa, Zea mays
  Clone ID: UC-ZMFLB73151F09_FLI.pep
SYWRSRMVDGVTADDDKVAPVYKLEEICELLRASDASIVKEVADFVLKRLDNKSSLVKQKALRLIKYAIGKSGTDFKREMQRHSAAIRQLVHYKGHPDPLRGDALNKAVRETANEAIAAIFSTEDPKPAVATESLGKRIQGFGNTNYEPSRDEKKSFLSELSEVVGIGSASIKQGLSNFAAAHAIMINDNGSTYKSPNLRRSLTTESEKYGRYDPSEIQSESRASSDASKNVASGSWGPTSSSAPSDDTSSSQPGVKTREERLLETIVTASGVRLQPTRDALRVFLTEASKLDAVALSRALENKLNSPLWQVRMKAICVLEAIVRKQDTDPYSIIASYFIENTASVVKCSELPQVSLREKASKVLNMLIGEEPTGTTATKSAMATPVQMPDLIDTGDQDGLATSSGQESNGQKNTGKAYVSSVDDLLGGEPIADTSVTADSNGSDPFADVSFHEVEAKETNDLFSGLIVEEKSSATMHGSSSSNKNELPDIFGSPPDSFIQGSVTDQGTVNDLMSGLNLNGTGQAHPPVKAEPNSTFSGSQFFDTNNEIGHVASAAALNGIVGQNSFYQQQQTPLQYSFPQHMMLNQSFPGQQLNYGAMGILLAQQQQLLQNFGNFNAELGNSSFNSMNSGNASVLPDIFNSSNQPQNHVAAMSSSKKDDTRAFDFVSDHLAAARASRK

SEQ ID NO: 70180 - protein, 548 aa, Zea mays
  Clone ID: UC-ZMFLB73170B02_FLI.pep
NIKKVLMDLLKDVGAAIDTTDDEMRLINKLKGHLTKKRYFVVIDDLWDVSAWSFITCAFHQNNRGSRIIITTRKIDVAKACCLSSGDHIYEMQPLSVAASERLFFKRIFGSEERCPSHLKEASIKILRKCGGLPLAIITVSSLLASKDLTLDQWNRVANSIGSTLENNPDIEVMRKILSISYFDLPHYLKTCLLYISIFPEDYIINRKSLIVRWINEGFVQEEYGKNAHDIGESYFNELINRRLVQPWFIDHDSGSVVTCRVHDMILDLIITKSVEENFVTLLDSRELTSSPQNKIRRLSIQCGDGEPPALVLEESTSLSHVRSVTIFGHGKQLPSLSNMKALRVLDLEGCKGLENHHLENIERLIHLKYLNLRETEITELPKQVVKLQYLDTLDIRNTGVSELPPAIIQLRQLARLFIDLDTRLPYEIGKMQNLEELTHVNTCMYHMNFLKKLAQLSKLRELEISWDHYGTRVDKVSYAGILIHSLHILATHNLRSLTVHIMDEQSFPLHTWHPAPSALRRLHFDMNNNEQFPKFQPGWDHLSISKN

SEQ ID NO: 70181 - protein, 146 aa, Zea mays
  Clone ID: UC-ZMFLB73158A08_FLI.pep
TVDAHFCFQNEMNERELSALKSVIKCIEEHKLEQQYPVDPLQKRVLQLEKAKADKRMAVEAAKPQSKRPRANGSAFATRATGFADKSFYSATPERHPFNPCERQFVYGAEVHLPPMMTSASYTMQPAHGPYYGNGYPVQYQVSYIH

SEQ ID NO: 70182 - protein, 431 aa, Zea mays
  Clone ID: UC-ZMFLB73162F07_FLI.pep
STAKRLEGKASTSHRPTKSQSEATATDRRSKKRNETKMMMMMGERAHAPPWQRSPAASGVTDADDASPYALLAALQHYLPSNEVAAYDEDDEEAALAAATAAVDAYACDEFRMYEFKVRRCSRGRNHDWTACPYAHPGEKARRRDPRRYHYSGAACPDFRKGGCKRGDACEFAHGVFECWLHPSRYRTQPCKDGTGCRRRVCFFAHTPDQLRVPPPRQSSPRGAAAAASPLAESYDGSPLRRQAFESYLTKSGIVSSPPPTSTLVSPPRSPPSESPPMSPDAAAALRRGSWPGVGSPVNEVLASMRQLRLGGGSPRSAPSGGSFLGGGYPFGSPKSPAGLYSLPSTPTRPSPVTVTTASGATVLTVERLNLGLIGDEEPVMERVESGRALREKVFERLSKEAAVPSDTAASANVEGAAPAPDVGWVSDLIN

SEQ ID NO: 70183 - protein, 476 aa, Zea mays
  Clone ID: UC-ZMFLB73158E10_FLI.pep
EGKLSTSCSEPNIANAFWRRSQRRVAEEPRGASSSPEHPLMRARGRSILGSEKQSFQEYTESGAASRSDGLGGPSTSNARRIRRRSISITPEIGDDIVRAVRAMNETLKQNRLQRDHVEGSCSYVMEDQSNTNDCPNKDDASWRIGATDSDSRNRTGSTQKAMSLPSSPHEYRGQVTQKSDDFISKEKMALAWNKVFQSSPFLNKALLPFKEWNIDFSEITIGTRVGIGFFGEVFRGIWNGTDVAIKVFLEQDLTTENMEDFCNEIYILSRLRHPNVILLLGACITPPHLSMVTEYMEMGSLYYLIHMSGQKKKLSWRRKLKIIRDICRGLMCIHRIKIVHRDLKSANCLVNKHWTVKICDFGLSRLMIDSPMTDNSSAGTPEWMAPELIRNEPFTEKCDIFSLGVIMWELCTLSRPWEGISPVQVVYSVANEGSRLEIPEGPLGRLIADCWSEPENRPSCQEILTRLLDCEYTVS

SEQ ID NO: 70184 - protein, 385 aa, Zea mays
  Clone ID: UC-ZMFLB73177A01_FLI.pep
KDLVRPTPKRTSKVPVTVAVILTWDTVPLFMGGAGVRGFLNAARGLANLAAHGDNNDNNAAVGQEAGALEALVQLTGSQNEGVRQEAAGALWNLSFDDRNREAIAAVGGVEALVALVQQCLNASEGLQERAAGALWGLSVSEANSIAIGQGGGVAPLLTLARSEVEDVHETAAGALWNLAFYSGNALRIVEEGGVPVLVKICSSSGSKMARFMSALALAYMFDGRMDEVALVGASSASSSKSVNIEGARRIAFKHIETFVLTFSDPQMFSTAAASSAPAALSHVAEAVFIQEAGHLRCSRSEIGRFVVMLRNPSPILRACAAFALLQFTIPGGRHAVHHAGLLQEAGAGRVLRPAAAATTASIEAKIFARIVLRNLEHHQSGTST

SEQ ID NO: 70185 - protein, 328 aa, Zea mays
  Clone ID: UC-ZMFLB73158F12_FLI.pep
PSKISEEMVRCMASIYYLLRTEAPAGKPEKARSPFLSRSSTNVILPRRVNGEENSAPNNRCTVEIASISVDKNQMPDVSYAITHYRLLVEQLERVDLSVSENSVKLAFWINVYNSLIMHAYLAYGIPNSSLKRMALFHKAAYNIGGHAITANAIEHALLCFRSPRIGRWFESILSTAMRKKCPDEKQLVQLKFGLQECQPLALFALCTGASSDPMLRVYTAKNVMEELERAKREFLQATVVVRKSTKKLFLPRLVERYAREACVGPDSVLPWAQREGAVAVVDDRPQQEAAQRGVGSRRKAVQAVEWLPYATRFRYAFARSMVDKPHC

SEQ ID NO: 70186 - protein, 594 aa, Zea mays
  Clone ID: UC-ZMFLB73163E08_FLI.pep
KNQLLLGIRHATRPQTVMPSSVLSSDSMHIGLLAAAAHAAATNSRFTIFYNPRASPTEFVIPLSKYIKAVFHTRISVGMRFRMLFETEESSVRRYMGTITEVSDADPVRWPSSYWRSVKVGWDESTAGERPPRVSLWEIEPLTTFPMYPSLFPLRVKHPWYSGLAALHDDSNALMWLRGVTGEGGFHSLNFQSPGIGSWGQQRLHPSLLSNDHDQYQAVVAAAAASQSGGYLKQQFLHLQQPMQSPQEQCNLNPLLQQQILQQASQQQMVSSDAQNIQSVLNPGAIQQQLHQLQQMQHTHNDQKQKIQPDQQYQVASSAVLPSPTSLPSHLREKFGFSDPNVNSSSFISSSSNENMLESNFLQVSSKSVDLSRFNQPVVSEQQQPQQQQAWKQKFMGSQSMSFGGSVSLNSPTSKDGSVDNKVGRDVQNQSLFSPQVDSSSLLYNMVPNLTSNVADNNISAFPSGSTYLQSPMYGCLDDSSGLLQNTGENDPTTRTFVKVYKSGSVGRSLDITRFSNYAELREELGQMFGIKGQLDDPDRSGWQLVFVDRENDVLLLGDDPWESFVNSVWYIKILSPEDVHKMGKPGNDPRYLS

SEQ ID NO: 70187 - protein, 82 aa, Zea mays
  Clone ID: UC-ZMFLMO17151H06_FLI.pep
NVCCNLLRAMFVHQNRLLAVKGTFRFSAYFCKSRFYENRSNQHEYKVYRAITAGGINPPLLNPKPWRLIHLSPHVSLMESRF

SEQ ID NO: 70188 - protein, 646 aa, Zea mays
  Clone ID: UC-ZMFLMO17158D02_FLI.pep
PSSSETRHEQRTVLPTVKQRLDWELRLRDGLGRRYHDRAPDDVLARHPLQVPLGAGDGRRPVPPHRHGEALLLVRPGEPQHRGPHHHGHGPGHVHHGLVHRVGLPDVGHGATDGDRMGQQLHHQRRVVELRLGDGLQLGAGDAAPSYLLHAVVPDAQPAEVGDVLAGAEVVHQPRVDGAGRVHVAGAHAVEARPPVLLVLDRHARVVRRARRRHDRRLDRRGGPARVQALDDGRDAAQVRRRHGRPGLHEEGQAHVVRELRVHLAGRPRRQDVHSGPGDVGLQDARARLVRPARREEGHGRRRGRAHHRAPERDGRRGPGRRLDVRRDLGPRGVAHVRRRQDVRVGEGGEPLRRLVHEDHAGAAVRGHHLPLLDVLRDGAALAQHHLAPHLGLHQRAAVAGLRVAVAAREDEQQRAPRGVVPWLEQRLAVEHLPVAEPHGGAYRAVHGARRDREHPWRAVGDGARGGAVVARRGADEDPVLHGLERGDGDEVVVELRAVRGADGEGEHVDAVLDGGVQAGNDVHDGAPAPRAHLVDGQVRVRRHPGRRAVRVAPHVGVLHEVARRRAGRVRAVARVVHGRRRVVDGRAPERARADDLVAAPAAGDRPELAGALPLLGRRRQPGVAEGRVAGQDAGVEEANHHAAAE

SEQ ID NO: 70189 - protein, 458 aa, Zea mays
  Clone ID: UC-ZMFLMO17152E11_FLI.pep
EPASSGDDKPLVDEDIEVKRMRRLEAIRAARPYNAIAEDGSGWVTVAAPEEQGGGSTHQRRNDTPLPERGRAPTREDLSPVRRRQRRDTPSPVHGDAAAKDFSPPRRPSPVHGDAAAKDFSPPRRRQRRNTPSPVHGDAAAKDFSPPRRRQRRDTPSPVPDGAAAKDFSPPRRRQRRQDTPSPKDSGAADQDDMSPPRKSRQREDLSPPRKGARHITEEPRDISPRKKRDISPSRKSTKEGASKQVKKSGLMTAEEVKEDIRKIKEAEMIKFASQDPSLVGKGAKAVFRDKEGRRISEEEMCKAKEPEKPKEIHIEWGKGLVQKREAESRLKEIEAEKSKPFARTRDDPELDNMLKERIRWGDPMAHLVKRKDPEFILEDLGDDEKMKESGFIVPQSIPTHSWLKRGVDAPPNRYGIKPGRHWDGVDRSNGFEKDMFKLKNEKQAMEQEAYLWSVSDM

SEQ ID NO: 70190 - protein, 141 aa, Zea mays
  Clone ID: UC-ZMFLMO17126B11_FLI.pep
HSKGGVAEACSVVKRVGSKLDPVDGACLPLDIICLHLEKAAMDRLSSGEELVGDDDVARALLGVCKGLPGPVLAVYDQLLSDGAIIPSLNLKLRLLRSVLAILREWGISVIAHRLGTTSAGASFFLDGTFSLNQTGAANQD

SEQ ID NO: 70191 - protein, 656 aa, Zea mays
  Clone ID: UC-ZMFLMO17132B07_FLI.pep
FFFHFCLMKKFMLSPLNFCRYKRLLCSVDLSKDFFFSYSYNIMRSLQKNITQKNTGQAVYEPMCVWNEFLTRAIRNHLKNTCWTVALVHGFFKQSKLSVSGKDFWLTLIARRSRHFAGTRFLKRGVNEKGRVANDVETEQIVFEDTSDGIPTQMASAVQHRGSIPLVWFQETSRLNIRPDIILKPDVDYKATRLHFENLALRYGNPVIILNLIKTREKKPRESLLRAEFAKAIHYINKSLPDDKRLKFLHMDLSKLSRRKGTNVLALLTKVASDVLDLTEFLHCEISTSTKPDDTSSGERTAAKPHDDRSSSDQTECAAKLAPLLLQKGVLRTNCIDCLDRTNVAQFAYGLAALGRQLHALGLTEAQKIELHDPLADDLMDFYEWMGDTLAIQYGGSAAHNKIFCEQRGQWKAATQSQEFLRTIQRYYNNAYTDHDKQDAINMFLGHFQPQQGKPALWKLDSDQHYNIGRQGTLKEEIGRSFIKRSLSDGNILLENNLPVTSCNNETNNTELLPMQQLDDIREPTDSAPEISICEPNPCSSVNYGRVPGRHSISEERQSYLKRLGYPELHSSNFLDLDLLSSSGNSCDEEVFERSSLINSPMDVVSVESSTSYSEQGHTDEGRDDMDLSRSSSQVSDVRDYSDRFAHWVADGGMLW

SEQ ID NO: 70192 - protein, 336 aa, Zea mays
  Clone ID: UC-ZMFLMO17136H04_FLI.pep
KARCQKKKISLARWWRKKKYHLVNWNKVCHTKKNGGLGIKNLEALNISLLCKWWWKIENESSLWQKIIVKKYFHGKDLYNIKVRNSDSPVWKDLMKIRAFYLKGRQITTKCGDKSRFWLDSWVNERPLCTIDPELYEICDDKFILVKDARIKNWQLSFRRWLNNENEIRWISICGDCENFEFQDSPDTVQWKWGGKKTFTVKSMYNSLSNNISDLGKKHIWKSKVPPKIKIFMWFLENNRLLTKDNLIRRKWSGDPSCCFCPHAENIEHLFFTCPIARVIWGTVAKCLDTHHIPNNVESCYRWLRKHLNCDNAVHVILISAICWAIWKARNKMCFD

SEQ ID NO: 70193 - protein, 561 aa, Zea mays
  Clone ID: UC-ZMFLMO17152H05_FLI.pep
TLNAYNVLAARCAAEYLEMSETVEKGNLVYKIDVFLSASIFRAWKDSIIVLQSTRPLQRWTDSLKVVNHCVDAIASRASTDPSEVDWSYTYSRRKLPSETDGDARGWNGVRKRQAVPRDWWVEDLCDLEVCLYRKVILAIKAKGRTGGAVVGEALRAYACRRLFGSLDHAVSDGLDCTKHRAALEAVADLLPAEKGSVSCGLLLKLLRASCLLESGQAYRGELIRRIGAQLERASVPDLLIPADSGDGDGDAMYNVGMVAAMLEEFLLHHKVNGAEAEKREDGEDDVDVAADDPVTSSKLAAVAKLVDGYLSEIAKDPCLPLETFVALAESMPPLSRPVHDALYRAIDVYLKEHPGMSKGEKKRLCALMDCRKLTADASEHAVQNERLPLRVVVQVLFFEQVRQSAAAAAASAAPARSLILPRDDGASYGSSRSATTTATEDEQWGGGAVVGAPVTTSTSGGAGDAGSLRSVSQLSANENGRSGGGGDRKKAKGGAVAPAPVKRVLGKLWSGKASSGSDDTSASPVGSLNLEPGGDQVNVTYHEAFCVIVTILLYMFSLFF

SEQ ID NO: 70194 - protein, 352 aa, Zea mays
  Clone ID: UC-ZMFLMO17155C05_FLI.pep
QDCITWARLKFEDYFSNRVKQLTFTFPEDAMTSSGAPFWSAPKRFPRPLEFSSSDSSHLNFLLAASVLRAETFGIPIPDWAKNPKKLAEAVDKVIVPDFQPKQGVKIETDEKATSLSSASVDDAAVIEELIAKLEAIFKTLPPRFHMNPIQFEKDDDTNFHMDLIAGFANMRARNYSIPEVDKLKAKFIAGRIIPAIATSTAMATGLVCLELYKVLAGGHKVEDYRNTFANLAIPLFSMAEPVPPKTIKHQDMSWTVWDRWTITGNITLRGLLGWLKEKGLNAYSISCGTSLLYNSMFPRHKDRLDKKVVDVAREVAKVEVPSYRRHLDVVVACEDDDDNDVDVPLVSIYFR

SEQ ID NO: 70195 - protein, 729 aa, Zea mays
  Clone ID: UC-ZMFLMO17137D09_FLI.pep
RKLEVPASEATIDATAQGIASLLCAHGPDVEWRICTIWEAAYGLLPLSSSAVDLPEIVVAAPLQPPTLSWNLYLPLLKVFEYLPRGSPSEACLMRIFVATVEAILRRAFPSETPEQSRKPRSQSKNLAVAELHTMIHSLFVESCASMDLASRLLFVVLTVCVSHQALPGGSKRPTGSDNHSLEEATEHSRLTNGRSRCKKRQGPVATFDSYVLAAVCALSCELQLFPCISKNGSHSNLKDSMKIIIPGKNNGINNELHSSISSAIIHTRRILAILEALFSLKPSSVGTSWSYSSNEIVAAAMVAAHVSELFRRSRPCLNSLSALMRCKRDAEISTRASSLYHLIDLHGKTVSSIVNKAEPLEAHLTLTPVKKVNQHRCEENNTNSSDSAKLENKNGSTHKKNGFSKPHLKCAEEVLNGNVASTSGKSIASLQVEASDLANFLTMDRNGGYRGSQTLLRSVLSEKQELCFSVVSLLWQKLIASPEMQMSAESTSAHQGWRKVVDALCDVVSASPTKASAAIVLQAEKDLQPWIARDDEQGQKMWRVNQRIVKLIAELMRNHDSPETLVILASASDLLLRATDGILVDGEACTLPQLELLEVTARAVHLIIEWGDPGLSVADGLSNLLKCRLSTTIRCLSHPSAHVRALSMSVLRDILDHGSVSPNKISRGEQQRNGIQSPSYRCVAAGILNWQADVERCIEWEAHSRRATGLTLAFLSTAAKELGCPLPC

SEQ ID NO: 70196 - protein, 537 aa, Zea mays
  Clone ID: UC-ZMFLMO17155F09_FLI.pep
APARQADMGNRASRHHRQAAEQQPATPTLPKPQPQIQPPPPPPPTQTQQYQQAPPQSQQKPKPAADVGAVGRVLGRPMEDVRATYTFGRELGRGQFGVTYLVTHSETGQRFACKSIATRKLVHRDDIEDVRREVQIMHHLTGHRNIVELRGAYEDRHSVNLVMELCEGGELFDRIIAKGHYTERAAASLCREIVAVVHSCHSMGVFHRDLKPENFLFLNNKEDSPLKATDFGLSVFFKHGETFKDLVGSAYYVAPEVLKRKYGAEADIWSAGVILYILLSGVPPFWAENEDGIFDAVLRGHIDFSSDPWPSISNGAKDLVKKMLRQDPKERLTAAEILNHPWIREDGEAPDKPLDITVIGRMKQFRAMNKLKKVALKVVAENLSDEEIMGLKEMFRSLDTDNSGTITLEELRSGLPKLGTKISESEIKQLMEAADVDGNGTIDYAEFISATMHLNRLEKEDHILKAFEYFDKDHSGYITVDELEEALKKYDMGDDKTIKEIIAEVDTDHDGRINYQEFVAMMRNNSPEIVPNRRRMF

SEQ ID NO: 70197 - protein, 820 aa, Zea mays; identical to SEQ ID NO: 53704
  Clone ID: UC-ZMFLMO17153E02_FLI.pep

SEQ ID NO: 70198 - protein, 470 aa, Zea mays
  Clone ID: UC-ZMFLMO17155H06_FLI.pep
LKDKYSLGRRLGQGQFGTTHLCVERATGKELACKSILKRKLGSDDDVEDVRREIQIMHHLAGHPSVVGIRGAYEDAVAVHLVMELCGGGELFDRIVRRGHYTERKAAELARVIVGVVEACHSMGVMHRDLKPENFLFADHSEEAALKTIDFGLSIFFRPGQIFTDVVGSPYYVAPEVLKKRYGPEADVWSAGVIIYILLCGVPPFWAENEQGIFEEVLHGRLDFESEPWPSISDGAKDLVRRMLVRDPRKRLTAHEVLRHPWVQVGGVAPDRPLDSAVLSRMKQFSAMNKLKKMALRVIAENLSEDEIAGLREMFKMIDADNSGQITFEELKVGLEKVGANLQESEIYALMQAADVDNNGTIDYGEFIAATLHLNKVEREDHLFAAFQYFDKDGSGYITADELQVACEEFGLGDVQLEDLIGEVDQDNDGRIDYNEFVAMMQKPTVGVLPKKADLQNSFSIGFREALRMA

SEQ ID NO: 70199 - protein, 549 aa, Zea mays
  Clone ID: UC-ZMFLMO17153G05_FLI.pep
SLSLNPHLSGSLSPPQSPTVRPPPRSPSTHCRCKRGHRGLEAAAVPGFGARSAMARRLMLALPVLLFLLLVGQCHGGKIGVCYGRNADDLPAPDKVAQLIQQQSIKYVRIYDTNIDVIKAFANTGVELMVGVPNSDLLAFAQYQSNVDTWLKNSILPYYPDTMITYITVGAEVTESPANVSALVVPAMRNVHTALKKAGLHKKITISSTHSLGILSRSFPPSAGAFNSSYAYFLKPMLQFLVENQAPFMVDLYPYYAYQNSRSNVSLNYALFSPESQDVIDPNTGLVYTNMFDAQVDSIFFALMALNFKTLKIMITESGWPNKGAVKETGATPDNAQTYNTNLIRHVVNDSGTPAKPGEEIDVYIFSLFNENRKPGIESERNWGLFFPDKSSIYSLDWTGRGNVDVMTGANITSANGTWCIASTNASETDLQNALNWACGPGNVDCSAIQPSQPCYQPDTLTSHASYAFNSYYQQNGANVVACDFGGAGIRTTKDPSYDTCVYLAAGNKMSTMNSTSLPARSDSGPVPRVKCFATLLPMLALVMAAVML

SEQ ID NO: 70200 - protein, 502 aa, Zea mays
  Clone ID: UC-ZMFLMO17133E02_FLI.pep
VIPKLNGPKGNPTTTGLESRQIGVDDPTTRWPSHAFPGMAEPTPPSLPSSDCADVLVGSSAPSFPYIRGWSFPSDSGAAMGSVEEHLQPKVCVQTSTSAGLEQILPWLFYHKVVGVAQFLLFVEGKAAKPNVAGVLESIPGVKVVYRTKDLEERQARSRIWNETWLSGFFYKPCNYELFVKQSLNMEMAIVMARDGGMDWIIHLDTDELLYPGGAAEYSVRRLLAEVPRDVDMVIFPNYESSVEHDNIKDPFSEVSMFKRNYDHLPKDTYFGMYKEATRGNPNYFLTYGNGKSAARIQDHLRPNGAHRWHNYAKSPNEIKLEEAAVLHYTYTKFSDLTSRRDRCGCKPTKEDVKRCFMLDFDRAAFIIASTASEEEMLRWYNERVVWTDKQLNLKLLRKGVLTRIYTPMTIVQSLRESGVFTSAIAAGQPAVNAKLSPKETNAQSQNVTASGNMTRVVRSTDSKASGRKILQAVDLAFSDTNVTAVPPLSPPSLDEHRHHSE

SEQ ID NO: 70201 - protein, 285 aa, Zea mays
  Clone ID: UC-ZMFLMO17127D03_FLI.pep
SGYIDHHQSLSSEDKGWGCGWRNIQMLSSHLLKQRQEAREVLFGGSGFVPDIPSLQRWLEIAWDKKFDTIGSSHFHNKVYGAKKWIGTTECATLFRSFGLRAKIVDFDSTESSDLQSKNSSHAASQVRGLMDKFLIKSNSPKSSSEFCQEDAESMRGQHALVDWVWNYFACERSDRLTTQRATVSNKTPLYFQHQGHSRTIVGIQKEMVHRGSQEQYTLLILDPGHRTADLERSLRSKNGWQRLVKRGVHTLRKPQYQLCYVDPGIASSEEMEQLKTIDSMLVRF

SEQ ID NO: 70202 - protein, 417 aa, Zea mays
  Clone ID: UC-ZMFLMO17159F12_FLI.pep
SSYVSSSLNLAGRRKMTVTPRITVSDGRLTVRGRTVLTGVPDNVSAAHAAGAGLVDGAFVGAHAGEAKSHHVFTFGTLRDCRFLCLFRFKLWWMTQRMGVSGRDVPLETQFMLVEVPASDGDGDGDDAPAYVVMLPLLEGQFRAALQGNDRDELQICIESGDKEVQTDQAAHMVYLHAGDNPFDTVTAAVKAVEKHLQTFHHRDKKKLPSFLDWFGWCTWDAFYTDVTADGVKHGLQSLSKGGAPPRFLIIDDGWQQIASENKPDPNVAVQEGAQFASRLTGIKENTKFQTKPDGDGDGEQAAGGLKRLVAETKDAHGVKQVYVWHAMAGYWGGVTPTAGTAMERYEPALAYPVQSPGVTGNQPDIVMDSLSVLGLGLVHPRRVRDFYGELHAYLASCGVDGVKVDVQNIIETLGAG

SEQ ID NO: 70203 - protein, 487 aa, Zea mays
  Clone ID: UC-ZMFLMO17130F07_FLI.pep
VPSPPNPTHQPTRRRTEKKNRVEATFAAMAGDPPTAAEKETLVSSFIEITAGQTLETATQFLQMTSWHLEEALQLFYIDGEAAHTAAHSVDPSPAAAAPSALAAAAGVEEAMRFAPPPAAALGDAMSHGFGVREDDDVRAPLPVKRETLYGEGIVSVMRPNASAAFRNFEQEARQSAVWDSEQNVASSSGDNLASLYRPPFPLMFNGSFDKAKLEASSLDKWLLINLQSTEEFSSHMLNRDTWGNEAVAQLIRSNFIFWQVYYDTSEGRKVCTYYHLVSMPAILLIDPVTGQKVHAWNGMVHPDRLLEDLLPYLDKGPKGHHAAQPQKRPRKVDQEASTGKQGKIAVEDEDEELARAIAASLEVVIEASDASDDDMAEAEPEEENEPSLNIKPDYPPLPEEPKGSRELLCRVAIRLPNNQRIQRNFLHTDPIKLLWSFCAPQVEDGEKRAFHFVQAIPGASQKLQFGSDLTFRKAGLANSMINLLWG

SEQ ID NO: 70204 - protein, 483 aa, Zea mays
  Clone ID: UC-ZMFLMO17134B09_FLI.pep
FLKTAEVLSLPSSYNQLVAGVYIYMMEAEKNGNILMQKYEVGKLLGQGTFAKVYHARNIETSQSVAIKVIDKDKIFKVGLMEQIKREISVMKLVRHPNIVQLYEVMATKSKIYFVLEYVKGGELFNKIAKGKLREDASRKYFQQLVSAVDFCHSRGVYHRDLKPENLLVDENGNLKISDFGLSALAESRRQDGLLHTTCGTPAYVAPEVISRKGYDGAKVDTWSCGVILFVLMAGYLPFQDSNLMEMYRKIGKADFKCPPWFPSDVRKLVSRILDPNPRTRMPITKIVECFWFKKGIDNKLIRKNIEMKGKVSALTDVNVVFSSTGIGSNNNKLVDVEQDVAKITNLNAFDIISLSEGFNLSGLFEESEKRKEARFTSSQSASTIISKLEDAATCSKMTIKKKEGGVLKMEGANEGRKGVLSIDAEIFEVTPAFHLVEIKKNNGDTLEYENLFKQDMKPALKDIVWAWQGESKDQQAKDHNQS

SEQ ID NO: 70205 - protein, 196 aa, Zea mays
  Clone ID: UC-ZMFLMO17151G11_FLI.pep
LKIHFGESSMQKCEIMLNDLIDSKRTNSNIKTSLLKSSQTVPGQEEAEVSHDVLDATIISSNFWPPIQIEDLVVPASVDQLLSDYAKRFHQIKTPRKLLWKKNLGTVKLELQFDGRSVQFTVAPVHAAIIMRFQEKSRYSKNCIIACIICTLLTKSIELSSWTSKALATEIGIPMDSLNRRISFWTSKVWHTCISG

SEQ ID NO: 70206 - protein, 637 aa, Zea mays
  Clone ID: UC-ZMFLMO17160D11_FLI.pep
MNGHLEINSANLARVLREFSPEEVTANIYTVVDVLLHHIQCEVQRGHLAQDLLSKAITNLSFFIWTHELLPLDILLLALIDRDDDPYALRLVISLLEKPELQQRVKNFCNTRSPEHWLKNQHPKRAELQKALGSHLSWKDRYPPFFDDIAARLLPVIPLIIYRLIENDATDIADRVLAFYSSLLAFHPLRFTFVRDILAYFYGHLPIKLIGRILNLLGVSTKTPFSESFAKYLVSSNSSICPPPEYFANLLLNLVNNVIPPLSSKSKSNPADTTRSTFNKHHASSQPGGVGNTDGQRAFYQNQDPGSYTQLVLETAAIEILSLPVPAAQIVSSLVQIIAHVQAILIQSNSGQGMSGGLGQSSGLPTSPSGAAESSGPNQANSAATGINATNFVSRSGYSCQQLSVLMIQACGLLLAQLPPEFHMQLYSEAARVIKDCWWLADGSRPVKELDSAVGYALLDPTWASQDNTSTAIGNIVALLHSFFSNLPQEWLESTHTVIKHLRPVNSVAMLRIAFRILGPLLPRLAFARPLFMKTLALLFNVLGDVFGKNPQVSNPNPVEASEIADIIDFLHHAVMYEGQGGPVQSTSKPKLEILTLCGKVIEILRPDVQHLLSHLKIDPTSSIYAATHPKLVQNPS

SEQ ID NO: 70207 - protein, 454 aa, Zea mays
  Clone ID: UC-ZMFLMO17160E02_FLI.pep
TLSASVPMLMPPSCEGSFCPAASPFQYTVFFLGLYLIALGTGGIKPCVSSFGADQFDDTDPAERVQKGSFFNWFYFSINIGALISSSFLVWVQDNVGWGLGFGIPTVFMGLAVISFFSGTSLYRFQKPGGSPITRVCQVIVASFRKWNVPVPEDSSLLYELPNGVSTIEGSRQIEHTDELRCLDKAATVTEVDVKTADFNNPWRICTVTQVEELKILVRMFPVWATTIVFSAVYAQMSTMFVEQGMVLDPSLGSFKIPPASLSTFDTLSVIICVPMYDYIVVPIARRFTGNERGFTELQRMGIGLVISIIAMSVAAVLEIKRLAVAREAHLVDQNVPVPLSIFWQIPQYFLIGLAEIFTFIGALEFFYDQSPDAMRSLCSALNLLTTAFGNYLSAFILTMVAYFTTRGGNPGWIPDNLNEGHLDYFFLLIAGISFLNLIVYVLCAGKYKSKKAA

SEQ ID NO: 70208 - protein, 196 aa, Zea mays
  Clone ID: UC-ZMFLMO17163G11_FLI.pep
PVYKSRSRPASPLPTRSPASASRSSTPPPPMANLPDADAAGFKLFGKVIQPPDAQRAAGDGDGAGAPPPSPPVLPPPPPPPPPPPQPLPLQQAAGAGGTGGEPLPCPRCGSRETRDENGRKRYLFGNQFFSRLRINRIYNIQYKFVFLFLTSSLLRFIKGKPQIHSIFSQIIDINFGMDSETNSVNFSTFCVVGSK

SEQ ID NO: 70209 - protein, 123 aa, Zea mays
  Clone ID: UC-ZMFLMO17166D10_FLI.pep
RRSESINTQLGISNHTTYVALNPCICQPFPRILHHMNWSALPGSTLPYHPASCQEGNCYSHHLPRPVRGCLFTYGIAGFRLTHDEVCGQLKGPRSSGQQSVRSLIDTDGRPFLLSVWSHFKLF

SEQ ID NO: 70210 - protein, 466 aa, Zea mays
  Clone ID: UC-ZMFLMO17169H11_FLI.pep
AADIKVLGSLSRDDLRKLCGDNFPEWISFPQFEQVKWLNKHLSKLWPFVVEAATVVVKESVEPLLDDYRPPGIKSLKFSKFSLGNVSPKIEGIRIQNLQPGQIIMDIDFRWGGNPSIILAVDAVVASLPIQLKDLQVYTVIRVIFQLSEDIPCISAVVVALLADPEPKIQYTLKAIGGSLTAVPGLSDMIDDTVDSIVSDMLLWPHRHVVKLGVNVDTSDLELKPQGRLSVTVVKATSLRNKEMIGKSDPYVKLYVRPMFKVKTKVIDDDLNPEWNETFDLIVEDKETQSVIFEVYDEDKLQQDKRLGVAKLAVNTLESEITQDATLKLLHSLDPIKNKDTKDRGTLHLKVKYHPFTKEEQLEALEMEKQAIEERKRLKEAGIIGSTMDAVGSGVGFVGTGIGAGLGFVGSGIGAGAGLVTSGIGAVSSGLGKAGKFMGRTVTGPFSMSRKNGSSSTAPQHDQPSA

SEQ ID NO: 70211 - protein, 367 aa, Zea mays
  Clone ID: UC-ZMFLMO17174F01_FLI.pep
RVALLKVVLMKWLPVSVPCDWCKHFLLNVSWLYLLVLIWNFYTCFSGYGMHAGPSPPRRAEASKFDDDVSPRYTHGYQGGGRGGARFREGPPPYGRGRSYGRGYGAPHGKDLINIDGEYVHRNDPNLSPREGDWICQNPNCGNLNFARRTHCNNCNKFRYSAREAYEPRRSPPFRSYPSPPRGPPRMVGPPGDRAPAREMARYRSPPHGWGASDPRAYAGRSPPERAGRFTDPSTKGRMGFRGERDPRDRVKYEWSATDDYVQRERPYDGYLDRSRRRSGSPRGNWGNDLRDRSRSPARNRPMKSSFTGRGRPDDYAADPYGSRGRPNGMEAGRGRGHAYRAGSGPYPGETRGDQRAAPRARNEDGY

SEQ ID NO: 70212 - protein, 271 aa, Zea mays
  Clone ID: UC-ZMFLMO17180E10_FLI.pep
RDDNADPRSPKRPCNESRSTVVEHNLQTPPPKQCHMVLTSLKAKCHPLQSTFASPTVSNPVGGNEKCADVTIQIFFSKILKLAAIRIRNLCERIQYMEQTERVYNVFKQILDQQTTLFFNRHIDQLILCCLYGVAKVCQLELSFREILNNYKKEAQCKPEVFLSIYIGSRNHNGVLISRHVDIITFYNEVFVPAAKPFLVSLISSGTRPEDKKNASGQVPGSPKLSPFPNLPDMSPKKVSASHNVYVSPFAANQDGFTAVTKFQEFLCMHW

SEQ ID NO: 70213 - protein, 524 aa, Zea mays
  Clone ID: UC-ZMFLMO17164B04_FLI.pep
ESGEELLMDSELKNLKLHDNLGNEIPHNIIAISDMNGEAPKRMEFDCSTGGPSGESTSYQFNENNWISSEQTANNYFSRTSSSVVVPTEWGRPNAPLWGGRVVGRRQIRYIRGSSCLSTDEYNAFMNIFERGSLLYCNMSFDALLSVRKQLEEFGFPCKAVNDSLWLQMLLCHRVQAIVADTCRNCCLMNSSCACKQAYVSSHTHYRQEHDRSSASDNIGNVYLADGQGDGNGVLGPVRVNVRGAVDGLAGIGRGNSNVPGAAWAPTRYVFSRVPYGLGSRNGQQFAIDESEPRIDRNGDISADGLTALVNLSQENNAAHLQDQSLFETGMQTRYRSVPSVSTPGGSSVQMQESKEHELGSDWETTKDATISLDMKTPLSHFPPFRFGVEFEDVHRLADGQVKHSTEVFYAGSLWKVSVQPFNDEDPHGRRTLGLFLHRRKAELLDPLRKAHLYVDPREKVTARYQLICPSKREVMIFGSLKQAGTLLPKAPKGWGWRTAILFDELADLLQGGALRIAAVVQLV

SEQ ID NO: 70214 - protein, 93 aa, Zea mays
  Clone ID: UC-ZMFLMO17175A02_FLI.pep
TVFMCPDPIKSRRRNRVSRGDNLNFVFSSEESGISLYFLRFNSERISFLPCSTQPTQMVKDVHAGNFVKQELKIFRKVHKPGIGLSIWGQFLE

SEQ ID NO: 70215 - protein, 406 aa, Zea mays
  Clone ID: UC-ZMFLMO17168D01_FLI.pep
DSSKGSTATEPNQSQSSSSSLPSSDLHDGGGAQVDELNTQKNQPSSQSKKPKKSTLSHQKSAPHDFYHGKKPGVSVESSSKNGAPDVTSNGRPKYQKPQSSHQPRQQNPVNHRPHGGSGNFQSSNSHRSNSCPAPAGHNGIPTAPLQFWPSGPPYHGPPINYPDMSRLNISEYPRGIHNNQGLHANYHPNHPGYNDYSYRPPTQPNMPSNMQNIGHWGANPGCSQPSSDPQGLVRYILGALEVLKTEKIPPTEQYIADCIWYGHGDANMPNFDVKKALQVAMQHQAVVKKKLGKMSFFLGKDENLWKCVNIMDDNAKYPKETLDAVHAFMSSAPGYSEIKSSQSRYQAATMLKKTCLKHLSLAEVLQVLNIIINTKKWFVPHSSGWQPLSFNIIVADATTATGGKA

SEQ ID NO: 70216 - protein, 350 aa, Zea mays
  Clone ID: UC-ZMFLMO17181E11_FLI.pep
VRKDEATGRLVASGVPRDNAMDVLLVDTSRGNKVVAFYFRNPCARLTLLYSHGNAADLGQLYDLFVQLKVNLKINLMGYDYSGYGASTGKPSEENTYADIEAVYQCLETEYGISQEDIILYGQSVGSGPTLHLASRLPRLRGVVLHSAILSGLRVVCHVNFTFCFDIYKNVKKIKKVKCPVLVIHGTDDDVVDWSHGKELWRLAREPHDPLWIKGGGHCNLELYPDFIRHLSRFVREMETVTTKARLRKIRPALHQLRKKAAHRASTAATATATTTSTTTFTANCCCRVRVRKPTCPSCGSFGCDCCWPLRSCLALRFPRCCRPPAACFTCGGCCWSCRCRSCFKCCCCC

SEQ ID NO: 70217 - protein, 902 aa, Zea mays
  Clone ID: UC-ZMFLMO17164G02_FLI.pep
ALVNAGMRVYLQETERNWIISDVSIVFGGVAAVPLSASRTENFLTGKKWDSGLLDDTFNLLKEDISLSENAPGGMIEFRRSLTLSFFFKFFLSVTHEMKIKGLLADGLHADHLSAVQPYSRPVTVGTQSYELVRQGASVGQPMVHMSAMLQVTGEAEYTDDTPTPPNTLHAALVLSKKAHARILSIDDSLAKSSPGFAGLFLSKDIPGVNHTGPIIHDEEFFASNIVTCVGQIIGIVVADTHDNAKTAANKVHIEYCELPAILSVEEAVKIGSFHPNTKKCLVKGDVEQCFLSGACDRIVSGQVHVGGQEHFYMEPQCTLVWPVDSGNEIHMVSSTQAPQKHQKYVASVLGLPQSKVVCKTKRIGGGFGGKETRSAIFAAAASVPSFCLRRPVKLVLDRDVDMISTGQRHSFLGKYKVGFTNEGKILALDLEIYNNGGHSLDLSLAVLERAMFHSENVYDIENIRINGQVCFTNFPSNTAFRGFGGPQGLLIAENWIHHIATELQRSPEEIKELNFHNDGVVLHYGQLLQNCTISSVWDELKASCNFVEARKAINNFNSNNRWRKRGIAMIPTKFGISFTAKFMNQAGALVQVYTDGTVLVTHGGVEMGQGLHTKVAQVAASSFNIPLSSVFISETSTDKVPNASPTAASASSDLYGAAVLDACQQIKVRMEPIASKGTHNSFAELAQACYMERVDLSAHGFYATPNIGFDWTIGKGTPFNYFTYGAAFAEVEIDTLTGDFYTRTADIVMDLGFSINPAIDIGQIEGAFIQGLGWAAIEELKWGDDNHKWIRPGHLFTCGPGSYKIPSVNDIPLNFKVSLLKGVPNPKAIHSSKAVGEPPFFLGSAVLFAIKDAISAARAEEGHLDWFPLDNPATPERIRMACVDSITKKFAGIDYRSKLSV

SEQ ID NO: 70218 - protein, 584 aa, Zea mays
  Clone ID: UC-ZMFLMO17168D04_FLI.pep
ERSRHLLTSGISEILEEATFTNVEQFLEPLELCYRSLCACGDKPIADGSLLDFLRQVSTFGLALVKLDIRQESDRHTDVLDSITTHLGIGSYAEWSEEKRQDWLLSELRGKRPLFGSDLPQTEETADVLGTFHVLAELPADCFGAYIISMATAPSDVLAVELLQRECHVKHPLRVVPLFEKLADLEAAPAAVARLFSIDWYMDRINGKQEVMIGYSDSGKDAGRLSAAWQMYKAQEELIKVAKHYGVKLTMFHGRGGTVGRGGGPTHLAILSQPPDTIHGSLRVTVQGEVIEHSFGEELLCFRTLQRYTAATLEHGMHPPISPKPEWRALMDEMAVVATKEYRSIVFQEPRFVEYFRSATPETEYGRMNIGSRPSKRKPSGGIESLRAIPWIFAWTQTRFHLPVWLGFGAAIKHIMQKDIRNIHILREMYNEWPFFRVTLDLLEMVFAKGDPGIAAVYDKLLVADDLQSFGEQLRKNYEETKELLLQVAGHKDVLEGDPYLKQRLRLRESYITTLNVCQAYTLKRIRDPSFQVSPQPPLSKEFTDESQPAELVQLNQQSEYAPGLEDTLILTMKGIAAGMQNTG

SEQ ID NO: 70219 - protein, 284 aa, Zea mays
  Clone ID: UC-ZMFLMO17161C10_FLI.pep
IDEIDKITKKAESANVSRDVSGEGVQQALLKILEGTVVSIPEKGSRKNSRNDSIQIDTTDILFICGGAFVDLEKTISERRQDSSIGFGAPIRTNMRSSGASCPMVTSSLLESVESGDLVRYGLIPEFIGRLPILVSLAALNEGQLVQVLTEPKNSLSKQYRKMFNLNKVKLHFTDGALRLLAKKAIAKSTGARGLRAILETVLLEAMYEVPDEKTGNERVDAVVVDEEAIGSVDRPGCGAKILRGDGALDQYITRTNVMNLQETNDGLAGELEEAYMLSRIVSL

SEQ ID NO: 70220 - protein, 319 aa, Zea mays
  Clone ID: UC-ZMFLMO17169C08_FLI.pep
QLQATTDPARSMSRRMVTNQDAEAAAPGAGAAVDPMRLASRWRRSRPEWNCASAELEAEPSELNTVNSSGLFSVVSTDKLSVKYLGSHHHGHDVGVVQADRPAPTRRAVYYFEMGVRNAGYKGQTSIGFTSESFKMRRQPGWETNSCGYHGDDGHLYRGQGKGESFGPKFTSGDIIGAGINYLSQEFFFTKNGTLVGAIPKEIKGPLYPTIAVHSYGEELTVNFGKEPFCFDVEGYILEDKMRQQSVSDKLNLEPDISHWIVRSYLLHYGYQDTLNAFDMANATDRPTSRQNGNAEPPEMYGLSHRKLLRQVSLETQFN

SEQ ID NO: 70221 - protein, 480 aa, Zea mays; identical to SEQ ID NO: 47349
  Clone ID: UC-ZMFLMO17172D03_FLI.pep

SEQ ID NO: 70222 - protein, 413 aa, Zea mays
  Clone ID: UC-ZMFLMO17175H04_FLI.pep
IVSRQGNEKLDRMLRQGKPEEKKSMLVVSEFIGCSPSLSGAIRVNPWNIEAVADAMETALVLPENEKRLRHDKHFRYVSTHDVGYWANSFLLDLERTCKYHSQKRCWGIGFGLRFRVVSLDLTFRKLSLENILMAYRRAKTRAILLDYDGTLMPQAINKSPSTESVRILNSLCRDKDNVVYLCSGYDRRTLHEWFPCENLGIAAEHGYFLRCKRDAEWKTCVAATDCSWKQIAEPVMCLYRETTDGSTIEDRETVLVWNYEDADPDFGSCQAKELVDHLESVLANEPVSVKTTPHSVEVKPQGVSKGLVARRMLVSMKERGQCPDFVLCIGDDKSDEDMFQLIATAACGDSLASKAEVFACTVGRKPSKAKYYLDDAAEVVRLMQGLSYVSEELALANQRDEDEDSSLDDVWE

SEQ ID NO: 70223 - protein, 455 aa, Zea mays
  Clone ID: UC-ZMFLMO17165A07_FLI.pep
AAPRVEKLSAAAEKARAKSNGLTKEASVPKDANGNAISAQTFTFRELATATRNFRPECFLGEGGFGRVYKGRLESTGQVVAIKQLNRDGLQGNREFLVEVLMLSLLHHQNLVNLIGYCADGDQRLLVYEYMPSGSLEDHLHDIPLDKEALDWNTRMKIAAGAAKGLEYLHDKANPPVIYRDFKSSNILLDESFHPKLSDFGLAKLGPVGDKSHVSTRVMGTYGYCAPEYAMTGQLTVKSDVYSFGVVLLELITGRRAIDSTRPHGEQNLVSWARPLFNDRRKLPKMADPRLEGRYPMRGLYQALAVASMCTQSEAASRPLIADVVTALSYLASQPYDPSTAFASRRLGGSKPGENGGRVVSRNDETGTSRSPGKDREDSPRDLPAILLNKDLERERMVAEAKMWGDRERMVAEAKMWGDRERMVAEAKMWGENWRDKRRAENGQGSLDSPPTRNS

SEQ ID NO: 70224 - protein, 335 aa, Zea mays
  Clone ID: UC-ZMFLMO17184E12_FLI.pep
LVRSSVVRNSELVVAGAVLVDDGVDLGVGRGLDGVGCLHGDAAVSLLGGHVARHADVPLLAPLGAPRVLDQPVLGAVRGDPVADRRDAVVQLRPAPAGEDPLGVELEVRATGLDGDGHGLVRHRLLERRLVVGRHVLVAVDGDDRGRRLLAGRLARSVRVRVLRRHPAVLGDVLERVVHEAPVAAGVGLGVAVHQLLLRQRRQVLGLDRVDALHGGDRRERPAATCVDDIGVGIIYSCPQASLYVVYMYMHTYIYTHTALALVLDVGDGALLPPVDGGRDVARVGVHERRRRRGALPVAAEHAVVRDPGARVVASELVGGHVAEAVEAELVGLVP

SEQ ID NO: 70225 - protein, 578 aa, Zea mays
  Clone ID: UC-ZMFLMO17163A09_FLI.pep
NPSSFTYERRFFRPFEYALQPPPWYRDEHIALDKPELPPGVSKMTEYDGPQCFIIPGNHDWFDGLHTFMRYICHKSWLGGWFLPQKKSYFALHLPKGWWIFGLDLSLHGDVDVYQFKFFADVCQNKVGENDSVIVVTHEPNWLLDWYWNETTGKNVSHLIQEYLKGRCKLRMAGDLHHFMRHSATRSEKNNFVQHLLVNGCGGAFLHPTHVFRNFERFSGTTYECKAAYPSYDESTGIALGNILKFRKKNWQFDIIGGFIYFILVFSMFPQCNLVRILNEETWSGRLKSFSGTIWSALLYIFEHSYVSSVGSLTLLTASYSFVPSKLSRRRRAIIGGLHVLAHLTAALLLMLLLELGIEICIRNHLLATSGYHTLYEWYRSMESEHFPDPTGLRARLEQWTLGLYPACIKYLMAAFDVPEVMAVTRINICKNGMMSLSRSVLIMYYTSVFIYFWIFSTPVVSLIFGSYLYICVNWFHIHFDEAFSSLRIANYKSFTRFHVKKDGDLEIFTLAVDKVPKDWKLDPRWESEGRGPHQLSHDRKHPSKWRSASSTDPVRSVRVVDHFTIERTRTPDMEPSS

SEQ ID NO: 70226 - protein, 369 aa, Zea mays; identical to SEQ ID NO: 69466
  Clone ID: UC-ZMFLMO17165C11_FLI.pep

SEQ ID NO: 70227 - protein, 306 aa, Zea mays; identical to SEQ ID NO: 46382
  Clone ID: UC-ZMFLMO17169A04_FLI.pep

SEQ ID NO: 70228 - protein, 427 aa, Zea mays
  Clone ID: UC-ZMFLMO17169A05_FLI.pep
GVGVVKAEARGEQRRLEQEHDKVLDRLVVLVGLRAFAQLLHDGVLRVDLHGLLGGHVPRHARVPERLCLHDPLHVGRPAVLARHQAAGGVHHAVRDHNLLHLVAQHLLDHLAQALELLLELLLPLLLILTLVELQALLGGRDELLALELLELANSILIDGVHHVQDFIALLLQLLEEGGVLHGLLALASDVVDVILALLHPRHIVLEACQLISALGGVVPQQLRNLVPVRRVLMDAKLQVLREGLIELVVVLLVLSNLKEKLNALLHQVLPDDLEDLVLLEGLTGDVEGKVLRVNNALDKAQPLWDQLLTVVHDEDTAHIELDVVRLLPGVKEVKGGPLRHKQDSLELKLTLNREVLHGEMLLPVVGQALVESSILFLGNILRLPHPDRLLLVNQLPLMRNLLDLLLLLFLFFLLINILNLALLVLL

SEQ ID NO: 70229 - protein, 456 aa, Zea mays
  Clone ID: UC-ZMFLMO17215D06_FLI.pep
KALLLLLTVLYENHPLVTLVSVDQVKPWIKTSLAPGSGVVKQYLDKSGLQKYLDQLGFNIVGYGCTTCIGNSGELDESVSAAITENDIVAAAVLSGNRNFEGRVHPLTRANYLASPPLVVAYALAGTVNIDFEKEPIGISKDGKEVYFRDVWPSTEEIAEVVKSSVLPDMFKSTYESITQGNPMWNELPVSTSTLYPWDPSSTYIHEPPYFKDMTMTPPGPRPVKDAYCLLNFGDSITTDHISPAGNIHPDSAAATYLKERGVERKDFNSYGSRRGNDEIMARGTFANIRLVNKFLKGEVGPKTIHVPSGDKLSVFDAAMKYKNEGHDTIILAGAEYGSGSSRDWAAKGPMLQGVKAVIAKSFERIHRSNLAGMGIIPLCFKAGEDADTLGLTGHERYTVHLPTNVSEIKPGQDVTVTTDNGKSFTCTLRFDTEVELAYYDHGGILPYVIRKIAEQ

SEQ ID NO: 70230 - protein, 106 aa, Zea mays
  Clone ID: UC-ZMFLMO17198G03_FLI.pep
HSKCQVAREESQQNTITTRNQSQRWHGGYPVVRPRPTLAYSTLWRPNGRGLQSTPLKRSKDPLEYHGVLLAFLNPVCEESPQLGASLWQNLPSYWAHMHLSLSQRL

SEQ ID NO: 70231 - protein, 431 aa, Zea mays
  Clone ID: UC-ZMFLMO17186C12_FLI.pep
LHPPARCLRRISSDSDPPDHPAPPPRSSSSRSEKMAGLDTFLFTSESVNEGHPDKLCDQVSDAVLDACLAEDPDSKVACETCTKTNMVMVFGEITTKANVDYEKIVRETCRNIGFVSNDVGLDADHCKVLVNIEQQSPDIAQGVHGHFTKRPEEIGAGDQGHMFGYATDETPELMPLSHVLATKLGARLTEVRKNGTCPWLRPDGKTQVTVEYRNEGGAMVPIRVHTVLISTQHDETVTNDEIAADLKEHVIKPVIPEQYLDEKTIFHLNPSGRFVIGGPHGDAGLTGRKIIIDTYGGWGAHGGGAFSGKDPTKVDRSGAYVARQAAKSIVAAGLARRAIVQVSYAIGVPEPLSVFVDTYGTGAIPDKEILKIVKENFDFRPGMIIINLDLKKGGNGRYLKTAAYGHFGRDDPDFTWEVVKPLKAEKPSSA

SEQ ID NO: 70232 - protein, 733 aa, Zea mays
  Clone ID: UC-ZMFLMO17193H09_FLI.pep
GLISCLEALAQAQSSRIGSTARALRESLHPVLRQKMELWEENLSTAVSLEVLGITEKFSVAAGARSITTDYAKLDCVTSILMGLLSRNQSLAFWKAFLPVVYNIFNVHGATLMARENDRFLKQIAFHLLRLAVFRNDSIRKRAVVGLQILVRNSFNYFKNTTRLRVMLTITLSELMSDVQVTQMKFDGSLEESGEARRLRKSLEEMADVRSKDLLKDCGLPVTALEAAPEGSSDNRWSWVEVKHLSKCLVQALDAGLEHALLGSVVTVDRYAAAEGFYKLAMAYAPVPDLHIMWLLHLCDAHQEMQSWAEAAQCAVAVAGVIMQALVGRNDAVWSKEHVASLRKICPIVNTDVSAEASAAEVEGYGASKLTVDSAVKYLQLANKLFTQAELYHFCASIQELIIPVYKSRRAYGQLAKCHTSLTNIYESILEQEASPIPFIDATYYRVGFYGERFGKLNKKEYVFREPRDVRLGDIMEKLSHIYEAKIDGSHTLHIIPDSRQVNADELQPGFCYLQITAVDPVMEDEDLGSRRERIFSLSTGTVRARVFDRFLFDTPFTKNGKTQGGLEDQWKRRTVLQTEGSFPALVNRLPVIKSESLEFSPVENAIGMIETRTAALRNELEEPRSSEGDQLPRLQSLQRILQGSVAVQVNSGVLSVCTAFLSGEPATRLRSQELQQLIAALLEFMAVCKRAIRVHFRLIGEEDQEFHTQLVNGFQSLTAELSHYIPAILSEL

SEQ ID NO: 70233 - protein, 363 aa, Zea mays
  Clone ID: UC-ZMFLMO17211G03_FLI.pep
APTVSEEESSSTGYPSKMLADARYISQTLKLGALGIPSYRAFSLVELEAATNNFENSHLLGQDSHGEMYRGRLGNGTPVTIRTLKMKRSQTAQSFNRHIETISRLRHQNLVSALGHCFEYNLDESTVTQLYIVFEYVQNGNLRSRISQGTEGCRLTWSQRISAAIGVAKGIQFLHGGIIPGLVGNDLRITNVLVDQNHVAKIGSYNIPILAEAMRSEQGGGGNKLQADSRVKSDKTDIFDFGVILLEVVSGKTITSMYEVEILKELLAWAIADEDRVRRRSFADPAVSKGCSDESLRTVMEICQRCLAKEASQRPSVEDVLWNLQFAAQVQDDWETDAWSSGGGSPVSSSSRPTRPSRLHLSR

SEQ ID NO: 70234 - protein, 500 aa, Zea mays
  Clone ID: UC-ZMFLMO17199H07_FLI.pep
YGQVAYPKHHKQSEVPDIYRLAARTKGVFINCALVEPFGLTLIEAAAYGLPMVATRNGGPVDIHRVLDNGILVDPHNQNEIAEALYKLVSDKHLWSQCRQNGLKNIHKFSWPEHCQNYLARVVTLKPRHPRWQKNDVAAEISEADSPEDSLRDIHDISLNLKLSLDSEKSGSKEGNSNALRRHFEDAAQKLSGVNDIKKDVPGENGKWSSLRRRKHIIVIAVDSVQDADFVQVIKNIFEASRNERSSGAVGFVLSTARAISELHTLLISGGIEASDFDAFICNSGSDLCYPSSSSEDMLNPAELPFMIDLDYHSQIEYRWGGEGLRKTLIRWAAEKNKESGQKIFIEDEECSSTYCISFKVSNTAAAPPVKEIRRTMRIQALRCHVLYSHDGSKLNVIPVLASRSQALRYLYIRWGVELSNITVIVGECGDTDYEGLLGGVHKTIILKGSFNTAPNQVHANRSYSSQDVVSFDKQGIASIEGYGPDNLKSALRQFGILKD

SEQ ID NO: 70235 - protein, 350 aa, Zea mays; identical to SEQ ID NO: 61017
  Clone ID: UC-ZMFLMO17204E10_FLI.pep

SEQ ID NO: 70236 - protein, 599 aa, Zea mays
  Clone ID: UC-ZMFLMO17209D06_FLI.pep
EAELAREKTNGYKLDKSHIFAVNLLDDFEKYMKVPDTWTPAEIKPYTAGENLLKWLTDEKARDQFVIRAGTLTEVYWNDARKLAPELVFQKQYWTDSFIQWSPLGTYMATVHRQGSQVWGGENGFERLMRFAHSMVKLIDFSPGERYLVTYSSHEPSNPRDTHRVVLNIFDVRTGKVMRDFKGSADDFTTGGNIGVSGVSWPIFRWGGGKDDKYFARLGKNIISVYETDTFSLLDKKSLKVENVVDFSWSPTDPIISLFVPEMGGGNQPARVSLVQIPGKEELRQKNLFSVSDCKMYWQNSGEYLAVQVDRYTKTKKSTYTGFELFRIKERDIPIEVLELENKNDKIIAFAWEPKGHRFAIIHGDGPKPDVSFYTMRTSNNTSRVSKLTTLKAKQANTLYWSPAGRFIVLAGLKGFNGQLEFYNVDELETMATGEHFMATDIMWDPTGRYLATAVTSVHEMENGFQIWSFSGKHLYKVSKDHFYQFIWRPRPPSLLTAEKEEEISRNLKKYSKKYEQEDQDAFNQLSEQDRKRRTQLQEEWDSWVAKWKQMHEEERAYRRELRDGEASDDEEEYEAKEVEVEEVVDVRQEVLAFDLDQE

SEQ ID NO: 70237 - protein, 529 aa, Zea mays
  Clone ID: UC-ZMFLMO17204G10_FLI.pep
STSEGEASRSMAMAEKVKEKMLMLRSSDNQEFEVKESVAMQSMTLKKMVEDGCADKGIPLPNVTSHILVKVIEYCNKHAEPTGPGDAAGTTNRSAEDELNIFDADFVNVEHSTLLDLILAANYLDIKGLLNLARQTITDLINGKMPEEVCKTNIKNDLTIPSTSALATTMPSSERKQMEARFIAYMQETAEERMTGFAVRGEKYRKHGERPPQPPLEIVKYPALLERAWGWDSILPYCPVNSWPLYKTYLQEYYERNSREVLAHQVEANAASGPNLNGADENDLATLFNLCISREVQLLNLLKRRDQKHNVDEISLNEKLTNCARQITFVEYAGFPFPSVALKCIMAESDLLCMLLMCGTGMISQVNICSRIRKVAFRFMTYKGPGCFAAAATMMATTKEAKLMSGLLRNRCRENNGPFSRSVFIRKWTFAAMFRICEECSPVEESTGGYTATKLILDGSDDKNPCDKELVNKDNLLQRNKINQKYQGLFKGKTTKCRHPVQKQEPGDGATPASPSPANPISTVVQKLW

SEQ ID NO: 70238 - protein, 648 aa, Zea mays
  Clone ID: UC-ZMFLMO17201H08_FLI.pep
AGKGDGPAIGIDLGTTYSCVGVWQHDRVEIIANDQGNRTTPSYVAFTDSERLIGDAAKNQVAMNPINTVFDAKRLIGRRFSDASVQSDIKLWPFKVIPGPGEKPMIVVQHKGEEKQFAAEEISSMVLIKMREIAEAYLGSTIKNAVVTVPAYFNDSQRQATKDAGVIAGLNVLRIINEPTAAAIAYGLDKKATSVGEKNVLIFDLGGGTFDVSLLTIEEGIFEVKATAGDTHLGGEDFDNRMVNHFVQEFKRKNKKDITGNPRALRRLRTSCERAKRTLSSTAQTTIEIDSLYEGIDFYSTITRARFEELNMDLFRKCMEPVEKCLRDAKMDKSSVHDVVLVGGSTRIPRVQQLLQDFFNGKELCKNINPDEAVAYGAAVQAAILSGEGNEKVQDLLLLDVTPLSLGLETAGGVMTVLIPRNTTIPTKKEQVFSTYSDNQPGVLIQVYEGERTRTRDNNLLGKFELSGIPPAPRGVPQITVCFDIDANGILNVSAEDKTTGQKNKITITNDKGRLSKEEIEKMVQDAEKYKSEDEEHKKKVESKNSLENYAYNMRNTIKDEKIASKLAADDKKKIEDAIDAAISWLDANQLAEADEFDDKMKELESLCNPIIAKMYQGAGADMGGSGGMDEDAPAGSGGPGPKIEEVD

SEQ ID NO: 70239 - protein, 436 aa, Zea mays
  Clone ID: UC-ZMFLMO17215B03_FLI.pep
VVLFDQTDANPKADAASRPARCPDWLRPEMLQCPIALDLMTDPVTVSTGQTYDRESITRWIKAGCHTCPVTGERLRTADVVPNAALRGIIERMLLSNGVSLPDPSSSGHRHGALGNTAVPFGPAAAGAARLAVAYVVAQLSMGSTAERRKATCEARKLCKHNMFYRACLVEANAVPWLLCLLSSTDASVQDNAVASLLNLSKHPRGRAALFEAGGVGLVVDVINVGARAEARQNAAAVLFYLSSNAEHAEEIGRIPEAIPTLVQLIRDGAHRGRKNAMVSLYGLLQCASNHGKAVGAGAVSALAGLLSGDRDDLASDAVTLLARLAEQPAGAQAVLARPGLVARVVEALATSASRSGKDHCVALLVSLCRHGGDKVVALLGRMPGLMSSLYTLVADGSPQTCKRARALLNLIHRHYEMDGQQPASEVPGERVVRVL

SEQ ID NO: 70240 - protein, 611 aa, Zea mays
  Clone ID: UC-ZMFLMO17212G11_FLI.pep
KSTFPSAQTAGRRMSMPETFTLKVGEATPAAAGRPSAGPVYRSIYAKDGLMDLPQDIQSPWDLFSGAVKKYPTNRMVGQRQVTDGKAGEYVWQTYEEVCQKVMRIGSAIRSLGVEPGAHCGIYGSNCPEWVMAMQACNSQGICYVPLYDTLGAKAVEFIMYHAEISIAFVQESKIKSILAVLPKCTAHLRAIVSFGDFASEMKAEAERLGVSCFSWEEFSSMGKQDYQLPNKRKEDICTIMYTSGTTGDPKGVIITNKAIVAGVMTTEHLLKETDKVITEEDSYFSYLPLAHIFDQVIENYCISKGASIGFWQGDIRYLMEDVQVMKPTIFCGVPRVYDRIYTGINMKIQSGGMIARHLFQYAYNYKLANMRKGLKQHEASPFFDKIVFSKIKEGLGGRIRLMIAGAAPLPGQIEEFMRVTTCSVVVQGYGLTESCAGCFTSIANIFSMIGTVGPPVTTIEARLESVPEMGYDALSDTPRGEICLRGHTMFSGYYKRPSLTEEVFSDGWFHTGDIGEWQSNGTMKIIDRKKNIFKLSQGEYVAVRSWKEHTCSHPLWHRSGSTGTASSRSSLLWLSLKGRLSRNGQQPTARPATLQSCALIPRRGATFGIS

SEQ ID NO: 70241 - protein, 406 aa, Zea mays
  Clone ID: UC-ZMFLMO17288F10_FLI.pep
ARASGTERKRDPPAASEMDGGAGEEGKQERHLVLAHKLFLLSHPSVDDLSKVALRAEVLDTVKSDDMATLFESLVAAGVLEGDAALLAEMRGRIDEEIRKLDEKIADAEENLGESEVREAHLAKSLYFIRVGEKEKALEQLKVTEGKTVAVGQKMDLVFHTLQIGFFYMDFDLISKSIDKAKNLFEEGGDWERKNRLKVYEGLYCMATRNFKKAASLFLDSISTFTTYEIFPYDTFIFYTVLTSVITLDRVSLKQKVVDAPEILAVIGKVPHLSEFLNSLYNCQYKSFFVAFSGLTEQIKLDRYLQPHFRYYMREVRTVVYSQFLESYKSVTMEAMATAFGVTVDFIDQELSRFIAAGKLHCKIDKVAGVLETNRPDERNAFYQATIKQGDFLLNRIQKLSRVIDL

SEQ ID NO: 70242 - protein, 642 aa, Zea mays
  Clone ID: UC-ZMFLMO17265D02_FLI.pep
RKEKSSCSLTIATPPHPVAMVKKPNDVAKAAATSADAAARPSKANPSTPQSVKTSKFKKRKVKANRQKPAVAAAAVGDVAPVGAGTGDGDASASAVLPQPSNVAEASPVVQTPKSTTFVEASPVVQTQKTATDAEVPVHSPMPATAEASALSPKPKPKPAHANADAAAAISVSKGKGVGADNSGGDGRMKSRKERARSGKGKEVLGDGGSKGKGKGKGKKAVGKKEERGDHKVAGFIFMCNAKTKKECYQNRLFGMPGGKIGMVKKIRPGVKLFLYDFDLKLLYGVYKAASHGGLNLVQGAFSGKFPAQVKFKIDKDCRPLPESSLKQAIKENYSAKSKFDPELTTKQVQRLLLLFKPLSAPQSVPNNHFEERRHYEEQRKPYYHFEERLPLLPIEEVRQPRFDDERRPAVRHVPLEDPYRAQAPRFAPVPVESQLGHSLASAQGDHGRYYQPPALAPEPRHIPLVLEPRYVPPAHVPTVPELQHVPAAYYRTSAPSGDSYYRPVDNLVPEGYADRTVSNITARDPIISDHTALPVEASARPDRLDDLYRIRGAHVEELYRPREIADRAGIATRADRMEELYRYDRLANRAVDPPHSAYLTTAYENNPAYAETSVRPISARVGGSGAPVSSLYSFSGGPVYR

SEQ ID NO: 70243 - protein, 376 aa, Zea mays
  Clone ID: UC-ZMFLMO17267D11_FLI.pep
RYLGKQEYKCRHCDAIFWFNERNKSMTRHNNQEPIYSNCCKNGKIRIPKYKEPPTFLNELIHQKMDTRCKHFLQKIRQYNSMFAFTSMGGNIDKKINDGEGPYVFRVNGQIHHRIGSLLPLPDNCPKFAELYIFDTKNEISNRIRALTNEEPGEQDIDPEIVRGLKKMLDEYNPLVKIFRQAHDFLEEHKGIDISIRIVGADKADRIQYEMPHQEELAMLIVGDLSLENYKRDIIVSTHQNSLQRISIFHPAYMPLQYPLLFPYGERGFQLGIKYHGQNINQNIDNSKRDRVTLHEFLKYHVHYRPNQPNPWLCYGRLSKQVVVDGRAMEDEDRLDYIVRNQSKLRSEYVQGIFDAVEKGIYDASRIGKKVLLPSS

SEQ ID NO: 70244 - protein, 143 aa, Zea mays
  Clone ID: UC-ZMFLMO17267G09_FLI.pep
VTSPYGNTVHHNENATTGQFAFTTSEAGNYLACFWIDSVEKGSGTSLNLDWKIGIAAKDWDTIAKKEKIEGVELELRKLEAAVESIHHNLLYLKAREADMRTVSERTNSRVAWFSILSLGVCVAVSVLQLWHLQGFFRKKKLI

SEQ ID NO: 70245 - protein, 150 aa, Zea mays
  Clone ID: UC-ZMFLMO17266A10_FLI.pep
SFENDVLARFCTTTTTITTTGRGGLQPKGCSITITITALPLPILREKREQERRHTTTVHTLPPQHWLVKHDGHELGLEPVRDPQSNHGPRVLFLDVKVVQNHGLGLGQRARLVLAWWEAQQRVLQMRWHQWGLPAFVFIPRNRVVVAGIR

SEQ ID NO: 70246 - protein, 436 aa, Zea mays; identical to SEQ ID NO: 45453
  Clone ID: UC-ZMFLMO17278H12_FLI.pep

SEQ ID NO: 70247 - protein, 676 aa, Zea mays
  Clone ID: UC-ZMFLMO17289E08_FLI.pep
EISRLPSESIGDRCVPTAAEAEGGPGGVVSSGVALWQPARARFWLPRGGSGVGGMAASLRWWWSAVVLSVVVGVSPVVANTEGDALYSLRQSLKDNNNVLQSWDPTLVNPCTWFHVTCNPDNSVIRLDLGNAQLSGPLVPQLGQLKNMQYLELYSNNISGPIPPELGNLTNLVSLDLYLNNFTGGIPDTLGQLSKLRFLRLNNNSLSGQIPKTLTNINTLQVLDLSNNNLSGGVPSSGSFSLFTPISFANNPNLCGPGTTKPCPGAPPFSPPPPYNPPAPTSSKGVSSTGAVAGGVAAGTALLIAVPAIGYALWRRRKPEEQFFDVPAEEDPEVHLGQLKRFSLRELQVATDNFNNRNVLGRGGFGKVYKGRLTDGSLVAVKRLKEERTPGGELQFQTEVELISMAVHRNLLRLRGFCMTPTERLLVYPYMANGSVASRLRERAPNEPPLEWETRARIALGSARGLSYLHDHCDPKIIHRDVKAANILLDEDFEAVVGDFGLAKLMDYKDTHVTTAVRGTIGHIAPEYLSTGKSSEKTDVFGYGIMLLELITGQRAFDLARLANDDDVMLLDWVKALLKEKKLEQLVDPDLQGRYVDQEVESLIQVALLCTQGSPMERPKMSEVARMLEGDGLAERWEQWQKVEVMRQEAELAPRHNDWIVDSTYNLRAVELSGPR

SEQ ID NO: 70248 - protein, 504 aa, Zea mays
  Clone ID: UC-ZMFLMO17280C06_FLI.pep
ERQRTKQSFPFPKMGFGFVRLAARAAVSRRGMTPATSARRALAPPAVPAEPRCGSHWLVAARGHVGHSHHHGGEDEGETSERIFRLGLAADVVLTAGKAVTGYLSGSTAIAADAAHSLSDIVLSGVALLSYRAAKAPRDKEHPYGHGKFESLGALGISSMLLVTSGGIAWHAFEVLQGVMSSAPDIIGNTLHAHHDHGSSGHHHGIDLEHPVLALSMTTLAISIKEGLYWITKRAGEKEGSGLMKANAWHHRADAISSVVALVGVGGSILGLPLLDPLAGLVVSGMILKAGIKTGYESVLELVDAAVDPSLLAPIKETILRVHGVKGCHRLRGRKAGTSLYLDVHIEVYPFLSVSAAHDIGETVRHQIQKEHNQVAEVFIHIDPSYSVGPTMDLKRILKDSDGTNSEAIPRQQSAEAIVSNIISSHFSEKMALEHLMLHYVQGRVLLQVQVSMSPEILIRDAMEVAKQAEEEILRADASISQISLQLRLGQQIKQLQLASQERR

SEQ ID NO: 70249 - protein, 338 aa, Zea mays
  Clone ID: UC-ZMFLMO17294D09_FLI.pep
RARFPSASAVSKFNSLKTSRKGVVAMAMIEYPSLEAATGKFSASNVLGVGGFGCVYKAVFDGGVAAAVKRLEAGGPECEKEFENELDLLGRIRHPNIVTLLGFCVHEGNHYIVYELMHKGSLDTQLHGASRGSALSWHVRMKIALDMARGLEYLHEHCSPPVIHRDLKSSNILLDSDFNAKISDFGLAVTSGNIDKGSMKLSGNLGYVAPEYLLDGKLTEKSDVYAFGVVLLELLMGRKPVEKMSQTQCQSIVTWAMPQLTDRTKLPNIVDPVIRDTMDPKHLYQVAAVAVLCVQPEPSYRPLITDVLHSLVPLVPVELGGTLRVAEPPSPNLKHSAC

SEQ ID NO: 70250 - protein, 456 aa, Zea mays; identical to SEQ ID NO: 63346
  Clone ID: UC-ZMFLMO17309B10_FLI.pep

SEQ ID NO: 70251 - protein, 409 aa, Zea mays
  Clone ID: UC-ZMFLMO17333H09_FLI.pep
QLASPSTACRHRRPDTPPAPAPAPALLIPSSSQFPQTSRAAEGEGRMASEPVARAVAEEVARWGAMRQTGVSLRYMMEFGARPTERTLLLAAQFLHKELPIRIARRALDLDSLPFGLSTKPAILKVKDWYVESFREIRSFPEVRNQKDELAFTQMIKMIRVRHTNVVPAIALGVQQLKKDLGGPKAFPPGIHEIHQFLDRFYMSRIGIRMLIGQHVALHDPDPEPGVIGLINTKMSPMTVARIASEDARAICMREYGSSPDVDIYGDPGFTFPYVTPHLHLMIFELVKNSLRAVQERYMDSDKLAPPVRIIVADGAEDVTIKISDEGGGIPRSGLSRIFTYLYSTAENPPDLDGHNEGVTMAGYGYGIPISRLYARYFGGDLQIISMEGYGTDAYLHLSRLGDSEEPLP

SEQ ID NO: 70252 - protein, 399 aa, Zea mays
  Clone ID: UC-ZMFLMO17346A09_FLI.pep
DADLRPHRGIRFVAILALTRVFRFVGLPRDRNASVDMLSRGAVRLLLYRLRPPPLRLSWNPSGAMPPPPPSAAANRSCLCRFAYSTARVERGRTLPGKAVFLDLGAGRRFTPSGALSLRGCLGWRDGGGDGELRRRVDGEAAGMKAQVLTTQRQLMRDPEVLPLEEAATGKSMNVNGACRRGKPLGFPEQAAAKMVVAVDVDEVLGSFLAALNKFIADRYSWNHSVSEYHVYEFFKIWNCSRERANFLVHEFFTTHYFQDGIHPIPGARDALQTLSSFCSLSVVTSRQDVIKNHTLEWIEKYYPGLFEQIHFGNHFALEGQSRPKSEICRSFGAQVLIDDNPRYALECANDGMRVLLFDYESSYPWCKTGADELHPLVTKVHNWEEVEEKLLSWVVPDS

SEQ ID NO: 70253 - protein, 634 aa, Zea mays
  Clone ID: UC-ZMFLMO17340G06_FLI.pep
STTKYKPLSMPLSTKGPEWLGPTLQAMQANIGCQTTLVLLTVLMAYVVWYFVFCGWQILSACIYHLCLFPFLNYATIIQYKLCNLFITQFTVLFIISFSRFLQCRGPFARRRHPLVNAAVVSEIQRCINNGIEFRGDLLNFRKDGSPLMNRLHLTPIYGDDETITHYMGIQFFTDANVDLGPLPCPMTKEPVRSTRFAPDNSFRPISVGPEHSNFCRKYSSLFQLTDEVLCQSILSRLSPRDIASVSSVCRCLYHLTRNEDLWRMVCQNAWGSETTRALETVPAARRLGWGRLARELTTLEAVAWRKLTVGGAVEPSRCNFSACAVGNRVVLFGGEGVNMQPMNDTFVLDLNASSPEWRHINVGAAPPGRWGHTLSCLNGSWLVVFGGCGRQGLLNDVFMLDLDAKQPTWREIPGVAPPVPRSWHSSCTLDGTKLVVSGGCADSGVLLSDTYLLDVTMDRPVWREVPASWKPPSRLGHSMSVYDGRKILMFGGLAKSGPLRFRSSDVYTMDLSEEEPCWRCLTGSGMPGAGNPAGAGPPPRLDHVAVSLPGGRILIFGGSVAGLHSASQLYLLDPTEEKPTWRILNVPGHPPRFAWGHSTCVVGGTKAIVLGGQTGEEWMLTEIHELSLANNSV

SEQ ID NO: 70254 - protein, 266 aa, Zea mays; identical to SEQ ID NO: 66285
  Clone ID: UC-ZMROB73036G01_FLI.pep

SEQ ID NO: 70255 - protein, 562 aa, Zea mays
  Clone ID: UC-ZMROB73036G10_FLI.pep
LQVISPQPEPAAMGTEAEQPDMDSHRNDGVVVVPAPRPRKGLASWALDLLESLAVRLGHDKTKPLHWLSGNFAPVVEETPPAPNLSVRGHLPECLNGEFVRVGPNPKFAPVAGYHWFDGDGMIHAMRIKDGKATYVSRYVKTARLKQEEYFGGAKFMKIGDLKGFFGLFMVQMQQLRKKFKVLDFTYGFGTANTALIYHHGKLMALSEADKPYVVKVLEDGDLQTLGLLDYDKRLKHSFTAHPKVDPFTDEMFTFGYSHEPPYCTYRVINKEGAMLDPVPITIPESVMMHDFAITENYSIFMDLPLLFRPKEMVKNGEFIYKFDPTKKGRFGILPRYAKDDKLIRWFQLPNCFIFHNANAWEEGDEVVLITCRLENPDLDKVNGYQSDKLENFGNELYEMRFNMKTGAASQKQLSVSAVDFPRVNESYTGRKQRYVYCTILDSIAKVTGIIKFDLHAEPESGVKELEVGGNVQGIYDLGPGRFGSEAIFVPKHPGVSGEEDDGYLIFFVHDENTGKSEVNVIDAKTMSADPVAVVELPNRVPYGFHAFFVTEDQLARQAEGQ

SEQ ID NO: 70256 - protein, 531 aa, Zea mays
  Clone ID: UC-ZMROB73004G01_FLI.pep
SPFRHAAMGNRASRHHRHATEQQPETPTLPKPQIQPPPPPTQTQQYQQAPPPPKPKPAADARAVGRVLGRPMEDVKATYTFGRELGRGQFGVTYLVTHRETGQRFACKSIATRKLVHRDDIEDVRREVQIMHHLTGHRNIVELRGAYEDRRSVNLAMELCEGGELFDRIIARGHYTERAAAALCREIVAVVHSCHSMGVFHRDLKPENFLFLNNKEDSPLKATDFGLSVFFKPGDTFKDLVGSAYYVAPEVLKRHYGAEADIWSAGVILYILLSGVPPFWAENEDGIFDAVLHSHIDFSSDPWPSISNGAKDLVKKMLRQDPKERLTAAEILNHPWIREDGEAPDKPLDITVISRMKQFRAMNKLKKVALKVVAENLSDEEIMGLKEMFRSLDTDNSGTITLEELRSGLPKLGTKISESEIKQLMEAADVDGNGTIDYAEFISATMHLNRLEKEDRILKAFEYFDKDHSGYITVDELEEALKKYDMGDDKTIKEIIAEVDTDHDGRINYQEFVAMMRNNTPEIVPNRRRMF

SEQ ID NO: 70257 - protein, 576 aa, Zea mays
  Clone ID: UC-ZMROB73020D12_FLI.pep
LKLNAPEWPYTILGAVGSVLSGFIGPTFAIVMSNMIEVFYYRNPSKMESKTREYVFIYIGTGLYAVVAYLVQHYFFSIMGENLTTRVRRMMLAVILRNDVGWFDQEENNSNLVAARLSTDAADVKSAIAERISVILQNMTSLLVSFVVGFIIEWRVALLILVTFPLLVLANFAQQLSMKGFAGDTAKAHAKTSMIAGEGVSNIRTVAAFNAQDKILSLFCSELRVPQMHSLRRSQISGALFGLSQLSLYASEALILWFGAHLVRTHVSTFSKVIKVFVVLVITANSVAETVSLAPEIVRGGESIRSVFSVLNSRTRIDPDDPDAEQVESVRGEIDFRHVDFAYPTRPDVMVFKDLSLRIRAGQSQALVGASGSGKSTVIALVERFYDPLAGKVMIDGKDIRRLNLKSLRLRIGLVQQEPVLFATSILENIAYGRDGATEEEVVEAAKVANVHGFVSALPDGYRTPVGERGVQLSGGQKQRIAIARAVLKDPAVLLLDEATSALDAESECVLQEALERIMKGRTAVLVAHRLSTIRGVDSIAVVQDGRVVEQGSHGDLVSRPDGAYSRLLQLQLHHG

SEQ ID NO: 70258 - protein, 536 aa, Zea mays
  Clone ID: UC-ZMROB73001A10_FLI.pep
QYERFINSFRSLEHNTRGEPDSIVALAKWRILNRLHDRNETLYYRLLIDNIKDFAPIIYTPTVGLVCENYSGLFRRPRGMYFSAKDKGEMMSMIHNWPAEKVDMIVVTDGSRILGLGDLGVQGIGIPIGKLDVYVAAAGINPQKVLPIMLDVGTNNEKLLEDKLYLGLRQPRLEGEEYLAVVDEFMEAVHARWPKAVVQFEDFQMKWAFETLQRYRNRFCMFNDDVQGTAGVALAGLLGAVRAQGRPLQDFTNQKIVVVGAGSAGIGVLSMAKQAMLRMPGIHRTGEGHNQFWVLDKDGLITKARKDLDSAVARFARGFGPDEVPDLYEGASLVEVVKKVKPHVLLGLSGVGGIFNEEVLKAMKESDSPRPAVFAMSNPTTKAECTPDDVFKHVGDKAIFASGSPFSNVSLGNGKSGYANQANNMYLFPGIGLGALLSGARHVSDGMLQAAAECLASYITDDEIRKGILFPSVSSIRHITARVGAAVVRAAVAEDLAEGCCDVGPRELGSMSESEAVDYVARKMWYPIYSPLVSDK

SEQ ID NO: 70259 - protein, 351 aa, Zea mays
  Clone ID: UC-ZMROB73004G05_FLI.pep
LNSRLACCATHAAGYVCNECVWNTLGTFGQVLECWDKERKEMVAIKIIRGIKKYRDAAMIEIGMLEQLGKYDESRSSCVQIRNWFDYRNHICIVFERLGPSLYDFLRENSYRSFPIALVREIAKQLLECIAFMHELCLIHTDLKPENILLVSPEYIKVPDYKVSSRSPKEGSYYKRVPKSSAIKVIDFGSTTYDQQDQSYVVSTRHYRAPEVILGLGWSYPCDIWSVGCILVELCTGEAIFQTHENLEHLAMMERVLGPLPYHMFKRADRHSDKYIRKGRLNWPEGCTSRESMKAVMKLSRLQNLVMQNVDQAAGDFIDLLQGLLKYDPSSRLTAREALRHPFFTQGFWRR

SEQ ID NO: 70260 - protein, 482 aa, Zea mays
  Clone ID: UC-ZMROB73045B10_FLI.pep
LKAKGVKLNPEKCVFGVPRGMLLGFIVSERGIEANPEKIAAITSMGPIKDLKGVQRVMGCLVALSRFISRLGERGLPQYRLLRKTECFAWTPEAEEALENLKALLTKAPVLVPPADGEALLVYVAATTQVVSTAIVVERQEEGHALPVQRPVYFVSEVLSETKIRYPQVQKLLYAVILTRRKLRHYFESHPVTVVSSFPLREIIQCREASGRIAKWAVEIMGETISFAPRKAIKSQVLADFVAEWVDTQLPTVPIQPELWTMFFDGSLMKTGAGAGLLFISPLGKHLRYVLRLHFPASNNVAEYEALVNGLRIAIELGVRRLDARGDSQLVIDQVMKNSHCHDPKMEAYCDEVRRLEDKFFGLELNHIARRYNETADELAKIASGRTTVPPDVFSRDLHQPSVKVDDAPEPEAPSAQPEAPSARPEVPSAQPEVPSAPEAEALNVEEELSGAMPDRNWQAPYLRYLRRGELPLDQAEARRVA

SEQ ID NO: 70261 - protein, 545 aa, Zea mays
  Clone ID: UC-ZMROB73005B01_FLI.pep
GAAAMEADAAHSGRGEAEDEEVESSDYTSEDEGTEDYRRGGYHAVRVGDSFKQGAYVVQYKLGWGHFSTVWLAWDTVHSRYVALKVQKSAQHYTEAAMDEVKILKQIADGDPDDSKCVVKLLDHFKHSGPNGNHVCMVFEFLGDNLLTLIKYTDYRGIPLPMVKEICRHVLIGLDYLHRTLSIIHTDLKPENILLVSTIDPTKDPRKSGVPLVPPSMRTDEPPPKVPAQSGNGGLTKNQKKKIRKKAKRAVAATSEGSSAVASADTDGSDDRGDLGTTNEGSPRQDGAKKRVTRDRRGSKGAKKMMAMKADLKCKLVDFGNACWTYKQFTNDIQTRQYRCPEVILGSKYSTSADMWSFACICFELATGDVLFDPHSGDNFDRDEDHLALMMELLGMMPRKIALGGRYSRDFFNRYGDLRHIRRLRFWPLNKVLMEKYEFTEINANGMADFLVPILDFVPEKRPTAAQLLQHPWLDVGPLRQQPKTRPESARSPGDGVSEKQKKEKEEREAMAVELGNIAIDGASSRMANDPQSSTNKTTATSSKK

SEQ ID NO: 70262 - protein, 725 aa, Zea mays
  Clone ID: UC-ZMROB73066H11_FLI.pep
ADPTEEMTEEEKKLHDKVELIRVKFLRLVYRLGATPEETVAAQVLYRLSLAEGIRHGRQTNRAFSLDNARRKALLLEAEGKEDLNFSCNILVLGKTGVGKSATINSIFGEEKSRTDAFSSATTNVREIVGDVDGVKIRIIDTPGLRPNVMDQGSNRKILAAVKNYTKKCPPDIVLYVDRLDSLSRDLNDLPLLKTITAVLGSSIWFNAIVALTHAASAPPEGLNGAPMTYEVLMAQRSHIIQQSIRQAAGDMRLMNPVALVENHPSCRKNREGQKVLPNGQSWRHQMLLLCYSSKILSEANSLLKLQDPNPGKLFGFRFRSPSLPFLLSSLLQSRAHPKLSAEQGGNEGDSDVELDDYSDVEQDDDEEEYDQLPPFKPLTKAQLARLTKEQKNAYFDEYDYRVKLLQKKQWKDEIRRLKEMKKRGKTDLDDYGYANIAGENDQDPPPENVSVPLPDMVLPPSFDCDNPTYRYRFLESTSTVLARPVLDAHGWDHDCGYDGVSVEETLAILSRFPANVAVQVTKDKKEFSIHLDSSIAAKHGENASSLAGFDIQTVGRQLAYILRGEAKIKNIKKNKTTGGFSVTFLGDIVATGLKVEDQLSLGKRLSLVASTGAMRAQGETAYGANLEARLKDKDYPIGQSLSTLGLSLMKWRRDLALGANLQSQFSIGRGSKMAVRLGLNNKLSGQITVRTSTSEQVQIALLGLVPVAASIYRSFRPSEPSFAY

SEQ ID NO: 70263 - protein, 605 aa, Zea mays; identical to SEQ ID NO: 53811
  Clone ID: UC-ZMROB73049A06_FLI.pep

SEQ ID NO: 70264 - protein, 511 aa, Zea mays
  Clone ID: UC-ZMROB73057G04_FLI.pep
AMERRRRRPPRLPLLVFVLVATTCPLGSSGIGSFGVGAESNGASSSFRTRSLLQIGDRNEDGLFHLPHTRALTHKSRSHRKVPTPAPAPESAPAPSPSMSPPDSSPSPSPHGSHPMPRQSTSHRHPSITPPHLVRPGPRQDGNDPLVYTPAHSRHKHFWTTYGLVAAGIAVFLLVSAASILCFRAKKMGTVRPWATGLSGQLQKAFVTGVPSLKRSELETACEDFSNIIGSTSTCMLYKGTLSSGVEIAVASSLVTSAKDWSKENESQYRKKITNLSKVSHKNFMNLLGYCEEEHPFTRVMVFEYAPNGTLFEHLHVREAEKLDWMARLRISMGIAYCLEHMHQLQTPAALRNFDSTTVYLTDDFAAKVSDLEFWNDAKGHNSTTNNELAFSLDMEDIVRKYGMVLLEILTGRVPSSEDDGPLENWVSRYFEGGMRLEELIDPSIGFFPEDTARALCEVVRSCIDRDPKKRPQMKEVAARMREITALGPDGATPKVSPLWWAELEIMTSES

SEQ ID NO: 70265 - protein, 538 aa, Zea mays
  Clone ID: UC-ZMROB73061A09_FLI.pep
WRCVHVRQVFDTYLSEARAALAAAAQDTDDAAAAAAALGLVTAALEMSPRAEAALELRARALLALRRYRDVADMLRDYIPSYARSCSGDDDATCASSSSSCSSASGDRDRSDACAGAARFLCCLHVSDLKRRLVASFCRSSSTEAQWRYLVLGRACFHLGLMEDAVVLLQTARRLATAAFRRESVCWSEDSFSPSNPLTANSAAASEAESVSQLLAHVKLLLRRRAAAVAALDAGLPGEAVRHFNKVLDTRRSVLPHPFATACLVGRAAAFRSAGRPADAIADCNRALALDPASIPALRARADLLESVGALPDCLRDLDHLKLLYDAALRGGKLRPQGGVQFGEIAGAHRTLTARIQLLRGRVAAGEGCGVDYYALLGVRRGCTRSELERAHLVLTLKLKPERSASFAERLELVDEHRDLEAVRDQARMSALFLYRMLQKGYSCIMSAVLDAERQRAKDAAAAIAEQEEEVATVQENATRKDGGNVVVTTKPEAIPMPRTAVAAATPLSQPFVFCRDTLLSRGGFDRPIPVKCEAMSC

SEQ ID NO: 70266 - protein, 621 aa, Zea mays
  Clone ID: UC-ZMROB73049G06_FLI.pep
ASSAIRQDWKSVTRRAGGRSQWIRTVVLFNVDAGRPELPGLDLRHGHWVSSVVEQVQVATAACRHVLRVHSRRDARPAPASEALDDRVVDQCSQRYAPVLLDVHVNESCVEWLVHPLFRRRPRQVGTHEHLVRATVPQHLEEDGGLLPHVAGRHHHQPERPDAAARARRGGFLLRARAQLVGIVLQPLGVQLLGVVQALGDLENDLHVRLQGVDAGDLAQAAGADHRARQRGSALPQRLDLLHRPLHQLPPVGVQPQRPRERLDAPPALVNAVVRLVHPRPQHAPPPARVEERLGAEQVAVVDPAPVKNALHRRERVRLVVVPADHVVVLVGGLAELEHVPHPGPAAGRRVEPLRAALRHREQVRALPDGHVGGRVQRRGAPLPAHEVLAAVHQGGAHAADLGRDGEPPQPVAPQPRRGGVPEVVARHVARLRDHRVAAGRLAPLPEQRVRRVLGERHVLHLHAACVAPGVEDGGAAVRQRGGGARPAALGVERRRRVQRGAQERPVHQVAGDGVAPGELPGAERRAVRVVLEEHVVHALVVQRPIWVVHPVLGRLEVVRSSAIPRALLPVHVARRGRGGGRRGDDEQIGEGEISRHCHALTRVCFYSGQKMKTPCRLQKT

SEQ ID NO: 70267 - protein, 721 aa, Zea mays
  Clone ID: UC-ZMROB73055A04_FLI.pep
GKVLILEYMDGIRLNDNDSLEAYGVDKQKLVEEITRAYAHQIYIDGFFNGDPHPGNFLVSKEPPHKPILLDFGLTKRISESMRQALAKMFLSCAEGDHVALLSAFSEMGLKLRVDMPQQAMDIATVFFRQSTTASEAKENIKTLNDQRERNVKALQEKMKLNKKEVQRFNPVDAFPGDAIIFMRVLNLLRGLSASLNVRIVYLDIMRPFAESTLLGSLTHGQIPNSQWIFDSPANSDVESKLRNYLLELGSDKILGIQVCAYKDGKVIIDTAAGMLGKYDPRPVQPDSLFPVFSVTKGITAGMVHWLVDKGKLKYEETVANIWPNFGTNGKELIKVHHLLNHTSGLHNALGDVVKNDPLLVCDWEETLNQITKSTPETEPGSAQIYHYLSFGWLCGGVIEHASGKKFQEILEEAIVRPLHIEGELYVGIPPGVESRLAALTVDTEELQKLSGIRAGADVPAALLNNIAQMASGVPAIFNTLNVRRAIIPAANGHCSARALARYYAALAAGGSVPPPHSSGAMPPLGSHVHTPKFPTAPLKKKKKGAGKKKGAGGGSMGDLKVQDISGGSSDRNGYCQLRTSDADSEAGSGSGGGGRMFGSDRILDAFMGVGEYEGMAHRDGKFGLGFRRYDDASSGSGRLRCFGHSGMGGSTGFCDVENGFAIAVTVNKLSLGSVTRGVVRLVLEELGLPVPDEYSATGEKGPDMMLNLTTTTTTTPPQLR

SEQ ID NO: 70268 - protein, 263 aa, Zea mays
  Clone ID: UC-ZMROB73077D10_FLI.pep
GSTLAVMKKSSKFLPVIGWSMWFAEYLFLERSWAKDEKTLKWGLQRLKDFPRPFWLALFVEGTRFTPAKLLAAQEYAASQGLPAPRNVLIPRTKGFVSAVSIMRDFVPAIYDTTVIVPKDSPQPTMLRILKGQSSVIHVRMKRHAMSEMPKSDEDVSKWCKDIFVAKDALLDKHLATGTFDEEIRPIGRPVKSLLVTLFWSCLLLFGAIEFFKWTQLLSTWRGVAFTAAGMALVTGVMHVFIMFSQAERSSSARAARNRVKKE

SEQ ID NO: 70269 - protein, 428 aa, Zea mays
  Clone ID: UC-ZMROB73080D09_FLI.pep
GGRGHVPAEAAAAARGGLRGEAVRQEGLVGPQVVPDPGVRRAGDHRGRPRREPGRQRRVWERVPREARQRRGGGREARHAGGGDEHGAVRRHAAAGGVGAVPRVRLGGGDAERHPARERGEAAVQHHQRGRRGEPAGVRAPPQRQPVRAAARGGGAEAGRARVGGAARRGGGRGEGPRVPPPRLRPPHPPPRRQVQQHPPGRVVQAPARRLRARQDPQLGRRRRRPLVRRRRGRHAGVHGAGVRVHVQGDGEERRVQLRRGAAGAGDGAAGGGGEPGPGGLGVAAAGEPGEGDVPGGPGHRGRVGQGGGSPRAARRRAVHQPHAVDAAVHALRRADAGGRGRRAPGRRREGPGGEGGLRPNGGALGFGRARRAPAVTGGRKGHHGQWQCRTCNSKISRLLFCLNNRPRNLLHLLQKGIFVSTCQSMEE

SEQ ID NO: 70270 - protein, 210 aa, Zea mays
  Clone ID: UC-ZMROB73064D09_FLI.pep
CAVPPETVHCNPFRHGALPKFRAVIKTAGLKRVWLTGGRQAQAEGLCLCTCCCKRREDAGACVGPGPRARWTTGRRRRRLLLRPAVSARALAPPQALARHVQPGVRVAWTRPDACQRLPEQRSSLHAFLCVRTMARGPPYVRRLVATSNSWSSPASYCGWRLARLRLRARCHCAAAWWSVHGGAGRQASKGNHRFPGSRRSRVYHTRAVC

SEQ ID NO: 70271 - protein, 216 aa, Zea mays
  Clone ID: UC-ZMROB73076B06_FLI.pep
VAPPPPPKQHIALSISAMAEVEQPQDAVKLFNRWTFDDVQVNDISLNDYLAVTAAKHATFLPHSAGRYSKKRFRKAQCAIVERLTNSLMIHGRNNGKKVMAVRIMKHTLEIIHLLTDANPIQVVVDAIINSGPREDATRIGSAGVVRRQAVDISPLRRVNQAIYLLTTGARESAFRNIKTIAECLADELINAAKGSSNSYAIKKKDEIERVAKANR

SEQ ID NO: 70272 - protein, 220 aa, Zea mays
  Clone ID: UC-ZMROB73077H09_FLI.pep
ISDLLSAGQPLRQACLEIDGSVPAGHDGGVGDASRLWEEDERQDRADKGEGGADAEGRGVSFVEGAVDGACAQRDHQLWKDDCNVEDANGETLTTAVLGGNLRRHGPRHAVEHGLRDADEREDGEGAALERVVGAREGGGERGPVALHGDHAEDDHGRHEDEHHQAADGPDDPRRELPAQPGDEEGGDAERDGAEEEADGALADAGFVQVRLAARALRLA

SEQ ID NO: 70273 - protein, 400 aa, Zea mays
  Clone ID: UC-ZMROB73080E05_FLI.pep
DYRPPGIKSLKFSKFSLGNVSPKIEGIRIQNLQPGQIIMDIDFRWGGNPSIILAVDAVVASLPIQLKDLQVYTVIRVIFQLSEDIPCISAVVVALLADPEPKIQYTLKAIGGSLTAVPGLSDMIDDTVDSIVSDMLLWPHRHVVKLGVNVDTSDLELKPQGRLSVTVVKATSLRNKEMIGKSDPYVKLYVRPMFKVKTKVIDDDLNPEWNETFDLIVEDKETQSVIFEVYDEDKLQQDKRLGVAKLAVNTLESEITQDATLKLLHSLDPIKNKDTKDRGTLHLKVKYHPFTKEEQLEALEMEKQAIEERKRLKEAGIIGSTMDAVGSGVGFVGTGIGAGLGFVGSGIGAGAGLVTSGIGAVSSALGKAGKFMGRTVTGPFSMSRKNGSSSTAPQHDQPSA

SEQ ID NO: 70274 - protein, 691 aa, Zea mays
  Clone ID: UC-ZMROB73050D03_FLI.pep
GTDSFSNIIGSVYYPDGETAKDLALELVENGLAKYVEWSANMLDVEVKIKLKNAELQAKKDQLRIWTGFKPPATNSKPIHDQKFNGKVVEVVSGDCIIVADDSAPYGSPSAERRVNLSSIRAPKLGNARTDVKPDHFAREAKEFLRTRLIGKQVAVEMEYSRRISTVDGQSAAPTANMADTRVLDYGSVFLGSPSQTDGDDTSSAPSSASQPGVNVAELLLSRGFAKTSKHRDYEERSHYYDALLAAESRAEKAKKGVHSQKESPVMHITDLTTVSAKKAKDFLPFLQRNRRHSAIVEYVFSGHRFKLTIPKETCSIAFSLSGVRCPGKGEPYSDEAIALMRRRILQRDVEIEVEAVDRTGTFIGSLWESKTNMGSVLLEAGLAKLSSFGLDRTSDAYILTRAEQSAKQQKIKIWENYVEGENASNGSTPESKQKQILKVVVTEVLGGGKFYVQTMGDQRVASIQQQLASLKLKDAPVIGAFNPVKGEIVLAQFSVDNSWNRAMIVNGPRSVESPDDKFEVFYIDYGNQEVVTYSRLRPVDPSVSSSPALAQLCSLAFIKVPSLEDDFGQEAAEYLSECLLSSSKQYRAMIEEHDTSGGKSKGQGTGNVLIVTLVDAETESSINATMLEEGLARLERSKRWDTRERKTALQNLEQFQDKAKKERLRIWQYGDVESDEDEQAPPARKPGGRR

SEQ ID NO: 70275 - protein, 496 aa, Zea mays
  Clone ID: UC-ZMROB73075E07_FLI.pep
GVSSSNLSSTSSSSVSGSSVSASDDSYQRPAVPAWEFLEAVPFVLEAVLTACAHGRLSSRDLTTSLRDLVDFLPASLAAIVSYFSAEITRGIWKPVPMNGTEWPSPGASLHSIEAEVKEILASAGVQINSCYPRGVPPMLPLPMAALVSLTITFKLDRSLEYIQGVIGHALENCAGGSSWPSMPIIGALWTQKVRRWHDFIVLSCMRSPFGRDKDAVAQLIQSCFSSFLQSSSSGSDIIANRGVGALLGDSITDQGLRLPMAPGFVYLRTCRTFHDTYFVSEVILKQVIEWAHKLANGWSFNGPPQLKSGRTPLSCAASMAHQVAMLGGGLLCIAGGPLVVQVLYEDTLPTLLLSAREQSLKDPGPVSSTLQGYAMANMLFYCGSLLWGADRSSPVMKLSFLSRRPRVVRNHMDFIAGVLDGHILLGCDPGTWKAYVSQFMFLVVKFVPSWLRDIKLDTLKKIAAGLRSWHEHDLALSLLERGGPQAISVVVETFL

SEQ ID NO: 70276 - protein, 259 aa, Zea mays
  Clone ID: UC-ZMROMO17089G09_FLI.pep
PELQHALEVQKMSEQAATNSFKELTYIRQELRNPLNGIQFTYNLLKPSELTEDQRQLVSSNVLCQDQLKKILHDTDLESIEQCYMETNTVEFNLEEALNTVLMQGIPLGKEKRISIERDWPVEVSHMYIYGDNIRLQQVLADYLACALQFTQPAEGHIVLQVIPKKENIGSGMQIAHLEFRIVHPAPGVPEALIQEMFQHNPGVSREGLGLYISQKLVKTMSGTLQYLREADTSSFIILIEFPVAQLSSKRSKPSPSKF

SEQ ID NO: 70277 - protein, 175 aa, Zea mays
  Clone ID: UC-ZMROMO17009A11_FLI.pep
SDIGSFELVIKMYPQGRMSHHFRETKVGDYMSVKGPKGRFKYLPGQVRAFGMVAGGSGITPMFQVTRAILENPKDNTKVHLIYANVTYEDILLKEELDGMAKNYPDRFKIYYVLNQPPEVWDGGVGFVSKEMIQTHCPAPAADIQVLRCGPPPMNKAMAAHLDGLGYTKEMQFQF

SEQ ID NO: 70278 - protein, 134 aa, Zea mays subsp. mexicana
  Clone ID: UC-ZMROTEOSINTE007E12_FLI.pep
GANVMLGGKRHSLGMSFYEPTVVGNVSNDMLLFREEVFGPVAPLIPFKTEEEAVHMANDTNAGLAAYIFTKSIPRSWRVSESLEYGLVGVNEGIISTEVAPFGGVKQSGLGREGSKYGVDEYLELKYICMGNLG

SEQ ID NO: 70279 - protein, 559 aa, Zea mays subsp. mexicana
  Clone ID: UC-ZMROTEOSINTE002D03_FLI.pep
EKAEAHLYTIIKVARDEDLKEQIGKGIYFDLVDHEKVHNFRIQKQMPFSCFKEEVAKEYGIPVQFQRFWLWAKRQNHTYRPNRPLTVHEETQSVGQLREISNKAHNVELKLFLEVELGLDLRPLPPPEKGKEDILLFFKFYNPEKEELCFMGRLFVKALGKPSEILAKLNEMAGFPPDQEIELFEEIKFEPNVMCETIDKKLTFHYSQLEDGDIICFQKSPGAEYDAPVRYPDVPSFLEYVHNRQVVHFRSLEKPKDDDFSLELSKLHTYDDVVERVARQLELDDPAKIRLTPHNCYSQQPKPQPVKYRGVVHLSDMLIHYNQTSDILYYEVLDIPLPELQFLKTLKVAFHHPTKDEVVIHSIRLPKNSTIADVINDLKTKVELSSPNAELRVLEVFYHKIYKIFPLHEKIENINDQYWTLRAEEIPEEEKNIGPNDRLIHVYHFKKDINQTQQIQNFGDPFVLVVHEGETLAEVKKRIQSKLQVSADEFSKWKFAFISMNRPDYLQDSDVVPTGFQRREVYGAWEQYLGIEHADTAPKRVYTVNQNRHAYEKPVKIYN

SEQ ID NO: 70280 - protein, 368 aa, Zea mays subsp. mexicana
  Clone ID: UC-ZMROTEOSINTE002G07_FLI.pep
TFVVFVPDVFQIKYFIRLCWDAHKSSFQEARHSDLWSKYKFICSCRRCIASPEPYTDLILNCDVRDLDKAEAEGTVTPPAIENLGDVLQQAISEYTSNDDPEACCNMIETMLSNRFLSGLKQEDISGRKHILQPLHHICLTAYMTLASAYRFRALSLEEAVRSDGENTDDFFRMAKAAAAYSLVLAGSAHHLFLSECSLMIPLSHFLLNTGQSLLYLAESIKGKTRQNISEARLSFSSCPASSTDNDSPPYHVFRSTCEAFGKQTLSLSLRCWSFLVRGLPCLEKIKSPMEFSMPGTTIFQSVLSEEDHANLSAHEPVSFTERQAGCILSLALCCITYCKYLATICYGPHHYLADHAKYLLEGIDPAQ

SEQ ID NO: 70281 - protein, 474 aa, Zea mays subsp. mexicana
  Clone ID: UC-ZMROTEOSINTE018D05_FLI.pep
EELDVNERRAFLVWRRNLARLEENDKLILTPFEKNIDIWRQLWRVLERSDLLVMVVDARDPLFYRCPDLEAYAKEIDEHKRTILLVNKADLLPLNIRKRWADYFKAHDILYVFWSAKAATATLEGKKLSGYSEGESASLDLDTKIYERDELLMKLQAEAESIVAQRRISPTVDDHEASSSDSVSSVTKHVVVGFVGYPNVGKSSTINALVGEKRTGVTHTPGKTKHFQTLIISEELTLCDCPGLVFPSFSSSRHEMVACGVLPIDRMTKHREAIQVVADRVPRDILEQIYKIALPKPKPYEPQSRPPTAAELLRAYCASRGHVSHAGLPDETRAARQILKDYIDGKIPHFELPPGVTGPEVDFEQIAGSESPTTSAANESVTDDLDEEDDDAVDPAESNMRDVLDDLESFDLGNGGSKTTAKKKEASHKHHKKPQRKKDRSWRVGNDGGDGTAVVRVYQKPAVNLSTVSLSGRV

SEQ ID NO: 70282 - protein, 263 aa, Zea mays subsp. mexicana
  Clone ID: UC-ZMROTEOSINTE019A05_FLI.pep
IWVRRSLRKHIKNLRVSTVGVGAIGYIGNKGSISVSMSVHETPFCFVCCHLTAGEKDGDDLKRNSNAEEILRRTVFNPENVVGMPMRIHDHKRIIWLGDLNYRINLSYERAHELISKQDWAGLFERDQLKREMRKGCTFDGWFEGVISFAPTYKYEFDSENYVSDESESGRRTPAWCDRILSYGKGIRLLSYKRGELTLSDHRPVAAVYVAEVEVFCRRKPQRALTFTDAESRTIYHQRRMDGLVEQRGRRTMRYAISSTSSK

SEQ ID NO: 70283 - protein, 335 aa, Zea mays subsp. mexicana
  Clone ID: UC-ZMROTEOSINTE023B05_FLI.pep
LGSPRLLVAPMVDNSELPFRMLCRRYGADAAYTPMLHSRIFSENEKYRSMEFTTCKEDRPLFVQFCANDPDILLQAAKKVEPYCDYVDINFGCPQRIARRGNYGAFLMDNLPLVKSLVQNLAANLHVPVSVKIRVFPRLEDTLAYAKMLEEAGASLVAVHGRTRDEKDGKKFRADWDAIKAVKDALRVPVLANGNIRHMEDVKNCLEHTGADGVLSAETLLENPAVFAGFRTKEWKEDGDENGDGGLDQADLVIEYLKLCEQYPVPWRMVRSHVHKMLGDWFRVHPEVREELNKQNKLTFEWLHDMVMRLKDLGGRVPLYRKETALGQTLASSNA

SEQ ID NO: 70284 - protein, 353 aa, Zea mays subsp. mexicana
  Clone ID: UC-ZMROTEOSINTE026E09_FLI.pep
KIQDKEGIPPDQQRLIFAGKQLEDGRTLADYNIQKESTLHLVLRLRGGMQIFVKTLTGKTITLEVESSDTIDNVKAKIQDKEGIPPDQQRLIFAGKQLEDGRTLADYNIQKESTLHLVLRLRGGMQIFVKTLTGKTITLEVESSDTIDNVKAKIQDKEGIPPDQQRLIFAGKQLEDGRTLADYNIQKESTLHLVLRLRGGMQIFVKTLTGKTITLEVESSDTIDNVKAKIQDKEGIPPDQQRLIFAGKQLEDGRTLADYNIQKESTLHLVLRLRGGMQIFVKTLTGKTITLEVESSDTIDNVKAKIQDKEGIPPDQQRLIFAGKQLEDGRTLADYNIQKESTLHLVLRLRGGQ

SEQ ID NO: 70285 - protein, 348 aa, Zea mays subsp. mexicana
  Clone ID: UC-ZMROTEOSINTE023F06_FLI.pep
KPLHCLAVRLTAERIARPDQYADPVPPPPALEDPALFHYAIFSDNVLAASCVVRSAVANSNDPSKHVFHVVTDRMNLGAMQVIIRRMDLKGAHYEVKAFEDYKFLNSSYVPVLRQLESANLQKFYFENKLENATKDASNMKFRNPKYLSMLNHLRFYLPEMYPKLHRILFLDDDVVVQRDLTGLWKIDMDGKVNGAVETCFGSFHRYAQYMNFSHPLIKAKFNPNACGWAYGMNFFDLDSWRREKCTEQYHYWQNQNENRTLWKLGTLPPGLITFYSTTKPLEKSWHVLGLGYNPSISMEEIRNAAVVHFNGNMKPWLDIGMNQFRHLWTKYVDYDDSYIRQCNFAPP

SEQ ID NO: 70286 - protein, 439 aa, Zea mays subsp. mexicana
  Clone ID: UC-ZMROTEOSINTE026H09_FLI.pep
CEALEEQKTVLDSLSGTMQSVCQTLRVVTEREMEDEAALEMNELNSFTPPGKDKDELSFGGNSADRREASWTSLAGTSQQEPDLAALRMHGTFSPGGQGLSLSGVQATAEGSKTKRRTKAEKTVSLQVLRQYFAGSLKDAARSLGVCPTTLKRICRQHGITRWPSRKIKKVDHSLRKLQQIIDSVHGAETAFQLNTLYKDLTDTSISSDNNLSGSVTVPPTNQSNLTDFNKHQPHKSSSNMPSTSHSHSSCSHGSQSSPSCSVGATEHAQQGIIDLMKSENPVKDSSIQTMQTENTSLYEHFSVHEAPIDLLQDVTEKANGAHHSSRSLSSPNPKQNTDANMRVKATFGSEKVRFRLNPECNFQGLKHELAKRLSIVDTNPLVLKYLDDDSEWVLMTCDADLQECLHVYKLADIQTIKISVHLAVSPATRVTAGHTGLS

SEQ ID NO: 70287 - protein, 400 aa, Zea mays subsp. mexicana
  Clone ID: UC-ZMROTEOSINTE037F07_FLI.pep
WNLMVDGYVKHGKIHDAIELYSKMSEKNLEASTTLMSCFIDNGMLDKARDVFYSMPQVDVVSCTTLLFGYVKGGYIYDALDLFCRMHKRTVVTYNVMIAGLLHQGKVTEAYKLFDESPTRDLVTWSCLINGLAQNGLNNDAIKLYKKMLLSNIRPSDSILSSLISCFSHHSMIVHGQQFHASTIRLGFGSHLLIQNALISIYCKCGEMIIAQTIFDRMDNRDTVTWNTMICGYAFNSFGQNAIETFDNMKKAQVDPDEITFLGILSACNHMRLLEEGKHFFNMMTCNYGILPNKMHYACMVDLFGRTGMLEQAEELMKSMPFKPDFAIWTSLLSSCRLNGNDRLAEHAASQLISIKPTIKMPYLHLIRVNGSTKRWNVMENLRNQIRNAATDKQVGYSWS

SEQ ID NO: 70288 - protein, 322 aa, Zea mays subsp. mexicana
  Clone ID: UC-ZMROTEOSINTE063B01_FLI.pep
PNPELASSIYIKCQSLSNWYGVIPTLWPNVKYIYGIMTGSMEPYLKKLRHYAGHLPLLSADYGASEGWVGSNVNPTLPPEEVTYAVLPNIAYFEFIPLEKPKWEETEICSSVHYIESEPVGLTEVEVGKIYEVVITNFAGLYRYRLGDIVKIAGFRNATPELQFICRRSLVLSVNIDKNTEKDLQLAVEAAEKLLAAEKLEVVDFTSLVDRSSEPGHYVVFWELSSDDGASEDVLSGCASCMDLAFADAGYVGSRKTQTIGALELRVLRKGAFAQVMNHYLSLGGAVSQFKTPRFVSQSNSKVLQILSRNVTRSYFSTAYGL

SEQ ID NO: 70289 - protein, 94 aa, Zea mays subsp. mexicana
  Clone ID: UC-ZMROTEOSINTE049G07_FLI.pep
YDTRCNSSVVARTVSLESPSHGFQAASPYLRWEDLPQFIPSPNPTHRGLRHWDSTRCSYLHLLSLCFHTLLPVILASRGTANLHWKATQLICGQ

SEQ ID NO: 70290 - protein, 686 aa, Zea mays subsp. mexicana
  Clone ID: UC-ZMROTEOSINTE045A10_FLI.pep
NDGNWRDCILQAIILLATKLGRRSVVDRVYRGKGRLEKEEFPFARNNDFVGRKKELSELELILFGDVMGDGEREYFELTTKQRRKGLAVRRSANNHEHMNTDDSKGKEPVIWKETEKDIEMQRLGSPLWHGRPLRVKNGVRCGRKKRSRKILYGKGIACISGEPGIGKTDLVLEYAYRFFQRYKMVLWVRGESRYIRQNYLALRTFLEVDLSVDSHLHEKGSDRCFEEQEEEAIAKIRQELMRDIPFLVIIDNLESEKDWWDKRVIMDLLPHFGGETHFIITTRLPRVMNLEPMKLSYLSGAEAMTLMKGGVKDHPLVETDALKIIEEKLGRLPLGLSIVGAILSELPITPTRLLDTLNRTPLIRNFSWNDREVISLKNHEILVRLLDVCLSIFDHADGPRSLATRMVQVCGWFAPSAVPIHMLARAAHKVPKKQWRGPRWRKWWRPLTCGLATSRMKKSEAEAAAMLMRFGIARCSAKPEHVQFHDLIRLYARKLGGTRTAPAMVQSVYLQGSIKHSSEHLWASCFMVFGFGSDPLLVELRPSELMFYVKQIVMPLAIHTFITYSRCNAALELLRLCTDALERAAESMLAHAGKWRETSFSCFRQAHSEAQYTYLWQELALLKASVLETRAKLMLRGGQYDIGDDLIRKAIFIRTSICGEHHPDTVSARETLSKLTRLLTTVQLS

SEQ ID NO: 70291 - protein, 310 aa, Zea mays subsp. mexicana
  Clone ID: UC-ZMROTEOSINTE049H11_FLI.pep
PGEALHSNGVHHVDVETGKVVAEWRFEKDGADITMRDIANDSKGAQLEPSGSTFLGLDDNRLCRWDMRDARGRVQTIGSSSDSPVLNWSQGHQFSRGTNFQCFASTGDGSIVVGSVDGKIRLYSKSSMRMAKTAFPGLGSPITHVDVTYDGKWILGTTDTYLILICTIFKDKDGKEKTGFSGRMGNRIAAPRLLKLTPLDSVLAGTDNKFHGGQFSWVTENGKQEKHLVATVGKFSVIWNFQQVKDSNHECYRDQQGLKSCYCYKVVLKDESIVDSRFMHEKFATSDSPEAPLVVATPMKVSSFSIANRR

SEQ ID NO: 70292 - protein, 241 aa, Zea mays subsp. mexicana
  Clone ID: UC-ZMROTEOSINTE045B05_FLI.pep
RREGAGEPIKYMGCGDCETTSRSMTIAGATDSFVTLQRIAKQLFSALHLDVKEVRGIGLSLSKLEHADLGRGASQGHMLESWLASPAAKLKKQQSEILGNVNVAGTSGLKDLRSGPSHTAEANLRNDRSTVFHNVELPPLSQLDLEVLKNLPPEIMSEMNEMYKGELQSLVDTLNSDKGKENSSKSLALPAVIRKSVPADAKLQGYRDHRDSMHLEEEHTKVSCVTGNKVALELFKQSAST

SEQ ID NO: 70293 - protein, 167 aa, Zea mays subsp. mexicana
  Clone ID: UC-ZMROTEOSINTE051A01_FLI.pep
RLIDDMVAYALKSEGGYVWACKNYDGDVQSDFLAQGFGSLGLMTSVLVCPDGKTIEAEAAHGTVTRHYRVHQKGGETSTNSIASIFAWTRGLAHRAKLDDNARLLDFTQKLEAACVGAVESGKMTKDLALLVHGSSNITRSHYLNTEEFIDAVADELRSRLAANSNL

SEQ ID NO: 70294 - protein, 461 aa, Zea mays subsp. mexicana
  Clone ID: UC-ZMROTEOSINTE069F12_FLI.pep
VPIPDEDGTVGARGFVTGSADHDVKFWEYQLVQKSDNDSKQLTVTNVRTLKMTEDVLAVSISPEGKHIAVALLDCHVKVFYMDTLKPSLNLYGHKLPVLCMDISSDGALLVTGSADKNLKIWGMDFGDCHRSIFAHSDSVMDVKFVYRTHYMFSVGKDRTMKYWDADKFELLLTLEGHHAEVWCLTLSSRGDFVVTGSHDRSIRRWDRTEEQLFIEEEKEKRLEETFEADLENDNDYRYGQKDDAPDEGSVGVPGRKTKETVTSADAIMDALDTAEEELKRINQHKMEEQITAKAAKFQPNVIMQGHSPSDYVLNVVSSIRPNDLEQALLALPFSDALKLMSYLKEWSLVPSKVELVCRVCLVLLQTHHNQLTATPAARSLLTELKDILYCRVKECKDTIGFNLAAMDHIKELLALRSDAPFRDAKAKLMEIKKEQSKRSSSRLDGDEKRKKKRKKASAES

SEQ ID NO: 70295 - protein, 395 aa, Zea mays subsp. mexicana
  Clone ID: UC-ZMROTEOSINTE045C08_FLI.pep
QFFKVQANFEQKYKYYIGQDGNGSDPQASGAYIFRPNGTVPISTDGQVSLTVLRGPILDEVHQQINSWIYQITRVYKAKDFLETEFIVGPIPVDDGNGKEVATEIVTNMVTNKTFYTDSSGRDFIKRIRDYRSEWKIEVHQPIAGNYYPVNLGIYVEDGSKELSVLVDRSIGGSSIKDGQIELMLHRRLLHDDGKGVAEALNETVCLDKQCEGLIIQGKYYVKIDPQGEGARWRRTFGQEIYSPLLLAFTEQDGGNWANSHVSKFSAMDSTYSLPDNVAMLTLQELEDGSVLLRFAHLYEAGEDKDLSSLASIDLKRVFPEKKIGKVIETSLSANQERAAMEKKRLKWKAQGSAADEKVVRGGPVDPSKLVVELGPMEIRTFIVSFDHISDKQQL

SEQ ID NO: 70296 - protein, 414 aa, Zea mays subsp. mexicana
  Clone ID: UC-ZMROTEOSINTE070C07_FLI.pep
LCRSMASVGVARSSLGFQNGTSSSSDPDRLPNELGSMSIRDDKDVEDIVVNGNGAEPGHIIVTSIDGRNGQAKQTISYMAERVVGHGSFGTVFQAKCLETGETVAIKKVLQDKRYKNRELQTMRVLDHPNVVALKHCFFSKTEKEELYLNLVLEYVPETAHRVIKHYNKMNQRMPLIYAKLYMYQICRALAYIHNSIGVCHRDIKPQNLLVNPHTHQLKLCDFGSAKVLVKGEPNISYICSRYYRAPELIFGATEYTTAIDVWSAGCVLAELLLGQPLFPGESGVDQLVEIIKVLGTPTREEIKCMNPNYTEFKFPQIKAHPWHKIFHKRMPAEAVDLVSRLLQYSPKLRSTALEALVHPFFDELRDPNTRLPNGRFLPPLFNFKPHELKNVPADFMVKLIPEHARKQCAFVGW

SEQ ID NO: 70297 - protein, 146 aa, Zea mays subsp. mexicana
  Clone ID: UC-ZMROTEOSINTE049D09_FLI.pep
KRVLRLRTQLAELYYWRKSQITIFFANSKVHLHVPAGSTPKDGPSAGCTMITSMLSLAMGKPVKKDLAMTGEVTLTGRILPIGGVKEKTIAARRSAIKTLIFPAANKRDFDELASNVKEGLEVHFVDTYSEIYDLAFQSDAGTETS

SEQ ID NO: 70298 - protein, 403 aa, Zea mays subsp. mexicana
  Clone ID: UC-ZMROTEOSINTE103E09_FLI.pep
PDVLSHVSVRARNSKVLFATCFDHTTLSELEGYDQKLFSFKPTSADITYREITESELQQSSSPNAEVGHAVPSISLAKKKFLGKYAISAEEFSEEMVGAKSRNIAYLKGKVPSWVGVPTSVAIPFGTFEKVLSDGLNKEVAQSIEKLKIRLAQEDFSALGEIRKVVLNLTAPMQLVNELKERMLGSGMPWPGDEGDKRWEQAWMAIKKVWASKWNERAYFSTRKVKLDHEYLSMAVLVQEVVNADYAFVIHTTNPSSGDSSEIYAEVVKGLGETLVGAYPGRAMSFVCKKDDLDSPKLLGYPSKPIGLFIRQSIIFRSDSNGEDLEGYAGAGLYDSVPMDEEDEVVLDYTTDPLIVDRGFRSSILSSIARAGHAIEELYGSPQDVEGVVKDGKIYVVQTRPQM

SEQ ID NO: 70299 - protein, 287 aa, Zea mays subsp. mexicana
  Clone ID: UC-ZMROTEOSINTE108H08_FLI.pep
PRWDGWGRFMEPITSKIPLMVIEGNHEIEPQGHGGEVTFASYLARFAVPSKESGSNTKFYYSFNAGGIHFIMLGAYIDYNRTGVQYSWLEKDLQRVDRRVTPWVVAAWHPPWYNSYSSHYQEFECMRQEMEELLYEYQVDIVFSGHVHAYERMNRVFNYTLDPCGPIYIGIGDGGNIEKIDMDHADDPGKCPSPSDNHPEFGGLCHLNFTSGPAKGKFCWDRQPEWSAYRESSFGHGILEVLNSTYALWTWHRNQDAYAENSVGDQIYIVRQPDKCLLQPASASSLN

SEQ ID NO: 70300 - protein, 344 aa, Zea mays subsp. mexicana
  Clone ID: UC-ZMROTEOSINTE092F12_FLI.pep
KRVLINAFTVRALRDTFPPARAAGIMALSVTSSYYEMTEIATRILPNIVVLTFDPNSDVRTKAFQATDQFLQIAKQHHEKLNTGDNSVAESTGVKLKPGNAGLLGWAMSSVTQKGKPSDHAPISTANANNSQASTTSTATPDTQASTLAYAPSTSTSLDQAASASARSSVDGWGELEDGNIHEENSSDKDGWDDVDPFEDKPSPSLLSNIQAAQKRPVVQPKQPVANSSKPNTLKAPKSEDDPLWGPIAAAPPKSAVKSADIKPSTSHNDEDDLWGSIAAPPKSSGKPLKPAVANSDDLWGAIAAPPPATKARPLASSSRGRGTKPAQPKLGAQRIGRTSSTGM

SEQ ID NO: 70301 - protein, 192 aa, Zea mays subsp. mexicana
  Clone ID: UC-ZMROTEOSINTE101F05_FLI.pep
GFLDLRMKPWIRNLVTRSLAILPSLIVSIIGGSSAAGQLIIIASMILSFELPFALVPLLKFTSSKTKMGQHTNSIFTAVLTWMIGSFIVVINTYFLITSFVKLLVHSGLTTISQVFSGIFGFLGMLIYIVAILYLVFRRNRKSTQPLLESDAELAVSGSSADAGAECSLGHLLREDISSMQLPQQRSASDLD

SEQ ID NO: 70302 - protein, 650 aa, Zea mays subsp. mexicana
  Clone ID: UC-ZMROTEOSINTE109E09_FLI.pep
RQSKERVANVRFNRDGSLVVCQVAGKTADIYRVLDETEAARKAKRRVNRKKEKASAKSMIAEENGTIIDPLPVQNLQNPTVIVTDVFKLFQVLRASKKICSITFSPSNPPRGCLATLSLSLNNNMLETYSVDKEKVSKMYSVEMHGHRSDIRSVSLNSEDNLLMSTSHNAVKIWNPSTGECLRTIDSGYGLSSAFVGNRYALVGTKSDEDGTVGARGFVTGSADHDVKFWEYQLVQKSDNDSKQLTVTNVRTLKMTEDVLAVSISPEGKHIAVALLDCHVKVFYMDTLKPSLNLYGHKLPVLCMDISSDGALLVTGSADKNLKIWGMDFGDCHRSIFAHSDSVMDVKFVYRTHYMFSVGKDRTMKYWDADKFELLLTLEGHHAEVWCLTLSSRGDFVVTGSHDRSIRRWDRTEEQLFIEEEKEKRLEETFEADLENDNDYRYGQKDDAPDEGSVGVPGRKTKETVTSADAIMDALDTAEEELKRINQHKMEEQITAKAAKFQPNVIMQGHSPSDYVLNVVSSIRPNDLEQALLALPFSDALKLMSYLKEWSLVPSKVELVCRVCLVLLQTHHNQLTATPAARSLLTELKDILYCRVKECKDTIGFNLAAMDHIKELLALRSDAPFRDAKAKLMEIKKEQSKRSSSRLDGD

SEQ ID NO: 70303 - protein, 99 aa, Zea mays subsp. mexicana
  Clone ID: UC-ZMROTEOSINTE088B05_FLI.pep
TPAGANTESRKKAKKAEEERDAELASGLRVIQNPRDEMAPVEPLPEAPNDGRPIVCPMSDFCPLTIDGVLKESFLETLRKKRRWSGLRFLHCELIPQFY

SEQ ID NO: 70304 - protein, 435 aa, Zea mays subsp. mexicana
  Clone ID: UC-ZMROTEOSINTE102C08_FLI.pep
RIGSFHKFPSGVAGMAIRKGSSYAVAALLALASVAAVAGEVFFQEKFEDGWESRWVKSEWKKDENMAGEWNHTSGKWNGDAEDKGIQTSEDYRFYAISAEYPEFSNKDKTLVLQFSVKHEQKLDCGGGYVKLLGGDVDQKKFGGDTSYSIMFGPDICGYSTKKVHTILTKDGKNHLIKKDVPCETDQLTHVYTLIIRPDATYSILIDNEEKQTGSIYEHWDILPPKKIKDPEAKKPEDWDDKEYIPDPDDKKPEGYDDIPKEIPDPDAKKPEDWDDEEDGEWTAPTIPNPEYKGPWKQKKIKNPNYQGKWKAPMIDNPDFKDDPYIYAFDSLKYIGIELWQVKSGTLFDNIIITDDPALAKTFAEETWGKHKEAEKAAFDEAEKKKEEEDAAKGGDDEDDDLEDEEDDEKADEDKADSDAEDSKDSDDEKQHDEL

SEQ ID NO: 70305 - protein, 766 aa, Zea mays subsp. mexicana
  Clone ID: UC-ZMROTEOSINTE106E08_FLI.pep
DRTLWRLLKIDRSEPSELVIDECSTVYTESEHPDLLKGLDDEHRSTGGVKFVTKFYGIIGFIKFLGPYYMLIITEQKKIGEIFGHPVYQVTRTSMVELANSKTRSTFQNFKDENRYRKILNALDLRKDFFFSYSYHIMRSLQKNLADPQDGWTLYETIFVWNEYLTRRIRNCLRNTLWTVALVHGFFKQDKFSISGKDIMFTLIARRSRHYAGTRYLKRGVNEKGRVANDVETEQIVYEAVPGPTEVSSVVQNRGSIPLFWSQETSKLNLKPDIILHEMQNNYEATELHFENLRARYGNPIIILNLIKTRERRESILRREFDKAIKIINKSLSEENHLRFLHWDLHQNSQGKPTNVLDVLLKVAFRALNLTEFFYCQVAPNSETSAQCPTLLNGLDQYLCDDNNSDDTECTEIVGDVSQEDISGSSDSSGNATTEDKFENSGLPPPKPPKFQKGVLRTNCIDCLDRTNVAQYAHGLAALGHQLHALGFIESPELGLEAPLAHHLMHFYEMMGDTLAVQYSGSAAHNKVFSAKRGHLKLFIQSQEFFRTLQRHYSNTCIDANKQAAINLFLGYFQPQQEKPALWELESSAGKHNNNLFDGHPSTLKRVKSDGTILHESNASISGSGRCHNEQLSASQPDVQNGFQFPTSESDSLHENEISSACGSGIAHLRYTPTASDVLHVPRAKVEYCHDSGDSNFLDLEWLSTSGNSSDERSIATSTPDANLSNENVISGITPDIMENHLAEMQYQKLPRNFVQWVNHGDTFWY

SEQ ID NO: 70306 - protein, 116 aa, Zea mays subsp. mexicana
  Clone ID: UC-ZMROTEOSINTE117B09_FLI.pep
EVIHLFVKEKHLLTLEKHEETNQPPRNHIQGIELGKQKATKYTLNFFQVTNDQQMVYGITTTEQNGGKHRDLLIPQAPLPPSGQRIYSQNKICSSRQTEHIQHSMKSVHFPILTIS

SEQ ID NO: 70307 - protein, 145 aa, Zea mays subsp. mexicana
  Clone ID: UC-ZMROTEOSINTE117C06_FLI.pep
EDEYARIEAEGGKVIQWNGYRVFGVLAMSRSIGDRYLKPWIIPVPEVTIVPRAKDDECLILASDGLWDVMSNEEVCEIARKRILLWHKKNSTSSSSAPRVGDSADSAAQAAAECLSKLALQKGSKDNITVVVVDLKAQRKFKSKT

SEQ ID NO: 70308 - protein, 425 aa, Zea mays
  Clone ID: UC-ZMFLMO17220E08_FLI.pep
AVYIKQKRRRATRHTSKELGPASRLLPHMRVGPRRHSCLPPTPAAAMAVAHAPPRRGVLPLLLVAALVAALPATCAAARSKKSYTAIFSFGDSLSDAGNLIVNGTPKALTTARPPYGMTFFRKPTGRCSNGRLVVDFLAEHFGLPLPPPSQAKGKDFKKGANFAITGATALEYSFFKAHGIDQRIWNTGSINTQIGWLQDMKPSLCKSEQDCKDYFSKSLFVVGEFGGNDYNAPLFSGVPFSDVKTYVPLVAKAIANGVEKLIELGATDLLVPGVLPIGCFPLYLTLYNTSSKADYNARTGCLRRYNRLAFHHNRELKQQLDELQKKYPKTKIMYGDYFKAALQFVVNPGKFGFSTALQACCGAGGQGNYNFNLKKKCGEQGASVCSNPSSYVSWDGIHMTEAAYRKVANGWLNGPYAQPPILKS

SEQ ID NO: 70309 - protein, 288 aa, Zea mays
  Clone ID: UC-ZMFLMO17224E06_FLI.pep
GLGRAIYINLQDRDVKQGASTLTQQLARSLFSEVGRENTAGRKIREMFVALKLEAVYSKDDILKAYLNRVYLGAGNYGFEDAAQFYFDKSAQDLDVGEAATLVAMLPAPNLYNPVQDYQTSVQLRNRVIERMAMLGMIDEQEANRARRSRIQVSPKATQTLSQRQAPYFYGYIFGELNHLLGEDVAKEGNFVVETSLNLKMQALAEKSLQKFLTTEGKKYAVSQGAVVTLDSRTGAVLAMVGGKSYRESQFNRASQAQRQPGSTFKLFAYTAAIPNSGNRILRWRKLI

SEQ ID NO: 70310 - protein, 307 aa, Zea mays; identical to SEQ ID NO: 58442
  Clone ID: UC-ZMFLMO17240A04_FLI.pep

SEQ ID NO: 70311 - protein, 115 aa, Zea mays
  Clone ID: UC-ZMFLMO17245D06_FLI.pep
TRRLSSSTFLLQFGSSLLLEETGTFEADFSTDVSRKNVLFSGRSSKRQMFGIVKFFCINPVYNHLVWNCQYPREDPLLWFSLKLLLSLKKTTWSSSYWLVFSYTRLYCICDMSLP

SEQ ID NO: 70312 - protein, 121 aa, Zea mays
  Clone ID: UC-ZMFLMO17252E01_FLI.pep
TVIKPTVESALWSIPQTDEFSFAHPHHQVSNKSVVPGHSIVAAPWAIAAGADCLVTPCPLCHLQLDSRQPEIGQVLGQPLNLPVLHLPQLVGLALGIDPKELGLDRHVVSTTPVLAKLGLT

SEQ ID NO: 70313 - protein, 344 aa, Zea mays
  Clone ID: UC-ZMFLB73032A02_FLI.pep
VRAPILASGDSILGWVEGDSSFVLLSYEWVDGFVRCLPDLSFSICPSRFVAQFVYLLLFLLADRSKSKARGVNPERRKRRRRGDRDRLPPSCLCLSRTVLVRTRSCRVRFFQEPAAGMDLYDKREDMALQDGDSCLASRASRGGCDVDLQWVDGLLEGAGRKRRAPEDFEDEVQKMDEVDGGGKRSKPPSPQPHTPDIHEAHVPGRRTTVVAGGGEHSGGGGDLIGEIGRDLSINCLLRLSRSEYGSVASLNHDFRSLVRGGGIYRLRRQNNIAEHWVYFSCNVLEWDAYDPYRKRWISVPKMPPDECFMCSDKESLAVGTELLVWDGTYCLQIQYTDKLLVTR

SEQ ID NO: 70314 - protein, 379 aa, Zea mays
  Clone ID: UC-ZMFLB73001C12_FLI.pep
DAEEQCKSSNIQKNEPSVIDPWSPSTRNTLLEKINGGLRKFSGYYKSNKVYCGKVPLTSSLNVLRNKGIKLGGRKYQIKGSTGTGAFAKVYKATVDSNAEEMVALKIQNPSFTLEFYMYCQLDLRISDVERPSFGYAHEMHIFSDVSVLVCDYLPYGTLLDVINSHLVVGRYMDEVLCMYYTIEMLNMLETLHSVGIIHGDFKPDNILVCYPSGEITEDNFRSEKRVERNQGLCLVDWGRGIDLALFPSCTEFHGDCGTSGFRCIEMQEHRNWTYQVDTYGLCVVVHMMLHGSGMNVKKVPRIGGGYEWQPKQPFKRYWNVDLWQKLFSTLLNPPSNDSDVAALQSLRASFRQYMCSNRQLVGKLNQLLAKQKASLCSS

SEQ ID NO: 70315 - protein, 279 aa, Zea mays; identical to SEQ ID NO: 56673
  Clone ID: UC-ZMFLB73021E06_FLI.pep

SEQ ID NO: 70316 - protein, 102 aa, Zea mays
  Clone ID: UC-ZMFLB73008F02_FLI.pep
IALKISQLPLASGKQKRIAVITQGADPVVVAEDGKVKTFPVILLPKEKLVDTNGAGDAFVGGFLSQLVLGKGIEDCVRAGCYAANVIIQRPGCTYPEKPDFN

SEQ ID NO: 70317 - protein, 117 aa, Zea mays
  Clone ID: UC-ZMFLB73093E09_FLI.pep
LHGKTLAGICGGAAKSQFRLMKVVAAQKHQEMEASQPASPPRVRSQFEKPQPIREAGSGARRPTAHPWGRWKGRRRQGSGRQGDSTASISYADCARGVRHVTVWDMTNSACSNLVSL

SEQ ID NO: 70318 - protein, 136 aa, Zea mays
  Clone ID: UC-ZMFLMO17340C10_FLI.pep
DMDGREVFVKLASDVISNRKNVNLAHITPTKDHIFETPHKVYVGNLAWSVQPQDLRELFTQCGTVVSTRLLTDRKGGRNRVYGFLSFSSAQELEEALKLDRTVWFNSSLKFPVPVACFFVFHRFDQLWLLLLISLA

SEQ ID NO: 70319 - protein, 254 aa, Zea mays
  Clone ID: UC-ZMFLMO17186D12_FLI.pep
DDIKMLHTKVDLIVTLGGDGTVLWAASLFKGPVPPVVAFALGSLGFMTPFPSEHYRELLDNVLNGPFSITLRNRIQCHVIRDAAKDEIVTEEPFLVLNEVTIDRGISSYLTNLEVYCDSSFVTCVQGDGLIISTTSGSTAYSLAAGGSMVHPQVPGILFTPICPHSLSFRPLILPEYVTLRVQVPYNSRGHAWASFDGKDRKQLSPGDALICSISPWPVPTACLVDSTTDFFRSIHEGLHWNLRKSQSFDGPRD

SEQ ID NO: 70320 - protein, 676 aa, Zea mays
  Clone ID: UC-ZMROB73012H03_FLI.pep
DEDLMNLLFSFLKPDHPHGTLLAGYFAKVVICLAMRKTLQLVHYVQGHPEIVSQLVDLIGITSIMEVLIRLIGADETMYSSHADSMQWLDDIQVLEMIVDKFSTSDSAEVHANAAEILCAVTRYAPPALAAKISSPSFVGRLFQHAFEDSRPKSVLVHSLSVCISLLDPKRLVSASYQAFRSQLSHGTLVTASPETVNGMLDSLGDLLKLLDVSSAENVLPTTYGSLQPPLGKHRLKIVEFISVLLSIGSEVAETRLIQLGAIQHAIDLFFEYPFNNFLHHHVENIIGSCLESKQDHLIGHVLDECKLVTRILEAEKNSALSSDLTKHTLSTEGRCPPRIGIVGHMTRIANKLLQLANTNIMVQSYLQQNSDWIEWHTSTLTKRNALENVYQWACGRPTSLQDRGRDSDDEDFRDRDYDVAALASNLSQAFKYGIYSNDDIDEAQASLERDDEDVYFDDESAEVVISSLRLGDDQESGSLFTNSNWFAFDEDKALNDGLVSPEASPSPNSEISALKEDDEVILGEVIDDTEGSEPTLPVSNKDANEESGHTVLANGTIDKQEDDIRPLTPDVKESQPEFVEWKEEEAEPGDVAEKDTAVPGIEVESEKQLNSMDDVMLCDAELGEEKKSGGMLGSSAPEAEAASPVSSDIDSIKHPEQAADSAVSEYPMGEQNPEI

SEQ ID NO: 70321 - protein, 108 aa, Zea mays
  Clone ID: UC-ZMFLB73061F01_FLI.pep
KRQRIEAIFHEYAYSDNLVVLEDVPTEGYFAHEQETELIGPEVEIPESCFRALNKPNGMTSDFVQNKTNLKAQTSGWDVLYDKFEKLNGDCLLDKPNGMQSSNDLAHT

SEQ ID NO: 70322 - protein, 304 aa, Zea mays
  Clone ID: UC-ZMFLB73067C03_FLI.pep
VVLIWLYAFFLTVGGAYKNAAPKTQFHCRTDRSGLVGGAPWISVPYPFQWGAPTFDAGEAFAMMAASFVALVESTGAFIAVSRYASATPCPPSVMSRGIGWQGVGILLGGLFGTANGTTVSVENAGLLALTRVGSRRVVQISAGFMIFFSILGKFGAVFASIPGPVIAAVYCLLFAYVGMAGVGFLQFCNLNSFRTKFILGFSLFMGLSVPQYFNEYTSVAGFGPVHTRARWFNDMINVVFSSKALVGGAVAYFLDNTLHRRDGVARKDRGHHFWDRFRSFKTDPRSEEFYSLPFNLNKFFPSF

SEQ ID NO: 70323 - protein, 450 aa, Zea mays
  Clone ID: UC-ZMFLB73073C11_FLI.pep
VLRRFVEKCLVSSSQRLSARELLEDPFLQGDDVAVSLDGGDYHVPTKYVRQPSYLGHTYSNGSMVSNGFSESMDEDALSEDCEDDDMKGQDGIDLFNENEDEPLGNVDITIKGRKSEDGGIFLRLRISDNDGRVRNIYFPFDVEADTALSVATEMIAELDITDHEVTRIADMIDGEVSALVPDWRPGPGIEEAPDTSYCHNCGSNVSSCGSLYAYMSSGRRGCQCAELHGRFEEITFQADGEQCDLQESAGSSDDGGGQTEHYVKSNESTHVNGLVQMGRRDLSNQLCFSSFQEQSCSYNRYENDTNHHVNGFDIKHEVKIAKYKARKMAQFKRAIHPSLDFDNAYGVNRGKPSLNKLQSFHVGKNHNFRVPTCDRSPGKVSTDYHSDLNSQVLQSRHPDPGAQRARHCEVNAAGSSTECMFTGRRYYTGAQLPPNLPRTKSVPLNAVDA

SEQ ID NO: 70324 - protein, 385 aa, Zea mays
  Clone ID: UC-ZMFLB73070G02_FLI.pep
MANEEKLFKMGNADTDTAALHNEWDDALCPICMDHPHNAVLLLCSSHDKGCRSYICDTSYRHSNCLDRFKKMKVNDGDSPSQSSSSMPRGTRNQNVVHGSRFGLTRESRRLHIDISEPNEASNHQGASHRPAAIGGEQEDNSYNEGTDLTLEGQEVEINGTSESSDMSSLNQLLCPLCRGAVSGWKIIEEARQYLDEKSRACSREACMFSGNYREIRRHARRVHPTTRPADVDPSRRRAWHRLEHQREYADIVSAIRSAMPGAVVFGDYAIEGGEMFSHDRETSGPSEPSGSLLTTFFLFHMLSSSPIRSGDEPGGTSRGLRRHRRRYLWGENLLSLQYNDNDDDDDDDDDDDEGEEGEGDAVDEEVQRPRSRRRFIRSRSEERV

SEQ ID NO: 70325 - protein, 707 aa, Zea mays
  Clone ID: UC-ZMFLMO17038E11_FLI.pep
RSLFRKGGKTMASSAAAHSGAPPAAKRPASSGREGDQMVVTPLGAGSEVGRSCVHMTFKGRTVLFDCGIHPAYSGMAALPYFDEIDPSAIDVLLITHFHLDHAASLPYFLEKTTFKGRVFMTHATKAIYKLLLSDYVKVSKVSVEDMLYDESDIARSMDKIEVIDFHQTLEVNGIRFWCYTAGHVLGAAMFMVDIAGVRILYTGDYSREEDRHLRAAELPQFSPDICIIESTYGVQQHQPRIIREKRFTEVIHNTVSQGGRVLIPAFALGRAQELLLILDEYWSKHPELHKIPIYYASPLAKRCMAVYQTYINSMNERIRNQFAQSNPFHFKHIESLNSIDNFHDVGPSVVMASPGGLQSGLSRQLFDKWCTDKKNACVIPGYVVEGTLAKTIINEPREVTLANGLTAPLHMSVHYISFSAHADFPQTSNFLDELRPPNIILVHGEANEMSRLKQKLITQFDGTNTKIVSPKNCQSVEMYFTCEKMAKTIGRLAEQVPEGGESSSGLLVKKGFTYQIMAPEDLRVFTQLSTANIIQRIAVPYSGSFEVIRYRLKQIYESVESATEESDVPTLIVHERVTVRLDSESYVTLQWSSDPISDMVSDSVVAMVLNIGREGPKVVPVEEAVKTKEETEKAALKVVYALMTSLFGDVKVAEEGKFVISVDGNVAHLYGRSGDVECENATLKERIKTAFRRIQGAVRPIPLSAS

SEQ ID NO: 70326 - protein, 463 aa, Zea mays
  Clone ID: UC-ZMFLMO17287D04_FLI.pep
VNGFLMGCRPYLGVDSTHLTGKYLGQLASATAIDGHNWMYPVAYAIFDKETNLNWKWFMTLLKRAIGTPPGLTIHTDACKGLAYGVSQVFGDAAEHRECFRHLMANFRRKYNGEVLKYMWPCAWACTHERHQVLMDKISETCPNAVAYLRYDHPHLWTRAKFNKICKVDYVNNNISECFNNWIKNVKELPAVDLMDMLRVMIMEKIATRQSIANKMQGHILPSVVNDLHEKSRNLRYTITKSGYMKGEVSGASRDGVAWRYGVNLVTQACSCGQWDVTGKPCTHAIAFITSQRNLRIEDYVGECYSVQRFKNAYQFEVYPMGDRLQWPKLDPGFEMRPPKLEGRPAGRPRKKRIKSAGEPGKRGPYQCKRCFQYGHIEKGCKNPVVEPHEDLPDNHLQRKTKKGPKKRKKSEPEQTSTSLVQISPSSFGPMTRRRVAMSPTCSSPSASKQGEAPASSKRRLII

SEQ ID NO: 70327 - protein, 338 aa, Zea mays subsp. mexicana
  Clone ID: UC-ZMROTEOSINTE019C02_FLI.pep
TLCEAKLSLSNSPDSVLNQSSLLISSSSPDIGEPSDKVQVDSCQYLISSHMGDCRVSGPDSSSLNTCANRNVSCKAHDEESLDQALIIKHDSGMMPSSNQTSLYATVGTEGSAELKQDVSHCNDFNIRVNDESLNQVLRNQHGDAIPLPDVVSLDAKVDKERSWCVEPLIANSDCCTDSVNVDSLCTDQRLADAPSGPTADAPSMLAEEESYPFSAKLENIDVARIKGLLMKRKSRREIQDRAIASDGLSEEDWIERELESGIVTNQEANCAAISDELSDEAWIERELESGIVVGPRNEQAITFDGLSEDDWIERELESGIIVEPAPATKKRKLESSC

SEQ ID NO: 70328 - protein, 427 aa, Zea mays subsp. mexicana
  Clone ID: UC-ZMROTEOSINTE030F04_FLI.pep
SGNPHSRVQTLNLNLSPGAAAAPSQRNRLPPRIEAMSSDDEVREEKELDLSSNDVVTKYKTAAEILNNALKLVVSECKPKAKIVDLCEKGDSFIREQTGNVYKNAKRKIERGIAFPTCVSVNNTVCHFSPLTTDDAVLEENDMVKIDMGCHIDGFIAVVAHTHVIANGPVTGRAADVLAAANTAAEVAMRLVRPGKKNKDVTEAIQKVAAVYDCKIVEGVLSHQLKQFVIDGNKVVLSVSNADTKVDDAEFEENEVYAIDIVTSTGEGKPKLLDEKQTTIYKRAVDKNYNLKMKASRFIFSEISQKFPIMPFTARALEEKRARLGLVECMNHELLQPYPVLHEKPGDLVAHIKFTVLLMPNGSDRITSYPLQELKPTKSIEDNAEIKAWLALGTKSKKKGGGKKKKGKKGDAAGDPMEATNDATSQE

SEQ ID NO: 70329 - protein, 197 aa, Zea mays subsp. mexicana
  Clone ID: UC-ZMROTEOSINTE044D05_FLI.pep
EEAAAAAAEAEEEEPRQAQKVAAPPSTPRGKKRDGVSGVTDPAPPAAKAQVVGWPPVRSYRKSCFQQQQAAAGAKGKPAAADEGAPGPAGGGVFVKVSMDGAPYLRKVDLGTCGGYRQLREALEAMFLCFSGPGSGSGDASGGGSPSDFAVTYEDKDGDLMLVGDVPFGMFIGTCKRLRIMKGTEARLGLGSAKNND

SEQ ID NO: 70330 - protein, 265 aa, Zea mays
  Clone ID: 700240187_FLI.pep
VSPDDLLASGPAWHHLPGPLDRSSSRQHEFSNEQVRSRCSSIARVVNRHHHGWKQPPAGRAGGPRRQGQEGARVQARRPQGQGRRLRPHPLHPRVQPGAAQRLLRLRPGQGRRPLQGVAPGAAGRAALLRRQVQPGPGAARRARRARRGLRLRQPRRDRGRARARRAARGHRLRQPLQARGAPRVRRGGRRQPHHLRLRGGGGQGQALPPRLRAPAPPQGPRRRRRQGRPGDQVRRAPGRGRAAPARRPARGGRRGRRLLPRRQR

SEQ ID NO: 70331 - protein, 211 aa, Zea mays
  Clone ID: LIB36-004-F3_FLI.pep
GTVMTDGKSKSLVAYHEVGHAICGTLTPGHDPVQKVTLVPRGQARGLTWFIPMDDPTLISRQQLFARIVGGLGGRAAEEVIFGEPEVTTGAAGDLQQITGLAKQMVVTFGMSEIGPWSLMEGGAQSGDVIMRIMARNSMSEKLAEDIDSAVKQLSDEAYEIALRHIRNNREAIDKIVEVLIEKETVTGDEFRAILSEFAEIPVENRVPPAT

SEQ ID NO: 70332 - protein, 368 aa, Zea mays; identical to SEQ ID NO: 46496
  Clone ID: UC-ZMFLMO17190A07_FLI.pep

SEQ ID NO: 70333 - protein, 321 aa, Zea mays
  Clone ID: LIB3354-003-E12_FLI.pep
ANTNMFKNRSRFQSFFDSTCQLIPLSNDSCRELANKLSNESENMQDSDNVSMLTSMNTGNTAGSVFPFSKQNTDLFEVSSSRPEFGLVPSDSLTSSPHSSLKSVKNLLSSRSLSEHQSSASLQHFVDWPRTPPAQGGLSWPQAEDMPRAQRSQLSVSAPMASSELSSASTSPIHDHEKLILSPLKLGRDREYSPSGLVSVAGASRDKVSQLEATWATMFRDSSTGGPLGEVLAKNSSNAEARSCPSAAPPLTDYYCWDSGHGMQSSPVGVLQRTTAFGSVSSSTGSSPRVESHGACCDGTSNLMDDDLGSVVVSHPSIRLL

SEQ ID NO: 70334 - protein, 311 aa, Oryza sativa
  Clone ID: UC-OSFLCYP117A12_FLI.pep
GGCGSCWAFSAIAAVEGINQIVTGDLISLSEQELVDCDTSYNEGCNGGLMDYAFDFIINNGGIDTEDDYPYKGKDERCDVNRKNAKVVTIDSYEDVTPNSETSLQKAVANQPVSVAIEAGGRAFQLYSSGIFTGKCGTALDHGVAAVGYGTENGKDYWIVRNSWGKSWGESGYVRMERNIKASSGKCGIAVEPSYPLKKGENPPNPGPTPPSPTPPPTVCDNYYTCPDSTTCCCIYEYGKYCYAWGCCPLEGATCCDDHYSCCPHEYPICNVQQGTCLMAKDSPLAVKALKRTLAKPNLSFLFGNGKKSSA

SEQ ID NO: 70335 - protein, 64 aa, Glycine max
  Clone ID: LIB3050-006-E7_FLI.pep
PIESLSSFYINNTKATNIFISLIHIKQKYMATQKIISNVVLLVFSILYINHIELCLLCLSIIIS

SEQ ID NO: 70336 - protein, 75 aa, Glycine max
  Clone ID: LIB3050-018-A3_FLI.pep
VTLLSQIPQLKMIAKNIQRALNIQHQNHKKRQQRPTKASAFSHEQQQPLVYQHCDHYRGQPRLQDHSQDLQQYLP

SEQ ID NO: 70337 - protein, 64 aa, Glycine max
  Clone ID: 700743615_FLI.pep
FSSYARCDGHKTLIRRLLISLPLHVRILCACLLPISHLAKIKRGEKTIYITFGTFFVHVLCPAK

SEQ ID NO: 70338 - protein, 254 aa, Zea mays
  Clone ID: 700094048_FLI.pep
QMWNLKALVTSLLCISALSSSPWPCTAAGQLGGKPLVTAVTKDASTSLYTAPLKDGHPLVLDLSSSVISLATCASSSKNNNGTLTATLSANATDGQNPLFPVSFSAVATCAPSSRLPAGAVGVAGLAPSSSSQQSLPAQVARTQKVADKVALCLPSDGRSTSGDSVGVAIFGGGPLFFVPPDRGDFTTMLAGTAPLHAGAGAGAPGYYVSSTGIAVEQARVGGPAGALVVALSSTVPYTALRPDVYAPFVKAFD

SEQ ID NO: 70339 - protein, 440 aa, Zea mays
  Clone ID: 700094492_FLI.pep
AADPERMDQYEVLEQIGKGAFGSALLVRHKAEKKKYVLKKIRLARQTDRTRRSAHQEMQLIATVRNPFIVEYKDSWVEKGCYVCIVIGYCEGGDMAEAIKKVNGNHFSEEKLCKWLVQLLMALDYLHANHILHRDVKCSNIFIARDQSIRLGDFGLAKILTSDDLASSVVGTPSYMCPELLADIPYGTKSDIWSLGCCIYEMAALRPAFKAFDMQALISKITKSIVSPLPTRYSGSFRGLIKSMLRKSPEHRPSAAELLKHPHLQPYVLQVQLKSSPSRTTSPIYQALTDKVKKMTFVSDTADSARRRAARRSSLGSERTVTFCKPSPERNSVSSTRSIKEYTTTTQSARELSVGSSLQVDDEVTSKAVVTKTAGVLRTPSKSRAPASKTLVAARSRLDPPKTSYARTNRAELDSRTPLSKSSARTARRASLPLAAYRAP

SEQ ID NO: 70340 - protein, 207 aa, Zea mays
  Clone ID: 700096393_FLI.pep
WLTSDDPHACTYRHTYAQSFITRADRHTACTYSTEYRHAFLHAHARMHPWPCTALFKTHGTPAPPAPPPPPPPPPRPPPPPNPPNGPAPATAPPNGPNPATPPPSGPWTPPKRPPPPVRPPNTSAVLACSSSSSTAPALPSPAAKAAVVSQSRGVALAAADATARQSSREATSHHLAAIGLSLSLAYYQEDQLLFFEVCLSGLVLLD

SEQ ID NO: 70341 - protein, 225 aa, Zea mays
  Clone ID: LIB143-059-F10_FLI.pep
VVTCRLLLEFAIVPMNQRVASTNPDSHRIRTFHVRAGACCSCAAGWAPELGPAGAGAVAPAHDDLLFLLLVGLLVGLVLEAAPAAAAAVTMVAAGAVRVRLLLAVGFLVGFLVGLVAVVVRVVSSVHGIVVEAAAVTPVQLLERRLLVDNVVLLHGAAGMAGFLGDLGGDVFAGVGAVVVRGGVRLAVAIAGAPEHRCSRGGLWLWLGAAWIYFNEVAFYRRASG

SEQ ID NO: 70342 - protein, 220 aa, Zea mays
  Clone ID: LIB148-044-D7_FLI.pep
STLLPRATMRAPLLSSLLVLAVVATVPLLVPAVCISRHDKSESKADEEAAATTVAADEHGSVKTMSLDAYGPLEMAAKKPKEQVLNAQATPATTAGADTYDQKPVGEKQAETATASAADEQPDKYVEALVPDEKAEEFPDKYVEALVPDDKVEVKKKKVKKEKKDESDDSDVATSYKKKEKSDDSEVSTSYKKKKKSDDSDEDASLDKKEKKAKFAASDK

SEQ ID NO: 70343 - protein, 200 aa, Zea mays
  Clone ID: 700237947_FLI.pep
AGVDNPNMTPLGHCVLMLITHLQCKINEKSRLYEDEALQNIFLMNNLLYIVQKVKDSELKTLLGDNWIRKRRGQIRQYSTGYLRSSWTRVLACLRDDGLPHTMGSSSTLKAALKDRFKNFNLAFEELHRTQTSWRVVDPQLREELKISISEKVLPAYRSFVGRFRGQLEGGRGSARYIKYNPDDLENHVSEFFEGRKSNA

SEQ ID NO: 70344 - protein, 63 aa, Zea mays
  Clone ID: 700210777_FLI.pep
SDRVASFSCSDNGEVREYVHQVAKRLGVELAREQVAGPLHAVPHARPPLRYMLRVAADVDALI

SEQ ID NO: 70345 - protein, 270 aa, Zea mays
  Clone ID: 700211127_FLI.pep
DSKQGLTVLERQTATSKFLSSCFGMEHKFSSPSHRQLAAICYHNLALRLPTLPAFSFDLVHNIHSRQHLAKHHMLPVQPTCCHCGDEKLGSVCISPGIGHGQKAWTSVLDLEVLIRKLQAVDRFTTPPVPESEVTSLEHEAGDDSVELTSLVVEGFATLADPFLSCAKSSEVLCRLRNSLPKKPHDNPACGLAVDLDVEVDLVGNLRQVLLSEVDEHLGERQCGGGEREPQANRGRAPGDPRRRAPPPPARRHLRSTRAPPTPMRSREFC

SEQ ID NO: 70346 - protein, 101 aa, Zea mays
  Clone ID: 700214440_FLI.pep
HVSCRGKKRLHIPTELTSSMRPAAPGTLMRNDHRHMQETQIFVFPSHVTHRARQLPAFPRRPAGRDRLQQTHVDKQAHDLDLLSASQVEQDTSSVWHQDAS

SEQ ID NO: 70347 - protein, 50 aa, Zea mays
  Clone ID: 700550925_FLI.pep
YKALRYHSSFNTSITSTSCDKIKKTWNAHTSYRDLTTQGNSLLTELIVIG

SEQ ID NO: 70348 - protein, 106 aa, Glycine max
  Clone ID: LIB3106-087-H5_FLI.pep
AKMASFTMTASILGSPAVTNRSAVATQRRSLVVNAAKAVEAEKVSYDNDMDGSNGRRNLMFAAAAAAVCSVAGMAVADEPKPGTPEAKKKYAPICVTMPTARICRN

SEQ ID NO: 70349 - protein, 115 aa, Zea mays; identical to SEQ ID NO: 47798
  Clone ID: LIB84-015-D7_FLI.pep

SEQ ID NO: 70350 - protein, 155 aa, Zea mays
  Clone ID: LIB84-024-F5_FLI.pep
RAATITFAALAAASIAAIPATMGPVLKRPTPGTVQCFGRKKTAVAVAYTKPGRGMIKVNGVPIELLRPEMLRLKAMEPVLLAGRSRFKDIDMRIRVRGGGKTSQIYAIRQAVAKGLVAYYQKYVDEAAKKEIKDIFMRYERTLLVADPRRCEPKK

SEQ ID NO: 70351 - protein, 184 aa, Zea mays
  Clone ID: LIB83-014-B8_FLI.pep
TVQAHRHTRAQKRNGHTQLIKAGNQYSPSAMGDLIPGLPDEVARECLVRVGFDQLPVVRRISRQWKSAAGTRRRGRRRTRCSSTTSCRARGGAARPCPARAGPSSPARPWAAPCTWPAATTPRRTRCARRWPTTRAPTRGRGSRTWRRSATSRAGSASPDASSSSAGTRRGRRAASSPPRSPST

SEQ ID NO: 70352 - protein, 43 aa, Zea mays
  Clone ID: LIB4073-006-C8_FLI.pep
DEAPASIEQAKITLHTTTLVQHNKAHHKFTVLVDTRTTTCAQT

SEQ ID NO: 70353 - protein, 146 aa, Zea mays
  Clone ID: LIB4073-018-H4_FLI.pep
RGMKRHIEVSSSRRKQRKAHFTAPSHLKRKIMSSHLSKDLKKKYNVRAVPVRKDDEVLVVRGPLKGNKGKVIQVYRARWCIYIEKLTKQKLNGQPINIPIDPSKVVITKLKIDKDRNDLLARKERTLSLKMKGGKYTGKDVGMGVD

SEQ ID NO: 70354 - protein, 168 aa, Zea mays
  Clone ID: LIB4073-019-H2_FLI.pep
GLNFMYLNQKLIAVESIQLPLITLQMEHRVHAFLDLKNEKEGANFSFKRHNITGCPQEIRTTPSPGRSVPLVLLDELGVLEVLLGEVGRHLGDEESGDGEPREEGPVAPPLPAEEDRPRVERLHLLGLRLRLRLRLLAISFLPPPPPASLLVRFEGRMGISFALLSWM

SEQ ID NO: 70355 - protein, 122 aa, Zea mays
  Clone ID: LIB4073-023-H5_FLI.pep
NALFLLVCVRTSRSHLPEDTSHLLSLLLCPLVSSKLSLGNLQSTLVLANLQKLSDTLLIRSKASNLSDQAPDHGHPLRCFPLAVGRARRQLALGDDMALVDAHEEARLRLRRRHEDEPFPVA

SEQ ID NO: 70356 - protein, 55 aa, Zea mays
  Clone ID: LIB3960-007-B5_FLI.pep
RMWSLDWITSEIFQHQISSEQPPTANLHQPLQQSFFSKHLLLQLIDESSFEKLAQ

SEQ ID NO: 70357 - protein, 75 aa, Zea mays
  Clone ID: LIB3958-011-B8_FLI.pep
YIATSSAHNSIHVSTHIWTKAMLCQCFIPVQYYKLLLMMNHFHQLEVMYKCYSDTSKFRTQMICYVLLKIHRKSN

SEQ ID NO: 70358 - protein, 166 aa, Zea mays
  Clone ID: LIB3958-021-D11_FLI.pep
TFKHRFYFKRSWIRSRLTSRTRSEERPDRAPCGRRLHSALSSAAASSTFSNSATFSSTFSSTAAGSSGADAFSASAAEAGAGGSSWSGSRAVSVELEMAARRRPIKGLKAVSTVTHASASPPATIAAVFRALPSRWPPLPPFAMGARGSMVTDGDAWMGWRDARVG

SEQ ID NO: 70359 - protein, 169 aa, Zea mays
  Clone ID: LIB3957-023-A1_FLI.pep
KRSRTKSTATVMVGATYRSVHSHSVYCLSFHDPSSLPLSLPKCISVEATERKEKTTTSPTILLLGSQADVDVRGSPVHHLLRRACGPASHGEARRVQVHGAGVGLGRCGGGWRRIMEPVPRTCQRDRGGCGEHGWGRFRFWQCRNRGELLLRAHPPLVLLQAVGQEASH

SEQ ID NO: 70360 - protein, 195 aa, Zea mays; identical to SEQ ID NO: 44977
  Clone ID: LIB3912-018-E11_FLI.pep

SEQ ID NO: 70361 - protein, 296 aa, Zea mays
  Clone ID: 700264701_FLI.pep
ALGELRFRRTQPSPPHRPGHGRRRRLLSSPLPHVTIRCDGRAAMTPAVRVGNPRAPGPGAAVVEDEEEAAVAWRELRGKAAELAAAGEERAILARRIEAALQVRREALRQAEELDELTRMVDLQQARLEAAVVGRRRALEAVERGKERLQEQIDRVLPLSRSLTAAHHRVQEAKEALSGDKFRLKDLQRLLRTRQQCMVSQVAGLYPVRVFHDLPRHAENPCADTNGEHVTLPEENRTFSGGDGTHLPTIIKSPEARGWTFFGWDIMKHKMKQKSYRNKVLQRSAAVLGYAAHSCS

SEQ ID NO: 70362 - protein, 248 aa, Zea mays
  Clone ID: CC-ZMPO148042B06_FLI.pep
LYARTILFDGCIRHNTIKQIDFCITINYYMANSAYMLAISETVFSSSHQHRYPVSILQAMHTCESNIDFVLQIHPAKMKTTGKRKQKKNLFIPKIAEQQSWRVLYNICAWCSADSSYYNLRGAFVRTALGEARSVAVAAAAAVAVTITMVMAFPVLLLFLLLLIFLLLMVFVLVVAGLVAVLAGDLVLDLLHDALLVLPVVLLVVLLALLVVLLALLVLVLLLVVAPDVERLLDLVDDARHACGYFSL

SEQ ID NO: 70363 - protein, 39 aa, Zea mays
  Clone ID: CC-ZMLE189061G05_FLI.pep
SDHADAVKQEVLPCQPCSSSIIMRPCVVTTEMELSSLAV

SEQ ID NO: 70364 - protein, 238 aa, Zea mays; identical to SEQ ID NO: 63315
  Clone ID: CC-ZMLE189104B01_FLI.pep

SEQ ID NO: 70365 - protein, 408 aa, Zea mays subsp. mexicana
  Clone ID: UC-ZMROTEOSINTE099C12_FLI.pep
TADAIAITVNQSAPSLKPGVTPVVEYFPGTWKSSNHLICCVPQRTYPDLWTGRLGPASGHGHAPASLIVITLKLDILCYSSIDFPVAAAVSELVIPGLADQMIVMKRIIASEITQQAQLQPFHFIPSGWHVPVTAIYNTRYGETEERQSELRKELHLRLGLPLDRPLLRISNALTFGGMGRRKKSMPRSGSSLLRDIHRELPSSGVSGGVMSLIDGSYEYYHYLHDGIDDNGWGCAYRSLQTIVSWYRLQQYSSINVPSHREIQQVLVEIGDKDPSFIGSCEWIGAIELSFVLDKLLGVSCKVINVRSGDELPEKCRELARHFETQGTPVMIGGGVLAYTLLGVDYNEASGDCAFLILDPHYTGTDDLKKIVNGGWCGWKKSVDSKGRSFFLKDKFYNLLLPQRPNMV

SEQ ID NO: 70366 - protein, 280 aa, Zea mays
  Clone ID: CC-ZMLE189066E12_FLI.pep
QHSKTHQAKRTSNDLTPMATKILALLALLALLVSATNAFIIPQCSLAPSAIIPQFLPPVTSMGFEHPAVQAYRLQLALAASALQQPIAQLQQQSLAHLTLQTIATQQQQQQFLPSLSHLAVVNPVTYLQQQLLASNPLALANVAAYQQQQQLQQFMPVLSQLAMVNPAVYLQLLSSSPLAVGNAPTYLQQQLLQQIVPALTQLAVANPAAYLQQLLPFNQLAVSNSAAYLQQRQQLLNPLAVANPLVATFLQQQQQLLPYNQFSLMNPALQQPIVGGAIF

SEQ ID NO: 70367 - protein, 532 aa, Zea mays
  Clone ID: CC-ZMLE18900031H12_FLI.pep
GGMAVGGTQPVLRKYLGALKDTTTVSLAKVNSDYKELDIAIVKATNHVERPSKEKYIREIFHSISAARPRADVAYCIHALARRLSKTRNWAVALKTLIVIHRALREVDPTFREELLNYGRSRSHMLNMAYFKDDSSAEAWDYSAWVRIYALYLEERLECFRVLKYDVETDPPRTKDLDTVDLLDHLPQLQQLLFRLLACQPQGASSYNVIIQHALSMVALESVKIYTAISDGTINLVDKFFEMQRNDAVRALDVYKRATNQAERLSEFHEVCKTIHIGRGEKFLKIEQPPASFLQTMEDYVRDAPTGQKQKTILAIEYKKEPEEEEKPASPPPAPEQEPEQEPEPEPEPVKEEAPEAEPDLLGLNEPSPAATAIEEQNALALAIVPIDDVPGAAPTFENGVTGWELALVTAPSSTETAVAPSKKLAGGLDLLTLDSLYDEANRRASQPASYNPWDATASAPMMTTMAPAMHDPFYASNGYAAPHGVQMAAMAHHQQQQQVFMLQQQMMAPAPAVHHPMQMQQNPANPFGNPF

SEQ ID NO: 70368 - protein, 119 aa, Zea mays subsp. mexicana
  Clone ID: UC-ZMROTEOSINTE016E01_FLI.pep
RRRRHACAAAPTMDEEEFRRMLDLFPVVRSRDYCCSDPGTSSRGTRQRSRVQEATKGDNKDSSGAQDMFMQKLKMAAENKIGATKAEFFCKTFEEVHEKLVHRELNLDAAKKFLSAYES

SEQ ID NO: 70369 - protein, 177 aa, Zea mays
  Clone ID: CC-ZMLE189070F11_FLI.pep
VKRCLSRSKTSVRVQPVHTSKGGGWLVVPGGVALSYASDDDFLLNRPPAPANGEMGGVVPSGEAGGVLAALLGEDGYPAGRLIMMLRVTFTGVSSLPEAGEGGTSAAASPAGSLILTAAGRAGCLRRRLRPVSGRGPATVSSHSLSRRPIPLRRNHPTATTRPRSGTVSSASSTHET

SEQ ID NO: 70370 - protein, 343 aa, Zea mays
  Clone ID: UC-ZMFLMO17127F04_FLI.pep
DQQRLIFAGKQLEDGRTLADYNIQKESTLHLVLRLRGGMQIFVKTLTGKTITLEVESSDTIDNVKAKIQDKEGIPPDQQRLIFAGKQLEDGRTLADYNIQKESTLHLVLRLRGGMQIFVKTLTGKTITLEVESSDTIDNVKAKIQDKEGIPPDQQRLIFAGKQLEDGRTLADYNIQKESTLHLVLRLRGGMQIFVKTLTGKTITLEVESSDTIDNVKAKIQDKEGIPPDQQRLIFAGKQLEDGRTLADYNIQKESTLHLVLRLRGGMQIFVKTLTGKTITLEVESSDTIDNVKAKIQDKEGIPPDQQRLIFAGKQLEDGRTLADYNIQKESTLHLVLRLRGGQ

SEQ ID NO: 70371 - protein, 305 aa, Zea mays
  Clone ID: UC-ZMFLLIB3205437F08_FLI.pep
QLKRITRAARGRGGVLDVLLLELLLVASASGGERDGVVVSGGAAAALGVEEGGAAVAGHEEGPAEAVRLAGGDELLDGEEEGHALAARELHGDGGVVDAVLLLELEGAVGGDLERALDLVQRVGEAGHELGLLELGRRVLGDALRLDGEGRRLQAQLLHLVLAGLERERVHAAVDGRALVRRARALHLQVRLALDLVVGQPLGRALRARARDEERRGGEREAGELGGVDALAGDVPDVGLEGARDPGGAGVDAERPGELRRRAGRRQRGGRRPAADLGRLHQGGRGLDLERGCHRGRRGRCCLLP

SEQ ID NO: 70372 - protein, 68 aa, Zea mays
  Clone ID: UC-ZMFLB73005H06_FLI.pep
QYTSTNKRSSSQLLELEFGALRGLDSGVITGLHSDPRHADVVRPHDGDDVHDCRRNPSLSFSRSYSTR

SEQ ID NO: 70373 - protein, 456 aa, Zea mays
  Clone ID: UC-ZMFLMO17217D10_FLI.pep
RTTPDGKHLQSPRPHGPSPPGKRRSLRRTAMAPEPEDDIMNEKNPRPLDEDDIALLKTYGLGPYSTSIKKVEKEIKEMAKKINDLCGIKESDTGLAPPSQWDLVSDKQMMQEEQPLQVARCTKIISPNTDDAKYVINVKQIAKFVVGLGDKVSPTDIEEGMRVGVDRNKYQIQIPLPPKIDPSVTMMTVEEKPDVTYNDVGGCKEQIEKMREVVELPMLHPEKFVKLGIDPPKGVLCYGPPGTGKTLLARAVANRTDACFIRVIGSELVQKYVGEGARMVRELFQMARSKKACIVFFDEVDAIGGARFDDGVGGDNEVQRTMLEIVNQLDGFDARGNIKVLMATNRPDTLDPALLRPGRLDRKVEFGLPDLEGRTQIFKIHTRTMNCERDIRFELLARLCPNSTGADIRSVCTEAGMYAIRARRKTVTEKDFLDAVNKVIKGYQKFSATPKYMVYN

SEQ ID NO: 70374 - protein, 120 aa, Zea mays
  Clone ID: UC-ZMFLLIB3205450F06_FLI.pep
SPPNWRGTATKPHDLQRFGRQRRENTEGKVPRALTAMRSRSHQGMWSPPVKKLLTDSKKRPILASINLLSGVGVGWSGSEEVAEQGRAILGFVCRMGTDETAEEKGLGLDSRRRARSKRT

SEQ ID NO: 70375 - protein, 172 aa, Zea mays
  Clone ID: UC-ZMFLLIB3205454G10_FLI.pep
IQYNTSSGNQRRRNRKRQKKVEALYLSRSNSSGADTRGGGGGGGLGLLEASAEAEPVAPRPRLRPEPAVLPPSGRGRRRRRRGAAQHLPHHVHVLVLARAHLLPQPPQPGLANPEAGRDAEPRPPHRQHDAVPPVAHRFAGARQSVAGRRRPDGTNLGGSASLLSCFVPLDN

SEQ ID NO: 70376 - protein, 226 aa, Zea mays
  Clone ID: UC-ZMFLB73008H02_FLI.pep
NPLLKWIFPFNHAPKHALISLQTATFTCRTSGASRSWCAGSRGRAGDTHAAPLHQHVLDNRSSGSQDHAFLATLAGVGRRRRRFLLAARRLLLRPLAPSLGRHDLDELVVVDVAVAVHVGLTDHLGHLLLAQLLPEVGHQVPELGRGDHPVLVLVEHAERLPELLLRLRVPHLARHQAQELLLVDGAAAVAVHLGDHVLQLRLGGVLPERPHHGSELLGCDATLWK

SEQ ID NO: 70377 - protein, 171 aa, Zea mays
  Clone ID: UC-ZMFLMO17060A12_FLI.pep
APPSSSVAEQSRSESGEEEKPIDGVQLRGHNGRGGTVPRPSQPQHQHDPDGRRGGGGIAAQLPAQLLLRVLRGPQPRRRRRRGQVRVRARDPRRVVQVPAPPHQLPGPRPRPPAPVPAGLPRRAGAGRLVFRFLPHRRGPVSVRGQRRARRGESEKMMGYTCRVSLSEGKE

SEQ ID NO: 70378 - protein, 73 aa, Zea mays
  Clone ID: UC-ZMFLMO17240B05_FLI.pep
ASCSGCWPPSAPPSSPPPPRATSSATTTARRTRRRRRRPAPRTRPLGPGRQLGRHEAQVQAQMKDGLGCNAGD

SEQ ID NO: 70379 - protein, 54 aa, Zea mays
  Clone ID: UC-ZMFLB73011F04_FLI.pep
CWRNFDLYRRTLNSKGKGVASFTSLYKQRHRRQLFANQNSQRPAGWNRHPLAHS

SEQ ID NO: 70380 - protein, 135 aa, Zea mays
  Clone ID: UC-ZMFLMO17283G11_FLI.pep
CFLVSALLPSQPGEKIVQYPIRPVDTTTDFEGTTSLQPTQPPSGNAPPGGQSVARPMPRQMPQQPMVGGIPRVAGGVTMAAFNAASQAGMAGLNPGNMPMQRGAGGQSHPHQLRRKADQGMGMQNPGYPQQKRRF

SEQ ID NO: 70381 - protein, 179 aa, Zea mays
  Clone ID: UC-ZMFLB73389H04_FLI.pep
AQQPWRQPAMIRLLLARLVDDDAARGAPGVVRRPVRVPLLLGAQQRRRRRRGGGPGGAEAQRPEHVEVVPGQQRRLGVVGVVDVRRVEEVVGVEEVDGVVGKERGDVELGVGGGEGGLVVLVLAEPVVPEPGGGVDELVPLWREFLHLPVRRRDEERRVGVQRRRRHGGHGAHPLLSCW

SEQ ID NO: 70382 - protein, 242 aa, Zea mays; identical to SEQ ID NO: 46973
  Clone ID: UC-ZMFLB73317A06_FLI.pep

SEQ ID NO: 70383 - protein, 264 aa, Zea mays
  Clone ID: UC-ZMFLB73299B08_FLI.pep
RRERTRSYRPMEEDSIKGMISAISWVPRGAAKSVPVVADPPTQEEIAEAMKTFDLGRDSGSDADEDDDAATMELDGAAETVEEVDEAARAKAVAKALCKGSSKADDVADELRELNMDAYDDEDEEVDIFGSGLGDLYYPSNAMDPYLKKNNEDDEEDDDDDEEIEDKMIMPTDFVIVCAHSEDDIFSLQVNILEETNDGEQNIFVHHDVPLADFPLCTAWMDFNLKGGEKGNFVAVGTMDPAIEIWDLDMVDEVQPHMVLGGLS

SEQ ID NO: 70384 - protein, 354 aa, Zea mays
  Clone ID: UC-ZMFLB73299C07_FLI.pep
YHLLPPLHAAPLLAVGNSRPGHGWIQFQRETTSPGSGREWYAIVPVLDVEKVGLTVHRRIRERGLRGDRGLHGDALGVEHVLRLLGLLPQPRQRLPDVVDALQRVVRAFHPLRLAHQHCVKADLLPGLDVAYAVVEENRLVRVDVGDPERLLHGVDVGLAQDGGLGQLGGGAGAGEVAGDVEDLGLPVSLRRARRVQGLEADDPLEAVLQAQPLQGSHGVDLVAVGEYEFADGQVLENVLENRVGLDVVVRQPSVDEGVVLIVIEAVADRPEASHRGAVVLVQQISQVLDLALVNTQLLDHVIFNVLLDMVRDPGAQRVQGVVEVEEQAVELGLLDLVAAILELHAWELWGRES

SEQ ID NO: 70385 - protein, 266 aa, Zea mays
  Clone ID: UC-ZMFLB73365H08_FLI.pep
KPSTTSGEMAPKRGGRAPVPAKKKTDKVTNPLFEKRPKQFGIGGALPPKKDLHRFVKWPKVVRIQRQRRILKQRLKVPPALNQFTRTLDKNLATNLFKMLLKYRPEDKAAKKERLLKRAQAENEGKTVESKKPIVVKYGLNHVTYLIEQNKAQLVVIAHDVDPIELVVWLPALCRKMEVPYCIVKGKARLGSIVHKKNASVLCLTTVKNEDKLEFSKILEAIKANFNDKFDEVRKKWGGGIMGSKSQAKTKAREKLLAKEAAQRMT

SEQ ID NO: 70386 - protein, 244 aa, Zea mays subsp. mexicana; identical to SEQ ID NO: 59981
  Clone ID: UC-ZMFLTEOSINTE40A03_FLI.pep

SEQ ID NO: 70387 - protein, 251 aa, Zea mays subsp. mexicana
  Clone ID: UC-ZMFLTEOSINTE40H02_FLI.pep
IIPHMMAQILSESHSIKSLYYLDIAHRLEFVRLMMQRLQCNAFMLSYRGYGESDGYPSQKGITYDAQAALDHLAQRKDIDTTRIVIFGRSLGGAVGAVLAKNNPDKVAALILENTFTSILDMAGIMLPFLRWFIGGSSSRGPKLLNCVLRSPWNTLDIIGEVKQPILFLSGLQDELVPPPHMKMLYDKASDHNSNCRFVDFPSGMHMDTWMSGGDRYWRTIQLFLDQYAPGVQNRDASFKSEITEDDEAAD

SEQ ID NO: 70388 - protein, 136 aa, Zea mays subsp. mexicana
  Clone ID: UC-ZMFLTEOSINTE53C12_FLI.pep
VPPAPWASDSASTPLFQRKKTNGDHGASSSQPFAQQQQLAVQQDSYMQSRAEALQNVESTIHELSNIFTQLATMVSQQGELAIRIDENMEETVANVEGAQGQLLKYLNSISSNRWLMMKIFFVLMVFLMIFIFFVA

SEQ ID NO: 70389 - protein, 208 aa, Zea mays subsp. mexicana
  Clone ID: UC-ZMFLTEOSINTE78E02_FLI.pep
CICTFWNGWSYIGCSTLIFLSIIVTLQPMEIYVDDEAKLTLHGLVQHYIKLSEAEKNRKLNDLLDALDFNQVVIFVKSVSRAAELNKLLCECNFPSICIHSGMTQEERLTRYKNFKEGHKRILVATDLVGRGIDIERVNIVVNYDMPDSADTYLHRVGRAGRFGTKGLAITFVSSSSDSDVLNQVQERFEVDIKELPEQIDTSTYMPS

SEQ ID NO: 70390 - protein, 248 aa, Zea mays subsp. mexicana
  Clone ID: UC-ZMFLTEOSINTE41B11_FLI.pep
AASRRPVFFFGPRRRPDSGQDRTWARRRRSATESGARGAPRRTRRTDNAVKNHWNCSLKRKLAGGAVASGSAVSAEDAAEAEARRGKMMMSISPPDSPSGSGSGSDRSDLSSHGAGSGSGQIYRPVARSGGFEPADCAMSRPQEEDPLTALSLSLPGTDQRFHHHSAAADSHFQELPPSPSPPAPSASPFSPEFAAAMQELIRTEVQRYMASAGLRAGCGAVGAADLCMPQLVDGVMRAAAEQVGRMQ

SEQ ID NO: 70391 - protein, 482 aa, Zea mays subsp. mexicana; identical to SEQ ID NO: 56456
  Clone ID: UC-ZMFLTEOSINTE098F12_FLI.pep

SEQ ID NO: 70392 - protein, 350 aa, Zea mays subsp. mexicana
  Clone ID: UC-ZMFLTEOSINTE109E08_FLI.pep
SWSLCPSDDLPLASFLLLPQSPVPTRCALAMDPSSEIILDTPYFRIYSDRRIDRLMGTETVPAGFDPSTGVTSKDVVIDSDAGLYVRLYLPLPDTVAAAASPPPNVNDSKTKLPVLVYFHGGGFVTQSAASPIYQRLLNALAARAGLLIVSVNYRLAPEHPLPAGYEDSFRALEWVAASGGDPWLSRHGDLRRVFLAGDSAGGNIVHNVAMMAAASGPRVEGAVLLHAGFGGKEPVHGEAPASVALMERLWGVVCPGATDGVDDPRVNPLAAAAPPRPSLRDMPCERVLVCGAELDSLLPRDRAYYEALAASGWGGTVEWFESQGQDHVFFLFKPDCDICHFKVLKQLTL

SEQ ID NO: 70393 - protein, 414 aa, Zea mays subsp. mexicana
  Clone ID: UC-ZMFLTEOSINTE066D04_FLI.pep
LSSSPSIHGLARSRRRPARLLPVVSPSPIASRSQPISQTESIQSYPRVPPSRPDPGSSMGKEGVAAGPAAEGSKSRSECINSSNPYHECSDYCLRKIAEARQRLDDELPDSWKRPPEQRTVHPDCINASNPYHECSDYCFKRIADAKSPACGLEREERQPPADVFAAAGMSDAVEQHRPVDNDPDEQEGAGPDDGYPQMTEKQKKLFELRLKMNEARKANQQAMVAEKKRMEPRGESRGVSKQKWLDDRKKKIGKLLDSNGLDMKMAYMLDTQETAEAKYKKWEKEPAPYGWDVFNQKTLYDAYKKRTKNIEVDMEAYNKAKEADPEFYRDASSLQYGKVSNVPEENIDKMVKELREREEKRKSFSRRRKFNEDKDIDSINDRNEHFNKKVERAFGKYTLEIKNNLGRGTALPD

SEQ ID NO: 70394 - protein, 231 aa, Zea mays subsp. mexicana
  Clone ID: UC-ZMFLTEOSINTE056E12_FLI.pep
YNRTVTRSSLLSRSHGRGASLFRSSFSPLAAADGGCLPPSLCCVLLVLARPAASAVQRTDHHPVVHGGAPRRAGGVGAVGHPAFPAQLLPALSPGRRRCAEGRVGSAACGRRRRRRGAGLAARRRGDGQRRRPQHGDAPRHGGRRRALRGRRRRGRRGGEGRVLAELAEAGVRARPGHRVVPQLVQKPHARSATCVQRPACCAFCLETDARALFCLVLRCLSLSLGEDEKA

SEQ ID NO: 70395 - protein, 195 aa, Zea mays subsp. mexicana
  Clone ID: UC-ZMFLTEOSINTE067E11_FLI.pep
DVFSHDAASRVLFLLRVRCRIGVDGGVGRHGVVLLVGGRVRDRRHRLVMAAVAPTAATALAAAALFALLALFATTVSAATVHHATGAPVAVPVALLLVVAGADAEQLRVAEAAPEDGCERDGVDSIADDGDLVALHRGGRHTVHSHSCLEGLPPLPLVIQGQLEHNLLLAHLCSTEPGRTTVLDWSVLGVDSISC

SEQ ID NO: 70396 - protein, 282 aa, Zea mays subsp. mexicana
  Clone ID: UC-ZMFLTEOSINTE098G04_FLI.pep
HCSAMDHGTVSGPWCRQSLGGDEGRRRWRAVNGLDEPVGLRQRLHGRQREMADGGAPAAHLLHGEQRGDGVAEDALPGDGQRLAPVEVPAGGGREDGLHRGLAVPDQLGDEVGGEEGLPQHPRDDGEAEHAAGALVELLEDLGEARVVDAAVVEQQHHLAVQVHHLAPDARQRGLGPARTPDALLELPLPDHELLLPLQEEGVELVDLRVQERQEVGLRGAGRRRIRRRPAGGHGIHAPLQLLVVEELAPPLRQALLDLLLEALAELHRSVMSRKIFFDLFD

SEQ ID NO: 70397 - protein, 208 aa, Zea mays
  Clone ID: JC-ZMSHLIB3587P009E06_FLI.pep
LASDPQFLLRISHSAQRRCEGRGTRRKMGLAFGKLFSRLFAKKEMRILMVGLDAAGKTTILYKLKLGEIVTTIPTIGFNVETVEYKNISFTVWDVGGQDKIRPLWRHYFQNTQGLIFVVDSNDRDRVVEARDELHRMLNEDELRDAVLLVFANKQDLPNAMNAAEITDKLGLHSLRQRHWYIQSTCATTGEGLYEGLDWLSSNIASKA

SEQ ID NO: 70398 - protein, 433 aa, Zea mays subsp. mexicana
  Clone ID: UC-ZMFLTEOSINTE059A07_FLI.pep
RYYSTPLYLPPHAPVLARPPDRTHARHELAAMSWFARSIAATLSSAHSDDDESEPHSGDNSPPRASDPTSAETGESDEQPDTPSRGVKGDISELTESLTRRFWGVASFLAPPPTEGETEEEEEETAAAAEVPQSPRIDGIRSDLAEIGGRVKTGISMLSNAGAVAEISRFASSFLPFGPGDQGEEEEGEAVGVTEEVVVFVGNISKHPKTWLDFPLFVDDRHADDFELSDEQYGHAVAIERLVPSLSYLRTELCSTNMSEACFWKIYFVLLHSKLSKQDAEILSTPQILEAREGLLQSSPTKHKLLSESRNTTEPEESELSPASIQNKHGVSEAPSFQELTSDPVPNVEADKHPISSTEAEIVDKSVIQEELVMKTEAKSLPTEESNPDPADDDDEKEVDDWLQDVDSVPSKTGNPTAVGEEEDVSFSDLEDD

SEQ ID NO: 70399 - protein, 94 aa, Zea mays subsp. mexicana
  Clone ID: UC-ZMFLTEOSINTE91H06_FLI.pep
FSEAPVTMRSKGKRPAQWTTYFLGFLLLCVFSGVDASTLRFLASCFAFLAATAGRLALPAVAPVSSVFLCFPWLLGCWVTFTFFTTPDLLDLRP

SEQ ID NO: 70400 - protein, 246 aa, Zea mays
  Clone ID: JC-ZMSHLIB3587P019G01_FLI.pep
HLPPRRPSLSLSSAAQSPNRGGSLALQGAAAAPGFVHRLVCLPPAPPRRPMALLAPAISGEVGLRLLLAPLSSNIVMRTASCAVGIGLPVYSTFRAIEKKDEQEKERMLLYWAAYGSFSIAEVFADKLLSSVPLYYHVKFAILVWLQFPSNSGSKHVYKRYLRPFFLKHQAKIDRFLNILSKELTKFVSSHEDEIRFIENMAIRGATTANHIVNGLDQPEETQAVNTIEGPNTTVTEEAGVSGTET

SEQ ID NO: 70401 - protein, 254 aa, Zea mays
  Clone ID: JC-ZMSHLIB3587P020D10_FLI.pep
TPAAATATRTAISTATLATSELSKSRGRDTNGAVHVARRDHADAGGPAAQQGHGAGADAERRDAGVPAAHGHGRAGAAGRLRLRLRRLVPVRRGQGGVRGPRPGAGRRGGAARGADLLRAPGRRAPPRPAARGRRGARRPGLRRALRSPLLRARQAEQALRRRRAPRLRAAASAGGGGGARAVGDIRRGAQGSSGAPALALRQAAPAVRVRPHGDPRVRDGERVARAQTGGDDGTVTWPCVCWQDLDSSGSRGR

SEQ ID NO: 70402 - protein, 304 aa, Zea mays
  Clone ID: JC-ZMSHLIB3587P021F10_FLI.pep
TQIWSGAGGGVIAGVLIAAGGRGMVGVLSNRVDRDDLKAGDHIYTWRAAYIYAHHGIYAGDGMVIHFTRAAGHEIGTGTFLDWFLYSSSPAATEGPPCQKCGHLVKSDGVITSCLDCFLDGGSLYLFDYAVSPAFFLAKARGGTCTLAASDPSDVVIHRARYLLDNGFGMYSLFKNNCEDFAIYCKTGLLVETAFSVGRSGQLASLTAAFSAVASSPLRFLTTSAGGLAIVTSGMYCVGRYVSDIGVRRDVVKVPVERLVEQNVTWIPQCVATETDIAAGAPQQQLEVPCAVAEEASVIQPAAP

SEQ ID NO: 70403 - protein, 216 aa, Zea mays
  Clone ID: JC-ZMSHLIB3587P042E07_FLI.pep
PSFSMVPWMPAPLLDAPARFHGRRCPSHLLGGRPRPYNLASLDLLRAPGCCFLHVVWLPGACSRPRPWSSSGHDTPSCRALDVFDEIPQRAPTRSAQPLRDVTNSARYRCRASCIVCSTKIPSPWTAHAQLKSDRPGTLDDYVNWRAWIRMDHKVALMDPSRYGRLDQVSGLLMLTKRTSSNHTNLVYPRQAPVHLPPPCCFKNFYHLYAALGDRS

SEQ ID NO: 70404 - protein, 213 aa, Zea mays
  Clone ID: JC-ZMSHLIB3587P025A12_FLI.pep
KLAYRISLDPKHTKLLVFYNTAQYYRAYYGHKTDPRAVLIGLLLIVSAFQYINQLTRYNQAMKSVKQTPAYKNRLKALEYERTGGIASKKKGIKQVDKKVEEELSNEVELQIHGVEKPSVWRLFGVQFILWPYSVGKALTWKICWFWRYRVKKLPYTWEDACYLTWISLQIPANAWKNMDESRKEDLVRRHLWEKSNMERYTSGTRKEPKRRR

SEQ ID NO: 70405 - protein, 340 aa, Zea mays
  Clone ID: JC-ZMSHLIB3587P025D03_FLI.pep
AAGFEKSRERALSLSTSSASPSLKAAEGERPGCSSRTPTATSATHHGATKQQVRQGKVSDETKMVQEELPQAWWFDSHNLARPSPWLNSTLSELDDKTKQMLKLIDQDADSFAQRAEMYYKKRPVLVDMLGDLYRTHRSLAEQYDLLKHGSGTRHTVFGLSSCTQSRSSTNGRTTPRSSCSASTYDSESEVDDPGQEEYEAEQLARAGMAKTESPPPPPEQQQQEQREQAEQQMRAEIERLKAQNAALQKAAEESAAALRAELAGKDEEKREVIRQLASSMDVMRQENLTLREHISRGSSKRSSAPRAGAAFDLRKVARGLFSARLFTAHCRPTGPIVAL

SEQ ID NO: 70406 - protein, 370 aa, Zea mays
  Clone ID: JC-ZMSHLIB3587P027B09_FLI.pep
GAEESAYFGGAGAAAAAPAMDWSFASKPGAAPALMSFRSASFPQFSSFDGAKNPAPRILTHQRSFGPDSTHYAAAHRTQHALNGARVTPVSSPFNQNSPMFRVQSSPSLPNGTAFKQPPFAINNNAAASSTVGFYGTRDVVRPKTAQLTIFYAGSVNVFDNVSAEKAQELMLLASRGSLPSSAPVARKPEAPILAPAKVTAPEVLHATQMLFQKPQHVSPPSSAISKPIPGILQAASLPRSASSSNLDSPFPKSSVPFPVSPVSQAPRAQPATIAATTAAAIMPRAVPQARKASLARFLEKRKERVTTAAPYPSAKSPMESSDTFGSGSANDKSSCTDIALSSNHEESLCLGQPRNISFIQESPSTKLQI

SEQ ID NO: 70407 - protein, 57 aa, Zea mays
  Clone ID: UC-ZMFLB73263D05_FLI.pep
NHALFHWQQSQYKTEHRTDTMLITVHTTTGILQQPVNYAESLTSDPYIRGAVPTRIS

SEQ ID NO: 70408 - protein, 254 aa, Zea mays
  Clone ID: UC-ZMFLB73126E12_FLI.pep
VQANTVVQSLNAFSSVAHISGMGLKVVPMIAPFSTLRAVNLSSNLIVHISPGSLPKGLHSLDLSRNKIASVEGLRELTKLRVLNLSYNRISRIGHGLSNCTAIRELYLAGNKISDVEGLHRLLKLAVLDLSFNKITTAKALGQLVANYHSLLALNLVGNPVQANIGDDALRRAVTGLLPSLAYLNKQPVKPQRIAREVATDSIARAALSGSDSRSIRKRTSRRLTQSPRSSSLTRARGGGGGGSPTPRNTSRRR

SEQ ID NO: 70409 - protein, 239 aa, Zea mays
  Clone ID: UC-ZMFLB73229D02_FLI.pep
RRRCSSHIPREDACSSPIDTMAVFSDLHTADGLKSLEAHLAGKTYVSGDSITKDDIKVFAAVPSKPGAEFPNAARWYETVSAAVASRFPGKAVGVNLPAGSAPAAAAPADEAEDDDDLDLFGDETEEDKKAADERAAAAKASSKKKESGKSSVLMDVKPWDDETDMKKLEEAVRSVQMEGLTWGASKLVPVGYGIKKMTIMLTIVDDLVSIDTLIEDHLTQEPINEYVQSCDIVAFNKI

SEQ ID NO: 70410 - protein, 82 aa, Zea mays
  Clone ID: UC-ZMFLB73229E03_FLI.pep
KLDFLFGAHAWVPYVLPVLLEHIYWTTMHKKPSFHKLLGLYGTNEAIDAGRQADSEVKAFQNDIPSGREKKIKEIAGYFRKK

SEQ ID NO: 70411 - protein, 130 aa, Zea mays
  Clone ID: UC-ZMFLB73186E04_FLI.pep
TKEFLNTGMRSLDEHSGFHRKLKHFAEQCQTDVSLLQEEEKKIRSLVRGTVDYFHGSTGKDEGLRLFVVVRDFLAMLDKVCKEVKEASKVAPKKTKTAQPSQASFNDPRRKLFPAIQDLRADSSSSDEDD

SEQ ID NO: 70412 - protein, 193 aa, Zea mays; identical to SEQ ID NO: 48053
  Clone ID: UC-ZMFLB73230G02_FLI.pep

SEQ ID NO: 70413 - protein, 55 aa, Zea mays
  Clone ID: UC-ZMFLB73238C02_FLI.pep
RHAMVNLGFLCGGASLLIMDYWLPFGRLMSGAAILANFGSTCFLLFEQGTKIFKV

SEQ ID NO: 70414 - protein, 151 aa, Zea mays
  Clone ID: UC-ZMFLB73199H07_FLI.pep
SSPLPTSQASASSPPALSPILPRASRSRNHHSRSQARRVPTRAAGFIGMAYVDHAFSITDDEDLVGGAVGGPRGAPVKEIAFAAALLAFGVLGVVAGSFMAAHQVGGDRAHGIFFAVLGGVMFIPGFYYTRIAYYAYKGYKGFTFSNIPPI

SEQ ID NO: 70415 - protein, 153 aa, Zea mays; identical to SEQ ID NO: 44881
  Clone ID: UC-ZMFLB73200E02_FLI.pep

SEQ ID NO: 70416 - protein, 173 aa, Glycine max
  Clone ID: 700734791_FLI.pep
MEPIEQGSQPEKEKWKGKATTEVKGAKAEQVWPLLEDFFGLDKWFPTLSTCIPVEGISGQPGCVRFCAGFKTPVDDGKQTVNWTKQKLLSIDPTQRVFSYSIVDGNVGFHSYVSTLKVLPMAEGCEIEWLYEVEPVEGWKLEHLDSFIDTGLQVMAQRMQAALKTMEEAVFMA

SEQ ID NO: 70417 - protein, 215 aa, Zea mays
  Clone ID: UC-ZMFLMO17332B09_FLI.pep
GKLSFAAGEESPKLPLPSPGGSLTRSGSGSLEGGAVALFNMEFTNGEFTDSEKKKIMANERLAEIALTDPKRVKRILANRQSAARSKERKMRYIQELEHKVQVLQTEATTLSAQLTMLQRDSAGLATQNNELKIRLQAMEQQAQLRDALNEALTAEVQRLKLATGEVTDGRMPKGLQQQMNSQMLQIQQLQVQQQAPQAQQQGQRQQQQQPQKSA

SEQ ID NO: 70418 - protein, 186 aa, Zea mays
  Clone ID: UC-ZMFLMO17333B08_FLI.pep
SSGEIHANPWNFASLCWLFSDSENPMGDVSLNRPVKAEPTAGGIAKGNRVLDTMSAGWTDERHMLYISSMEASFVDQLYNHGNHPHDANGAGFKVLRRGVWEYIEYEKTSAPVRSGAKCCVPANPWIRHFRPRDCGSNAQSDAVEASVGDHESGTQASRKSPSVSHGRERGACKGEPQILHESTGD

SEQ ID NO: 70419 - protein, 288 aa, Zea mays
  Clone ID: UC-ZMFLMO17334A01_FLI.pep
APTRIPDSLLVRSIPAPNRSNRVLAPCSVPQSGRLAPASRGSWAWAEAMDKPVAPGIIKEELLEQQPPTQDGVGGGGDAPRPMEGLHEVGPPPFLTKTFDLVEDPATDAVLSWSRAGNSFIVWDPHVFADGLLPRLFKHSNFSSFVRQLNTYGFRKVDPDRWEFANEGFLRGQRHLLKMIKRRKPPSAVAPLRQQRAPASCLEVGEFGFEEEIDRLKRDKNILITEVVKLRQEQQSTKDHVRAMEERLRVAEQKQVQMMGFLARAMRNPEFFQQLAQQQDKRKELEDT

SEQ ID NO: 70420 - protein, 116 aa, Zea mays
  Clone ID: UC-ZMFLMO17354B05_FLI.pep
LWYFQLKSQASHDLMNTIQYSTAFIDHSSSDDSQFLSLPPKNRGQGTQICPDSSRSPGRGQLKILFFRRNKTKEKNSTEKGRRFSLSLFSLSAPRRRKTAKTPGAGPQTDRRTRGK

SEQ ID NO: 70421 - protein, 239 aa, Zea mays
  Clone ID: UC-ZMFLMO17360H03_FLI.pep
NSAFKEFDPHTCTWSIVRTYGKSPVSRGGQTVTLVGTTLVLFGGEDAKRCLLNDLHILDLETMTWDDVDAIGTPPPRSDHAAACHADRYLLIFGGGSHATCFNDLHVLDLQTMEWSRPKQQGLTPSPRAGHAGATVGENWYIVGGGNNKSGVSDTLVLNMSTLTWSVVSTAEGRVPLASEGMTLVHSNYNGYDYLISFGGYNGRYSNEVYTLSLKSDFKSTTKEETVSDLGSSNQRLKW

SEQ ID NO: 70422 - protein, 228 aa, Zea mays
  Clone ID: UC-ZMFLMO17363C06_FLI.pep
PTAFGALFGKPAAGRRPDLFLGFSNVQGKTKVDKITSSVVLPFHHFSGGAKLPSAVLSAKESLHSEPDSIQHSDPACQLEEVIQLDMGTDEQQPPENGNEDDGHCETEDTEMSKSPSGDPSVTEQRFRSLNEERNVKQIQKTPREFEFSVPVVPFDYAEARKNLVSSLPKAERRKDDAVARAINTDSGDKQRGSKKPPGGGENEGNFQHPRRRQAFPPSGNRNATYHQ

SEQ ID NO: 70423 - protein, 109 aa, Zea mays
  Clone ID: UC-ZMFLMO17363E04_FLI.pep
GGGLPAVVVVCQRWEDNLSHWVTGFAVDVFGLRLKWDGTGATPCSQFFNFLGSRRYKKTTLVFTSSLRDSHLTTRVTVTVPFHPFVYLVRSSQWFAILVALANENCTRT

SEQ ID NO: 70424 - protein, 239 aa, Zea mays
  Clone ID: UC-ZMFLMO17365B07_FLI.pep
MPRRSRRRYCFPCGIIQVINTSRRMHSMQKFADVRWHFVRNKNPLCIAGLWNELKTGTPHSINQKRRISGIKIAPENRSLEGQKWYQSVFFCLPIFLSESGFVCDQFQIIVSIRTLSRQSICRLITDSTRLTLHIKVLDNMVNSFLVTWPSNRRKKIDIADQRNSSGPRLVRESVGLFILHLEGHRRKSLFISHQNLQLSEGQLKKGKASDAYAHKLKVNHVPVFVQEKGSDWAVDLAT

SEQ ID NO: 70425 - protein, 201 aa, Zea mays
  Clone ID: UC-ZMFLMO17367A08_FLI.pep
YDLCISGPRELTGAVDLISHYKLLPHHDFFCKKPLPLAISDTHYLHNVVGDTEIRKGEGMELDQLVHNAYLRDKPAYIQPFDMETLGQAFQLRETALVDLPSTEKGIPTISGKPKSESKDKEKKHKRHKDKDKEHKKHKHRHKDRSKDKDKDKDKDKKKDKSGHHEKKRKHEGTEDSVDVHKHKKSKHKSSKTDEMGNGVS

SEQ ID NO: 70426 - protein, 158 aa, Zea mays
  Clone ID: UC-ZMFLMO17376E11_FLI.pep
TLLHLVIFSLFHISPEVAGHLLNNPQPLLLLVRAMLILVIKMPMSPPPSLSCLPLCWLAGSTVRRATVCTVLKVLLTGLLVDSASRVSRYADTFSPSLDSVLSALTITAPLLAGVRRAYAQPRHRGTYLASKPCSTSSHVTIVPFIRSKVRPPSFDLQ

SEQ ID NO: 70427 - protein, 315 aa, Zea mays
  Clone ID: UC-ZMFLMO17391E11_FLI.pep
KKSLAPAAVPSRHPLPQQRSRRPKPARVSSGWPPPRQTSPMGDNKSPLSLSPMGGRDRDRDRELLIPVSGGGSAPGVDDEDADRASSASAALSSSGREAFHKVVRSWASKKFMTGCVILFPIAITFYITWWFIHFVDGFFSPIYAQLGINIFGLGFITSVTFIFLIGVFMSSWVGASVLSLGEWIIKRMPLVRHIYNASKQISAAISPDQNKQAFKEAVIIRHPRVGEYAFGFITSSVSLQSYSGQEDLYCVYVPTNHLYIGDIFMVNSKDVIRPNLSVREGIEIVVSGGMSMPQILSTLDPEMILRDRTGPSRS

SEQ ID NO: 70428 - protein, 218 aa, Zea mays
  Clone ID: UC-ZMFLMO17399A03_FLI.pep
LLPSSMQRPNAPSACATITFAEALRREMEYRKWVERTHPHLLVGICGAPEMQRDFSAGSVPDAIKRKLAAETSVPPQQSSFSCVTGQKQPQNWYPTKKKVKVPHLPSQILQCPRPNVVPSFWCKICKVDCVTEFNFSAHVGGKKHKAKKLEILGKRNAGGPASRCAGNRSAGQSGLAVSRSRSSEQNVAGSVAAGPNCDMLSESRTNGTEGNGCTVQL

SEQ ID NO: 70429 - protein, 130 aa, Zea mays
  Clone ID: UC-ZMFLMO17399E08_FLI.pep
RGYGESDGYPSQKGITYDAQAALDHLAQRNDIDTTRIVIFGRSLGGAVGAVLAKNNPDKVATLILENTFTSILDMAGIMLPFLRWFIGGSSSKGPKLLNCVVRSPWNTLDIVGEFIAGQTTHSLPFWIAR

SEQ ID NO: 70430 - protein, 282 aa, Zea mays
  Clone ID: UC-ZMFLMO17425F04_FLI.pep
LRPRGQRGFWDGRWEIWRRQRRAGDQTMRPVFCGNFDHETRQYDLERLFSKYGPISRIDMKLGYAFIYFEDERDAEDAIRRLDNVSFGYNRRRLSVEWSRQVEPVPKSRDRPTGDVKPTRTLFVINFDPIRTKVQDIEKHFEPYGKIANIRIRRNFAFVQYETQEEASAAVKNTDKSTILDRVVTVEYAFRDDDGDRDDRYDIPKQGAYDRRGGSPYMRSPSPRYRRDYGPDYGRRGRYPGYGRRDGAMYERRSPVYDRYGGGRSPAYDRYDRRRSPGYDQY

SEQ ID NO: 70431 - protein, 284 aa, Zea mays
  Clone ID: UC-ZMFLMO17H01_FLI.pep
SHAQPDDLIDFYHLKSRKGMSQLELEDEVHDDLKAATGGFTKDADDANKLNRILQLTGFSDPVYAEAFVTVHHYDIVLDVTVINRTKETLQNLCLELATMGDLKLVDRPQNYTLAPESSKQIRANIKVSSTETGVIFGNIVYETSNVMERSVVVLNDIHIDIMDYISPATCADVTFRNMWAEFEWENKVAVNTVIQDEKEFLNHIIKSTNMKCLTPPSALDGECGFLAANLYAKSVFGEDALVNISIEKQHDGKLSGYIRIRSKTQGIALSLGDKITLKQKGGS

SEQ ID NO: 70432 - protein, 182 aa, Zea mays
  Clone ID: UC-ZMROB73014A12_FLI.pep
DCVTVSVLQALLGGGGKFSWGRQGKGLHSRLNRLVNEFDQIKSISAFKDVHSNTGIFGIHTSTDASFVPKAIDLAARELTSLATPGQVDQSQLDRAKASAKYAILANLESQASLTEDMGRQVLAFGERKPAEHLLKAVDGVTMKDITSVAEKIISSPLTMASHGNVLNMPTYESVSGKFRSK

SEQ ID NO: 70433 - protein, 131 aa, Glycine max
  Clone ID: 700845165_FLI.pep
IASSAVRAAIKVKASVIICFTSSGRAARLIAKYRPTMPVISVVIPQLKTNQLRWTFTGAFEARQSLIVRGLFPMLADPRHPAESKSATNESILKVALDHGKAFGIIKAHDRVVVCQKVGDSSVVKIIELDE

SEQ ID NO: 70434 - protein, 188 aa, Zea mays
  Clone ID: LIB3068-030-D10_FLI.pep
QHTCVDSKQKFLHILTLDDSAIQGMGQNRKPENHALFSSPNLDIIRVYDPTSIAPTRMRTSYKLKASINRTEVAARHCLLLLATCLVLVVVRGGTGAAGRCLLRLLGRLLLQSFLVPLAALLRGEPVLGVLGVGLPRRRALTVAVTLVAASHVAGRAHAGCPVAPPSAGENSATTPQVTQRIGPGVLS

SEQ ID NO: 70435 - protein, 458 aa, Zea mays
  Clone ID: UC-ZMFLB73044E01_FLI.pep
ATKFRYSTSHRTAHHDQIPKGPEFDHTFTTHHAKSRRAQLQTTSRADRHSALSRFISLRLDRHNLDLVQHGAAERDAVGDLGVVVGAVEGEAGADAAGHEPERRRLEPAFPGGIERHLLRDVARERLHQHGAVAAVPGVADGERQVVGAVGNGADDLRDGALPPGHQLHRILPRGDREVSRVDEPHRLERLDDPAGQRRRRVLLLGGQQHADRRVPEHLGTDLEAVVLDQVVFGRVRRGQLLDGDGVQQRAARGVLLHAGVGERDLRDGGGGAEAPGPGVGGRAAVERAHGDVGGRRERRRHRHAQGLVLRARPRRRERERVQRPRPHRHVLRRRRAAAEAQRVHAVRHREEHAPGLGTARDVLHVPLHRPPRQRVAPHDEGLVQPPRRRLEVAVDEHAFGVLSMTRRRNRQWGRSGDGERGSSRRRGRGRDGEDQQQRQQHSPRELHCQALPLFRFR

SEQ ID NO: 70436 - protein, 140 aa, Zea mays
  Clone ID: UC-ZMFLMO17002C01_FLI.pep
SNDSESRKGTVLEAELQVDDNLVQEDEFVVAKEDKKPAVATDASVQVDWVKTDEANPQKSKLHEEMEVLDELLGKENMENSGITSTDENYAEKAGGDDILFEDGVLIENGLATAYEHDLLWGWKALQQLLMSLGFKMDTT

SEQ ID NO: 70437 - protein, 203 aa, Zea mays
  Clone ID: UC-ZMFLB73238G04_FLI.pep
YTMFLITCIMMYSIIHYVLRSRNVVFAYLPNGTGRLTGAQHGRAVCVPGLRGAAYHGHDQRAPSGIDQRRRRRGARVRRRLGPHLGPAHRARGPGPQPRVDAIDVEDVAAARERAHLLAVRELRQTHRAVRRPGPGAVGGGARPVVVRPADAVRGDRQRGERGRGEPVAGAPPGEGAEGAADAHGQAAPSARHELVQEQADED

SEQ ID NO: 70438 - protein, 111 aa, Glycine max
  Clone ID: 700868082_FLI.pep
VGRPIGEFQFIQGKIADMYTSLQSSRSYVYSVARDCDNGKVDPKDCAGAILCAAERATQVALQAIQCLGGNGYVNEYPTGRLLRDAKLYEIGAGTSEIRRMIIGRELFKEQ

SEQ ID NO: 70439 - protein, 323 aa, Zea mays
  Clone ID: UC-ZMFLMO17097H08_FLI.pep
LCLTYKLLIDRVLWMELDQLLADGLVDKARAAAGARRRQRQRRSLLRRGLDGAHVGAESRGDHRVAHAPVERRLPHGRRRRLALGARGRSSPRGPLLWVLVIRMPRRHRQVQVGGVQTRTRTRGAHQVPVALPLQLPQPRLVVVVEHERPGRGTGTGAGRERADQRRQIRGREALQDGLLHGRAVDSLPVAAGPAAPAGAAEPSDDVAPGTLPRDGGGEVGGVVEGHMAGAAGPRQGRRDLVRRGAHAVCHDGLKPLHAAKRRLHGHRAQVHALLAVDEDNRQHACVLHVRRTLLPASAAAGHKPRIETAATRTGSICLGCCE

SEQ ID NO: 70440 - protein, 247 aa, Zea mays
  Clone ID: UC-ZMFLMO17426F10_FLI.pep
ASAAGAMNSSKQALIYSFVAKGSVVLAEHTAFSGNFSTVAVQCLQKLPPNSTRSTYSCDGHTFNFLVNRGFVFLVVADEAAGRSVPFVFLERVREDFMQRYGSSIDEEGQHPLADDADEDDFLFEDRFSIAYNLDREFGPRLKDHMQYCVNHPEEINKLSKVKAHLSDVKGIMMDNIEKILDRGEKIELLVGKTETLQSQADSFHRHGRELRRKMWLQNLRFKLMVGGGIAALILIIWLMVCRGFKC

SEQ ID NO: 70441 - protein, 83 aa, Zea mays
  Clone ID: UC-ZMFLMO17219G10_FLI.pep
KALEKKKRVSTRNPKETTIAQHTPYITTTSRLTSSSDRSGADLPWSGVLGSECTDNRVPELTRISQAQRMAGPRHSQVLMAYC

SEQ ID NO: 70442 - protein, 195 aa, Zea mays
  Clone ID: UC-ZMFLB73346H09_FLI.pep
ENHGAGAPWRDPKLITTLFSLSLSLPLFSQPYRFIYSSVEPIGPVVPLCRAWVVDAARHVETRTEPELRRAGGDVAHLAHEWRVVADEELLLLLHWRLLLLLLHHAVVDVVEGSVALYEETLVHLDPLLGHRVWPLHDGDAVAARVLVRHEVVVVHVHQLGDGPLPVHGQAEIQTVQCLVGLAEGRLEGLWLWRC

SEQ ID NO: 70443 - protein, 521 aa, Zea mays
  Clone ID: UC-ZMROB73035F03_FLI.pep
KGKQESSSDGSSSDDESDDDVKPAAPLKKTSVAVAQKKKGDSSESDSDDDSDEEVPPKSKAPAATIKKEDSSESESESDSEVEDASKTQPAKRAASKMKDESSDDSDTDEDEEPPQKKQKEALSAAKKESSSEDEDDSSEESSDDEPTKVEEKKAPKVSENSGSEDESSEDESDKDSEEPANTPKKAAVHASEKKTATKEPKTPTGSQSESTEVNTLFMGNVPWKAEFDDVKEFFEDVGEVVDVRFPTHDDGNRKGFCYVEFVSAEAAAKAYKEKQSKELHGREVRLDFAKGRSTQTPRSGNDGSFQKAARGNSSSIFIRGFDKNLSEDEIRSSLEQHFSDCGEMTRVSIPTDHESGAIKGMAYIDFKDQDSVSKALELSGSDIGGGYELYVDEAKPRGDGQRGGGRSGGRSGGRFGDRSGGRRGGGRFGERSGGRDGGGRFGGRRGGRDGGRGRGGRGFGNKHSAGTPSAGTTHPVIVKFTAFWFEQKNCRPVVSGFKKLEVTAVLPLICTGKKTTFGDD

SEQ ID NO: 70444 - protein, 511 aa, Glycine max
  Clone ID: 700559531_FLI.pep
ETKYIDMVKHVINIRVLGVLEELRLSERSIYKVPCTLRKVKEEAYTPLCISIGPIHLGKQELEPMQEHKLRYFQFFLKRVSYEAMKTYKHYLETNEKQIRQCYAEKFPGMAQEKFVDMMLLDAVFIMELLLRNCELKSQSFKHEQKHKESKSFRGRNSEDLIMTQSWLSRNITRDLILIENQIPFFVLQKLYDDVVTCVKEKEEQHTSFVDLTIEYFAFYDSQMSSLNENETKKHYFCGLLRKSKSKDESPKPFTVVRRSGSEEPCISKSEDNGSKETCKSENKNSCCKPEHFTDLIRWFYLPTECNIGHADQVLRTATKLQDSGVSFEKDDMDGRLLDITFDKTPILSSFLCFGCSPLLNQFKARVRIPQLKVDHNTECIFRNLIAFEQCHYPEKPYICNYVSLIDSLIHTQLDVELLVEKEVIVHELGSHKDVASLVNGLCKHVVTNSTCYSDTINKLNDHYMNDWNHTVAALRLVYFRDLWRASGTVVGIVVLVFAVFQFLRVWRYLF

SEQ ID NO: 70445 - protein, 156 aa, Zea mays
  Clone ID: LIB3116-021-A11_FLI.pep
HDRTKTMDDSSMLSEAMVSGKKKRRGAHTPRLQIAVLIILAPCLVYPQKNDAIHGNAKNKHCLMKLFQTARGASGDGGVHVLALINFGRRHRAGAGICLAYITSSDTHPKSGPSSSVTAGRTGAGDAWAFLKLSSRIASISSGQALAYASPTSPAP

SEQ ID NO: 70446 - protein, 116 aa, Zea mays
  Clone ID: LIB3356-036-C11_FLI.pep
SRTSSSTSGTVTRRPADVERAGAPEMTALASTTATATPLELAQLATMRLTACAADSCSTAFRCAVAAGPHAPEPAGVTAASSEAATGVAATAAAGARGGHASMGLGFGLTFPVWPL

SEQ ID NO: 70447 - protein, 171 aa, Zea mays
  Clone ID: LIB36-016-A3_FLI.pep
RSRSGQQEVLHRACLSPQGHCHRRRGRCRQRPACRRRRHGPGGAAGRRRRRARLRAQPVHRQGRRHHHLQEQRRLPAQRRVRRRRGAERRRRLQDLAGGVPQRARRDLLRHPHRAGHLRLLLRAAPRSRNGRQDHSQLKLAIHSMHLDLYVLRPSMDDASISTCFPHMYNN

SEQ ID NO: 70448 - protein, 259 aa, Zea mays
  Clone ID: LIB3245-223-G6_FLI.pep
LMATTIWIWTATTIWTTATTRPGRTHPMHTPYSILISKTSLRSSSLIFGTVTLSTPFFMSALIWSILKAWEERPMRQLYRAGPLSSSPSRSLPASPLITRASFSTRIFTCSFPSPGIGTFSCTASPSSFETHHPRAEKPAMDAAPPSPVSASIRSSLAASSSRSSTSPVKILGMERSRSPWRSAAASLMPSSEERGGATPLPKRWRAETAVFPQGDGEARMSLRRTGSCGTSTEATPGAMDGKPLSRSLLCDWGFGFGF

SEQ ID NO: 70449 - protein, 347 aa, Zea mays
  Clone ID: LIB3607-011-E10_FLI.pep
MSFRSIVRDVRDGFGSLSRRSFEVTLASIYGLTGHHKGKTQSSSHVLDDSPSIIRESRWANLPPELIRDIIRRLEADESTWPARKHVVCFAAVCRTWREMCKEIVLSPEFCGKLTFPVSLKQPGPRDGNTMVQCFIKRNKSKSTYHLYLCLSNVVTSESGKFLLSAKRHRKTTCTEYTISMDSGNISRSKRTYIGKIRSNFLGTRFLIYDTQPPYNGAVVPPAGRTSRRFNSTKVSPKLPSVSYNIAQVSYELNVLGTRGPRRMRCIMHSIPASSVEPGGTVPGQPEQIVPRALEDSFRSTASFSQSFRSTASFSKSIMDSSMDFNSARFSDIAGSSARFTGVPGSS

SEQ ID NO: 70450 - protein, 131 aa, Zea mays
  Clone ID: LIB3245-118-D7_FLI.pep
PLFWNAIETASASTVPPEHLVRAVPRGGLEGGVDVDDGEVDLRRVRHEDRCRPRLAEPRLRRPTRPPRLIFRLPVHFHPLLVFLLPQPHPLHRHDAATPRVVGGRSPPRTPPFSLLGVRQWFGWFGAGGNG

SEQ ID NO: 70451 - protein, 117 aa, Zea mays
  Clone ID: LIB3592-099-F9_FLI.pep
GASRDVRQHVVGGAHGHADARAAHRLQRALVRRVQPHRRDAVRLVHAHHRARRRQVVGAHAVAYADGLSTLWDGCKDAEEQCRGEHGGGYTLPACHSLSKPLYLCCLERTHAAAAAG

SEQ ID NO: 70452 - protein, 127 aa, Zea mays
  Clone ID: LIB3596-046-H5_FLI.pep
PIPHSTHSADPVTRSPQAEHRSRTRKDAGHLPEAGGARAAGAQQPPRRRVAQQAPEPRRDPARLPRRAPGRRLLRLLRRRRRARLRRPLLLRHRHLPADVLRPGPHLLRLPGPPRQPQRPHPPVRPV

SEQ ID NO: 70453 - protein, 142 aa, Zea mays
  Clone ID: LIB3357-062-B11_FLI.pep
AHVDLLRDLRRGGVQWPADARAASGSCRRRRLGDDDGEVDDEHLVDGGHEGGGERGVAVVGHVGGEVGGGGEGEREDVREALRQHLLVQHVLAPLERLDRVHPGGEVGHALEHVVHHDALLELGQAQVLHLPHVRRRRKPSS

SEQ ID NO: 70454 - protein, 131 aa, Zea mays
  Clone ID: LIB3066-038-E9_FLI.pep
VAGVVLLDEADGGVDEEEDDDADEVLPVGRLASAVGEHDGHDGGGLHDPGERVPHEAQELEQLALRLLLQLVGPEDLEPIVSLGAGEPLLAAFQVLEHLLHRDGLEVDGLVADVLEGDGRHCRLLVDAAAS

SEQ ID NO: 70455 - protein, 241 aa, Zea mays
  Clone ID: LIB3078-050-C7_FLI.pep
RTSACAARWSTWVKGTTSKSLARRRPSLMSPSTTKLVVAAQQRALRLLERGVVVGVEAVDADDAVAAFAERQRAVRAHEARGARDEHGQPRGRPRRRPPPRRRRRPDLALPVQPAPGRPDLSRPVLVMSHSSNRLDQSPAHPVLVMSRSSNRLDQSSSASSPAPVKAPMLVMSGSSNQLDSSHPSLSPTAAAAAALVLVLSNSGKRMDQVGRKKYVKQVTGRHNDTEAVLCCAEPVCARPW

SEQ ID NO: 70456 - protein, 1145 aa, Zea mays
  Clone ID: UC-ZMFLMO17035F11_FLI.pep
EIETAPVHNAKTVPSEAGAISPVVAEGKACAAADLSSLKASEEAGSQNDIDNGRLETSSRQANADSMKLEISDDLPVKKWTYHDHKSDLLSSVTSANSAIAKEINEVLFKSLPADTPRLDLFASSHLLSQRKSDLIVKERLGVCKTRLRLKEQMLTMKFKAYCHLWKDVQLFSANKQRSKSNKRTDQSNRTSQIGSQRQRSSNRSRLTMPAGNLSTFSTPEMSDVAMRLFSEFKIKRCRNYLKMPALIIDEKEKEWLKLMNKNGLVEDPVLVEKERVMINPWTQEEKKIFMELLAKFGKDFSKIASFITHKSTADCVEFYYKHHKSDSFREVKKLLDLRQQQPTSNFLGAKSGHKWNPESNAASLDMLGVASVIAAHGLEYAKQVEKISAKSLIRTAYGPIVTSVANKSSDKECIDHVPLHERESVAADVLAGICGTLSPDGMGSCITSSADPGQKISMKRVEHVLSQENDKTVEEEDTLSDQECEVDPVDWNDDEKSIFIEAMNNYGKDFARISSCVKSKSYEQCKVFFSKARKSLGLDLIHQGAADVSMPASDTNGGKSDTDEACAVEMDSAICSTQSCSKIAMDVCPTEGAIGGPNSVIISKQAEAYISNGCNADVKIEEDEKVADKNCSIVDDKRSSDATHEAGPIDINCPGSTDKLQGTDDVVDLVNMHSNSGISSSAKHAVAIHSEMRSTLHSVEVLQTDKGEGTGTDLSWVEECSHHALDNTPMKNGNSGAPAFLASDSGIKDNVRISNITAASTVSPAFTSSYQHSVPGDMPLPKPKPLVTPLTPKDLMPVQFSSVLPDPTAIRFEGIASITTPNFEDTGNRVSGALGAKEMSKYPAFRDPSGNQQSTLFCNIDGYMNHRLTTELPFFSERTASGTVNTSQADRLTQTKLQNGRSSSLCLPNNSDGIQWPRDHEGGLEGSLRPCSRNTSSEGDEQQKRPGDVKLFGQILSHQSTLQSSGLSCNGNKSKPPSPKIDTSVRSMNNPMDRVVCSSRPGTTPHLGLEERLARCYGHLDGSTAQPEPLLMMAKRQRSLAGVQFYSAKNGTLGVLPDYQQPSTQPQQSDPKRVERLSDPQKRNVLELISGFQQPGRVARFGGAGILVSGNVSDPMAAALKAQYGPGSKIMGSDVDSWTDIGSR

SEQ ID NO: 70457 - protein, 102 aa, Zea mays
  Clone ID: 700074763_FLI.pep
PEGGPAAAGLGREPRGSPSARSAGWPPAPSSARRSTPAAAAAAVAVAAAAAADAVAVAAAADAVVDLSDLPLSCDTRGNLHGTMTCVHGFFFYIVKQKESTV

SEQ ID NO: 70458 - protein, 663 aa, Glycine max
  Clone ID: 700961396_FLI.pep
EGRRGIFLPPLSCAVVVVLLMSRKLDSPVQTQMAVAVIRSSPLGREYHGKQPAGRRRVFVQTEKGCVLGMDLDRGDNVHTVKRRLQLALNVPVDESYLTFGDMVFKNDLSAVRNDTPLLLTRGKNTHMPRSSSTPCLSPKGRDIDKSGPIEILGQSNRLDGIKHMIKDIMKAIKMGIEPIPVHSGLGGAYYFRNSKGDSVAIVKPTDEEPFAPNNPKGFVGKALGQPGLKRSVRVGETGFREVAAYLLDYDHFANVPPTALVKITHSVFNVNDGVNGNNLWRKRLFSKIASFQQFIPHDFDASDHGTSSFPVASVHRIGILDIRILNTDRHAGNLLVRKLDGIGSFGQVELIPIDHGLCLPETLEDPYFEWIHWPQASIPFSEDELAYIEDLDPYHDCEMLRRELPMIREACLRVLVLCTIFLKEAAAYGLCLAEIGEMMTREFRRGEEEPSELEVVCLEARKIVVERDREELSPRSEMRDDEFLFDIDYYDEFGSDFTPKMAIDDPLTRATFLPALGNGQSRNPLSKLDECIEEEEEEEEEAEGESPQGFVTSAAEEKIPSVSELSVSLKNTMLDGKNQNQQKYSGGKVENGHFANTSSGHKSANEQLPPSISFVDVTEMTEDEWPLFLEKFQELLYPAFAKRKSITLGQRQRQRLGTSCQF

SEQ ID NO: 70459 - protein, 364 aa, Zea mays
  Clone ID: LIB3180-021-F5_FLI.pep
LSSHILSPTSPASPVSVVSSPLLTSPAMGKIKIGINGFGRIGRLVARVALQSEDVELVAVNDPFITTDYMTYMFKYDTVHGQWKHSDITLKDSKTLLFGEKPVTVFGIRNPEEIPWGEAGAEYVVESTGVFTDKDKAAAHLKGGAKKVVISAPSKDAPMFVVGVNEDKYTSDVNIVSNASCTTNCLAPLAKVIHDNFGIIEGLMTTVHAITATQKTVDGPSAKDWRGGRAASFNIIPSSTGAAKAVGKVLPELNGKLTGMSFRVPTVDVSVVDLTVRIEKGASYEEIKKAIKAASEGPLKGIMGYVEEDLVSTDFTGDSRSSIFDAKAGIALNDHFIKLVSWYDNEWGYSNRVVDLIRHMFKTQ

SEQ ID NO: 70460 - protein, 887 aa, Zea mays
  Clone ID: UC-ZMFLB73023B01_FLI.pep
NLQFGHSPHEGRSSAGRPPHALVAFGFGGKLIVMKETTSMHASFNSGNQGNSSSTVSVLNLLEVVFDKVDPSSVTNGSALSYFHALCRQPVPGPLVGGSAASKDVNKWLDEMIARYESSSSEFHRGDTRKLLISLLKILSQHYGKLRSPFASDPSQEETDGPEMAVTKLFSSCKRSTVHMGDYGSLVPCMKSIPSESQMQAVAQEVQSLLVSGRRKEALHCAQAGQLWGPAIILALQLGDKFYVDTVKKMAHFHFVSGSPLRTLCLLIAGQPADVFNVENNVNSDYGASHQPVEPGPNMLDDWEENLAIITANRTEGDVLVITHLGDCLWKEKNEVAAAHSCYLVAELNIDSYSESARLCLIGADHLKCPRTFASPEAIQRTEVYEYAKVLGNSQYILLSFQPYKLIYAYMLVEVGKVSDSLRYCQASIKVLKASGRAPELEVWKQLFSSLEERIRTHQQGGYGTNLAPGKIVGKIFTSLDKSISRMMGTPSAPLPPLPHGSFSDKESHSIPAAAKFVNSQSVMVMPSLIPSASMQSMTEIAEDSGGTGRKIAHNRSVSEPDFGRSSKQGAGGSDGTQSSASGSSSSRFGWLVQKTMGLVSKSHRQAKLGDQNKFYYDEKLKRWVEEGAAVPAEEPPLPPPPTKPSFQNGMLDNKLNGPMSVSHAPNGVTEWKSSNSSEQGLGMPPIPPSQNQFSARGRMGVRSRYVDTFNRSGASGAMPSYNKPAAPSMTPPAGAKFFMPTAAPVAADQMIPHQAAEIHSETIHQDERSASPPAETSFSSTPPPTQFPSPVQSTIYRQSSMENISTPYQGSGVSSLSNDSSFSKSRAASWSGTYSEQFNAFAGTISPDRQTTHSPLMPGKPPHSRSNSNSSGHLNGLAEDLHEVEL

SEQ ID NO: 70461 - protein, 694 aa, Zea mays
  Clone ID: UC-ZMFLB73296G04_FLI.pep
FTKYCGGRLRSQVKCTRCLHCSNKFDPFLDLSLEIAKATTLVRALENFTEDELLDEGQKEYECERCRQKVVAKKRLTIDKAPNVLTIHLKRFSPFNPREKIDKKVDFQSILDLKPFVSDSKGTDFKYSLYGVLVHTGWSTQSGHYYCYVRTSSGMWHNLDDKEVRQVREADVLKQKAYMLFYVRNSIGKSVVCKDNNAANLLKKKTSEKISSLNGIAQTNVRAQNLNGVSPFGDKTHGTIIGYSTISSKTKTIHCSKNEVKAEDAPASQNNALPSTQAPIARNDVGILPTKPMQFAVKNEEKTSSHQPAPFTNTCGEQTVVGRPLQEMEPKAGAGENTSVVSAVANDAATLSKADKLTSQPQTAPSSKPTANVKDTATEFATLSLSKKDSVVSNGAVLSIGCLTSGEKAMNLSESVDQANEITKALPTSQNNTAPVIAQADCGVEISSGVIMHVAVSASCNGTTEKKVNSKSKKFVRYPVVNMWLGSRHLKPGKKANRKRSKMIRRVVACKDAANLSCLSEQLTSTSSTACSETVECTSSHQKRSHASARSKDDAQSSQNKQKVDGARVGAGTSAPSCSAGVPKSDPNPSTDAKVVATQPASIRATDLMEATVPRWDDVDMPNIKVAEPQSKRKSGGYILDEWDEEYDRGKTKKVRRSKQDFGGPNPFQEEADYVSQRRTKQKSYRGKSWNKRA

SEQ ID NO: 70462 - protein, 692 aa, Zea mays
  Clone ID: LIB3354-043-E10_FLI.pep
RRHTSTMAATTPATDPPDALLAVTADAPTPARPTPAELVARAVAPVKPAFLCPPPVREAPKEEGKAAGGGAVVKVEKKSKRQLKRERQQEQKSTSHLCIEVGKSGNVDSCKYGTSCRFSHDINAYLSQKPADLEGTCPFTALGHLCPYGLTCRFLSTHKDNLAPQNHPEGNCERNPLSKEIQKLLWKSKYKFPKASAQIKLLGLKDGNKNKAEAVNDDNPDETCNLNGDDKTLLSSIPENVEPDPTLCKEIDNSGGEPLVVDSVESVEPRASKKSKVEVDETRDNEIKGPTTGIHDNEAESEVNSISGVKVSSNNQSSCKVDLITIPHLREKKIIDFREKLYLAPLTTVGNLPFRRLCKTLGADVTCGEMAMCTNLLQGQASEWALLRRHPSEDLFGVQICGPYPDTVARTVELVDNECSVDFIDINMGCPIDIVVNKGAGSSLLTKPMRIRSIVQAASTVTEKPLTVKVRTAFFEGRNRADSLVSDIYNWGASAITIHGRSRQQRYSKLADWDYIYQCAQKAPDYLHVIGNGDVFSFTDWNKHVSDCSKISTCMIARGALIKPWLFTEIKEQRHWDITSGERLNILKDFVRFGLEHWGSDFKGVETTRHFLLEWLSYTCRYIPVGLLDVIPQRLNWRPPSYYGRDDLETLMVSDSAADWIRISEMLLGKVPEGFTFAPKHKSNAYDRAENG

SEQ ID NO: 70463 - protein, 318 aa, Zea mays
  Clone ID: LIB3607-043-H3_FLI.pep
RLRPAASEIKKILQEKKKKDLGRERKREGGRKKNNLASKLVRSIVVKIMDPVTASIHGHYLPPPFNTRDFHHHLQQQQQHHHHQQHLQLKTEDDHGGGAPGLFGDRGTQGDHENNDENSGNSNGSGGGELALVPPSGGGGPEGGDATPRRPRGRPAGSKNKPKPPIIITRDSANTLRTHVMEVAGGCDISESVTAFARRRQRGVCVLSGAGTVTNVTLRQPASQGAVVALHGRFEILSLSGSFLPPPAPPEATGLTVYLAGGQGQVVGGSVVGALTAAGPVVVMAASFANAVYERLPLEDDDLLAAHQAPQAQADGVL

SEQ ID NO: 70464 - protein, 324 aa, Oryza sativa
  Clone ID: LIB4309-004-E3_FLI.pep
LSGWVRLLALLLLGDGSDAGFSDWRGEARLLVRLSDRENSRAGKPVAGRRSGRGDGEHRRPLAAAASGVLPRRRRGREQRGGGGVAAARRWLGYGVGGPPAEGEAAGLQEQAEAARRGDAGEPQRDAFPRAGDRQRRRHRRGHRGLLPPQAARRLRAQRERRRHQRHAPAARGDWGRRRRAAGEVRDIVHVWRLPPGAGAARGHGARRVPRRRAGAGGGWERHGGADRVGPRHGDRGHVRQRHVREAAAGPGRRGGRRAVRVGGRRRADGAAEQRRRRRAPADVRRRPADAAARHVRAVGACSGGSAAADIVLALAPVNQCLST

SEQ ID NO: 70465 - protein, 247 aa, Oryza sativa nipponbare
  Clone ID: JC-OSROLIB3475038D07_FLI.pep
QQQLVAAAAAAGGMAKQELVDESNNTINSGGSNGSGGEEQRQQSGEEQHQQGAAAPVVIRRPRGRPAGSKNKPKPPVIITRDSASALRAHVLEVASGCDLVDSVATFARRRQVGVCVLSATGAVTNVSVRQPGAGPGASLRHRPHRLRLRRPGAGRGRHGRRTAHRRRPRRHHGRLVRERRLRAPPARGRRAAAAHGGRRPVLAAAAAAAITTTPAADSSRPSATQPDERNPPPRRRRLRLDQRRRR

SEQ ID NO: 70466 - protein, 480 aa, Zea mays
  Clone ID: UC-ZMFLB73003E10_FLI.pep
PPGPRGWPVLGNLPQVGAKPHHTMCAMAREYGPLFRLRFGSAEVVVAASARVAAQFLRAHDANFSNRPPNSGAEHVAYNYQDLVFAPYGSRWRALRKLCALHLFSAKALDDLRGVREGEVALMVRELARQGERGRAAVALGQVANVCATNTLARATVGRRVFAVDGGEGAREFKEMVVELMQLAGVFNVGDFVPALAWLDPQGVVGRMKRLHRRYDDMMNGIIRERKAAEEGKDLLSVLLARMREQQPLAEGDDTRFNETDIKALLLNLFTAGTDTTSSTVEWALAELIRHPDVLRKAQQELDAVVGRDRLVSESDLPRLTYLTAVIKETFRLHPSTPLSLPRVAAEECEVDGFRIPAGTTLLVNVWAIARDPEAWPEPLEFRPARFLPGGSHAGVDVKGSDFELIPFGAGRRICAGLSWGLRMVTLMTATLVHALDWDLADGMTADKLDMEEAYGLTLQRAVPLMVRPAPRLLPSAYAE

SEQ ID NO: 70467 - protein, 210 aa, Zea mays
  Clone ID: UC-ZMFLMO17259F06_FLI.pep
NLQFTIYSCAEAGAGGSEHLAARGRRLHRDTSAGRAVAVASGWLLASMVGMYQHQLRDDPFDTLSGGHCGEQPRVAGGGASSSSPSAVHDPLSAEVHGGGQPRQRVEALADGRSMLRGGGSGIVGAAGGDLGVLVRWMRELAADPVGPLPAPSEHRVRKRHVLAWRRARYLRLEDVADAEELPSFSKPERWRARDKAGKEKDMPPVSATV

SEQ ID NO: 70468 - protein, 471 aa, Zea mays
  Clone ID: UC-ZMFLMO170114C05_FLI.pep
IIANLHVFIPNICEEQERDLFLQNFQKYLAYGSPKLSADLPASSDFKATKVCRNLGFLSDYAKTLVPNLLNGEDLVLLSDFADKLQSWCKSQVAVKVVQNDIPPESMDAMRSVQQLLPTRTSTPASKMNNLPKDAQNMEVSTPVPPINPEGNDEDETPKNTVSRNGGFLQNAVGQDLVHLGVARTASGGPLAVASGVSTGHQHNRMDLDPASSSVDNFKTPELTKENGLEEDGKGESSMYDERQPKRRKRTLMNNEQIDELEKALVDEPEMHKNPVLLQSWSEKLSLQGPEITASQLKNWLNNRKAKLARIAKERAENADKPSTPHPGESSESAGEDNYLPPAGVMTVLSKGGSLLSPDSTEQTSQAELSPNTTMMVRPFTRSFSLEPGRLVSLVDSDGKEVGRGKIFQEPGKSPTESCVCVVDVTELRTEKWRELPHPSEAFGWTFQEAEARNGGIIRVSWDAVRLFPVA

SEQ ID NO: 70469 - protein, 108 aa, Zea mays
  Clone ID: UC-ZMFLMO17126E08_FLI.pep
LCVTSIGTFKLTLQFTEDYPNKPPTVRFVSRMFHPNIYADGSICLDILQNQWSPIYDVAAILTSIQSLLCDPNPNSPANSEAARLFSENKREYNRKVREIVEQSWTAD

SEQ ID NO: 70470 - protein, 308 aa, Zea mays
  Clone ID: UC-ZMFLMO17131H02_FLI.pep
LDEEDEGFGCGIGTLGNFKKANGTVNMSATYNSRSQDIESSVVAHGDLWRLEASRGGSTSGNGTSPLYLVQLGPLLFVRDSTLLLPVHLSKQHLLWYGYDRKNGVHSLCPAIWSKHRRWLMMSMMCLNPIACSFMDLQFPNGQLTYVAGEGISASGFLPLFGGLLQAQGKYPGETRVSFSCKNKRGTRFTPMFQWPDKSVSLGVTQALAWKRSGLMVRPSIQVSVCPTFGGSDPGVRAEVVHSLKEELNLMCGLSCSRHPSAYTALSIGRSKWNGQVGSSGVVITLETPLNNIGRPSLSVQLNGGFEL

SEQ ID NO: 70471 - protein, 227 aa, Zea mays
  Clone ID: UC-ZMFLMO17134G01_FLI.pep
SEAAKLETMTLTIPDEVRAKAEVYVGDAAGQEKTRLLLQETGLPSGLLPLRDIIECGYVEETGFVWLRQRRKVDHYFAKAGRHVTYGAEVSAVADKGRLKKITGVKAKEMLLWVTLHEICVDDPPTGKLHCKAIGGLSRSFPVEAFEAEEPAPPGAGGVVPRDAEEEEKEEGDKNPEQEAAAEKDGDAPATAPAAEEAESKAEEKADKEVSSADPAVVHAEALAAKN

SEQ ID NO: 70472 - protein, 70 aa, Zea mays
  Clone ID: UC-ZMFLMO17151C06_FLI.pep
IGLGTTLYCLIVPYRHYTTLTHYSARVHHFTLRTQKYKRLYHYKVNLLCLKSYQIICTHHNLIYIYHWLV

SEQ ID NO: 70473 - protein, 245 aa, Zea mays
  Clone ID: UC-ZMFLMO17169B06_FLI.pep
GKKRRTYWDLFLLVLSNFFDTCLYVFPPNYQLPFLQGLSILEKLAAPLAPLIVGRTGAQLFLTDGDPSKPPLLLQMASDCDDKNYISALAAFKNRVLYANVSYDHMVGWRTSSLRREKNLIKPSHRSLDGYKHIVNVEYCSPVSSEGPHFPSKAARAKEAAQRTPNRENTEEYHQMMEEEMLHGLQKVGWKKVDVNFHSSFWPYSAHNNIHVKNEWLHNAGAGVIAHVADSIKQQESRPCLPANL

SEQ ID NO: 70474 - protein, 356 aa, Zea mays
  Clone ID: UC-ZMFLMO17013B09_FLI.pep
WKIPYIRLKNVRMIYLDKKVILPILSCLSAVTCAITLSMCFQTGKWEWKFENKPVNIYYEEHEQEVAENMKNILMIPTISDVSTVEEWRVVAKDIVGRKGELGYRVTIVDWPGLGYSDRPSLNYNADVMESFLVELMNSPNSPVANADDELIIVGGGHAATIAVRAAGKDLIKPSAVAAVAPTWAGPLPIVFGRGSDMETRYGLLRGTLRAPALGWMMYNVLVSNEKSIQSQYKSHVYANPDNVTPAIIESRYELTKRKGARFVPAAFLTGLLDPVQSREEFLQLFAKLDGDVPVLVVSTVNAPKRSKAEMEALRGSKGVTKFVEVAGALLPQEEYPLAVAEELYSFLQESFAARR

SEQ ID NO: 70475 - protein, 726 aa, Zea mays
  Clone ID: UC-ZMFLB73068G09_FLI.pep
SKEGPPQNFQLYSWETYQPVSGLLAQPEWTVWDQTVEYCAFAYQQYIVISSLRPQFRYLGDVSIPFATGAVWHRRQLFVSTPTTIECVFVDAGVAAIDIETKRIKQEMKAREAQSRAAEEHGDLALITVEAPQVTVSEKVSLRPPMLQVVRLASFQYAPSIPPFIVPKQSKFDGDDSVFQKELDDRRYAEVAVAGGGVSVAVTRFPPEQKRPIGPLVVVGVRDGVLWLVDRYMCAHALSLSHPGIRCRCLAAYGDPVSAVKWATRLGREHHDDLAQFMLGMGYATEALHLPGISKRLEFDLAMQSNDLKRALACLLTMSNSRDVGQETAAADATDVTQILSLAVAKQAKQESLTDAVQGIVKFVKEFFDLIDAADATGQSDIAREVLKRLAAAASVKGALHGQMLRGLALRLGNHGELTRLSGLVSNLITAGHGREAAFAAAVLGDNALMEKAWQDTGMLAEAVLHAQAHGRPSLRNLVITWNKMLQKELDHTPTVKTDAAAAFLASLEDPKLTSLGETEKKPPIEILPPGMPPLSAPPIVIKKAGAKPGLPNAAKASNGPIGAPMAQGAPMAHGTPGPQGVPMNQVTPSQGSHDEARPSDATVADAAAAVAEGTAAPPAAEGTSAPPAAEGTATPSSEEAKAAPGNEEGTSNPINEEATAAAVSVAAGSPDSAAAPAADTSSDAPAVNPTEDTVSAPSTEAPPELTDKPSSAEASLPPPPSVSGV

SEQ ID NO: 70476 - protein, 141 aa, Zea mays
  Clone ID: UC-ZMFLMO17294F04_FLI.pep
LPDTPMSFKLIFSSAIIFSAICFGPINILCTLFIYSWDCNCKACNSSHMCLVPVVVAMEQKIHVNPLKILSETKCTHIQNSSSSCPNQLRRIRMSWILRGRSLPNARSLCKLMQMRKNISEDILTDLLRLLASSGGHYTPH

SEQ ID NO: 70477 - protein, 307 aa, Zea mays
  Clone ID: UC-ZMFLB73010G09_FLI.pep
FISVKLSLILMIVLLFCSKPCEKVCPADAISLKHSMVDGERTLSDPLRGKYEGGVITERCYGCGRCLPVCPYDRIRAVSYVRDPTMTAELLKRDDVDAIEIHTTGKGTDMFNTLWDNLSGSINNVKLVAVSLPDIGESTVDLMNTIYTIMEPHFKGYNLWQLDGRPMSGDIGRGATRETVSFAAHVASMSERPPGFYQLAGGTNSYTVDYLKKAGLFQSSNWNSGTATSEMASSHQALIGGIAYGGYARKIVGRVLRKIPEQFGRVHIEDHPDHLLEALQEAMSLVGPVKGYIPSHSKPFMKQVDRQ

SEQ ID NO: 70478 - protein, 420 aa, Zea mays
  Clone ID: UC-ZMFLMO17238A11_FLI.pep
ADSELQLARARCVALQDHLAASPDLPRHPALRSLLRLVNAELRFLSSLRLAPATPLSSNLPHLVALHLVLTHPAIRSPSRLSPLPGVDFSCAFRGRPAWVLVSASNPARLAWAPPGGLRARFAAALEAARGAPPATRPEKLLVVFSRGVGVDIARGLTEGFEAVEADLLEEFIGDSEEENEHGWVVISLDSSEELRNFRAFEIDVVEGASEVLLPSDVAVDEVSADEEELLGFWGSFAAFMEKMWKVSRELVNLDTTALVAIVSGISNGGVGKLMAAPEAETRARFKCNYKFVMDQAQYELQFPILIELRKAVEGKQCIICETVNLEFKEIVSMCGGPEENTRARHLLKQLTIVPDNPSARMMDLPTTRKLAMKNKIVFGTGDHWRAPTLTANMGFVRAVSQSGMSLLTIEHRPRALIGL

SEQ ID NO: 70479 - protein, 263 aa, Zea mays
  Clone ID: UC-ZMFLMO17169E12_FLI.pep
RDLRSCSPLVRRQHPRAAMATDSSAGSFQKIQIQREDTTFDAYVVGKENAPGIVVLQEWWGVDYEIKNHAIHISQLGGGYKALIPDLYRGKVALDVAEAQHLMEGLDWQGAVKDIQASVKWLKSNGSPKVGVTGYCMGGALSIASGVLVPEVDAVVAFYGTPSSELADPSKAKAPIQAHFGEHDSFVGFSDVTAAKSLEEKLKSSGIPYEVHIYPGCSHAFMNTSPEALKRKKGMGLTDENQEAVDLAWSRFSSWMGRFLGSA

SEQ ID NO: 70480 - protein, 359 aa, Zea mays
  Clone ID: UC-ZMFLMO17247G08_FLI.pep
HVLDFPTSEATATVAIRMHHSLGDGVSLLSLLIACTRSAADPARLPELPPAPRRASPVYARQRPPLSAGLVAFALWLWSYVLLAWHTLVDVACFVATAWFLRDQRTPFMAASEGVEFRRKRFVHRTLSLDDVKFVKNVMKCTVNDVLIGVTNAGLSRYYFRKTSDTNNERKKSQNIRVRSALLVNIRRTPGLHALAEMMDSIKNNRAKWGNLIGYMILPFHIAMHDDPLEYIRQGKRTAQRKKASLEAVFTYWSGNLIVKLFGMKAAAALCYGMFTNTTMSFSSMVGPAEKVEFYGHPIIYIAPSVYGHPHALTIHYQSYTNSIKLVLAVDDAQFPDSHQLLDDFAESLRLIRQAASTR

SEQ ID NO: 70481 - protein, 155 aa, Zea mays
  Clone ID: UC-ZMFLMO17318H09_FLI.pep
FCQVFEKLGPSLYDFLKRNRYRPFPVELVREFGRQLLESVAYMHDLRLIHTDLKPENILLVSSEYIKVPSTKKNSQDEMHFKCLPQSSAIKLIDFGSTAFDNQDHNSIVSTRHYRAPEIILGLGWSLPCDIWSVGCILVELCSVRSLLSFLTFFS

SEQ ID NO: 70482 - protein, 619 aa, Zea mays
  Clone ID: UC-ZMFLMO17077A12_FLI.pep
PPAMASISGAAAAPSSAACRLRLRRHLLLRPSHLRLRAPHSIADLSRSSSSSNSAPTRAQPLGSRPENGGVRAVEKDPIKLWERYVEWLYQHKELGLFVDVSRMGFTEDFLRQMEPRMQRAFAAMRELEKGAIANPDEARMVGHYWLRDPALAPNSFLRSKIETTLDRILAFSQDVVSGKIQSPSGRFTSILSIGIGGSALGPQFVAEALAPDNPPLKIRFIDNTDPAGIDHQIAQLGPELATTLVIVISKSGGTPETRNGLLEVQKAFRDAGLQFSKQGVAITQENSLLDNTARIEGWLARFPMFDWVGGRTSEMSAVGLLPAALQGIDIKEMLAGAALMDEETRNTVVKENPAALLALCWYWASEGIGNKDMVVLPYKDSLLLLSRYLQQLVMESLGKEFDLDGNRVNQGLSVYGNKGSTDQHAYIQQLREGVHNFFVTFIEVLRDRPAGHDWELEPGVTCGDYLFGMLQGTRSALYANDRESISVTVQEVTPRAVGALVALYERAVGLYASLVNINAYHQPGVEAGKKAAGEVLALQKRVLTVLNEATCKDPCEPLTIDEIADRCHCPEDIEMIYKIVQHMAANDRAIIAEGSCGSPRSVKVYLGECNVDEDLQAA

SEQ ID NO: 70483 - protein, 792 aa, Zea mays
  Clone ID: UC-ZMFLMO17059C05_FLI.pep
LRASPDPAAPFGFAFSVDAGTVAYQLRSGLPANAPVLHIGTLPAAAAEAASDELSDYLLANFSCLPVYLPTDLHHRFYHGFCKHYLWPLLHYLLPLTPSSLGGLPFQRTLYHSFLSANRAFADRLTEVLCPDEDLVWIHDYHLLALPTFLRKRFPRAKVGFFLHSPFPSSEIFRTIPVRDDLVRALLNPDLVGFHTFDYARHFLTACSRLLGLDYQSKRGYIGIEYYGRTVTVKILPVGIDMGQLRSVVSAPETEDAVRRVTEAYKGRRLMVGVDDVDLFKGIGLKFLAMEQLLVEHRELRGHAVLVQIANPARSEGRDVQGVQDEARAISARVNARFGTPGYTPIVLIDAPVTPQEKAAYYAAAECCVVSAVRDGLNRIPYIYTVCRQESTALGDDSPKRSVIVLSEFVGCSPSLSGAIRVNPWSVESVAEAMNAALRMPEAEQRLRHEKHYKYVSTHDVAYWARSFDSDLQRACKDHFSRRHWGIGFGMSFKVVALGPNFRRLSVEHIVPSYRRTDNRLILLDYDGTVMPENSIDRTPSSEVISVLNRLCEDPKNRVFIVSGRGKDELSRWFAPCEKLGIAAEHGYLTRWSRDAPWDTSGLAADFDWKKTAEPVMQLYTEATDGSYIEHKESAIVWHHHEADPDFGSCQAKELLDHLENVLANEPVVVKRGQHIVEVNPQGISKGVVVDSLLSSMVRTGKPPDFVLCIGDDRSDEDMFESIVCPASNSGVKLPASSEVFACTVGKKPSMARYYLDDTVDVVKMLDGLASAPSQQRPRPAVQLRVSFEGSL

SEQ ID NO: 70484 - protein, 406 aa, Zea mays
  Clone ID: UC-ZMFLB73213G08_FLI.pep
KLVVSHDDYSLTSKLPRERTSVVTILRNPVDRVFSTYEFSVEVAARFLVHPNLTSAKLMTTRVLKKSRAVSTLDIWPWKYLVPWMREDLFSRRDARGIDKVHSSKKVNAYDVEDMVMPLHQYINDPVAHEIIHNGATFQITGLTNNSYFDGAHEVRHCARKHPDLGRIVLEVAKNRLDQMLYVGLTEDHEESARLFAHMVGAQVLLQSGTLSLDLKEDLHSETDSHPSMVEPGDEEASEHLNNTHGWQNNEALNSTSDEQGKGNMTVGKLMEAYETCIAKLRKSQSSRRKISLKKVEEANFSKEARKLVPEAILKQIISLNSLDMELYDHAKKIFTQEHLMLKAQQSMAGQHRQLAEQEEGWIGTMCSDGTCSPWVVVLLGLGITTILVLATLAVTTRKRTSKLKV

SEQ ID NO: 70485 - protein, 121 aa, Zea mays
  Clone ID: LIB3076-052-D1_FLI.pep
LAITTHRESLSRFLARAQMELGLRGRWRGAGLDGLEGLVQAAEHGLVAAPLGVGRGDEVRVQLVPCARHRYEAVRAGARHLVLVVHLAGAVGALGGAHVVGGRDLVQQPDVGERQVVEHGA

SEQ ID NO: 70486 - protein, 120 aa, Zea mays
  Clone ID: LIB3078-026-B10_FLI.pep
HTKQQDMLMSHSYTQVTLITWFLGNKLMATKVPDLSHTHDPCMSIPRSHASPSKIRDVDYIPCFFSLSPIHTHIYLVNQPCVHVRGASSMLHSLQDKLQFLLSMVELEQFSADPAMLLQA

SEQ ID NO: 70487 - protein, 203 aa, Zea mays
  Clone ID: LIB3078-056-D10_FLI.pep
LRRCRRTLIILPTRADLMQIRLTRRSAGAAGPAHSVVRAERAVAQGGRVARLHRGEHHRPTHHGVHAHPDGVDGLQLTTGLQPAAHTGHRHRRQHHGRCGRGAVAARGLQLHRHQRHDDAHAHHDHRRHRCRTSPYLVRAASLALTGSGSARTHLGIYRRPYCCGVDWGGGGGVVHWWWRVSSSYCCRRSPPWMIIEHRHDIS

SEQ ID NO: 70488 - protein, 100 aa, Zea mays
  Clone ID: LIB3079-003-C3_FLI.pep
PGRRVWPQLVESSSSSSLPDRPSTPWGPGAAAGPLGPSAGASATGASADFASAIGATTMATKRRAAMTKTTLARAMGTVSSFLGLVDSCLGEFNAWCLCA

SEQ ID NO: 70489 - protein, 226 aa, Zea mays
  Clone ID: LIB3076-052-D11_FLI.pep
CALLRCCRLLAELVPELPPQDLAGHRLGDGVHEAQQPELLVRRNAPRHVRHHVRLALRRATSPHHARRRDLAGLLVRQPEDGGVLDGRVRQQDGLQLGRGDLEALVLDELLDAVHDEHVAVVVDVPDVARVEPPRGVDGALRLLLPPVVALHHGLAPHADLPRRVLGQRPPRVGVHELHLQVGQDEPDRLLLGDLHRRPHVLAAAASVRQRDAAVLREPVRLLHLH

SEQ ID NO: 70490 - protein, 136 aa, Zea mays
  Clone ID: LIB3078-036-D10_FLI.pep
CSRHRRCTTPRRSCSRSSRRSSGRRRTCTCRTRTRRRRRSLTTSSRTTTARPGRTRRRCTTRTASSTTRTPTPAASCERRAGRRGPDAAGRRGQRVVWGGGGAARYRNIRERRLCGCIGRVACTVYHPSSFHPIST

SEQ ID NO: 70491 - protein, 433 aa, Zea mays
  Clone ID: UC-ZMFLB73022C05_FLI.pep
GSTTGGGAAAAAAAAAVVDPGAPAALVGPSLQVLSALSDQNNKRIVLALQSGLKSEILWALNALTVLSFKEKDDLRRDATPLAKVPGLLDALLQVIDEWSDISMPKDHTKPPRLRTLGANTTLSGFGQENMEKVYSDTATTSNDQSKAEDSSVTKKRAASFWFDEDGLFNNDDEGRAERQQCAIAASNIIRNFSFMPENEIIMVQHRHCLETIFHCLENQNREDDELITNMLETLVNLAPVLDLRIFSSSKPSFIKMTEKGAIHAIMGMLSSSVKPWHCAAAELIGRLIINPDNEPFLLPIIPQIYKRLVDLLSVPAYDAQAAAVSALYNVAEVNMDCRLKLASERWAVDRLLKIVKTPHPVPEVCRKTSMILESLVSEPQNRMHLLVHENTFAEILTSEGKYSDTFARIVYELTARPSNKVTSGHAIWGNIN

SEQ ID NO: 70492 - protein, 965 aa, Zea mays
  Clone ID: UC-ZMFLB73025E08_FLI.pep
GGEGRCRCSGGGGVEWQWSPREPGRARQLPRRLERAPGRGLSRSPSWSLGFGAEGRRGSGSGNAAGGRGETEMAVGDALRRLCEEIGWSYAVFWKAIGAADPVHLVREDGYCGHTSCPVGSEPSESLPLPSDAGCSVPAADTICWLVNNDMASQVHVVGQGIVGRAAFSGNHQWIVHGTANGHGLSSEVAAEVNNQFRVGIKTIAIIPVLPRGVLQLGSTGLVMENTNFVMFAKKLCSQLNNRSSMAASASVKNTSSQHGQSRPDTATVSTSTPPNALLSASLLKVAQQNGHPVREHSVYAERDLRFIQQASICESQFGSNLQSGVMNSCLTSPSFASVKKQSLLMNSIGQLQFSNNVHSSADLAREIILKSLGRQDSSICENTNMNMHRGRYVVSLGRQDSSVCENTNMNMHRGRYVVSNDINGSRNFDFLPIGAKESRANLSIPASSQILDHMPGTLQQKQSLVPFRVTQSSEFSKKVENPESGSFQIPSVTTSDSGGQVSNSFNMVQENRLSMSNNVRQVQKIDRFSDPSANVSTQRMKNRDECEPGMPIERASSFLVEPGADNDLFDMFGSEFHQSSHNVGADLVTWSGTESQNSDRDVPESSICFNSSPLFSSLDNELHYSGILSLTDTDQLLDAVISNVNPSGKQCPDNSASCKTALMDVPSTSHLCSIDLKRCESPSVPSLLIKHELAQFAKQPCLVDKSEDGCLSQNNGMHKSQIRLWIESGQNMKCESASASNSKGLDVPSKANRKRSRPGESPKPRPKDRQLIQDRIKELRELVPNGAKCSIDGLLEKTVKHMLFLQSVTKNADKLKDSTESKILGSENGPLWKDYFEGGATWAFDVGSQSMTCPIIVEDLDRPRQMLVEMLCEDRGIFLEIADFIKGLGLTILRGVMETRKSKIWARFTVEANRDVTRMEIFLSLVRLLEPNCDGSGAADNTNNMNMHLGLVHQPVIPATGLIQ

SEQ ID NO: 70493 - protein, 139 aa, Zea mays
  Clone ID: UC-ZMFLB73026A08_FLI.pep
LRSPSLLPLAAGAAQDLLHFLQRSGRHWRRVRVGCRLLALLPRQTLFPYELFVKLYSKVELHPFGLHNLGNRPIYAGNALCTVKYTDEDPCMMSIRSTSFSPTADAMSETKVAPITQYLFSNLREIYMGESDIPRHKAA

SEQ ID NO: 70494 - protein, 78 aa, Zea mays
  Clone ID: UC-ZMFLMO17018A05_FLI.pep
QSVKLGFPISSASKIIYLFIFPTTPALVWLGWQGQRLRFSLLDGRWVRLLESVDPSSRLERVRQKHRDRHRPDAAWDR

SEQ ID NO: 70495 - protein, 414 aa, Zea mays
  Clone ID: UC-ZMFLB73028E05_FLI.pep
LVRFHNQGAAMASAATTLLKSSFLPKKAEWGSKHQLVAAHPRPATVVVSMVARASAYADELVQTAFAILLIIFLQKTIASPGRGILAMDESNATCGKRLDSIGLENTEANRQAYRTLLVSAPGLGQYISGAILFEETLYQSTVDGKKIVDVLSEQGIVPGIKVDKGLVPLAGSNNESWCQGLDGLASREAAYYQAGARFAKWRTVVSIPNGPSQLAVKEAAWGLARYAAISQENGLVPIVEPEILLDGEHGIERTFEVAQKVWAETFFYMAENSVMFEGILLKPSMVTPGAECEEKATPEQVAEYTLRLLRTRIPPAVPGIMFLSGGQSEVEATQNLNAMNQSPNPWHVSFSYARALQNTCLKTWGGRPENVKAAQDALLLRAKANSLAQLGKYTGDGEAAAAKEGMFVKNYSY

SEQ ID NO: 70496 - protein, 121 aa, Zea mays subsp. mexicana
  Clone ID: UC-ZMROTEOSINTE119H11_FLI.pep
IAAMAIEMPCNNRMSTVALVVVVLLVVACQIAPAHCTAPTTVASTPRSRYLLVVQSSSATTATAYSTTKAGMIEGTVTPSEGGAPGATEDVRPTNPSHSPGIGHAFTHNKIGRKLLAAISQ

SEQ ID NO: 70497 - protein, 524 aa, Zea mays
  Clone ID: UC-ZMFLB73256D04_FLI.pep
LESLRAKFVELQSEMEERDKEIIFAQRNMSLLYEACASSVAEIEGISDIYPGKHSYAVEHSADECIKSIVEQLVMAVKTSQNSNEGSTKELKAIVLELQQELQAKDVQISTISSDLSYQLRVAESSAKQFSVDLEDARMELQNLEKQVDVLQNQKKDLETQLNELKNMESMASEQHGRIEKLTDELSRKDQEIEGLVQALDEEEKELEILENKSLQLEQMLQEKEFALKTSEVSRTKALAKLATTVDKFDELHSLSENLLAEVENLQLQLQERDSEISFLRKEVTKSTNELLTTEESNKNYSSQLNGFMKWLERELLQFGFHSESANDYDYTQFPVYMDMLDKKIGSLIAESDDLRVTVQSKDSLLQVERAKIEELMRKSDGLEASLSQKDSQIGLLRRDRASNQQSRSINLPGTSEIEQMNDKVSPAAVVTQIRGARKVINDQVAIDVEMEKDKPFDDEDDDKAHGFKSLTMSRFVPKFTRPVSDRIDGMWVSGDRLLMRQPTLRLGVLIYWIALHALLASFI

SEQ ID NO: 70498 - protein, 452 aa, Zea mays
  Clone ID: UC-ZMFLB73066F02_FLI.pep
PLRAVIDAAEASGLSLTAAPYWEGVSVAGLVSTGSHGSSWWGRGGAVHDHVVGLRLVVTAGEADGWARVLTLRRGDELFPAALVSLGLLGVVSKITLSLEPRFKRSITFDYRNDSTFQDDFAAHAASHEFADITWYPSQHTAVYRIDDRAPANAPGDGVNDFIGFQATPIAVTAGLRVVETSLERSKNMKGKCAMAAAEGVAKRLVGNGLKNNGLLFTGYPVVGYQGKMQTSGSCARSSAADLLSACGWDPRFHGLFFYESTAIFSPARFRDFILDVKRLRDLAGSDSLCGVDVYNGLLVRFVKASAAHLGQPEDSVVVDFNYYRASDSAAPRLSQDVWEEVEQLAFVKHGARPHWAKNRLVAFAGVRGKYPRWGQFAAAKRQLDPRGLFDSPWSDEVVGGVELAKGDGCALDGRCVCSEDRHCSPEQGYYCRPGLVFTDARVCRYSGSQNQ

SEQ ID NO: 70499 - protein, 439 aa, Zea mays
  Clone ID: UC-ZMFLMO17105A02_FLI.pep
AHTLGRQRQRDGGRHCGGHPSSGQVRRRGGSFVRGIIGRVVVGRRAICRFIVRGRGGRRGAGGLLLALLLGPLRSRRRREISGLGLEQLLRLQELGASVDGERVVVPDGGLDGGGDDGGVERDGVVLALRFVGVVLLGDAGGGERGDLALVGLEELHGVVVRHGVVEQDGRLGLGREVLELGHEGGHRRVDGAEDGERGVLGAVEGVEDLGVGGEEAREALAVLLGEDVGEVDGRRRGDGCLGLRGGQDAADLEHRVVVAVALDLLHVGDGLDAVRRVVHDERHLAAAVLRYVHVSCHAGGKSGSLEQGGRGGGGVRQLLELLVVVVVGDDVQLEDVADGAERVVAGGEVAHVAVGHGQHGDCAVAVDVAGQVRLVEQLAELRELVVLPQDLQDVEPLRRREGAHGQHRRRGHHGQQPPPQQQIHRRLERGGGGSEGSL

SEQ ID NO: 70500 - protein, 721 aa, Zea mays
  Clone ID: UC-ZMFLMO17113A09_FLI.pep
FPFPSHPFRIVPERRRRTQGTAPTSPPRPEGPDMKALGAHAADLLRGPHLLRAAIFAFAVALAFFVGYHWPNASPRLVFFSSDASSSSPRPSSRSPSVVLSPNSNVSFDPSLIPIPSTPPASSTPNAWSPPSLPPPTSAPPPPLPPPPPPARLGIVGEDGAMQDDFDIGNVGANDTDLATDETAPQEPRDVGASGGPPRVRIERFPVCPESMREYIPCLDNEDDIKRLPSTERGERFERHCPAKDKGLSCLVPAPNGYKAPIPWPRSRDEVWFSNVPHTRLIDDKGGQNWITKVKDKFRFPGGGTQFIHGANQYLDQISQMVPNVAFGSHTRVVLDVGCGVASFGAYLLSRDVLTLSIAPKDVHENQIQFALERGVPAMAAAFATRRLLYPSQAFDIIHCSRCRINWTRDDGILLLEVNRLLRAGGYFAWAAQPVYKHEEAQQEAWKEMENLTARLCWEFVKKEGYIAMWRKPLNNSCYINRGPEGKPPLCDADDNPDDVWYVGLKACISRLPENGEAPTPVQWPARLMEPPKRLQGVEMDAYSSKNELFKAETKFWDDIIDGYIRIFKWRKFKVRNVMDMRAGFGGFAAALIRQKLDWWVMNVVPISEPNTLPVIFDRGLLGVAHDWCEPFDTYPRTYDLLHASGLFSKEQNRCNISSILLEMDRILRPGGKAYIRDRKEVIQEIKEITNAMGWRGTIRDTAEGAYASRKVLMCDKPMAR

SEQ ID NO: 70501 - protein, 433 aa, Zea mays
  Clone ID: UC-ZMFLMO17031F08_FLI.pep
HSATALYTSRSHRPVSDLAAAMGSAHSSVSTAGGEDEEDDEDPSAAAVSSAGAQAPPPALSPSPVRVPPASASKVLEQEPEVLPCLAADSPLSPQPSAAGTPRLLAGPGIKVWDPCHVLLPPPPPSPHAGRQVDAAAIEVVVVSHGECAAAMRPDLVGGRWPATALTARGERQARALAVFLRSRGARLAAAYASPLDRARATAALVCRELDFPEEQIQLSDALTEMSQGQWEGCPKSEIYTPEMVNLMESTQPDFSAPSGESLRQVQFRMMEFLNRTVLRLPEKVAMGDTLSQQNELKGFSRQSSSNSVQDGPPWDSLYRLNRHSLQRKKSGKSRLQFVTSGDNEAEDDFSPKEVNQRHLLHEGSVGSSAATSIAIFSHVTPIRCLIAGLLDCNPIMSKRICIDDSSVTVLEHSLKTGWQIKRLNDTAHLRLL

SEQ ID NO: 70502 - protein, 500 aa, Zea mays
  Clone ID: UC-ZMFLMO17036H04_FLI.pep
NFREEERNEGITPCSAAAARAGSSTHTACTQALSSVSYLISVAVLVHQDVDRGRDGLVGGDHDLVPGHVPERVARELVAGDERVLHVADAVREQQHRREVERPGGPVALERCARGGGPDGHPRGGVLLHVHLVHGGEGAVQLHDVDALVPAAEDVADDLDAPGDAADGLEDDVGVAEEEGSGDVEQHGVLGDDAGVVHVAVADPRLREARDLEVDAGAAEARGLVVAVHAGDGVGRRGDHDPRGRGEDDDVGHGVVVAVEADGRAREAALPRVAPGRHVLAEVGVADERLVAAAHRDAVGREVRHVAVVDGDAERVHHRHAAAAVAAVQHQVPQRGVLVVVAPAALGRRQLDQVPVRREVVGRAQRPAVDLEVAAAGCRQREGPLDEVRAAVEVHLGAAEVGDAAGHGGVGGRAERVSYGLADRRRGVGGAGRVRAVVRHVVHPRARGSLRRPSTPGQTYVAVQFRLPKGRKEKKRKRKTSFAGELKTGANRVRRARLHE

SEQ ID NO: 70503 - protein, 331 aa, Zea mays
  Clone ID: UC-ZMFLMO17044F06_FLI.pep
LRFASMALVAGSYERFIWGFSLKTLTTPSATGASLSETLTLAPLFSYPAHTGPVRCVAAAPRAGLVASGGADDSVRLYDLPSAADLGPLLDPSAAVSALAFYSRGPVPRNLLAACDDGSLHIYDADGFALLSTLRAFPRHEAAEALAVHPSGRVALAVGRAGAFAMLNLVRGRRSFACRLEHPASAIAYAEDRDGGDRFVMAAENKVSVHDSVDARVIHDMDCGKKVLAMAPAKSGVLYTGGEDRCITAWDLSSGKVSSRIEGAHATRVKGVVVFGNSNDGSQLSNLISSASSDGVIRIWDIRTIGNGKPTPLAEANTKARLTCLAGTSLK

SEQ ID NO: 70504 - protein, 577 aa, Zea mays
  Clone ID: UC-ZMFLMO17060E07_FLI.pep
NSHTLATHGHHHHHHHSTGPLPPLPLTMASSASLQRFLLPSPHAAATAASPSSRLRRTGRARAAVSVPPPAAAGEQVPTERLEPRVEERAGGYWVLKDKYRAGLNPQEKVKLEKEPMALFMEGGIQDLARVPMEQIDAAKLTKDDVDVRLKWLGLFHRRKHQYGRFMMRLKLPNGVTTSEQTRYLASVIEAYGADGCADVTTRQNWQIRGVTLPDVPAILDGLRAVGLTSLQSGMDNVRNPVGNPLAGVDPHEIVDTRPYTNLLSSYVTNNSQGNPTITNLPRKWNVCVIGSHDLYEHPHINDLAYMPAVKDGEFGFNLLVGGFISPKRWAEALPLDAWVAGDDVVPVCKAILEAYRDLGSRGNRQKTRMMWLIDELGMEVFRSEVEKRMPNGVLERAAPEDLVDKRWERRDYLGVHPQKQEGLSYVGLHVPVGRLQAADMFELARLADEYGTGELRLTVEQNIVLPNVSNERLDALLAEPLLQEQRLSPRPSMLLRGLVACTGNQFCGQAIIETKARALQVAREVEKRVAVPRPVRMHWTGCPNSCGQVQVADIGFMGCLTKDSDGKIVEAADIFV

SEQ ID NO: 70505 - protein, 217 aa, Zea mays
  Clone ID: UC-ZMFLMO17074D09_FLI.pep
RRRRSSGWMTHRLEVIGGHSRLLRPHPHFVVSAGSANGPRPDRRSSSRRGTVIAKERKNTFLAELKMPSHQDKKRNISSNFSKHAVKDEDEPAWTPLRDTYMLGSKLKDWDKMKAFANALVHIHPSHPGHLDSANSIEEKDKIIEITGLQNLAKSLSAQHCVQIKSAEYMERRASGVHEKYNLQSGKPKLTGSSIFRLGIKTRLTPFMKALLTTEVK

SEQ ID NO: 70506 - protein, 270 aa, Zea mays
  Clone ID: UC-ZMFLMO17078E06_FLI.pep
GLARDLNHQPKTFASHYFTSFQYTSSQRLEIDMACHLRSISLPSRPQSGEAAVQQELCILDAIISSPSTCIVTMCDGLRRLGDIYNSVVEMTHLPSNQVCSSQQRKMLDGEIESSLELLDLCNTMQEIFVELKAIIQELQVALRKGDGVTVQAKIQSYSRLVKKAKQSFKKSSKKATSDKADCAVVRLLTKAREIAISLLETTVQLLSKQIEVPKQSLVSKAFSKRKAVVCEEDQLQALECSVGDLESGAGHLFRILVQSRVSLLNILSS

SEQ ID NO: 70507 - protein, 791 aa, Zea mays
  Clone ID: UC-ZMROMO17068H01_FLI.pep
SQEISMTTIEQPIAIDQVEPVNLNVDELVVDDDQPGFAPRCESARLDKPGCTSKKDDSNEIVEDSKSLENQLEICNAATMSDECSSRNANEDPSPINMSAECSSRTANEGFSPINEASHLAEESCLSDKSYNAISYENGNGPAKSSEEPDKSCNAIICENENEPAKSSDVVETRCVEALAPSSVGTVVTAEQKDNGHRASGEWHGDNVQVIGQQQKIYIIKVPKFAGDDLWNKIQAAQAHLDHLTQERDAINRRRQKQKAVCDQYREKLEAARREEREARTAHGDKKNDLNNVRSVLGKLHQANSAEELDELIAKKERTMQHETISLKEEKLLIKEINELKAQRKQLSTTMGSKAEINEAFDQKDHIHERHKVLKKDSDVLLTNLKFLEENTRKIQKSFEDERTALRKLTEEHRAANEIRQKAYIEWTELRSEPSKKNEYFFRYRDDRNAAEIFRANGDINGLKSHCNSQIEGVMEMWNKNEEFRKQYVESNKVSTLKRLGTHDGRKLGPDEDPPVISSRRPSSIYPLSASSPGVATLASIPAPVVAAPAAVSAKEDSFPVLEAPQTSKRTKSKASDICAQTENNSVIVSEAEALEQTLKEKARLLEEQLELARKAEELARKEEELSKERAAAEKERLRMEQKAKAKEAEERKRRKAEKDKEKAEFKARKEAEEREKKKAKKDKRRGTAPADSSLTGDGHAAALATADTDSNASDNPREAEAPQPAAAPKRLSRPAAAIKQLNRVQPMPAPLRNRGRRRLRQYILIAAAVLSGLALFVAGNYIPRLKSVHS

SEQ ID NO: 70508 - protein, 538 aa, Zea mays
  Clone ID: UC-ZMROB73028D05_FLI.pep
ALMRRVLLVDGSLHNKLFPSTTSLHQELICFDLPSLHSTFLDLLNATIKGMRSQLLPHGASIIRLITEYFKIAKLPTLRTKTYSILQLLLTSMGVGTSLHLLEATVRNAVADLNDDGEINMTMINTNSSQLTNESSSKVYSKKRKQEPQMQNSTISGSEKVAISPRKRKGSSIPITSKGVAPESTGDVTLSTPHSVKIAALETLEVLLNVGGSLRMDRWRSEVDILLINVARSACGMGGSYEQKPSTFGEPNISDFQLASLKGLLASFLSSHARPPYLANGIELFRKGKLEIGTKVAEFCSHALLALDVLVHPRALSLERTVPASSGFNYTAQKKTVFGAGTHQISPFGDQPQAMEVEDMYDDWLISNNNEPPEVPVNGSDAVVSKGVLVEDGKQLNPIAEDPKVDPPRITDAAQDAPASTKTDVKVVDAAAATAAKPNTAENPSSSNAVPSPVRTTDSDSRKHASFPEQDSPHENKSAAVHPGEASATPGVGSSHHRHEAPEARSASFTELFGSESGIESESEDLMPDIVDGDPDSD

SEQ ID NO: 70509 - protein, 538 aa, Zea mays
  Clone ID: UC-ZMFLB73149G03_FLI.pep
RDSKLTRLLKDSFGGTARTSLVVTIGPSPRHRGETTSTIMFGQRAMKVENMVKLKEEFDYKSLCRKLDIELDKLIAENERQRKHFDDEVERIRAEAQCRIAEAERECKITLENEKMKYHEEYLDSIRILEEKWKVHQQSPKKQNKEAESTSNDTGEVHNLLQNEKMLRQSAEDEASDLKNQISHWKKLEATATAEIIKLQKMLDAEASQKEKLEEEIGVLRSQLLQMSMEADETRSLDKGDGPGKIFPGLDSLVSQTRGSQPREQDNGQKQPIAKLFEQVGLQKILSLLESEEPDVRVHAVKVVANLAAEEANQEKIVEAGGLTSLLMLLRSSEDETIRRVAAGAIANLAMNETNQDLIMAQGGVTLLSMTASDAEDPQTLRMVAGAIANLCGNDKLQTRLRVEGGIKALLGMVRCGHPDVLAQVARGIANFAKCESRAATQGNKMGKSLLIDDGALPWIVKNANNEAAPIRRHIELALCHLAQHEVNSKDIINEGALWELVRISRDCSREDIRNLAYRTLTSSPTLEAEMRRLGIKM

SEQ ID NO: 70510 - protein, 169 aa, Zea mays
  Clone ID: UC-ZMFLB73228C04_FLI.pep
SFSQKSPDAYSALSVVISIYGYARREAKQKQDSVRAAISFIKPRMEMDGLKPDFHPPSRWKYHEPLFVPRAKYLMCLRWATCQGMECKPNTHGPTFMVNMVGADRMPQRSYSSRYPFSLDAEMIPDDEFEMWLQQALASGVFADSPKRRKSWSPFKLPQKGIKSWRRSS

SEQ ID NO: 70511 - protein, 485 aa, Zea mays
  Clone ID: UC-ZMFLB73152G03_FLI.pep
LSFLSPSPSSHQPGMQPTTREMQAMAAAGQQISLDDLRAAAGGVHDDFLDQMLGGLPPSAWPELSSAAGGKAPDGGAQAEQMQHQPQHLGGGGGLYDDSALLASRLRQHQISGGGGGEAVKQMVLQQLADLRQEHHVLLQGMGRSTSTGGSRDGGLLLPLSLGSGGSGGDVQALLKAVADSAGGEAAGVFGGSFAGSLHHHQQQQQHFQSHPQQQTAPLPGQGFGGGAGASGGVSQPQAGAACGGAAAPPRQRVRARRGQATDPHSIAERLRRERIAERMKALQELVPNANKTDKASMLDEIVDYVKFLQLQVKVLSMSRLGGAAAVAPLVADMSSEGRGGVAVAAGSDDGLAVTEQQVAKLMEEDMGTAMQYLQGKGLCLMPVSLASAISSATCHMRPPVGGPGLGVAAAAAHHMAAMRLPPHAMNGGAGAGADAVPASPSMSVLTAQSAMAPNGAGGGTDGEGSHSQQQQRHHPKDAASVSKP

SEQ ID NO: 70512 - protein, 426 aa, Zea mays
  Clone ID: UC-ZMFLMO17050F06_FLI.pep
GREDVHFRVVSARSRQPHHPPHGRHAGWGPRRRRRGPDAGGPAAPPCRRRHSTRPRRRQGSDPVTGHIISTTIGGKNGEPKRTISYMAERVVGTGSFGIVFQAKCLETGETVAIKKVLQDKRYKNRELQIMRSMDHCNVVSLKHCFFSTTSRDELFLNLVMEFVTESLYRVLKHYSNMNQRMPLIYVKLYTYQIFRGLAYIHTVPGVCHRDVKPQNLLVDPLTHQVKICDFGSAKMLVKGEANISYICSRYYRAPELIFGATEYTTSIDIWSAGCVLAELLLGQPLFPGESAVDQLVEIIKVLGTPTREEIRCMNPNYTEFRFPQIKAHPWHKIFHKRMPPEAIDLASRLLQYSPNLRCTALEACAHPFFDDLREPHARLPNGRPFPPLFNFKQELANASPELINRLIPDHARRHLGLTLLPATGP

SEQ ID NO: 70513 - protein, 171 aa, Zea mays
  Clone ID: UC-ZMFLMO17306B11_FLI.pep
KLWRREMLVFKVISCVPFIHMSDQLAQVHFANFLQTRPQKKMKLQKKVSSQVKINNSACSSSVSTTFARLCRFTLSDDGRKINSFYHSFVEVLCLIVRVRACTQSETKCILAPTLLALLPLAALYRHKRHCVRDLSSFIYFFRMLLKILGEGVHQDTTAWLVNTQDAIVGS

SEQ ID NO: 70514 - protein, 575 aa, Zea mays
  Clone ID: UC-ZMFLB73084H06_FLI.pep
AERTTTHARLFLLLPAAAAAAARAFACPIPSPPTRSPRWHQFPIPPVHRRPPLSRTRTQRLPRRRRRAAMVSQHGILLAVNIISDHFGPIVSKVCGCLLRHGALSLQDIVRRLELSPGQVKNSLLILIQHNCVQAYTSPRGAGDRTVTLYLAIFDNVLHRLRFSKFLSVVRVDIPESEVLLEGLLQNGRLTFEQLVERTIFKVSEDSPLPTREEVRMNFNKLVYAHYVERCPKPEPFFDPLAVEQPTSTRKRAPKTVEAVLSLEQKVVCTAALSDAERFSEIPYFMDGSSSAKDGHHAVAGNKRKHETLEVDEDDSIIAESEVLWRINFERFIFCLKKKFCAERKKAKMRLGTLAIWEAFFEANVTNNDNKTVTSPIDGILERVGQKEGGMSMTLDHITSVLNDLECTSTANNPEEFTFDLNKLVETCRNDEIESLVKKKHGQEAYTIFRLLLKQGSPVETDEITDRTILDKQVVHETLYKLWKDEYIDSERVPSTSATGTGSAQFFVWRVKNIYREHFMDNLYHAALNLRQMVNYMAELLLEGSKDEIKLRNRKNILILALTRHDESLMLFHDF

SEQ ID NO: 70515 - protein, 424 aa, Zea mays
  Clone ID: UC-ZMFLMO17058F08_FLI.pep
GNICKGWTRDQVLNTLKSIGIQECEISFPSYKGGSRGFAFLKFTSHYYARAALRRLMKPDAIFGTDRSAKVSFYRTPTKSSKRLIQAKIVYLEHVPLSWDENKVKEYCEEYGEILKADVFQISKNMENETISFVEFSSRKGALACVTGINKANIVDGSFKLCAYLAWPKSASKVNSAAPSNAATATEKDKTHTEKILVDIDLQHKFQKGDKSKLTSQTKEAIMKKKSSSKLPNDNDTKLTSQGAAEVPQTSKSSEGKRKVGKNKHASVYQKPLKKAINNRNVDESQLTHRSAAVLQTSNTSKGKRKASENRSLYLNEKALKKARGNSNLGGSSRSKSYASDLEPHAGFISPAIRDNGSDAYNRQRTARYDIHPIDVHPYARAPSSAYSGYKSHAGYEAANTYEYAGNRAPTPPSGSYIPRRGHY

SEQ ID NO: 70516 - protein, 586 aa, Zea mays
  Clone ID: UC-ZMFLMO17055A02_FLI.pep
SLPQTGHPLRNLPKTQCENQREADDLDTLPLRLRDDGADVADADDEKRDRLEEEVDEEMVPPVRKIVPAAGEEEGCHPELRDVQPLPYPHELLPEPRFVSRFHLHGAAELRRHHPLVGPAGLQQADQRGLCSVQGHDVLEGDPEEKQVERPGSADRVEEGDGRGDVDAAPLGYADLGDEDGCRDDDAVEREGDDVRDDLAYQEEVVDDVDLLPDRHFLVRHNLHEHLPEQVRRAARPPVLLEPEGLEGTRQLAFHLDVTEVDELPALEAGPDGQIHVLHRGPVLPPPSLVHRGDAPHAGGAVESKEGADGGAHFLLHGEVVVQGHLLHPRHQALVRVHESPARLDEGDLRVVDEVGDGALEVVRVGLEVGVEDGHVLAVAHVRVPHPRPQRAGLVPLAVLPDLVRYVDPLPSPPLALHPHHLLNHFVRGVVEHLHHQPVRRPRQPAHGADGQLVHLALVEHGDLDEHDGERGGAQLRVVLGEGVAAVAAVGAEAEQAHPGDDDGHVHPLKEQKHRHGEAHGHRQPQQRHDHRRAHLRPRLRQRVHRSLSLSLWLRRRRATRGWGGGLGRLPACLGSARLCVSVTRA

SEQ ID NO: 70517 - protein, 156 aa, Zea mays
  Clone ID: UC-ZMFLMO17100B10_FLI.pep
SICRFNHPDRPGPAADIAFMVPLVQATLPSSAPIVPAVVEPLPMIYPQRPGETVCDFYMKTGSCKYSQKCKFHHPISRFAPHSKENGDPQQPATLASLPRREDAEACAFYMRSGMCRFGAHCKFDHPPREEAISELQAAGKEGIEGPSLVQRDHDV

SEQ ID NO: 70518 - protein, 389 aa, Zea mays
  Clone ID: UC-ZMFLMO17150G09_FLI.pep
QPYFCCRQIDNGDIKPFDVTQLQGYWSQEVLRTMFNATSSLKVRFKVPKSRPSSDGGLKRKRDAFNDDANPQKFISSGASTSRFYGENIQQLCPGCHVEVLSQDSGIRGCWFRCLILKRHKDKIKVRYLELQDADETGNLEEWVMLTRVAKPDQLGVRFLGRPMVRPQRVEQSKASCFDVGAIVDAWWHGGWWEGIVLYQVGSGRLQVYFPGEKRTAEFGEDELRCSLEWVGNKWNPLKGRKDVTSKLTSTADCGSEYLIAKQDPLNFHVPKNSEPQLEGHQYDKRGIEKSSVSTISRDQKRVLADLTNDLKLDNLRWRPRKRSRRSGSRKQSDTSSGSSSGDMDLFSPSPSGSFGQHNLVPDEETCKSSGEQTFMGVPVQVPNLVMSR

SEQ ID NO: 70519 - protein, 264 aa, Zea mays; identical to SEQ ID NO: 40375
  Clone ID: UC-ZMFLMO17169F07_FLI.pep

SEQ ID NO: 70520 - protein, 145 aa, Zea mays
  Clone ID: UC-ZMFLMO17295D11_FLI.pep
DVEGAGKLKCSCGEGACEGDHNNSNMFVLDADDSISRRVFCKNKLSRQYHSFIRNLWFTKRRRDRESFTKRRKDGEDMDSLRNGNMLPSFNLPQSGRVMYFWPEVIKRRLCRSDYFTYHNHPQIRLVTAVLIALAVLCLLVSHVK

SEQ ID NO: 70521 - protein, 504 aa, Zea mays
  Clone ID: UC-ZMFLMO17050A11_FLI.pep
DVKGVDEAKAELEEIVHYLRDPKRFTCLGGKLPKGVLLVGPPGTGKTMLARAIAGEAGVPFFSCSGSEFEEMFVGVGAKRVRDLFNAAKKCSPCIIFIDEIDAIGGSRNPKDQQYMKMTLNQLLVELDGFKQNGGVIVIAATNFPQSLDKALVRPGRFDRHIVVPNPDVEGRRQILEAHMSKVLRADDVDLMIIARGTPGFSGADLANLVNVAALKAAMDEAKAVTMQDLEYAKDRIMMGSERKSAVISDESRKITAYHEGGHALVAIHTEGAHPVHKATIVPRGVSLGMVIQLPEKDQHSVSRKQMLARLDVCMGGRVAEELIFGESEVTTGSSSDLNYATRLARAMVTKYGMSKRVGLVSYSENSVSGQTSVIDKEVKEILEKAYNNAKAILTTHDKELHMLANALLEHETLSGAQIKKLLPQVDNSNNKQKKAAKVPQKTPAARAKGVAQEAAGKAKGVAGTAAVAQEAATANTEGGAGTAAVPQEAATSVAAKAKGVAGT

SEQ ID NO: 70522 - protein, 414 aa, Glycine max
  Clone ID: 700807584_FLI.pep
PGVLQKEKDHVEGFAPEVAWVTKSGESELEIPIAIRPTSETVMYPYYSKWIRGHRDLPLKLNQWCNVVRWEFSNPTPFIRSREFLWQEGHTAFATKDEADAEVLEILELYRRIYEEYLAVPVIKGKKSELEKFAGGLYTTSVEAFIPNTGRGIQGATSHCLGQNFAKMFEINFENEKGEKAMVWQNSWAYSTRTIGVMVMVHGDDKGLVLPPKVASVQVIVIPVPYKDADTQGIFDACSATVNTLNEAGIRAESDSRDNYSPGWKYSNWEMKGVPLRIEIGPKDLANKQVRAVRRDNGAKIDIASADLVVEIKKLLDTIQQNLFDVAKQKRDECIQIIHTWDEFVQALNQRKMILAPWCDEEEVEADVKARTKGEMGAAKTLCSPFDQPELPEGTKCFASGKPATKWTYWGRSY

SEQ ID NO: 70523 - protein, 175 aa, Zea mays
  Clone ID: LIB3069-043-H5_FLI.pep
RASCASVRPCRAHCPPAHPRRPAVAPRTAWAAPRGGGGGAAPRAPSRAYGRTRGACRRAWTRRATRPPPGPPAARTAAAAAGAGAAAAVAGGGAAAAGAAAAAAERPVQARAPRRRRQAATRPWSPFCVDLSAWQLPRPRLVAAAAVLHSGSGPVELGLTGSPSRLLSFDQTSWS

SEQ ID NO: 70524 - protein, 205 aa, Zea mays
  Clone ID: UC-ZMFLMO17046E03_FLI.pep
AVPITDGNLGQSLDDTNDDLGAREPYIRTDPEVCEECIGERESCALVEKLNYQNEDIHVYFVHGKEAPKSIKEASKAVTVPDRRTSKRSRRTSSGNSISLKVSGSTSVYQLKLMIWESLGIVKENQMLHKGSVEIEDDFATLADKSIFPGDFLWVRDSEIYENRDIADEISEQKDDMLQAEEGFRGTLLTSTVSAQLCQDIAFSE

SEQ ID NO: 70525 - protein, 218 aa, Zea mays
  Clone ID: UC-ZMFLB73026H10_FLI.pep
ARQGFKHAISVAPLYRSFSCLCPVQWLMIMFKHYCLLISVHLLQERGATIYAEFLGGSFTCDAYHMTEPHPEGRGITLCIEKALADAGVAREEINYVNAHATSTQAGDLKEYEAIVRCFRQNPQLRVNSTKSMTGHLIGAAGGIEAVASIQAIRTGWVHPNLNLENPEDTVDVGILVGSQKERCEVKVALSNSFGFGGHNSSILFAPFKELPSSSSSK

SEQ ID NO: 70526 - protein, 65 aa, Zea mays
  Clone ID: UC-ZMFLB73108G11_FLI.pep
GWEHGTGPVPSELVFYEPGELTTNMLPYISCTLSWYRTWSCAFSLWGTYGVPGVPCVKCRAWRPL

SEQ ID NO: 70527 - protein, 238 aa, Zea mays
  Clone ID: 700265193_FLI.pep
QQNTSGAPKSCLYSTKKLQLCFHTSLLCFLWHPSRWSWGCDRCCWFSWALGQPLLPPSNLPLTACLALCTLGLKLIRKCLLSGLLSLGLVDTLHKHPLVLKHITLDLHVHVMIHVLVDLLGLTVLAEQAPQNTHPPHPQNLGGEPSLPGTPALAISRVPSLLLGLMCPSCTGPRVNLLRLPDDKPILNQLPDVLAGVSHGDLADFIGVKPDFAFPTLEDARGEPLLQLQRHHLRRRRR

SEQ ID NO: 70528 - protein, 634 aa, Zea mays
  Clone ID: 700346926_FLI.pep
LSSLRGFPSSSPALMAKEQDGSPKVRHPEFQRMRVTLTIGVIGLCVTAYILGAWQGTSNGISSPLISTRTQCKDPVRSSGARLDFQAHHQVGFNESALAVEKFPPCQLKYSEYTPCQDPRKARKFPKKMMQYRERHCPKKEDMLRCLIPAPPNYSNPFQWPKSRDYAWFNNIPHRELSIEKAVQNWIHVEGDLLRFPGGGTMFPHGADAYIDDINALVPLNEGNIRTALDTGCGVASWGAYLMNRNIITMSFAPRDSHEAQVQFALERGVPAMIGVMGTERIPYPARAFDMAHCSRCLIPWNKLDGVYLIEVDRVLRPGGYWILSGPPIHWKRHYQGWERTEGDLKQEQDEIEDLAKRLCWKKVVEKGDLAIWQKSINHVECVDSRKVYDAPQICKSNDVDSAWYKKMDTCISPLPDVKSEDEVAGGVLETWPKRAFAVPPRVIRGSVPGLTPEKFQEDNKVWSERVDHYKKLIPPLGKRRYRNVMDMNAGIGGFAAALMKYPLWVMNVVPSGLAHDTLGVIYERGFIGTYHDWCEAFSTYPRTYDLIHADKVFSSYQDRCDITYILLEMDRILRPEGTVIIRDNVEVLVKVQAITGGMRWKSQIMDHESGPFNTDKILVAVKTYWTGKLVQKQ

SEQ ID NO: 70529 - protein, 623 aa, Zea mays
  Clone ID: 700467025_FLI.pep
SSAPPPPVPRSCLASPPLERARQARGEVFEMKVIEKILEAAGDGRTAFSFEYFPPKTEEGVENLFERMDRMVAHGPSFCDITWGAGGSTADLTLEIANRMQNMVCVETMMHLTCTNMPVEKIDHALETIKSNGIQNVLALRGDPPHGQDKFVQVEGGFACALDLVQHIRAKYGDYFGITVAGYPEAHPDAIQGEGGATLEAYSNDLAYLKRKVDAGADLIVTQLFYDTDIFLKFVNDCRQIGITCPIVPGIMPINNYKGFLRMTGFCKTKIPSEITAALDPIKDNEEAVRQYGIHLGTEMCKKILATGIKTLHLYTLNMDKSAIGILMNLGLIEESKVSRPLPWRPATNVFRVKEDVRPIFWANRPKSYLKRTLGWDQYPHGRWGDSRNPSYGALTDHQFTRPRGRGKKLQEEWAVPLKSVEDISERFTNFCQGKLTSSPWSELDGLQPETKIIDDQLVNINQKGFLTINSQPAVNGEKSDSPTVGWGGPGGYVYQKAYLEFFCAKEKLDQLIEKIKAFPSLTYIAVNKDGETFSNISPNAVNAVTWGVFPGKEIIQPTVVDHASFMVWKDEAFEIWTRGWGCMFPEGDSSRELLEKVQKTYYLVSLVDNDYVQGDLFAAFKI

SEQ ID NO: 70530 - protein, 278 aa, Zea mays
  Clone ID: LIB148-009-G5_FLI.pep
ALPSKPKASCLLFLPGMEEVAVSPMIVAAVVLDNNGADAVSCTAIPSVTISLEEKENINGDVPTITSAASNEEEALFSVGESTKDDGHRLTMECSTPVSSSSPSTRKKRGAFSLFRAMFLSFGRSDDSMKKTDDDTTSPKKRAIAAADDDCKPAGDESTSWKRLVDGMRPLRLRGQLEYYPPPPPPPPLGHADVYHDVILPPPSQARFGFEIKEVGMTSRYASAEDLHQMDSDQEEGAEGGDDGDSSCPHAIDMQAEEFITKFYEQFKSESFNGRASE

SEQ ID NO: 70531 - protein, 152 aa, Zea mays
  Clone ID: 700621563_FLI.pep
GRSAMTPGSSAAGSGVVVPRNFRLLEELERGEKGIGDGTVSYGMDDADDIYMRSWTGTIIGPHNTVHEGRIYQLKLFCDKDYPEKPPSVRFHSRINLTCVNHETGVVDPKKFSVLGNWQRDYSMEYILTHLKKEMTSPQNRKLVQPPEGTFF

SEQ ID NO: 70532 - protein, 434 aa, Zea mays; identical to SEQ ID NO: 58987
  Clone ID: 700461113_FLI.pep

SEQ ID NO: 70533 - protein, 402 aa, Zea mays
  Clone ID: 700615924_FLI.pep
LVENYAELLASQGLLKTAMEYLKLLGSDEHSNELAILRDRIACSMEENDNARSYVSESTATPSLYGTNQSYTAPDHSQNVYQQVPQPYNVPSNAYSEAYPQQPTGAYGYNNTYQPQQPTHMFVPPSAPASSQQQPGPSPVPVPQQTVKAFTPANPAGLKNPGQYQQPNTLGSQLYTGTANQQYPSGPSASYPSGPPTTFHQPVSPVQYQPVAPPVSSFGPSAPVPATVPTQMFPHSAAANSTSRFMPSNNQSFAPRPGLSPAQPSSPTQVQAQPAPPAPPPTVQTADTTKVSAELRPVIGTLTRLFDETSKALGGSQATQAKKREIEDNSRKIGALFSKLNSDDISPNVSSKLRQLCSAIDASDFATAMHLQVLLTTSDWDECNFWLAALKRMIKTRQNFRM

SEQ ID NO: 70534 - protein, 87 aa, Zea mays
  Clone ID: 700455830_FLI.pep
HCSRSRSWRIQRMQNSRQRGNMSNVDTIKEFESLAFDGHNFPTWSIDLKVSLSLQIFLGGHCSTVIGYSVPNNKTKYIIRLIYIPQT

SEQ ID NO: 70535 - protein, 819 aa, Zea mays
  Clone ID: 700089311_FLI.pep
LERYGAASNDLPVSSTTVTTNEITAMVPPPSTSAADRLGSILPELLNTGDALERYQQVAQKLEALIANDGKDVEIQSVIMEVPDILRRCVSRDEAALAVAQKVFKSLYDNTSNTTYVSWLLATLVAIRDVCKLVVKELTSWVIYSDEEKKFNIDIIFGLIRSELLNIGEYNVHLAKLIDGGRNKVATEFAMSLVQALFAHDPVGFTEFQNVLDALSKHTKRPGSPESLQQLIEIARNNVSTTTGFVAVKDEKVKLPKDKKVLATRANKEENTANEITLVDPNQVAVLFSEWCQMCNHVSASDAAYTRFVTQLQQDGLLKGDDISERFFRILTELAVTHSLVSEQIVAPGGSSQQSPQQPHISYFSIDSYAKLVVMVLKYSVEITPNKASILSKILSVTVRSIQKDAEEKKASFNPRPYFRLFINWLYDLTTTDGHHDSSNFQVLTAFANAFHMLQPLRVPAWSFAWLELVSHRSFMPKLLMCNSQKGWPFFQRLLVALLKFMEPYLRNAELPEAMDLLYKGTMRVLLVLLHDFPEFLCDYHFSFCDVIPSSCIQMRNVILSAFPRNMRLPDPSTPNLKIDLLAEISIAPRIMSDVDGALKSKQLKTEVDEYLKRPEGSSFLSDLNQKLLLPQNEASVAGTRYNVPLINSLVFYVGIQAVQQLQLNKANPSASVQQINHISPMDIFQIGTATDIFRSLITSLDTEGRYLLLNAIANQLRYPNSHTHYYSFITLYLFSEATQEITQEQITRVLLERLIVNRPHPWGLLITFIELIKNPRYNFWSRSFTHCAPEIEKLFESVARSCGAKVVDEGISVQDGSH

SEQ ID NO: 70536 - protein, 218 aa, Zea mays
  Clone ID: 700089471_FLI.pep
KPCLLLAYKLKYPDNIYLLRGNHEDAKINRVYGFYDECKRRFNVRLWKIFCDCFNCLPMAALIDDKILCMHGGLSPELTSLDQIKDIERPTEIPDYGLLCDLLWSDPSHDTEGWGESDRGVSCTFGADKLVEFLEKNDLDLVCRAHQVVEDGYEFFAERRLVTIFSAPNYCGEFDNAGALLSIDESLMCSFQILKPNETGAPHSRKPLPSKAPKGENV

SEQ ID NO: 70537 - protein, 162 aa, Zea mays
  Clone ID: 701161192_FLI.pep
VHHSFIVTIYHHYLPSLFTVTFYRLPLLFIVTFYRLPLLFTVTFYRYFLPLLFTVYRYFLPFTITFYRYFLPLLFTVYRYFLPLLFTVTFYRYFLPLLFTVTFYHYYSPLLFINHPITPNFNYSSIMLSSPPKTSQTHIPVIQTPVTVIFIPVGNFLAGHPS

SEQ ID NO: 70538 - protein, 361 aa, Zea mays
  Clone ID: 700472525_FLI.pep
TYFTLVLKYRFIQYRFRMRRHVFERLVLAVQQVDPYFVQRPSCAGELGLSALQKVVAAVRILAYGVPADAVDEYVRIGESTAHEALKHFCTAIQTAFGGYYLRKPTPADIARLLHVGESRGFPGMLGSVDCMHWEWRNCPTAWKGMFTGRGKHPTMILEAVASYDLWIWHAYFGMPGSCNDINVLQRSNLFDSHLHGDSPPVSFSVNGHTYNMGYYLADGIYPDWPAFVKTIRHPYDVRTQHFATVQESARKDIERTFGVLQKRWAIVRGPAYGWSPQHIGDIMKTCIILHNMIVEDEGPSSMNTSFDNIGVLADTSHGSFSERNEYINNRYDQLHDPVKYNQLQVDLIHHHWARLGSGAA

SEQ ID NO: 70539 - protein, 323 aa, Zea mays
  Clone ID: 700350401_FLI.pep
RERGPSTGPPDQSHSTSGSHPKPRTASPPMADRVYPAAKPNPPPGAAGNSNGAQASSFPAPKSQMYQRPIYRPQAPAKRQRGRSCRCSLCCCFCWALVVVILLAFVGAVCGGVFYLLYRPQRPSFSVSSVRLASLNLTSSATAPVLSDAITLTVTARNPNKKMVYLYDDLTLLVATAANAVPLGSATVPGFAHAAGNTTVLTATVSASAVGVDPSGASSDIKRSGGGSFSVVVDADTSAGVRVGGLKTKKIGIQVHCEGIKLTAPPPPPPAPKRAKGKNSTAALAPAPAPSAADATPAKTATVSTAAHSCKVRVRVKIWKWTF

SEQ ID NO: 70540 - protein, 347 aa, Zea mays
  Clone ID: 700549610_FLI.pep
NKSSLSRNTLEKRAKEENTGRRGGRSGPPRKWRRCRAGARPTAPSRTPPPLASPISTPTSRCAFDPDLDVAIVKATNHVECPPKERHLRRVVAATSITRPRADVAYCIHALARRLAKTRNWIVALKALVVIHRLLREGDPTFREELLNFTQRGRILQLSNFKDDSSPIAWDCSAWVRTYGLYLEERLECFRVLKYDVEAERLSKQGQGPEKGHSRTRELDSQDLLEQLPALQQLLYRLVGCRPEGAANNNYLVQYALALVLKESFKIYCAINDGIINLVDKFFEMPRHDALKALEIYRRAGQQAGNLSDFYENCRGLELARNFQFPTLREVRACTLSSLRYVHWIML

SEQ ID NO: 70541 - protein, 393 aa, Zea mays; identical to SEQ ID NO: 58706
  Clone ID: 700332110_FLI.pep

SEQ ID NO: 70542 - protein, 447 aa, Zea mays
  Clone ID: 700236926_FLI.pep
LAQAIRDSVSATVDRTPLNPRARCCLLSQISFAAKDSEFSDWDGDILAVAVTDKDVQVQPHVSGSEFENAVLRRLDVQLGGLLRAAAAEEEFAGRPGQSVVLRVRGQRFKRVALVGFAARDRDRDAGCLHGLGESVASVARAARATSAAILVADPAVVRPESRLNAAAAIASGTVLGLYEDNRYKSEWEKVHLKQVDLIGLGSGPELDQKLRHANRLSSGVMLARDLVNSPANVLTPGALAEAAAKIASTYSDVFTATILDAAKCRELKMGSYLAVAAASETNPPYFIHLCYKPRGGDVRRKLALVGKGITFDSGGYNIKAVPVATIELMKKDMGGAAAVFGAAEVLGQIKPPGVEVHFISAASENMISGSGMRPGDIVTASNGKTIEVDNTDAEGRLTLADALVYACNQGVDKIIDLATLTGAIRVALGPSIAGILTPSDELAEEF

SEQ ID NO: 70543 - protein, 241 aa, Zea mays
  Clone ID: 700244131_FLI.pep
RGRSGDPFHTTTTALAPARRRSCQICSGHRSSDSEPSPMAVKVYVVYYSMYGHVGKLAEEIQKGASSVEGVEAKTWQVPETLPEEVLGKMGAPPKPDVPVITPQELAEADGILFGFPTRFGMMAAQMKAFFDATGGLWREQSLAGKPAGVFFCTGSQGGGQETTALTAITQLTHHGMVFVPVGYTFGAKLFGMDQVQGGSPYGAGTFAADGSRWPSEVELEHAFHQGKYFAGIAKKLKGSA

SEQ ID NO: 70544 - protein, 640 aa, Zea mays
  Clone ID: 700096446_FLI.pep
RVAILESSEAAKQIMKELTEGSSSGNVSRDFTNSMDGQIMLDDSEDDDDGDEKEFDSAALAALLKAATGGSSDGNVTVASQDGSRIFTMDRPAGLGSSAPSLRPTAPRQPARSNLFSPSELAVTADPTEEMTEEEKKLHDKVELIRVKFLRLVYRLGATPEETVAAQVLYRLSLAEGIRHGRQTNRAFSLDNARRKALLLEAEGKEDLNFSCNILVLGKTGVGKSATINSVFGEEKSKTDAFSSATTNVREIIGDVDGVKIRIIDTPGLRPNVMDQGSNRKILAAVKKYTKKCPPDIVLYVDRLDSLSRDLNDLPLLKTITSVLGSSIWFNAIVALTHAASAPPEGLNGAPMTYEVLMAQRSHIIQQSIRQAAGDMRLMNPVALVENHPSCRKNREGQKVLPNGQSWRHQMLLLCYSSKILSEANSLLKLQDPNPGKLFGFRFRSPPLPFLLSSLLQSRAHPKLSAEQGGNEGDSDIELDDYSDVEQDDEEEEYDQLPPFKPLTKAQLARLTKEQKNAYFDEYDYRVKLLQKKQWKDEIRRLKEMKKRGKTDLDDYGYANITGEDDQDPPPENVSVPLPDMVLPPSFDCDNPTYRYRFLEPTSTVLARPVLDAHGWDHDCGYDGVSVEETLAILSRFQQM

SEQ ID NO: 70545 - protein, 137 aa, Zea mays
  Clone ID: LIB83-003-A12_FLI.pep
VSTATSTHFPLADRRKEGRRRWVAAWRCTKTGGSKSGTPAARTSSSISAGPAAASPSSASSASLSPSSSTRASSANSICRTRMQAGHTGSSCKRRPGPQETSIPRPGLRGGEFPFSLCRYCFSLNLMEQFGMLNYCA

SEQ ID NO: 70546 - protein, 121 aa, Zea mays
  Clone ID: LIB4073-019-A5_FLI.pep
GARRTSPSGLLSAAAKMVNVPKTKKTYCKNKECKKHTLHKVTQYKKGKDSLSAQGKRRYDRKQSGYGGQTKPVFHKKAKTTKKIVLKLQCQSCKHYSQHAIKRCKHFEIGGDKKGKGTSLF

SEQ ID NO: 70547 - protein, 261 aa, Zea mays
  Clone ID: LIB3960-007-F5_FLI.pep
RSPRESRGETKSRDMDSEHWISRLAAAKRYYAAQLGRVDDVPGMGTEEVEMEVEDDGDMEMELEMALELGDATWPEVACPYCYEDHDVASLCIHLEEDHPYEPHAAPCPICSQRITRDMLNHITMQHGYLFKNGHRSRRFIVPESHAISLLSRDLRGTHLQALLGGGHGHRSNNAVTTNISSDPLLSSFGLSFSASDAPEPSKSASSIPDGTAIRKETPVQPWESSIDSSLTSEEREQKRKQATGRATFVQGLVMSTLFGD

SEQ ID NO: 70548 - protein, 596 aa, Zea mays
  Clone ID: LIB3960-012-B9_FLI.pep
IRSWPSLLRGRWILWSSAGAPSRALSAWRAEARDGCGSGFGQPTAPSPWRAALSPWRRARIPRPCLHFLVVLAAIRFLVRNFTPKMVQLFLQVPAECGSVNTVVVEGRRSLFHNVESIIKSLTKSAGRYEARLWLCATVSLVHSLSDCGQRDLFLDLLERKNSRRDVAARLLRMIFDKKPRMVGSILARKGHILEDFFRGNPNRIMQWFGHFAVTGESTHRKGAKALSQFAFVNRDRCWEELEWKGKHGQSPAVVATKPHYFRDLDVLETVENFLEYVPDFWSSDELANSIKDGEILQIDEEYFVDQFLYLMYEENSKDAWHVVEDFLMDEQFSSLCQHLLIHLDEERLLGFLNSLGKLINPTMQCKELTFPCCWLEVLLSGHYDHISLDDLVFLNCVIAKGRQLWRLMNDEEQHEEWGQMEELLKGGNHLTDADHFALMKELVETELPGVLKWVGIQSWIIFCELSKECKSGDSCESFFSHNKIEFHKADDYSLVRNYGFSISHMPDIDVEDLTRSSHKRRKRNRRKRHRYESDEDKFDELLELGSSDGKNGVESQRGSWRLSTDGFSASWDISDIPDHLSTCYFTIWVKWACFR

SEQ ID NO: 70549 - protein, 318 aa, Zea mays
  Clone ID: LIB3960-021-C1_FLI.pep
HCSSELGRMPDIQLGCHTIRSHGTKVATLHMYDWIILLCLAVLDGLLNIIEPFHRFVGRDMMTDLSYPLKGNTIPFWAVPLIAIVLPLVIFAVIYFKKKNVYDLHHGILGILYSVLITAVITDAIKDGVGRPRPDFFWRCFPDGKPNFNNITTDVICHGEKSVIKEGHKSFPSGHSSWSFAGLGFLAWYLAGKLKAFDRKGHIAKLCLVFLPLLVASLVAVSRVDDYWHHWQDVFAGGIIGLTVASFCYLQFFPYPFDNDALWPHAYFQQLAETHSNGNANSINIRPTEFEDEPDDHGDIVLRDTSPILESMESGRRP

SEQ ID NO: 70550 - protein, 344 aa, Zea mays
  Clone ID: 700259617_FLI.pep
LMPAHQMRHRHAAAMMNVVAIGLILSTLAAAGVWSPAPQPTAAPHHGDRIVREGRRVVIVEYERELPLSTDGGGSVKVKETRVLPPDALDGVEGDGGTFDEARGVVSDAAGKVAGAAEEGKERLSDAKESAKGGVLGTVKRCKDRLCGAGRKVEEGAKDAVSRVEHGAEDAARGAMEAVSDAKDSAENTAFDAVQKGKETMKSAKDKASDAEQRGKDAVRSAKDKASDAAHQGKETVKSAKDKVCETASKAKERASGIQHGAAEAAKAAKERVSAAAKSAKDTVQSARDSVSDIAQRAEECAEDTAERAADRAAEAEEEAKARAAEVAKNLTDIARRARGVASD

SEQ ID NO: 70551 - protein, 487 aa, Zea mays
  Clone ID: CC-ZMLE189101G07_FLI.pep
CSCAYAYTAPIRIVLLASLADPPLPSPRFKMQIFVKTLTGKTITLEVESSDTIDNVKAKIQDKEGIPPDQQRLIFAGKQLEDGRTLADYNIQKESTLHLVLRLRGGMQIFVKTLTGKTITLEVESSDTIDNVKAKIQDKEGIPPDQQRLIFAGKQLEDGRTLADYNIQKESTLHLVLRLRGGMQIFVKTLTGKTITLEVESSDTIDNVKAKIQDKEGIPPDQQRLIFAGKQLEDGRTLADYNIQKESTLHLVLRLRGGMQIFVKTLTGKTITLEVESSDTIDNVKAKIQDKEGIPPDQQRLIFAGKQLEDGRTLADYNIQKESTLHLVLRLRGGMQIFVKTLTGKTITLEVESSDTIDNVKAKIQDKEGIPPDQQRLIFAGKQLEDGRTLADYNIQKESTLHLVLRLRGGMQIFVKTLTGKTITLEVESSDTIDNVKAKIQDKEGIPPDQQRLIFAGKQLEDGRTLADYNIQKESTLHLVLRLRGGY

SEQ ID NO: 70552 - protein, 344 aa, Zea mays
  Clone ID: UC-ZMFLMO17001C04_FLI.pep
TLESLELSVPDPLDLDILGRLGPEVGVGRLHALEDADDLAGLRVALGDAQRDVAGGGGGVLDVLLLELLLVTSAPGGERDGVVVAGGAAAALGVEEGGATVAGHEEGPAEALGLAGGDELLDGEEERHALAPRELHGDGGVVDAVLLLELERAVGADLERALDLVQRVREAGHELGLLELGRGVLGDALRLDGEGRRLQAQLLHLVLAGLERERLHAAVDGRALVRRARALHLHVRFALDLVVGQPLGRALRARARDEERRGGEREAGELRGVDAPAGDVLQGARDPGGAGVDAERPAGELRRRAGRQRGKGRPAADLGRLHQGGRGLERGCHRRRGGDAFWLL

SEQ ID NO: 70553 - protein, 289 aa, Zea mays
  Clone ID: UC-ZMFLLIB3205453H01_FLI.pep
LPLVLGELISRSINLIINKLSKMNMEESLQRALLRAQVIIEEAMGRHITNQVILLQLGVLRDAMHRGYYALDAFRYQPHYGEDGNPAVRRFVRLSKVPCAKDLYFSGPTVQFQEQLQEALDKLSSMIVDMNELVMFLMSYPRLYRQPYNKHILLGNCMFGRQMEAQLVINFLLHTKPHSSEELYVLPVVGPHRVGKSTLIAHVCKDERVRDYFSEILWLHDSDFTDDELTLRQGCAMKRQLFLSNFKKGKRFLVVIELYGNLCEDAWNKFYRASRQSFLSGSKIIVTSC

SEQ ID NO: 70554 - protein, 293 aa, Zea mays subsp. mexicana
  Clone ID: UC-ZMFLTEOSINTE37D08_FLI.pep
HRAATRGEQEPTNKLATVISRPSREREREREREGGSMADHKEEPVPESVMDKITEKFHGGDSSSSSSDSDDEKKGSSSESAAEAMKAKIYRLFGRERPVHSVLGGGKPADLILWRNRKISGGVLAGATAIWLLFEVMEYHFLTLVCHCLILSLAILFLWSNASTFINKSPPNIPEVKIPEDVAVNVALSLRYEINRGFATLREIGHGRDLKKFLIVIAGLWLLSVLGSCCNFLTLFYIVFVALYTVPVLYEKYEDKVDAFGEKAMIEMKKYYAIFDEKCLSKIPKGPLKDKKH

SEQ ID NO: 70555 - protein, 347 aa, Zea mays subsp. mexicana
  Clone ID: UC-ZMFLTEOSINTE100F10_FLI.pep
ALGNVAGDSPKCRDLVLGHGGLYPLLQQLNEHAKLSMLRNATWTLSNFCRGKPQPNFDQVKPALPALQHLIHSQDEEVLTDACWALSYLSDGTNDKIQAVIESGVFPRLVELLMHPSASVLIPALRTVGNIVTGDDMQTQCVIDNQALPCLLNLLTTNHKKSIKKEACWTISNITAGNKEQIQAVINANIIAPLVQLLQTAEFDIKKEAAWAISNATSGGTHDQIKYLVAQGCIKPLCDLLVCPDPRIVTVCLEGLENILKVGEAEKNLGAGDVNVYAQMIDDAEGLDKIENLQSHDNTEIYEKAVKMLESYWLEEEDDAMPSGDNPQNGFNFGNQPSVPSGGFNFG

SEQ ID NO: 70556 - protein, 228 aa, Zea mays subsp. mexicana
  Clone ID: UC-ZMFLTEOSINTE102B07_FLI.pep
VVGLLQGSVNCRQDHPTSSGNGLYNGGNSGPVAKANSTNSMQSNAPASFPLPAPSASNGNMMPAPQHSSQMNSPTMSSNLPPMQTPASRPQEPEPIESQSSVQRILQDLMMQSHMNGVGPVGSDMRRANTITPGLNGVNSVVGNPMTNNPGINGMGFAAMGGLGQQMRTAMGNNALAMNGRTGMNHSAHDLTQLAHQQQQRDLGNQLLGGLRAANSFNNLQYDWKPAQ

SEQ ID NO: 70557 - protein, 309 aa, Zea mays subsp. mexicana
  Clone ID: UC-ZMFLTEOSINTE108A01_FLI.pep
VILINGDDWKRHRKVVLPAFNHETIKSMSAVTAEVTEQMMQQWRGQIHGSEEESAEIDMIHAFNDLTSKVNGRVAFGTSHREVEEVIVLMREMQKLATAATLDAPILWYLPTRRNLHVRRLNKQLRSKIMSIMQARLAADGADRRGGRGGAVSGGGDLLGLLLEAWTPQPQHGNGGETLTTDEVIDECKTFFAAGQETTATLLVWAMFLLAVHPEWQDKVREEVVREFCTSDDGEVPHADVLAKLKLLYMVLLETSRLYPPIVYIQRRAAWTPSLEASRCPRAPSSPSPLPCCTGTSRSGAPTPMSSTR

SEQ ID NO: 70558 - protein, 638 aa, Zea mays subsp. mexicana
  Clone ID: UC-ZMFLTEOSINTE110B03_FLI.pep
TELPSLSPPPPPTPKMTTMENVIVLVNRIQRACTVLGDHGSGDAAASLPTLWEALPTVAVVGGQSSGKSSVLESIVGRDFLPRGSGIVTRRPLVLQLHKTEAGVQEYAEFLHMPKRRFTDFSLVRKEIQDETDRLTGKTKQISPVPIHLSIYSPHVVNLTLIDLPGLTKVAVEGQPESIVQDIESMVRSYVDKPNCIILAISPANQDIATSDAMKLAREVDPTGERTFGVLTKLDLMDKGTNALDVLEGRAYRLQHPWVGIVNRSQADINKNVDMIIARRKEQEFFDSSHEYSHLASRMGSEYLAKLLSQHLEAAIRSRIPSITSLINKTIDELESEMDHLGRPIASDAGAQLYLILELCRAFDKIFKEHLDGGRPGGDRIYGVFDNQLPSALRKLPFDRHLSVQNVKRVVSQADGYQPHLIAPEQGYRRLIESSLNYFRGPAEASVDAVHSVLKELVRISIGETQELKRFPSLQTELAAACYKALERFREDGRKTTLRLVDMESAYLTVEFFRKLPQEVDKTGTGNPRTANPPAPSDDRYTDAHFRRIASNVSSYIGMISETLKNTIPKSVVHCQVREAKRSLLNDFYTQVGGKDAKQLAVLLDEDPALMERRLQCFKRLELYKSARDEIDAVSWTR

SEQ ID NO: 70559 - protein, 434 aa, Zea mays subsp. mexicana
  Clone ID: UC-ZMFLTEOSINTE111D05_FLI.pep
GRGRRRTLARDRRRQNRISSPPPLLPRSGQSAPRENQDIDFSIWTRCLKVLSEMDKKKAADGTEPGPAPSRAVDRFGFIKPEQGNSPDGIPKGKSIHEREREERRIRKWRKMIGVGGNDWKHYVRRNPHVVKRRIRKGIPDCLRGLVWQLISGSRDLLLMNPGVYETLVIYETSASELEIIRDISRTFPSHIFFQQRHGPGQRSLYNILKAYSVYDRDVGYVQGMGFLAGLLLLYMSEEDAFWLLVALLKGAVHAPMEGLYQAGLPLVQQYLSQFEKLVIELMPKLGQHFVEEMINPSMYASQWFITVFSYSFPFHLTLRVWDVFLYEGIKVVFQVGLALLRLCHDDLVKLPFEKLLYALRNFPEEATDPDVLLPLAFSFKVSSRLEELQKEYQKRQEGTSETSSGERLQPLVSKTMSRVGSRVVSNLTTADRK

SEQ ID NO: 70560 - protein, 124 aa, Zea mays subsp. mexicana; identical to SEQ ID NO: 41198
  Clone ID: UC-ZMFLTEOSINTE70A07_FLI.pep

SEQ ID NO: 70561 - protein, 305 aa, Zea mays
  Clone ID: LIB3060-021-F3_FLI.pep
HRTQILGRGSSPRHLPWRLASQPLPSRELAELSLSPWPRRALLPLSSLARAGRSYQFPWPRSVLLWSSLLLLSAQARRPPDLHRPAPWRALPFSARSRTAQSPLVVARLLPASRVVRRAPSLAVPGSSSAGPVPHGRRLLDPSSLPSHPYSSMAASSLCCLLRRAPSPQPRSPPCRVPAELLRTAPCRGFPFLRAVALLLALRARSSVPARSRFLGSPWSLRARFCPVHVPLGRPRDTSSMAAVRRRVPTCAPAPCVAFHSPKPEFASRPYLPVCCCSSSDLAQVAAMVIRCLARADSRSLISPS

SEQ ID NO: 70562 - protein, 337 aa, Zea mays
  Clone ID: JC-ZMSHLIB3587P044D08_FLI.pep
AEEEEEDLLLLEGEEGYIVGDGGYYYPELRCNDEEYYYEDGREEEDAVALDLERRICLLEHDQEPRLLEPPHEKEEGTHLYTDEVLPDMSEHELGGLYADEMLSKEDVETMNNLHNDDEELPESPTAGNDDREEASEADGADSVSGSGSDRVYTIDKVHQGAAMPIARVVDKYQGEAVEPDIKKLYMRLEALEADRESMRQALVAMRTEKAQLVLLREIAQQLAKDGVPVGPGAGAGPGVHHLPRKHTVGIVERRFTEDKKAILVKTFSMAALFKWILALLGKKKKLSQSRYTFGLTNNNVGLLILLDKCPRIQKTLTRTKLNLAERSSSSSSSCTM

SEQ ID NO: 70563 - protein, 469 aa, Zea mays
  Clone ID: JC-ZMSHLIB3587P027G09_FLI.pep
ATAAAARHVVAVPYPGRGHVNPMLVVCRLLAAADAALSVTVVVTEEWHALLAAAGVPGTLPDRVRLATIPNVIPSERVRGADFAGFVEAVHIKMVAPVERLLDRLSLERKPDAIVADTFLAWGVGVGSARGIPVCSLWTQPATFFLALWHLDRWPPVDGHQGEEGLSCRSLDQYLPFPALAPVKCSDMKTLRSMVLPMKRLAQVFSNLRKAQCVLFTSFYELETGAIDGTSQVVPCPIYAVGPSIPYMPLEGDSGEFHHEEDYFGWLDAQPRSSVLYVSFGTHVSMPSSQLEEVALGLHESTVRFFWVARDRASTATLEQISAGGKGLVVPWCDQLKVLCHPSVGGFLSHCGWNSTLEAVFAGVPMLAFPVAWDQLVIGHLVADEWKIGVDLRERRREDGVVGRAAICDTVTKLMDLTDDDSLEMRRRAAELREASRRAVQEGGSSRCSLNSFVRDVIEGRLNVAETSR

SEQ ID NO: 70564 - protein, 380 aa, Zea mays; identical to SEQ ID NO: 48492
  Clone ID: UC-ZMFLB73232F03_FLI.pep

SEQ ID NO: 70565 - protein, 363 aa, Zea mays; identical to SEQ ID NO: 42242
  Clone ID: UC-ZMFLB73198F12_FLI.pep

SEQ ID NO: 70566 - protein, 452 aa, Zea mays; identical to SEQ ID NO: 47541
  Clone ID: LIB3151-059-G9_FLI.pep

SEQ ID NO: 70567 - protein, 184 aa, Zea mays
  Clone ID: LIB3279-019-G6_FLI.pep
RLSLAPPPPATMSLAAIFVFLIVSALQLLDRYLDLARKSGGLSDEQIKVRLEIKQLLKEADQLSTPSTFAQAAKLKRLAAAKEKELAKMQEHDLKGKQSLYDKYTKFLLVTKVIIYAVLVLCFWSTPVTAVPQHLLQPFGKMFSWRGVDTATGNVVVGILPWLFLTSRVSKMLCQKLGFVLVRP

SEQ ID NO: 70568 - protein, 279 aa, Zea mays
  Clone ID: 700243193_FLI.pep
TMPPHRAGGAAGGGDTSAFFAATLVLWAVSVGFEIGVRGRRELAPVAAGFAFFQAANAAVRGSVSRDPRFVNTAVSLLHSSLTSVSVIFVLVNQWRNKGLENMFEHEELFGGSWIGAYSALCFSCGYFAYDQLDMLRYRLYNGWIPGILMHHLILLICFTLALYRNVTINYLILSLVCELHSIFLHVRKVRRMVGFRDFDRTMVKLEWLLNWTTFVTARVICHILITYKLVADAHKFGKGIELPLALLGMAGMNLLNIFLGLDLLKAFTRERNQQSHQD

SEQ ID NO: 70569 - protein, 200 aa, Zea mays
  Clone ID: 700165734_FLI.pep
KTLTPTPHTRLAGGGAMRAITGGVVSSQPCPLHKAALFLKRFTESAASHLPSSDCCNYLRNAADATTQLSRFRKELGGSHKQGAANSDAHYYDDPVKGNRNHEDQESKGDMAIAADDSNRDSAAEAKLDVASGKKGNKKKKKKHKQEECTEVVKEKKITDGDLDREKKRKKKRDRGDNYDNAPEQVEHINKKQKKHLGIS

SEQ ID NO: 70570 - protein, 403 aa, Zea mays
  Clone ID: 700172224_FLI.pep
GPTSMVGDIFGRSWSSAAPSSGFGIPQANNPGLFSDLLGSALGSSRSQSNAPLRSAAAPQASRPAGEKPNVNASSSPFSMGGMAGALPKTTGAPMGSGGYGVGGRPMKPVGMAATAAAQPMGQQRDPFGSIDPFAAKPGSMNAVKQANSVKPDQGFGAFQGVNSSVAAGFGSFQSTDAGSGGFQSAGTTTPSNFTPPPAPASMPTPVSAAVNSSMDPLDNLFASTTSAPTAAAASNGDSGGDMFGEMDGWVDVEAEFAGGDSGGTTTELDGLPPPPSGLTISAAKAKGMDSYKGGQYADAIKWLSWAVVLIEKSGKDADIVEVLSSRASSYKEVGEYKKAITDCSKVLDQDKDNVSVLVQRALLYESTEKYRLGAEDLRLVLKIDPTNRLARSTIHRLNKLAD

SEQ ID NO: 70571 - protein, 101 aa, Zea mays
  Clone ID: LIB3062-032-D12_FLI.pep
SAWIEAWSLSPSSSSSTSTSSSTSTSSISSTSSPPAPCGSFSIVASTGARTSDRPAALAVADLVVGEALTGVNPAADLGSSFRFLPIATATRRGKTGIASC

SEQ ID NO: 70572 - protein, 246 aa, Zea mays
  Clone ID: LIB3354-116-B10_FLI.pep
NNTTLLPRKHALKDLLTLAVTSSKNKAKLKFTPWPKLQRDAKFSYQKLSCSVEIWHQDRLLCRLLALFIALRPSGFTDPFSHPLDTSIILPQLLLPVPRLFPDHHDCILLFCAPTDHYRVLVSASASSADDHDFVDAADARNAAADKGDGGGPAVESGVIHAASSAWCRDAVLLVGVFGEGQPGEAGGDGRGSEGECLSDRLRRERAVLEPRVFQPRRPDGHAAAYSELFLARHWIHRPLASNLRG

SEQ ID NO: 70573 - protein, 146 aa, Zea mays
  Clone ID: LIB3279-222-A11_FLI.pep
QVHGRLTDEEKMNICRGLSYEKLSPECCKHMLRNGEFPTTAAVQALASQHTVLKSVVLREPGQLKSVSPSPTASTGKRRDGYDDDNGGGENDGQVILYARRLDLSVENQNLRSLLDGMHWRVVELEKVCSRMKTRMSKMKQARRGG

SEQ ID NO: 70574 - protein, 82 aa, Zea mays
  Clone ID: LIB3592-081-C10_FLI.pep
RHREKRTSPPPPPRTTTCWRRLTSRTPGPTTATVPPLRRSTPSWTVVSTPSMTTVNWCAEATAFGSTTTIFRDAEMKWRGKG

SEQ ID NO: 70575 - protein, 359 aa, Zea mays
  Clone ID: LIB3591-013-B8_FLI.pep
VCNGTRTMGRTRGNRGVGGAKSFPSPASSSASSSEFEFTVTLSPASKQRSAEQLCPADELFYKGQLLPLQLSPRISMVRTLLLSSASTSSASASDSTNSSSRDSNGSTSSSFSADCGALLGPDSAASSSRPSSATEDDRHLHPPSAAAGLLPPAKRTGKQYLSSFATRFSSVFHRGGAGAPAAKKQPSKSLAKEVIKKYAKKVKPLYERLSQIPNKNQNNVVNGNSQPQQRFKKPFTFSIRKKKGDAVAAVVEAAAEVGGNKYAHSSSFSGNLWFPRQKRATASCPSSMQSSPSHSGLLTFGGAGGVGFPDVPAVASGIGVGPVSLSTASSMEELQSAIEGAIAHCKNTMGGTVSVKAA

SEQ ID NO: 70576 - protein, 180 aa, Zea mays
  Clone ID: LIB3061-006-B10_FLI.pep
PATDKSTICTQRRPDRDRATAAAQPTGELAARAPTLGGACEARRDGGVVHGVVEGLRLRHPRPQLPGLLLRHHPHELPPRRLVLRPRRRRGRGLQVVGLPRPPQQRRPPLGALRRPRESVDRPGARGGAGPGRGRRRAGGERDDACCGRCHRHWIGSVWSRPLFACTCRVAFRLLWWLFA

SEQ ID NO: 70577 - protein, 256 aa, Zea mays
  Clone ID: LIB3587-277-E4_FLI.pep
AKATNKMHQKNPKKKSSQKTRNEAIDRSTEPEQRSEERRPACICMHGRCGNWDVPIRRGPTWPRRPSPRASCCQARPASTLDPSSLLLPAPRAAAWPRSSWPPSSSAPSSPAGTPPRRRRPRRPARAASATTPAPRASPRRGTSAHRAPGWRTPTPTPRWSPPRSRPWTPRSMRTMPPPRGICCACIPPPRRSRARRTAAATGGTGAPAGSTRRRPPPAAGAAGTARPPPCPSPCGNRTATSSPTTGPETLPPLLV

SEQ ID NO: 70578 - protein, 184 aa, Zea mays
  Clone ID: LIB3592-007-D2_FLI.pep
ALGLHRCGGHGARARQPHPLVVVLLLPWLRAPLPRRGLPERRPPPDPRLPPAAPGRGRRRGGGERGGGARGHGPGARDPVLPLDEAVDAADRVAGGRGGGGRRGARRGAGAGPHVRAVGAEPEEAVPEAVGAHPAAGSRGRVLPAPPFVASSAADDDRGHRCLHRLTRLLLLGCLALFSLRSAR

SEQ ID NO: 70579 - protein, 215 aa, Zea mays
  Clone ID: LIB3607-033-A2_FLI.pep
ARTEADPPFVPPARGLACRRPRERSRGGAVQFRGVRSRGGKDDAGDVHGRAAAGGPHSRLTERRLVPGRGASLDGGGEQAVRAGAGRARPLPPGLGEGGAGHPGPDGARGRQPLQEPPGRRPADRERPGAHAGLRRRGRGRLVHPAVGRLLRPRGLEAQRLPLRKRRLREAAPRPHPGAGPEEGRAVDGGGAQVLYPICGDDARAPPNACVRLAM

SEQ ID NO: 70580 - protein, 172 aa, Zea mays
  Clone ID: LIB3632-017-F10_FLI.pep
SAGAKMLVYQDLLSGDELLSDSFTYKELENGVLWEVEGKWVTQGPVDVDIGANPSAEGGEDESVDDTAVKVVDIVDTFRLQEQPPFDKKSFVSYIKKYIKNLTAVLEPDKADEFKKGVEGATKFLLSKLKDLQFFVGESMKDDASVVFAYYKDGATNPTFLYFSHGLKEIKC

SEQ ID NO: 70581 - protein, 477 aa, Zea mays
  Clone ID: LIB3732-036-F7_FLI.pep
AASSDQERAAKERSQAMEKAVDRQRVLLRHLNPAAAASPAPHAISASACAAGDSAAYHRRPAFADDVVIVAAYRTAICKAKRGGFKDTFAEDLLVPVFKALVDKTKLDPSEVGDIVVGTVLAPGSQRAIECRMAALYAGFPDTVPLKTVNRQCSSGLQAVADVATAIKAGLYDIGIAAGLESMTVNKVSLDGQANPKVELFSQARDCLLPMGLTSENVAHRFGITRLEQDQAAVESHRKAAAAAAAGKFKEEIVPVHTKIVDPKTGEEKKIVVSADDGIRVDTSLAVLSKLKPAFSKDGSTTAGNASQVSDGAGAVLLMRRDVAMKKGLPVLGVFRTFAAVGVDPAVMGIGPAVAIPAAVKAAGLQMDDIDLFEINEAFASQYVYCCKKLELDPAKVNVNGGAMALGHPLGATGARCVSTLLNEMKRRGKDCRFGVISMCIGSGMGAAAVFERGDGVDELTNARGISTHNWLSKDAM

SEQ ID NO: 70582 - protein, 141 aa, Zea mays
  Clone ID: LIB3959-023-G8_FLI.pep
DAMCSSAALAASSRPAPAAAAQLRRRWMRHSPRSSERSSRTSHGGVGVGAPPGERVERHGGEVVQRGRCDRRRRAFVLDHQAGSLPRQVATACVRACWPGAWAGWWFVFLARTRVRGGDATTAALVWLVCEAGKALELLCA

SEQ ID NO: 70583 - protein, 428 aa, Zea mays
  Clone ID: LIB3960-010-F12_FLI.pep
ASGRTKHAARTRMAIVREEAVDTSISPRVSALRPSKTMAITDQAMALRQAGVPVIGLAAGEPDFDTPPAIAEAGMDAIRNGYTRYTPNAGTLELRKAICTKLQEENGVSYLPDEVLVSNGAKQCITQAVLAVCSPGDEVLIPAPYWVSYPEMARLADATPVILPTNISENFLLRPELLTDKINEKSRLLILCSPSNPTGSVYPKELLEKIADIVKKHPRLLVLSDEIYEHIIYQPAKHTSFASLPGMWERTLTVNGFSKAFAMTGWRLGYLAAPKHFVAACGKIQSQFTSGASSISQKAGVAALNLGYAGGEAVSTMVKAFQERRDYLVKNFKELPGVKISEPQGAFYLFIDFSAYYGSEVEGFGTIKNSESLCIFLLEKAQVALVPGDAFGDDKCIRISYAASLTTLQTAMSKLKEAVALLKPCVAA

SEQ ID NO: 70584 - protein, 36 aa, Zea mays
  Clone ID: LIB3992-012-D7_FLI.pep
FTHLAAMSNVVSPITMGGSVSNDLNEPLKWKGIIYK

SEQ ID NO: 70585 - protein, 187 aa, Zea mays
  Clone ID: LIB4073-003-C8_FLI.pep
QQTRMGSSMIKQQRCMMNSCRLQPPRSPMPASDLVKLLRLHHRIGLGNRVPSCSSIVELAVMFVGVAVHRTVHVPASAVKSCQPNTLPTGCTPVWAFLGLGDYSSSLAGFSYMHRLHNNSLLLNLRNCRIYSCGNYRPFPTITTIDNAINGGGSQLGLLLLHYHLLVALGAHVHGGSAAKETAVIDA

SEQ ID NO: 70586 - protein, 175 aa, Zea mays
  Clone ID: LIB3689-229-F12_FLI.pep
RNIQILTLFTFVFWYNAQDALEPYMSKRTVELHWGKHHQDYVDGLNKQLATSPLYGYTLEDLIKEAYNNGNPLPEYNNAAQVWNHHFFWESMQPEGGGLPEGGVLQQIEKDFGSFTNFREEFIRSALQLLGSGWVWLVLKRNETKLSVVHTQNAIFPLAFGDIPIINLDLCMLTT

SEQ ID NO: 70587 - protein, 168 aa, Zea mays
  Clone ID: LIB3066-034-B10_FLI.pep
ELGVAKCSSTTTNITNGCSRGGRGLRQAHCARPRRVPGRLVLVQGGHPTPRGGVPRRRAGHGGIGRRPAGAAGGAHVPGLHQAAAGPPRVAAGRGPRRARRPQPRRRERRAGRRDVPGQGLRRGVPLRLHAGLHGAAVARAGKGEAITQQSASCSCSPLDLRGPAHGV

SEQ ID NO: 70588 - protein, 379 aa, Zea mays
  Clone ID: LIB3912-030-B8_FLI.pep
VTIVGAVFGFLIGISFPTVNITKLHFPSSIVSYIEDKNSGISAQAILNHAWTAARNARGNGSHPISLDNFKVYVPTNPRGAESLAPGIVVPESDFHQHRLWGNPDEDLPFKPKYLVTFTVGISQKDNINRAVKKFSKDFAILLFHYDGRVTEWDEFEWSKRAIHVSVRKQAKWWYAKRFLHPDIVAAYEYIFIWDEDLGVDHFNGEEYIKLVKKYRLEISQPGLEPDRGLTWQMTKRRGDRQVHMVTEEREGWCSDPHVPPCAGFVEIMAPVFSRDAWRCVWHMIQNDLVHGWGLDFALRKCVEPAHEKIGVVDSQWIVHQVIPSLGNQGQSENGRAPWEGVRERCRKEWGLFQTRMAEAEKAYYEMMGITPPNVTFVS

SEQ ID NO: 70589 - protein, 267 aa, Zea mays
  Clone ID: LIB3912-035-F9_FLI.pep
SSPSLLHPIPYHSAKEEPQTLAPNSQAKPDPKIGTAHPLRSVPSFTPIHPASHGRQGLRQPRRGRPAAVVPAPASDPPSPGPDRGRDRADHLPGGPPHAPALLPTGRVAPAARPLQLHHPVLLPPLHDAAGDAGLAQPERARGGVLRPAGRVRVVQVPAGDGGRGAAGRVPGPRRRGRVVARAVGPRRPLRALPRRRAPPGLPGGLPRPPGQGRRPRAVEGRQLDLRPLPPLRHLPRVPRHRRRQRRARRFRVQVPDHHLLPRRGLN

SEQ ID NO: 70590 - protein, 395 aa, Zea mays
  Clone ID: LIB3912-055-E4_FLI.pep
WSGTAQGEAGVPKSHFRRPLPPWDRGRKERRCFTMKALILVGGFGTRLRPLTLSFPKPLVDFANKPMILHQIEALKEVGVTEVVLAINYRPEVMINFLKDFEDKLGITITCSQETEPLGTAGPLALARDKLADGSGQPFFVLNSDVISEYPFAELIKFHKCHGGEATIMVTKVDEPSKYGVVVMEEATGRVERFVEKPKIFVGNKINAGIYLLNPSVLDRIELRPTSIEKEVFPQIAADQQLYAMVLPGFWMDVGQPRDYITGLRLYLDSIRKKSAAKLATGAHVVGNVLVHESAKIGEGCLIGPDVAIGPGCVVEDGVRLSRCTVMRGVRIKKHACISNSIIGWHSTVGQWARIENMTILGEDVHVCDEVYSNGGVVLPHKEIKSSILKPEIVM

SEQ ID NO: 70591 - protein, 121 aa, Zea mays
  Clone ID: LIB3912-056-A11_FLI.pep
LRRSPHASGATSTMAPKKEKAPPPSSKPAKSGGGKQKKKKWSKGKQKEKVNNAVLFDQATYDKLLSEVPKYKQITPSILSERLRVNGSLARRAIKDLMAKGLIRMVSVHSSQQIYTRATNT

SEQ ID NO: 70592 - protein, 284 aa, Zea mays
  Clone ID: LIB3900-011-G6_FLI.pep
PAAPPVGVHQHRPVHQLARHRRASAHNVPPVAGPRRAARWRVGAARLLLLPLDSRRRRALLLLHLPLDVVVFRLRVTPPDVRRWREVEGGGDGKVPTLGAVLEWCDGGEDVHDLRHGGPGLGVPLQALPRQVRHDLHLLRRELALQRRVRQLRDHQPAVPQPRRRPEYEALVGPRRRRLVDGLPAGDELQHNDAEAEDVGLERRLAHDGVLRCEVAERAQHPRRGARAAGHAVVHQALGHAEVSDLGSELVVQEDVGGLDVAVEDARRRRLVQVLQPPRGAERD

SEQ ID NO: 70593 - protein, 196 aa, Zea mays
  Clone ID: LIB3732-002-E3_FLI.pep
TRAFNITAVKAPAPLCLLGGLGGLLGRLGLLGRRLLSGLLGQEHRVDVGEDAAVGDGDAGQQLAELLVVADGKEHVARDDAGLLVVLGSVAGQLQHLGGQVLEDGGQVDGGARADALRVPALLQVPPDAADGKLQPGLDGPRHRLLPRPAGLAPGRALLRLPAGSGCARVHGRLTAAAALRDRGGGVELERLRMRE

SEQ ID NO: 70594 - protein, 307 aa, Zea mays
  Clone ID: LIB3732-009-D7_FLI.pep
MEFPHHHHHHGHRRDDDEDDRRGPPPPVYGGYGQPPPPDPYGRAPVDPDPYGRPPPQSAYGGAGDAYGHSGQGYAPPPAYGAGGGYGNVVHVAHEVGDERPYYGGGGGGLGGAYGGGGSEYGHEGRPHHGGGGSQYGHETRPHHGGGGGAPPVRQQTYRIYCKAGEDQYSLASRDGKVCLVRTDRDDDAQHWIKDMKYSTRVKDEEGYPAIVLVNKATGEALKHSLGQSHPVLLTRHNPDSLDESVLWTESRDVGDGFRCIRMVNNIYLNFDALHGDKDHGGVRDGTALVLWEWCEGDNQRWKIVPW

SEQ ID NO: 70595 - protein, 226 aa, Zea mays; identical to SEQ ID NO: 50617
  Clone ID: LIB3732-012-B1_FLI.pep

SEQ ID NO: 70596 - protein, 242 aa, Zea mays
  Clone ID: LIB3732-035-D6_FLI.pep
SASARCARPAGRLTAGSVTCAFLSESVGLQSKETMAPTTTLIVTVNLECCRCSSKIQKILCGIQQEGEFTIEKIVYEKDKVLVTGPFDADKLSCKLWCKAGRIIKDIQVAKPKDEKPKNPSCKLVYPYYPCYPFQLCPQQQPGAWPCSGGCPHPHCGCQSKPPPPPVPPPPPPPPPPPPPMPPACQCSTWPSCYCGGYPPPMPPSCQCSTWPSCYCGGYPPPMPYPMIVCDDSPPYGACTVM

SEQ ID NO: 70597 - protein, 315 aa, Zea mays
  Clone ID: LIB3732-051-A10_FLI.pep
PTFRTCVRECQTTGIIGENVISHCQFKEDNTSVGGSWYNQEQIYIQWKELNCMTDCRYFCMTRREGERQALGLSPVKYHGKWPFLRVSVFQEPLSAALSAVNLLMHFTGWLSFFLLVNYQLPLRPQAKRTYYEYTSLWHIYAILSMNAWFWSSIFHTRDIDLTEKLDYSSAVALLGYSLILSLLRAFNVKDEASRVMFAAPILAFVTTHILYLNFYELDYGWNMKVCVVMAAVQLLTWAVWAGVSRHPSRLKVWTVVFGGALAMLLELYDFPPYMGYADAHSLWHASTIPLTCLLWSFIKDDAKFRTATLVKKAK

SEQ ID NO: 70598 - protein, 506 aa, Zea mays
  Clone ID: LIB3689-209-H6_FLI.pep
SNKLQLGQFIYVEKVQSSVPVPVLVGVRPVPGRNPCIGNPKDLMQMSTPSGITEAPDHQRRTSKSADMSESEKENLQRKVVIKEQKAVVASRYMLGVSSNNGKITSLNSSIDSDKSNGGSTISEPNKKSVAPKVRQEAKPQERPNDTSTGNAKLVSTKQEISKGTRKNGGASPSPNGCAVVKKQMPKESKKESATERRSPPKLDKSSPTPARTSPTKLGPAVKQNGNSSPGPVPSISTVKRRVTETISWDSLPTSLIKSGKAVVRRKNIALTVAAEAQREAAAAAYLVKGLGIFSEIRGSYEADPQAAMTKFFQLHRLIVEQSAVWNAYSPEPSKEPRPEKEKPSSRKATTASHNHQNNRAGTRNAGAKDPHEDGSRGSEKAEWAREDGFKEMCRSWVALRRESRSWFLSFLEDALESAGFVMEGGSRKNARERVRGRGQANGGDGGGRIAARLSQLKETSDWLDQQLQLQGEADGSAETVERLKRKVYQCLLGTVETAASALEGR

SEQ ID NO: 70599 - protein, 285 aa, Zea mays
  Clone ID: LIB3689-212-C7_FLI.pep
SAPYSPSNPIGFPQAPMATAVEVPVEAPVRTVKVTNVSLSATVQDIKEFFSFSGDIDHVEMQSGDEWSQVAYVTFKDAQGAETALLLSGATIVDLSVIIAPAPEYQPPPTASAPPMSGTRVPVGGGDNNVVHKAEDVVSTMLAKGFVLGKDAVGKAKAFDEKHGFTSTAGATVASIDKKIGLTDKITTGTSLVSGKVKEMDQKFQVSDKTKSALAAAEQKVSSAGSAIMKNRYVFTGASWVTSAFNKVAKTATDVGTMTKEKMAAEEHHKGSGPSSGGHSYTPIR

SEQ ID NO: 70600 - protein, 372 aa, Zea mays; identical to SEQ ID NO: 48438
  Clone ID: LIB3689-214-H9_FLI.pep

SEQ ID NO: 70601 - protein, 200 aa, Zea mays
  Clone ID: LIB3689-234-E7_FLI.pep
GLNAILQYIHSITPILFSFKINAVLNRRHGIDGKSRKKKTDTCYLIPPFLKGSNFLCSKFGHGNRFYSMRELPMCSTAIGTNEGPEICAGILWSQIVTVDAALVGGQLEQAAKDLLVPLVLLDPARHRRRIGPPGSLRVGAPFLGARARAARRARARSRARVRRPRGRRDDEVVAAASEKVCCCCVASLRVFNRGGGKEV

SEQ ID NO: 70602 - protein, 541 aa, Zea mays
  Clone ID: LIB3689-236-B7_FLI.pep
YISLELRRMAVGGTQPVLRKYLGALKDTTTVSLAKVNSDYKELDIAIVKATNHVERPSKEKYIREIFHSISAARPRADVAYCIHALARRLSKTRNWAVALKTLIAIHRALREVDPTFREELISYGRSRSHMLNMAYFKDDSSAEAWDYSAWVRIYALYLEERLECFRVLKYDVETDPPRTKDLDTVALLDHLPSLQQLLFRLLACQPQGASSYNVIIQHALSMVALESIKIYTAISDGTINLVDKFFEMQRNDAVRALDVYKRATNQAERLSEFYEVCKTIHIGRGEKFLKIEQPPASFLNTMEEYVRDAPTGQKEKAILAIEYKKEPEEEEKPSSPPAAPEPEPEQVPEPEPEPVKEEAPEAEPDLLGLNEPNPAATAIEEQNALALAIVPIDDAPKAAPTFGNGVTGWELALVTAPSSNETAVAPSKKLAGGLDLLTLDSLYDEANRRASQPASYNPWEATPAAPAPMMTMAPVMHDPFYASNGYAAPHGVQMAAMAQQQQAFMLQQQQMMTMAPAPQPVVHHPMQMQQNPANPFGNPF

SEQ ID NO: 70603 - protein, 311 aa, Zea mays
  Clone ID: LIB3634-001-C4_FLI.pep
SIHPSIHHHPAAAMCGGAILSGFIPPSGVAAAAAAAKKQQQQQQRCRVTADLLWPGPGSKGAPQDKEEDFEADFREFERGLGEDDVDSAGEGGDPEVQELPPPEPTRFAFATAAKAAVDGVMTPPPKDVQGDRAVKKRGRKNQYRGIRQRPWGKWAAEIRDPNKGVRVWLGTYNTAEEAARAYDAEARKIRGKKAKVNFPDDATGTRHRPTTDEIFNNLKNDDNNNNDDLFAMFAFGDNKKKVPAAKPAAAEGGSGSGSFLVPAPAVAVVPGNKRRSSATNTMLSVSDDQRSNSYGSGSSDLVGSWSWDDD

SEQ ID NO: 70604 - protein, 447 aa, Zea mays
  Clone ID: LIB3632-019-D11_FLI.pep
GRADRSRSRTTRPPMARPQRVYEAWKGNNKFFFGGRLIFGPDAKSLILSVSLIVAPVLVFCGFVARHLRHHFPAYNAGYAIPAVAVVFMIYVLVLLLITSAQDPGIVPRAAHPPEDEFSYGNALSGGTPGRLQFPRVKEVLVNGMPVKVKYCDTCMIYRPPRCSHCSICNNCVERFDHHCPWVGQCIGQRNYRYFFMFVSSSTLLCIYVFAMSALYIKFIMDEDYPTVWKAFKHSPASLGLLIYCFIALWFVGGLTGFHMYLISTNQTTYENFRYRSDSRPNIYSQGCLNNFLQVFCSKTKPSKHKFRAYAQEEVRPPTVSFGREVDEEPVGGPRPKVEDDLEIGTDLLKISQRRNYEDVDAETGGRRSRSSEVEGTASARPAVACSESQIPAVGGTDVRVRHSSWDRRSGNWDMSSAVLTRSASDVIGRSSVFAANAARPSLEETR

SEQ ID NO: 70605 - protein, 310 aa, Zea mays
  Clone ID: LIB3632-060-E5_FLI.pep
KKNYSWILQCMQKDIWNDEEDSVLIQAHKEVGNRWAEIAKRLPGRTENSIKNHWNATKRRQFARRRSRASASTSTSKGPPKPGTLLQNYIKGLGIGPVSNRSAAPLPEPTTPPPPPPSSPETPGGARSAKQAGESTTLEVERRSPSCDVLVDSSQCTTILPPTSVHGYDEYSNCSGESHQSCEVLLAPIISCGDDAFSVGMCGGGGGLFDTDDADAFLQAYGVAADDVVDGIGMGYYVFNDGHVDHAATVDAEIDMETMMMMWDDDDDYAAALGLGCAAGPAGVESAVRVKEEMDLQVETMVAATHKCGD

SEQ ID NO: 70606 - protein, 376 aa, Zea mays
  Clone ID: LIB3608-011-C10_FLI.pep
LARCLGQPGVARWPACQASNNGRFRGGASGVRHAGEGAAARGDAAAAVRLRGLPRGVAAGAQHGHQQARLPRLPQHHRALPARALRLLSGEEGQAAADPQLRRPVLPSRPLRHHGEPRVLPAGPGQHVADVRVRHPELGPGHHLRHGRGAADREGPAGPPRRRGQGGGHAGVRGGCVRHHALQGPHHLRSQRQRRRRRRPRAGGGGRRQELDAGVRVPDRALPVVVGLAGAAGPRAEEVPGAAVRHLLHLLLRCHPVPRHRRLHGEGRGGLEVPLRIRALHHPIRRVHRVRGGVRGADLVHRPWGPGVRGGVPAGADAGGGHHGVAHPGREVLPGGHHRRRAHRRRPLPRALGQERGEGARRQGRRLRRRPRGAPC

SEQ ID NO: 70607 - protein, 246 aa, Zea mays
  Clone ID: LIB3608-022-E3_FLI.pep
SAVLDSTPRQDAAHGSHPRVRDCVSRGQECAGRAMDVEARKSDAPPARGKAMHRFLVALNCGMLAVGAIGGPLLSRLYFSKGGHRQWLSAWLETGGWPLLVIPVAASFVARRARDRGAPVLLAPPRILLAAAGLGVATGADDFIYAFGLAYLPVSTSAILISTQLAFTVFFAFLVVRQRLTAASVNAVALLTVGAVVLGLHVSSDRPPGVTRGQYWLGFVLTLGAAALYGLVLPLVELAYRRAAGA

SEQ ID NO: 70608 - protein, 219 aa, Zea mays
  Clone ID: LIB3600-056-H10_FLI.pep
IGRRPALGWTHSTDFSTAASGAGAAASSSVAATSGVAATAGAASSSSSLASTAATSLVSAAISGSAASTGAAAASVSAAGAAASVSASLTSVSAAGAAASGSASLGSASVGSATASASLVSVSVSASTGSGSLATTTSVSTAGAAVSSFGVSTAEAAASWAASSTGAAVGTWTSTAAIGAVQLAGRVCVWTVEQTTKALKLGAKQSAELTSVTMAGWRV

SEQ ID NO: 70609 - protein, 364 aa, Zea mays
  Clone ID: LIB3606-060-G4_FLI.pep
VASVLSCLLRAQTEREILQSLDHPFLPTLYTHFETDKFSCLVMEFCPGGDLHTLRQRQPGKYFSEQAAKFYVAEVLLALEYLHMLGIIYRDLKPENVLVREDGHIMLSDFDLSLRCSVSLTVIKSANPGLDAMQRNNAAYCAQPACIEPSCIQPSCVAPTTCFGPRFFSKSKSKSKSKSKKEKSKPDGPNQENLFPELIAEPTDARSMSFVGTHEYLAPEIIKGEGHGSAVDWWIFGIFLYELLFGKTPFKGSGNRATLFNVVGQPLRFPESPIVSFSARDMIRGLLVKDPQHRLGYKRGATEIKQHPFFEGVNWALIRCASPPDIPKPLELECRPKQVPSANGKVAPVANQKGPDNYLEFEFF

SEQ ID NO: 70610 - protein, 377 aa, Zea mays
  Clone ID: LIB3607-057-E8_FLI.pep
PAAGTSSLQRPSAFSEPSSLQYNGVVAQVHGAEAARGAGGAGVPDAAGAEAALGHRRPGRAALPHPRHPVLPPERAHGRAGPGAGGPGRRGQGARALLPVRRSAQGAGRPQARRGVHGRGRAVHRGRHRRAPRPLRGRAAAAVPVPRGAHLRRPRLVRGAGLAAPPLPGDAAGVRGLHPRGAAAPHDGGRAGAGAVPRRRGGAGAGRGGTDGPAGVGAGAAGGARPAAAGLRAPRVRRGAGHQGHHHPAGRHGAPLLLLRAPGGGGRPRQPPAGPPLARLQVRPPHGAPVEVPHRGARPGRRRGDADDLHRERPRRQVRRRHPRGLLRQRLRVPGGRRDGRGPRREAARVRRGAGEAGQGRGGRGVHALGGRPDGAT

SEQ ID NO: 70611 - protein, 246 aa, Zea mays
  Clone ID: LIB3593-008-C2_FLI.pep
LHFKIISPCAFPSPLSSKDTINNRRFYTPAKNRSNNNKAPRNNPFSSMAKLMNKLVDSFEHDEILDVGCVRAVLAELVLTFLFVFTGVSAAMAAGTSYDHAPTAPLSDRLLSTRSPSYLLFISLWALARKRQVLFPLYETYVALHARRIRREARRRYADGDAGGGGNRARAGRWRPGDGRVPRLRRPPEPRGDGGAHGARPHHQAPGGAVRRRPAAGLLRRLRPPPLPQRRHGTLHFHRTRADSWI

SEQ ID NO: 70612 - protein, 252 aa, Zea mays
  Clone ID: LIB3594-001-D3_FLI.pep
PAPCPRSHSHRHASCRVLKGEKVKMGACASVHKDPGYPKEQFLDSPTKAEAANEKGGCGGGDDDFADFKSKVDAEQQRAELNPKSPDSGSKDEVFFESRAWLDSDCEDDFYSVNGDFTPSRGSTPIHQPRAQTVMSNIFQPDTHGSKSPEPSPTGRRKLAELLQEAMQNGPEESTDQELQLRSVAADGKPVSESTSSSACSTVTTPIAVANAKSRKEKAWYTGRCCLPSFVHSLTLDESERAQKMSSRPCAV

SEQ ID NO: 70613 - protein, 289 aa, Zea mays
  Clone ID: LIB3594-048-D10_FLI.pep
SESHGDQIISSADAQMASPTNRALERYKSAITAATSVVGAAMLLRRLVAGVLPAGTPPLVGALLLLPPPSARRHAVVIEEFDGAFYNRVFLAVRAYVSTLLAAAPTGAPPVVKASLPRGAGAGAEQIRLAMGPGTAVVDVFRGAELTWRLRSHGHGGGAGEAFRLSFDGQHRDLALGAYLPFVMARFEAMARDRRQAKLYSNEWGKWRSVRLRNASTFATLAMDAALRQDVLDDLGRFLGQKEYYERTGWAWKRGYLIHGPPGTGKSSLVAAMSNHLHFDVYDLDLGAV

SEQ ID NO: 70614 - protein, 159 aa, Zea mays
  Clone ID: LIB3594-059-D6_FLI.pep
SGEQRSRAEPRDPAHHLPSGRRGADRFTGSEDDGFRRGGLHRGSGSSGVGSVPLQATRHRDPAEPLAAGLLLRAAPRGVLPPLPHRRADGRRAHLRRGGPPVALRGGGAARARGGQGRRGDGAAPQLPRVRLGLPRRGAAGRRHHHGQPVLHPARDPPP

SEQ ID NO: 70615 - protein, 242 aa, Zea mays
  Clone ID: UC-ZMFLB73139F04_FLI.pep
VARSMPTSAALDVVAKNLNLKFFEVPTGWKFFGNLMDAGMCSICGEESFGTGSDHIREKDGIWAVLAWLSIIAFKNKDNLGGDKLVTVEDIVRQHWATYGRHYYTRYDYENVDAGAAKELMANLVSMQSSLSDVNKLVKEIRSDVSEVVAADEFEYKDPVDGSVSKHQGIRYLFGDGSRLVFRLSGTGSVGATIRVYIEQYERDSSKTGRDSQDALAPLVDVALKLSKMQEYTGRSAPTVIT

SEQ ID NO: 70616 - protein, 196 aa, Glycine max
  Clone ID: 700892916_FLI.pep
EFGLDVDHHNAVEPAASFFNKKVKIRRAIEAEGIPYTYVCSYAFAGYFLSTLGQENVTAPPRDKVVILGNGNVKGVYVTEEDVGTYTIKAVEDPRTLNKTLHQKPPANVLTFNELVSLWENKIKTTLHKIYVPEEQILKKIQESSFPANFLIALGHAMLVEEAFNNEVDPSVSVEASELYPEVKYTTVDNYLNAFV

SEQ ID NO: 70617 - protein, 276 aa, Zea mays
  Clone ID: UC-ZMFLB73099F04_FLI.pep
PVFSAFTTEPSTAPFTPPPESVHLTTPSSPEVPYAKLLTSINNSKNGEAGGDLQSYPNYPDSPIGRLISPSSGCSGTSSPFPDPEMQASSRSALRLFPVREPPKILDGEGVATQKLIPRHMRNGGSLLDGQISAAVPVVDFSARLQPNEHAMDHRVSFELTVEDVARCLEKKTAISGDSGTASFHLAPTGSGDHHRESNEARAGLYVDESYHDLPEKARRSLSLRLAKEFNFNNVDVGSVEPSVGSDWWANEKVAGMTTEPKKNWSFHPVVQPGVS

SEQ ID NO: 70618 - protein, 170 aa, Zea mays
  Clone ID: UC-ZMFLB73201C06_FLI.pep
NEMRERKIPVLVGITILFVVHVSGFYWCYKNGDLIRPLMMLPPKEIPPFWHAIFIILVNDTMVRQTAMVVKCLLLMYYKNSRGRSYRRQGQMLTIVEYFLLLYRALLPTPVWYRFFLNKEYGSLFSSLTTGLYLTFKLTSVVEKIGKGWCVAAKERTSCLCARKKDAKDL

SEQ ID NO: 70619 - protein, 155 aa, Zea mays
  Clone ID: UC-ZMFLB73206E08_FLI.pep
SSRLFVIEGDFIHLREGAQQIISATTAAAKIAAATASSAPYSSLLPSVAVTPVAQSTRQKRGPAVDSRSSNAILSGNGFTDQFNIIQGVSDVPVSGKVRNTLDNGFLGEVRTGQPSVLTAAANGARHDKGTNNVIQGYGGKQQGRSTGMAYLSRR

SEQ ID NO: 70620 - protein, 324 aa, Zea mays
  Clone ID: UC-ZMFLB73188F01_FLI.pep
LTVLAAPKIRPSRWLAIDARAVDLRGYFNSMFWNLNFWDKASTLAGEVEDPRKTFPKAVFGAVGLVVGAYLIPLLAGTGALPSETAAEWTDGFFSEVGQRIGGPWLRVWIQAAAAMSNMGLFEAEMSSDSFQLLGMAEMGMIPAIFARRSKYGTPTFSILCSATGVVILSFMSFQEIIEFLNFLYGLGMLAVFAAFVKLRVKNPDLARPYRVPVGTAGAAAMCAPPAVLIATVMCLASARTVLINAAVVVAGVALYYVVEQAKRRPWAEFLAPVPPADSSHGPATAPDDADAADLEDVRAGLLAGEPADEEGSKVEYSRLEIRA

SEQ ID NO: 70621 - protein, 522 aa, Zea mays; identical to SEQ ID NO: 57881
  Clone ID: UC-ZMFLMO17247G10_FLI.pep

SEQ ID NO: 70622 - protein, 210 aa, Zea mays
  Clone ID: UC-ZMROB73051H05_FLI.pep
QSRQKALGDLQSLQNDKLERLSDIQSQPESQLKFIIEAWLQIVECRRVLKWTYAYGFYLPEHEHAKRQFFEYLQGEAESGLERLHQCAEKELQIYLDAESPSKDFNDFRTKLAGLTSVTRNYFENLVRALETGLNDVGPSTSHGTCSKSATSKSLGGKSKSGKNRASSTSSKSGGSSRGVDDSNIWTCDQCTYANPKSARACQACDHQHR

SEQ ID NO: 70623 - protein, 361 aa, Zea mays
  Clone ID: UC-ZMROB73055B11_FLI.pep
RSLPGGRPRGEHAAAGTPGRRPRRGVLQREVPAGGGPGARRDADPRRQRRDHRPGAAALHVPRLPRPGAYVAAAGLLIVCLLLDTSFLDVFFFLLLLLPRARAQGCDASIMLVSRNGTAERDAFPSYGLRGYAEIEHIKAKLEDACPLTVSCADIIVMAARDAVYLSNGPRYAVETGRRDGKVSAEYDADNDLPPPSSKIVDLKTYFSFKGLGWKDLVVLSGSHTIGRAQCTTFASDRLYNYSGHVGQDPSLNKAYAAQLREMCEPGLADDTTMVEMDPRSPYTFDLSYYRNVRANRGLFTSDQALLDDPWTSAYVERMADAASPDEFFADYAAAITNMGRIEVLTGDNGEIRSACAAYVD

SEQ ID NO: 70624 - protein, 393 aa, Zea mays
  Clone ID: UC-ZMFLB73125F11_FLI.pep
PAASRLSTLRLLPDWAVSPAALLTVCPALAGLTSLHLTAVRPLSFRWLKLLPRLKSFALVNSAATVDSAGSSSDDADGEAEDVAGTLPLEKLSLCGIRSGDRGLGWLWRRCGSLKWLQLRACDGTGDGPASLAFAGCLAGLLALELRACRAVADRVLLLAADHCRTLTSLLVYDGGGSEALHRFIQQRAAGLHTLDLRLPLDLHNDHLLAIGADSVHNATHGLASLRLQSCVLITGDGLRSLARTAAGAGIEELALVSCDVVEREPGLLTFLSQSMPRLRRLNLSYNETLNDKVIGAMLSSCRNLIDIRLRGCRGLTGGSLLSLLRHCGQSLEILDISRCPGIAVGNVELFAQRAARLNHVIIEESAMSEELKAIAQKKGMKVGSLPCEGGPF

SEQ ID NO: 70625 - protein, 327 aa, Zea mays
  Clone ID: UC-ZMFLB73301D12_FLI.pep
FIQPARMASKAIKRRPISAETDTTGEKQMDTALSDPVTEPLLGNTPQEEKSKTYEPITRSGFWDGTAQECLRWTHLLAAFVAQSARNIVNVLSEFGYLLARLFGCSSASKSSQNGQTLPVNLSPLQEERLRLLRQRIDVPYDCSSVKHQDALKELWKLAYPNRQLPPLKSDLWKEMGWQNSDPSTDFRAAGFMSLENLIYFARNYPDSFHRLLHKADGKRAEWEYPFAVGGVNISYMLVQMLDLQSGKMRTKAGVHFVQLLDDDGVAFDNLFCVAFQVLDSQWLARRASYMEFNEVLKSTRGQLEQELTIGGISRIQDMPSFRMLRR

SEQ ID NO: 70626 - protein, 107 aa, Zea mays
  Clone ID: UC-ZMFLB73404E09_FLI.pep
TLIEYVISPIILDVWAHPFISIDVVEVLEFLGYQGSWMLTGTCVSNPFNNWIHFSESDQPRRRPHPTCVYLFAAYPALSLLLQPTMRRPGSTIRWSNSVRLKSPKLM

SEQ ID NO: 70627 - protein, 143 aa, Zea mays
  Clone ID: UC-ZMFLB73131E11_FLI.pep
PQHRQPPDGSSLGRGGRRRTASTSQEMGALCLLYPSTPPRCPCGARADATAAFAPSPFLSSCAATGAQTRLQLCGRSQRRGGVARVGGGGGGGKGESGKNGAAAFFDEDGVVDDMDGYLNYLSLEYDSVWDTKPAWSVPFAPP

SEQ ID NO: 70628 - protein, 508 aa, Zea mays
  Clone ID: UC-ZMFLB73136G01_FLI.pep
AYLLFRRNHNQTSAARWSVPRCADYLHQSRASRCPLTHPPRCSKESQIQSAAAMASPDAEQPAPTELERWRDLDMLLSRPGNLVEATFDPSPGLRDLLGSLVEVLVVGAGGLGCELLKDLALSGFKKLHVIDMDTIDVSNLNRQFLFRVQDVGKSKAEVAAKRVMERVNGVNIVPHFCRIEDKEIEFYSQFHIIVLGLDSIEARSYINSVACGFLDYDSSDNPLQETVKPMVDGGTEGFKGHARVIIPGTTPCFECNIWLFPPQVKFPLCTLAETPRTAAHCIEYAHLIKWDEVHPGKPFDGDDAEHMQWIYSEALKRAELFGISGVTYSLTQGVVKNIIPAIAPTNAIISAACALEALKLISGCSKSVSNYLTYNGLEGTHIKVTEFVRDKDCLVCGPGTLVELDTSSTLSDFIKMLEEHPKLRMSKASVTHEGNNLYMQSPEVLEQMTRPNLSIPMFELLKEVPYTTVHATGMAENNGKKVSSLRKLRVAFKGIEDASKMDTTVSS

SEQ ID NO: 70629 - protein, 119 aa, Zea mays
  Clone ID: UC-ZMFLMO17223B08_FLI.pep
CALGSTSRATPLIGKHVVRPHRLPHRQARHGSRHLQPPRFFDQQARDHASHCSVVVVPGASCLRVSLTSECVRRDLPCLGSKQNQGIRSISHGCCRVGDLIVHKNLRFGTKSLTEGRSR

SEQ ID NO: 70630 - protein, 210 aa, Zea mays
  Clone ID: UC-ZMFLMO17224C08_FLI.pep
LKYHPGAVPYFSRNFEYGVSSGYAYRDRPEIKLGFIPIQNIIEGRKTKENNATTNLCLNLKFISDFSHGLDEIAKALHAYIKQSSKNIKLRTDLKLSKIQSIVRSNYLSFLKNDALQHVSTNSSNEIVSEITNKIISSEIKLLLQKALFTLGQRHPNTEGKERGQIFNIYNDNLLLIGKQYKIAAIQDFDFLFDYLKNSPCFSEHVKVIA

SEQ ID NO: 70631 - protein, 440 aa, Zea mays
  Clone ID: UC-ZMFLMO17005H06_FLI.pep
KESADLTCLAYRHRTYSKVIEFVQFKDRLHHSMQYLSAKSDSVMLHLKQKADSLDEVESILESVSHGTKLVELSNEDSMVDLTFNEDLDARPWWTPTSSVNFLSEPFDESSTPASYRDKMCKHKSKEKDGSKLKDVERKSLVPRLVYLSTHGCASFLRESESNGASSDVTASVEMKTLLDKYARSIGYSFDDALSFVLGISHGKKAVKDLAPDIVSWMNFAVFINAWNLCSNVSVIPGTDKSSPNSWWIVDNLVKTCIDEQVADTNQILTSPGSNIPLLAWMVTEPISWHLLVIQSCMRSMAPQGKKKKKGPSERPNTPHLQAIRSSVQCMADTLERVQKCLSEQMKPEEQALDMLVSHLQGTGAEGPGQIARILDESAAAASSEIGGRIAHSLEPWSRACVMRRIVGAENETIAELMKICTSKLKLLASASASLSLVLH

SEQ ID NO: 70632 - protein, 798 aa, Zea mays
  Clone ID: UC-ZMFLMO17004E03_FLI.pep
GISRRFSLKSRYAGMEPRTEGDTSRNLRQGRLLEPPPVPAVRTSPEGVQRHTGQDVIASRSQSAAASETGSSLPCEDGNATAETIGSSTHPVHIGVQNQDIEQEQVHETGKRYKRLTSDVWNYFTKKKEIIEENGKKCEQIWGYCNFPNCKRRYRAEGRQGTTAFKNHLRSAHSIVRGQQQLKFEKDLGNNITHIQPFMYDQEVSVKKLIMAIIMHDYPFNIVEHEYFVDFIKSLHPSFPIKSCNAVGKEVMDTYLEEKEKLYAHLKTVHCRFSVTMDMWTSCSNKSYMCVTVHWINADWCIQKRIIGFFNVKGRHTGKKLSETFTEAMVRWNLDKKLFSLTLDNASANEMAVKDIISDLKDGQASLVCDGLFFHVRCACHILNLVARDGLKVISKTIDKIKALVLAVKGSPLQWKELMKCASESELDTKRGISLDVSARWNSTYLMLRDALYYKDAFARLKSSNRHMYVEIYPSPDEWDMALKIFQCLKKVYSLAEILSGTSYPTANLFYRGFCDIKVLLDDWCSSDDATVSEMAIAMSQKIEKYWEHSNLALAVACFLDPRYKKKVVEYYMKKFHGDGYHVELEKIVNVVRGLYCFYSSSTPAPAKSTSPEPANSASDILMASVSDELDSFLYGTNEPTLVQSNELEKYMADPLLRLGGPFDGPFDILAWWKSKREVYPILSQIVRDVMAIQVSTVASESVFNAAGRFVDPYRNRLEPEMVEALICTKDWIAAERKDSKIVGSIVSDLEIETLSTVMANKIRAVDDKDIEWKDQEHDGENEYIDSDLDVMDDHDEL

SEQ ID NO: 70633 - protein, 491 aa, Zea mays
  Clone ID: UC-ZMFLMO17007D03_FLI.pep
QVSLLWITTPPIMRESPSTQGGPSTSSAVDDSYSADGVEDSQLFLSVPALNQAASYLAQTASFLTQCLPVPGFVGLSEEGQELLTLPPASASGRLSVQTSSVEPSGTNSSLGQSDCGGNPSQENAGQMVPSHVFQNGASLFQGLVERARKTVRGSADDIGWLQRDQSLPTTEDGTARFLEILDSVRKNEHKLSDSLVYLLVPGLFSNHGPLYFVKTKAYFSKMGLACHIAKIHSESSVSKNAREIKEYIEEIYWGSRKRVLLLGHSKGGVDAAAALSLYWPQLKDKVAGLALAQSPYGGSPVASDILREGQLGDYVRLRKIMEILVSKVLKGDLQALEDLTYERRKEFLRRHPLPQDVPIVSFHTEASITPSVLTALSHVAHLELPIAGDGNSTRIPVVMPLSAAMAACSQLLVARYGEKSDGLVTRKDAEVPGSVAVRPERKLDHAWMVYSSLKEESGDQADTSQVCEALLTLLVEVAQKRRHEMAMKDE

SEQ ID NO: 70634 - protein, 382 aa, Zea mays
  Clone ID: UC-ZMFLMO17009E12_FLI.pep
PPPPRSGSSGGDEPSNATPWASPDWLTSLSRAVGRSGGDDSGIPVASAKLDDVRDLLGGALFLPLFKWFREEGPVYRLAAGPQDFVIVSDPAVARHVLRGYGSRYAKGLVAEVSEFLFGSGFAIAEGDLWTVRRRAVVPSLHKRFLSIIVDKVFCKCAERLIDKLEPYALSGEPVNMEARFSQLTLDVIGLSLFNYNFDSLTTDSPVIDAVYTALKEAELRSTDLLPYWKVGFLCKIIPRQIKAENAVTIIRNTVEELIMKCKEIVEAENEQIEGEEYVNEGDPSILRFLLASRDEVSSVQLRDDLLSMLVAGHETTGSVLTWTIYLLSKDPTALRRAQDEVDRVLQGRLPKYEDVKELKYLMRCINESMRLYPHPPVHFLC

SEQ ID NO: 70635 - protein, 534 aa, Zea mays
  Clone ID: UC-ZMFLB73046D03_FLI.pep
VLALNGMAWLGLGRAGGAIKGRGWKYGSGFVDGVFPVLSPMAQDVLELVQTRGTDAASVWESLDKIPQAHDLWDDIVNVAVQLRLNRQWEPIITVCEWVLRRSSFRPDIICYNLLIDAYGQKRQLSEAEAAYMALLEARCVPTEDTYALLLRAYCGSGQLHRAEGVISEMQRNGIPPTATVYNAYLDGLLKARCSEKAVEVYQRMKKERCRTNTETYTLMINVYGKANQPMSSLRVFREMKSVGCKPNICTYTALVNAFAREGLCEKAEEVFEEMQQAGHEPDVYAYNALMEAYSRAGLPQGASEIFSLMEHMGCEPDRASYNILVDAFGRAGLHQEAEAAFQELKQQGMRPTMKSHMLLLSAHARSGNVARCEEVMAQLHKSGLRPDTFALNAMLNAYGRAGRLDDMERLFAAMERGDGAIAGAPDTSTYNVMVNAYGRAGYLDRMEAAFRSLAARGLAADVVTWTSRIGAYARKKEYGQCLRVFEEMVDAGCYPDAGTAKVLLAACSDERQVEQVKAIVRSMHKDAKTLFAL

SEQ ID NO: 70636 - protein, 168 aa, Zea mays subsp. mexicana
  Clone ID: UC-ZMROTEOSINTE086E02_FLI.pep
PHHGGGGGGGAPPVRQQTYRIYCKAGEDQYSLASRDGKVCLVRTDRDDDAQHWIKDMKYSTRVKDEEGYPAIVLVNKATGEALKHSLGQSHPVLLTRHNPDSLDESVLWTESRDVGDGFRCIRMVNNIYLNFDALHGDKDHGGVRDGTALVLWEWCEGDNQRWKIVPW

SEQ ID NO: 70637 - protein, 383 aa, Zea mays
  Clone ID: UC-ZMFLB73044H11_FLI.pep
GTDGFRGSVAGLPREPDARAGDVDDDPHVLLLKVGHHVHDGVHVLRRLGHGQARQRRGAAVDQRVLHRQRQVHAAVHVQRHGRRAARRHLVRVEARVERSQRRVPARRRHLPPELLAQRRVHGRCPPRDHRARVDHRAGAGGRVERERPRGDLHPGPPHAEPRHVHVVERRAVRVGQQRRVPDVPGLPGGAQPEGAGEVVGPVAGQAVGEDAVVPAPGLGQQRHGAPAEAEEPLLRQVGRRPGHRAHAPERVAGDGVLAQAQRVAAQRRLERGVRERLGEGARRQRRRGVLVRRARLALEERAPVGGAREGGVRGGAGRDEAAAGGARVARRAVRPGGVGAGVEREEQLLDRGAEPRADDVRGRSLAGGDGSGGDAAGRGRLG

SEQ ID NO: 70638 - protein, 360 aa, Zea mays
  Clone ID: UC-ZMFLB73043B05_FLI.pep
GKNASCIIEEARADHGDGAFVETLPRQGDEKTEHANSSVSGSGVPEQVKPKASTASGPSLDGSTKALGWQLLGSSLEGSAKASGWKPPALSIEGIANASGSQALYPTQGSTKSSGCQRSSSSPDGSRKASGWQQSSTSPVGSGKAHGWQRSGSFTQGGTKAAGWQPSGSSTDRSAKVDGWQRTSSSPEGNRKASGWHSSGRESSKITYGASENRKSFSSHQATTPTGRHSLARRQGSSDKGAAGWEESLGNTWEASKRQQRNSDKNAGCGEALGSNRTWHPSSGNPSRSSQGNHQHDRHSHGSDSRRGSSNYPRRSDHRHDHGSGGSSRPSSRGQPQRGVCKYYENGHCWKGSKCQYLHR

SEQ ID NO: 70639 - protein, 511 aa, Zea mays
  Clone ID: UC-ZMFLMO17024C01_FLI.pep
GFDSDQAESSPDASMTDIAPVLNEIDPLLRADSNRPDPVPNDDSDTDSHVSEDHQIDDDSNDEGDDIDAKDNVEGEKENDGKEAAFLWTADDEKNLMDLGYSEIERNRRLEILMARRRSRKNMAFEIDNNLIDVHSSGSGTSLDDLSRFRAQVPPIAVPRRNPFDLPYDSEEAAIPGSAPSILHARKNPFDLPLEQSNDSVVVHAHDILNSGEPATSRRDMIFRRHESFNFGRMDVIQEKRFSRLKPYFVPETVEWNASNFERQFNDKSESKMSSVTKSDIASSVADQEDHKDQDEKDLADVGSECSDGINSIDVELDHSDIDDREIALQQFVFERAQEREAHLVSTKGKGREEDYAPESAGSSTMPFHAVTDLLSWEDGDGDNSLGAKPSFQLNTEVKCSEWVSSSRPPVEGESDSGDLPEYLDTEVASSSNTAILGANNAAEKGGNVDRMSYSNDEMPLDNLIHRSMELPSEFFTETLPVISRDLHPIPEERVVENFNVQENHEAAIFY

SEQ ID NO: 70640 - protein, 74 aa, Zea mays
  Clone ID: UC-ZMFLB73042C11_FLI.pep
LDGLGTSSYIILPRSVQGKTPYEAWHGSKPQVGHLRTFGCIGHVKKVGPIHMAKRGVSSSCGAHIQEEMKLQLS

SEQ ID NO: 70641 - protein, 792 aa, Zea mays
  Clone ID: UC-ZMFLMO17027D12_FLI.pep
GIFLSEYHDETEEPLQPYEPPKVFQWRSEFGSELLKLRLEGYQWSTPFSINANGVMCVLMNSTTGNDQAFVRVNVRSGTKSSRHEVVFQLDCWSSPYRVENRSMFLPIRFRQFGGDDHSWRNLLPNSSASFFLEDLSRRHLLEVLVDGTDPMNSMTYDINVVMDHQPLTNSDALKKALRVTVLKEGKLNVIQIIDWLPDNRNRGQITERMLSPIFQPSEVDYGQSSPDLDSEFHVTLELTELGISVIDHMPEEVLYLSVQQLLLAYSSGIGSGVNRLKMRMHWIQVDNQLPFVPMPVLFCPQKIENQSDYIFKFSMTVQTNNSLDFCVYPYVGVQVPDNCVFFVNIHEPIIWRLHEMIQHLKFDRIYSNQPSAVSVDPILKIGLLNISEIRFRVSMAMSPSQRPRGVFGFWSSLMTALGNMEHMPVRIAQRYREELCMRQSALMNSAISNIQKDLLSQPLQLLSGVDILGNASSALSNMSKGIAALSMDKKFIQGRMRQDSKGVEDFGDVIRDGGGALAKGIFRGVTGILTKPIEGAKSSGVEGFVQGVGKGIIGAAAQPVSGVLDLLSKTTEGANAVKMKISSAIMAEEQLLRRRLPRAIGGNSLLYPYDGHKATGQAILHLAECATFLGQIDIFKIRGKFASTDAYEDHFLLPKGKIFLITHRRVLLLQLPMMTQRKFNPTKDPCSVIWDVLWDDLVTVEMTHGKKDPPDSWPSKLILYLKAKPSNSKEIVRLVKCNRGSDQASIIYSAIDKAYKAYGPNSLKEFLRWKVPRPYAPRNSSGRSIQDLSFG

SEQ ID NO: 70642 - protein, 360 aa, Zea mays; identical to SEQ ID NO: 53639
  Clone ID: UC-ZMFLMO17029G06_FLI.pep

SEQ ID NO: 70643 - protein, 73 aa, Glycine max
  Clone ID: 700869725_FLI.pep
LFTNCILAINLILSMVMSRTTNTLLFLYCFIPFLPISVAFEFVDLLPMDSYITNFQVHLLGCYTQLSNIIGYL

SEQ ID NO: 70644 - protein, 177 aa, Zea mays
  Clone ID: UC-ZMFLMO17039G05_FLI.pep
VRRIMEGNHRMGMVAIDSATGTVADCGCEVEISECEPLPDGRFYLEVEGTRRFRIVRSWDQDGYRVAEVEWLKDIPLPEGSQGRRELMELANGASELARAYIRHARDTVRTARRTRHLDLEGMPGPQDPEKFSFWLANLISLRPSDRLDTLRLRDTRERISSSISLLRDSEQGCRVQ

SEQ ID NO: 70645 - protein, 373 aa, Zea mays
  Clone ID: UC-ZMFLMO17040F12_FLI.pep
DVPRLCSMGSRVSGPYMDSPPPPPPRPPSPPRHPPHPQGERHVGGEMLYQDTDHRLRALVGSAEGFGRHAIGGLYGAIHRVTSLQDDGPGSLREACRAEEPLWIVFEVSGTIHLHSYLRVSSYKTIDGRGQRVVLTGKGLRLKSCHHVIICNLVLEGGRGHDVDGIQVKPDSTNIWIDRCTLADYDDGLIDITRQSTDITVSRCHFMRHDKTMLIGADPTHVGDRCIRVTIHHCFFDGTRQRHPRLRFGKVHLYNNYTRSWGIYAVCAGVEAQIVSQCNIYEAGGGPPKKTTVFKYMPEKAGDREDVVAGSISSEGDAFLNGALPCLIDNPGSVFRPEEYYQQWTMEPASPALKDIIQLCAGWQPVPRPPDDR

SEQ ID NO: 70646 - protein, 276 aa, Zea mays
  Clone ID: UC-ZMFLMO17180D04_FLI.pep
PRHSSPIRPSFVPKCHLPVNTTKQSLDLGGSVPQNMQRRSVDLVVNSNYRIEANTNQPPRVLLNSARYIQKEKDSTTTRQAFLQLAWKNGLPLFMLSYGDSDILAATVRRKGISEKDDLESTYAVFTVEEPKKKSGAWIKAGGKNKKHHLLSSIVGEIKVARRKSRCHHTADVHVYREFVLLGSGFLPSSEESGDSHVSGEFAAFISALPQQEAETSNQSSSQNTRQKNLAPTGCGCPPLGNFQPSSASANVIAVLPDGFHGKSTSGQPLPLIERW

SEQ ID NO: 70647 - protein, 515 aa, Zea mays
  Clone ID: UC-ZMFLMO17021A10_FLI.pep
TGNDEAEDKSKLTPSPFPTTPVSVERRLGEAMASGIGSGQQQPPAPAADADPGAVGDKLVFEAPPQPVREDYVQNAVKFLSHPKVRGSPVVYRRSFLEKKGLSTEEIDEAFRRVPDPQPSTTATTSPQQQVNSQNQSVGVQAYAPAQPVHPANAGPVVLPTQPRFSWYQAFLAAGLLLGFGASAAVFIKKLFLPRLKSWIRNVVAEGNGTEGNQLKPRIDDETADAVKASASAVSAIAKTNQQLLASKDEEKKILVTLTQALDSQAKELKSLTDSIGHTREPINITRDDRFSQYRPLEDHAPTVIRNGAINSSWRASQQTNMYGVSNGDFGSVRSSFAPAPVEPTAGSFSRSYGEQPMSTAQRSDRSSGSKPWEMQQYSQQRPGYGSNSQLSEEGSYSDAQDSYAPSYHQNGKAPDFQADEPRPLTYNTGVEERPPPQRRWVPPQPPGVAMPEAAAAIRQPKALPKQPSSDASEAAGEMQVNGSSASDAVTEVPVNGATASDAGRSEIQEQSVAA

SEQ ID NO: 70648 - protein, 309 aa, Zea mays
  Clone ID: UC-ZMFLMO17037E11_FLI.pep
STGGQLDYVQKVDNVATPVVSNVFDGTGELIAGVASVQAVENFITSSWIYHFRNHIANAPLVMLDANLSPESLKAACIMAYEFGVPVLFEPVSVVKCRRIAPVAEYITCTSPNEIELVAMANSLSPSVKYNFHKIEQFKEKADTVEYIFEMLSPAMFFLLEKGIKLLIVTLGSNGVFVCCKEHTNFMKDQHKCKQTPFSRQLLEKMDGCFPSNNLANLCRESSSRTCVFHLPAISASVISLTGAGDCLVGGVLSALCAGFDIIRSVAVGVAIAKASVESEANIPDDISAASIADDAQSVLHSAKVLWCK

SEQ ID NO: 70649 - protein, 653 aa, Zea mays; identical to SEQ ID NO: 56213
  Clone ID: UC-ZMFLMO17042B02_FLI.pep

SEQ ID NO: 70650 - protein, 145 aa, Zea mays
  Clone ID: UC-ZMFLMO17043D01_FLI.pep
ATTSHSPPSPNPRTAAPRRLRRCSGSQERPEREASPALHLTCLLPNDSAAPSVPRRGSGICRPRCSAAFSLAPAGGSSLGRLAGASGHDASWPRALPTTAPLLQLPIDASGFVRPAVPRPSAHPCYPDCPCPVLALYGVSIGRQI

SEQ ID NO: 70651 - protein, 126 aa, Glycine max
  Clone ID: 700844719_FLI.pep
ILQALLRNATDAMRESRVLEIINTMEPLAYRKMDFEEFCAATISTHQLEAHEWWEDIASTAFEHFEREGNRLISVEELARELNLGPSAYSVLKDWIRNTDGKLSLLGYTKFLHGVTLRSSNPRQHR

SEQ ID NO: 70652 - protein, 669 aa, Zea mays
  Clone ID: UC-ZMFLB73256D12_FLI.pep
GADRGPILEVIVSRMRYISSQTERSIRFVGLSTALANARDLADWLGVTDDGLFNFKPSVRPVPLEVHIQGYPGKFYCPRMNSMNKPAYAAICTHSPNKPVLIFVSSRRQTRLTALDIIQLAASDEKPRQFLSIEDNSLDMVLSQVSDSNLRHTLQFGIGLHHAGLNDRDRSLVEELFSNNKIQVLVCTSTLAWGVNLPAHLVIIKGTEYYDGKTKRYIDYDITDILQMMGRAGRPQYDQHGKAVILVHEPKKSFYKKFLYEPFPVESNLREHLHDHINAEIVSGTISNKEEAIIYLTWTYLYRRLVVNPAYYGLEDTETNTLNSYLSRLVETTFEDLEDSGCIKVDDHSVKYLILGKIASQYYLSYLTVSMFGSNIGPNTTLEVFLHILSAASEFDELPVRHNEDNLNRILSGNVPYPVDQHHLDDPHVKANLLFQAHFSRAELPISDYVTDLKSVLDQSIRIIQAMIDVCANSGWLTSALTCMHLLQMIIQGLWFERDYESLWMLPSMNDDILDHLKSRGVSTVPSLLDLSREELRRVLQPFSASELYQDLQHFPHVDVKVKLHNEQERSKPPTLNIRLQLKNSRRSASRAFAPRFPKAKQEAWWLVLGNATSSELYGLKRISFADRVINTRMELPQTFNVQETKLILVSDCYLGFDLEYSLEHLTKG

SEQ ID NO: 70653 - protein, 597 aa, Zea mays
  Clone ID: UC-ZMFLMO17270B01_FLI.pep
QLQVEESKAMVVKEREAARKAIEEAPPVIKETPVLVEDTEKINSLTTEVEQLKALLLTERQATEAAKREHAESELRNEELIKKFESAEKKIEQLQETVHRLEEKATNMESENKVLRQQAVAISPTSKSLAAYPKSPFQLKTPENGNALNGEVKSSPDITPILPNPKELEAEEKPQKSLNEKQQENQDLLIKCVSQDLGFSSGKPIAACLIYRCLLHWRSFEVERTGVFDRIIQTIGSAIESQDNNDKLAYWLSNSSTLLLLLQRTLKTTGAAGFTPQRRRSSAASFGRVFSGMRASPQSAGRAFMGSRLIGGLGDLRQVEAKYPALLFKQQLTAFLEKIYGMIRDNLKKEISPLLGLCIQAPRTSRASLIKGSRSQANALAQQTLIAHWQSIVKILTNYLNVLKANYVPSVLISKVFTQIFSFINVQLFNSLLLRRECCSFSNGEYVKAGLAELEQWCIYATEEYAGSSWEELKHIRQAVGFLVIHQKPKKTLKEITNDLCPVLSIQQLYRISTMYWDDKYGTHTVSSDVISSMRVMMTEDSNNAVSSSFLLDDDSSIPFSVDDISKSMTEIEVTDVDMPPLIRENSGFTFLHQRKD

SEQ ID NO: 70654 - protein, 213 aa, Zea mays
  Clone ID: UC-ZMFLMO17277G03_FLI.pep
ESRCSSMFVFVVDLRVRCRNPKRVGELRSQTTQRPMHIGTRNTTREENPGPKNNPPCDLHPQDTKISSFITVACHASAPTMAKASIACHVLYMLHLTSPLQVGASLRSNNYRNSSNNYQRSRFIIPSGAGQRRSRSHRRLQPSSLQTRSERNPNSLAISLALEPEAKQRGRSAQHNNKILRSETNRCRSNSSYTRICCTSRAQIHSLPARFKP

SEQ ID NO: 70655 - protein, 272 aa, Zea mays
  Clone ID: UC-ZMFLMO17286E09_FLI.pep
SRSGGGGDAPRRGGDERARMPPQGQAPVLLLHPVPVAAGEERQQRARLLVGIGAQVHGREPGAAEAAAPLAQRLVALRALRALARHHVADLPAEVHLRHDLVRAAGRGRGGVGGLAGAGAGALERIEHGGVVVQRLGEAVEERAGVVVGLLLDHGHDPRPHRAHRAQDLLEGTGLRKKPVQLEHGVHGDHLGLVIRVIALRLQHERLQVGERGRDEATVLEVHADGVRELGKFPAHLLQGVGLVGLRRPDAGEPERRGAARAEGEGLEKSRP

SEQ ID NO: 70656 - protein, 652 aa, Zea mays
  Clone ID: UC-ZMFLMO17273H12_FLI.pep
HHSFLPWSPPPPWPSRARPYRSRVPRARHAHFSRAGARARARAGARARARAGAGGMASQVAGSTPAVAALGFLLPTFWEIEVTCAAAMILVALYVAYELLNPRSSQAAAAGDADELLVRGLDGADKFKGGVSGPSAYVVKLELLAAKNLMAANLNGTSDPYALITCGAEKRFSSMVPGSRNPMWGEEFNFFVDSLPVKINVTIYDWDIVWKSTVLGSFTVTVESEVPSGPIWHTLDSTSGQVCLHIKVIKVHESSSRAINSSAEAGARRRISLDKQGPTVVHQKPGPLQTIFELPPDEVVDHSYSCALERSFLYHGRMYVSSWHICFHSNVFSKQIKVVIPLRDIDEIRRSQHAVINPAITIFLRMGAGGFGVPPLGCPDGRVRYKFASFWNRNHTFRALHRAMKNFVMMIEAEKQERAQSALRAHSSSRKNSKKEINVPEDCAALTGQLQPFVKEEVLVPVFNGTFPCTAEQFFSILLSDDSNYITEYRTDRKDKDINLGQWHVADEYDGQVRELNCKSICHSPMCPPYSAMTEWQHIVLSADKMDLVFETVQQVHDVPFGSFFEVHCRWCVKTISSNSCSLNISAGAHFKKWCIMQSKIKSGAVDELKKEVKVMLDFAQGYMLKVSSPDQENSNLAQQDNTAPDAPSDTG

SEQ ID NO: 70657 - protein, 984 aa, Zea mays
  Clone ID: UC-ZMFLB73022C10_FLI.pep
HIHSPTKTKEYGEDLLPFVLDALSEIAFHPKFSSSRVEKERRAILSELQMMNTIEYRVDCQLLQHLHSENKLSNRFPIGLEEQIHKWDPDKIRRFHERWYYPANATLYLVGEIDDIPRAVREIEAVFEHTLSENEGNPVPSANPFGAMASLFAPKLPGGFTSNLTGEKSPATDKIKPAKRERQAVRPPVEHKWSLPGVAQDAKPPAIFQHELIQSFSINMFCKIPVSKVQSYKDLRSVLMKRIFLSALHFRINTRYKSSNPPFTSVELDHSDSGREGCTVTTLTVTAEPQNWRSAIKVAVHEVRRLKEFGVTMGEMTRYMDALIKDSEQLAMMIDSVPSVDNLDFIMESDALGHTVMDQLQGHESLLAVAETVTLEEVNTVGAEVLEFISDFGKLNAPLPAAIVACVPQKVHVDGAGETEFEIYPEEITEAIKAGLEEPIYREPELEVPKELITQSELDDLKSQCNPSFVPLTKEENAVKVFDSETGIAQRRLSNGISINYKITQNEARVGVMRLIVGGGRATEDSESKGSVIVGVRTLSEGGCVGNFSREQVELFCVNNLINCSLESNEEFIFMEFRFALRDNGMRAAFQLLHMVLEHNVWLEDAFNRATQLYLSYYRSIPKSLERSTAHKLMLAMLNHDERFVEPSPHSLQKLTLQSVKNAVMNQFVGGNMEVSIVGDFTEEEVESCVLDYLGTVRASSSLNTEERIEKISFRPFPSDVHFQQVYIKDTDERACAYIAGPAPNRWGFTTEGNDLFNVIRISDADAEVSEPVSLDLTGKRHVDVRSHPLFFGITLSLLAEIINSRLFTTVRDSMGLTYDVSFELNLFDKLGLGWYVIAVTSTPSKVHKAVDACKGVLRGLHSSRIVERELDRAKRTLLMKHEAETKTNAYWLGLLAHLQSSSVPRKDVSCIRELTTLYESATIEDLYLAYEHLKVDDSSLFACIGIAGAESGEDTNDDELDVDLHGMAPMGGRGLSTMTRPTT

SEQ ID NO: 70658 - protein, 267 aa, Zea mays; identical to SEQ ID NO: 59257
  Clone ID: UC-ZMFLB73008G04_FLI.pep

SEQ ID NO: 70659 - protein, 480 aa, Zea mays
  Clone ID: UC-ZMFLB73135G03_FLI.pep
ASPTPARARVSCATATSGLPPAMAEAPTYQILVRLLDGRTTCLRFSTPTVSGAVLLEAVASISRVPAAALRIVTGRFDVSPSNVLTSSADGQFPSASALLRLRGGKGGFGSLLRGAASKAGQKKTSNFDACRDINGRRLRHVNAERRLEEWKAEAGDRHLEKLAENFIKKKAKEAGRRGGPSAAEVDKYLEKYRKDAEICVNAVEESVRASLGKRKTAPKPPSGADAKKLKIWLGKNKVEEDESDSDSDSDMDDEDSEDQESADAKSLVVDEGNCSNGSIKNEKLDLGSVSGSHSEGESSGEKSQPTTKSGAEGGDFESDGSAEPELGMVDHPIPVNNAVAAASEEVLKSDEVTADEDNTTSATSNQNNPVVPQVKEALKADEDNSASATSNQNNPEVPKVEEYADASKSYSEPLDLAKYSSAVELEVLGLEKLKIELQSRGLKCGGTLQERATRLFLLKTTPLDKLPKKLLAKAAIGGK

SEQ ID NO: 70660 - protein, 187 aa, Zea mays
  Clone ID: UC-ZMFLB73093E06_FLI.pep
AQSQLVLLLMLMLPSVTMLVVLLRTDAVDAAGNTTAAIGKGFAIGSAALVSLALFGAFVSRAGVKVVDVLSPKVFIGLIVGAMLPYWFSAMTVKSVGSAALKMVEEVRRQFNTIPGLMEGTAKPDYATYWKISTDASIKEMIPPGALVMLTPLIVGTLFGVETLYGVLAGALVSGVQPSFSLNRKEL

SEQ ID NO: 70661 - protein, 107 aa, Zea mays
  Clone ID: UC-ZMFLB73184F05_FLI.pep
KEILHVSFTIKQLLQYSGAGGVQLEGLSELAGGYEELNRSVFKRLVSPSIVTKTNQLTIRKVLKGPKTNGACIFIRSLIGVLYGSFIMLVKLYEVCSLLSNLVSCPS

SEQ ID NO: 70662 - protein, 474 aa, Zea mays
  Clone ID: UC-ZMFLB73220G06_FLI.pep
PQALTPPPNPRGRPDDRRGPTSAPTVPETPIDPDDKKMQTGPLVGIAVGSIAAASCVLFALVLCLHNARKKPDDGSSEAKASSREVMDSSHDNAAVATSDLQLIQPAGKMTPDDRAHGPNGCTAKRPKQQVTVTTVSSYTVAALQVATNSFCQDSLLGEGSLGRVYKAVFPNGKVLAVKKIDSASLSLYEEDNFLAVVSNVSRLRHPNIVPLAGYCVEHGQRLLAYEYVGNGTLHDMLHFSDDDGMTMPGKTTRLAWNTRARIALGTARALEYLHEVCLPPVVHRAFKSSNILLDDEYSPRLSDCGLAALSPNPETEREAFAGVVGSFGYSAPEFAMSGTYTAKSDVYSFGVVMLELLTGRKPLDSSRERSEQSLVRWATPQLHDIDLLAKMVDPALDGLYPAKSLSRFADIIAICVQSEPEFRPPMSEVVQQLVRLMQRASIVRRQSDDQLGYSYRVPERDGGGTVGGDVVVA

SEQ ID NO: 70663 - protein, 245 aa, Zea mays
  Clone ID: UC-ZMFLB73064A07_FLI.pep
TEVRWRWLWRWRWVRRLRRRWRRRWWWVWRWRRRRRRWVRRRWRLHTRLLWHRHLRLLEEPPGRHHLVHRVAGQHPRLLRRRVQRLLREQAADAAGRAVQHPHRLLRRPPPRGRRGLPQLHRRREVRLQHAAGSGLHRRRAHFQGRRRRAGRHVQEGQLRLQLLARPRASSAYNVRTQCSLYNSIRIWVCKVQTDQLYVFIVAFVSASSSHACLCMMPCRLVVSWFSSDAYFLVVVANVRNKTMR

SEQ ID NO: 70664 - protein, 542 aa, Zea mays
  Clone ID: UC-ZMFLB73065B09_FLI.pep
NLLVLPNPFPDPNCKSSFATMDPRARYPSGVGNGRGGTPNYYGRGPSPQQPHQHHQQQQQQKQTSGAHHHQQYAQRQQQQHRHSHNHQQQQQQHQSHQQQQQQQQWLRRNQIAREAAGAAVTSEPKALAPSTAADGVNSSSQDWKAQLKLPPPDTRYRTEDVTATKGNEFEDYFLKRELLMGIYEKGFERPSPIQEESIPIALTGSDILARAKNGTGKTAAFCIPALEKIDQEKNAIQVVILVPTRELALQTSQVCKELGKHLKIQVMVTTGGTSLKDDIVRLYQPVHLIVGTPGRILDLTKKGVCILKDCSMLIMDEADKLLSPEFQPSIEQLIRYLPASRQILMFSATFPVTVKEFKDKYLPKPYVINLMDELTLKGITQFYAFVEERQKVHCLNTLFSKLQINQSIIFCNSVNRVELLAKKITELGYSCFYIHAKMLQDHRNRVFHDFRNGACRNLVCTDLFTRGIDIQAVNVVINFDFPKNSETYLHRVGRSGRFGHLGLAVNLITYEDRFNLYRIEQELGTEIKPIPPQIDQAIYCQ

SEQ ID NO: 70665 - protein, 588 aa, Zea mays
  Clone ID: UC-ZMFLB73154G03_FLI.pep
VNENSENPYWKAIGYSVDEPREDRARTATPSPSRPLDVGVVETRLLDDNKLLRSLVGRGLTVKPASSDANHHTVQCDAVIVGSGCGGGVAAAVLASAGYKVVVVEKGDYFTAEDYSSIEGPSMERLFERGGIFCTSNVTTMIFTGATVGGGSAVNWSASIRTPEEVTQEWAREHGLPVFASPGYAQAMDAVCARLGVTDGCQEEGFQNKVVRRGCEALGLCADAVPRNSSDAHFCGSCNFGCPTGDKRGTDTTWLVDAVARGAVILTGCKAEYFVLEKNHSSGSGSGRGKKCVGLVATCASNGVTKKLRIEAKVSIAACGALMTPPLLRRSGLKNRHIGSNLHLHPVSMAWGYFPENKQDPPLSGKCYEGGIITSMHRVTDRTIIETPALGPGAFAAMVPWESGRDMKERMRRYSRTAHAFALVRDRGVGFVDGEGRVRFTPSREDVDELRNGLRRVLRILVAAGAAEVGTHRSDGLRLRCKGLRDEDLEGFLDEVTIEKGPMHSRVDKWALHCSAHQMGSCRMGSSPKDGAVDGRGESWEAEGLYVCDGSLLPTAVGVNPMITIQSIAFCLSKGIAETMAQGQGKGQ

SEQ ID NO: 70666 - protein, 318 aa, Glycine max
  Clone ID: 700790189_FLI.pep
EYHQFDLHQDYDHGLYTGFNGTGYCEEDAIPHISSYLPSICPPPSAFLGPKCALWDCPRPAQGLDWCQDYCSSFHAALALNEGPPGMAPVLRPGGIGLKDNLLFAALSAKAQGKDVGIPECEGAATAKSPWNAPELFDLSVLEGETIREWLFFDKPRRAFESGNRKQRSLPDYSGRGWHESRKQVMNEFGGLKRSYYMDPQPLNHFEWHLYEYEISKCDACALYRLELKLVDGKKNSKTKAANDSVADLQKQMGRLSAEFPHDNKRAAKGRAKINAKVGIGGVYPASHRVTPLNGTYEYGLAAPYDYLVDNMGDYYGT

SEQ ID NO: 70667 - protein, 138 aa, Zea mays
  Clone ID: UC-ZMFLB73274H09_FLI.pep
FLQENRNSFTKQLKDHQTGSSRGETLVTFSKMFSWCAWRRMSWRTLGPQRPVINRYTHGSRIALHLQKKQGYRAFHQCLQDVNSVPSENCPRFGSTVSSKRLSCAGSRRPSTKRLSLGGRTPRCPIVSTGRWPGAGIQ

SEQ ID NO: 70668 - protein, 98 aa, Zea mays
  Clone ID: UC-ZMFLB73276E05_FLI.pep
ARLYMDAGLASAVTMLRTCTDVVHLAHVLEQFRLAWCGKLVRDTRAVAPSRASASTSSSLGVETELSMYAGGERCDRYYPCLINYDNGDGHDIWSILY

SEQ ID NO: 70669 - protein, 137 aa, Zea mays
  Clone ID: UC-ZMFLB73280E05_FLI.pep
EAAPLAKKRPPFQEMKIQESADTVTEPDSRSRNYQARGYGNHRPFLRPDDRGFRRGFPDHRSDGQRNGHDIRGRFSVRGGMDRDRFNNSYGGRSNAEQASGDQEEKWKHDLYDQTNRSPPPKTEEEQIAKVEALLAL

SEQ ID NO: 70670 - protein, 735 aa, Zea mays
  Clone ID: UC-ZMFLMO17288D12_FLI.pep
MNPNCPRQPPPPQQSPTPPVKSAMSPPPCDALPTAANNIQPFLVLHKAAASSVPSSRSQRQIQTSQPSSPNRKSANRCRQPAGEECEDEGDSELYEQLRAEAFHRTWSKIQSTIDEVLRAINLKLFDQVLQWAKESFASAHAITKKHHTEVQQPYPLLTDVICRRIPTVFVLTKNAEFVDDITTFHDLAGHMKSNGCHIVKLSAAELSAKHGVGGCFRSLLGQLLSDVPDVADVSALASWYCEAENFDQPIIVIIDDLEQCSGDVLGEFVMMLSEWVFKIPVFFVMGIATTLDAPKKLLSSEALQRLEPCKLTLGSPSDRLNALVEAVLVKPCAGFCISHEVALFVRNYFFRHDGTITSFITALKLACSKHFSMEPLSFLCLGMVEEDSEEFWHDKLESLPQTIWKHAFDLPSNKNARNSCNMVEGLSRLLKSQKDWSSVLLCLYEAGRHDKVQLLDIFCEAASPDWQTENAPDSYLFASKVALLGVKSGSARRFIAQVMNTIRYLPTEILLHVLEVWSIHLKGMSEINDRVKELRSKGCGADSVRAKRKSTANTGNGVVLINEEAAALLQDVIRKYLVPAECLPFHEIVCFKNVDILRSALIGNPRRMIQLDLLRSQSHLKCSCCSRSGAAVSGSLHDTSILCSLAQEYGDMINLHDWYTAFEGIIKSTNSKAKGKSCSSPSKKKKKSNPTPLEGDGMIQARFCSAVTEMQVTGLVRMPSKRRPDLVQRIAFGP

SEQ ID NO: 70671 - protein, 97 aa, Zea mays
  Clone ID: UC-ZMFLMO17076D08_FLI.pep
WRLMTWTCHVEFSVYSQKEVLDDTMGIGRPAGQMDPKAFVLQKFNRTGRERIDSAVREGVDILKMVAARGLTEAAKLTNADQKYKHLRSHGIQTNDD

SEQ ID NO: 70672 - protein, 426 aa, Zea mays
  Clone ID: 700343285_FLI.pep
KASEIPELAVIKDLHLRTVDELGLDRSIVSGLLDELEQLLKGVAMMKELTLRTRDYLVSFGECMSTRIFAAYLNKLGKKARQYDAFDIGFITTDDFTNADILEATYPAVAKRLHEDWMDDPAIPIVTGFLGKGCKSCAVTTLGRGGSDLTATTIGKALGLREIQVWKDVDGVLTCDPNIYANAIPVPYLTFDEAAELAYFGAQVLHPQSMRPARDGDIPVRVKNSYNRHAPGTVITKSRDMSKSILTSIVLKSNVTMLDIVSTRMLGQYGFLAKVFSIFEDLGISVDCVATSEVSISLTLDPSKLWSRELIQQELDHVVEELKKFAVVHLLQRRSIISLIGNVQRSSLILEKAFNVLRRNGVNVQMISQGASKVNISLVVNDSEAKQCVQALHSAFFENGFLSEVEGAEVPQNGASLNSNGAVYGN

SEQ ID NO: 70673 - protein, 211 aa, Zea mays
  Clone ID: 700348062_FLI.pep
DLDLKKFMDSCPEFAKNPTLIKSYLYQILRGVAYCHSHRVLHRDLKPQNLLIDRRNNALKLADFGLARAFGIPVRTFTHEVVTLWYRAPEILLGARQYSTPVDVWSVGCIFAEMVNQKPLFPGDSEIDELFKIFRVLGTPNEQGWPGVSCLPDFKTAFPRWQAQDLATIVPNLEPAGLDLLSKMLRYEPSKRITARQALEHEYFKDLEMVQ

SEQ ID NO: 70674 - protein, 333 aa, Zea mays
  Clone ID: 700348185_FLI.pep
LRPSVKLFIAFTEPGEGVRLQRATCGHNKRTRCRFLFCVGAGGSIRAAPENAFVSSGIGEDGDRRIIRGAREGVAAVDGSHEFRVPETPLSPPKRGSVNSHDQRHFCGYSTPTDSRSFITDFLSGMLGIAPFTRTHREAAAAANLMHSLLGFPSTRATANAEVNVSPAPVVSMTSVAGTIGCLIGSSPSTNKADPCDPSLTSTSCTPILWHFPAAMLICSNVSVGIPVRRASSVSFGLKISTRLSSSRGKGVSIPPASMITGTPALFAAWAACALTQSGISLCSSSTPAFRINSRSSEPIPAAQPSMFAPPTMIMEFCPSGMSMTTACPDGAS

SEQ ID NO: 70675 - protein, 301 aa, Zea mays
  Clone ID: 700351357_FLI.pep
ARAPAVRFPSARRAAELKAFLEDPANFDTLAMVFNRSSRFGRLQGVKCAIAGRNLYMRFSCSTGDAMGMNMVSKGVQNVLDYLQADFPDMDVISISGNFCSDKKSAAVNWIDGRGKSVVCEAVIKEEVVKKVLKTNVQALVELNVIKNLAGSAVAGALGGFNAHASNIVAAIFIATGQDPAQNVESSQCITMLEAINDGKDLHISVTMPSIEVGTVGGGTQLASQSACLDLLGVKGANRESPGSNARLLATVVAGAVLAGELSLISAQAAGHLVKSHMKYNRSSKDMSKTLAEETDKPKKC

SEQ ID NO: 70676 - protein, 193 aa, Zea mays
  Clone ID: 700451040_FLI.pep
LGCYHVDEQYQTYTYTCGAERRARMVHDAAAVSIMALNSSKQTTPSPSMSTTAIISAHRSAVISSPTIPSLHRARRSSSAVITPSPFSSYSANAARNVSDRSPSSNSASSSSRLMNPSPSRSATATISSASTAVHPHNSRISSAEMRPSPSASKWRNTRTRAGSGIVYVGGGVLAAAGGGGLEERRRLKKISL

SEQ ID NO: 70677 - protein, 266 aa, Zea mays
  Clone ID: LIB3357-023-C10_FLI.pep
ISGRSIVMHSYRAMHPYTHHSYQHHTAAVAPTKHGHGHGHGHGHGDEEDDQSMLLLSLWPPGHHHGNAAASSACSSPPICASATTTSMAAAASSPASYPWLTHQSLYNNAGCGGGSSSSSHSSFLFQEHQQEPGVSISLSIAPPCSNNAASSCGGGGFAAPPAAPSTVTTTVTPGGGQVPRQYWIPSAAEILVGSTQFSCAVCNKTFNRFNNMQMHMWGHGSQYRKGSESLRGAITVGTAPPASLMRLPCYCCAEGCRNNIEHPRA

SEQ ID NO: 70678 - protein, 232 aa, Zea mays
  Clone ID: LIB3357-046-B4_FLI.pep
PCTDLLCSPITSNSGFTNSVTVALPASQTPEADRGRRYTAASCPATSRHVSRTEVSDAGSFSRRARWASTLWRCGAAASGCDVQSVARRRRHSRLAGEASPGESGASALSSMGTASVDGGARMMRSSSSTAMWCVSRSESLTSAASTRDLSSAIAAFFDGVAPAAGDGGGGGAAPPPADAALEPGFGGGGCAVVGNLGWDLTADLETAVAIAVGIWSMRWVEWEEWEWRGQI

SEQ ID NO: 70679 - protein, 267 aa, Zea mays
  Clone ID: LIB3357-059-F12_FLI.pep
EFFSVAQDADPLATLFMNEYNVIETCDDPFSTVDTYVSKLKDLRSAGAILEGIGLEGHFSKPNIPLMRAILDKLATLGLPIWFTEIDISNKFDAQTQAAYLEQVLREAYSHPAVSGVMLWTALHPSGCYQMCLTDWNLSNLPTGDVVDRLLNEWRTLQAAGQTDAHGAYSFTGYLKRSPSLSSQAHDIPILLEICILLLQQCPKPCPMCSSKGDHDDLAKLELVEDGGFTSGIDADHKDLHILIDEEPAEELPKHEPHSSMSAFFTT

SEQ ID NO: 70680 - protein, 89 aa, Zea mays
  Clone ID: LIB3587-269-H11_FLI.pep
WREKKKEQRRANDRDAGEAVGRRGGRASPGDGPREAPQGHHRPPARRRRQRNNYMHLLICWIEYIEHLCNTFGENTGHLYILLSLSIPV

SEQ ID NO: 70681 - protein, 299 aa, Zea mays
  Clone ID: LIB3591-084-B5_FLI.pep
IFPIGGVPSGIQTSRSLFYFNLTCAFFTERFHTLHARGYRAAKQRTQSYRTHTIRYTAEGHKITRLCRCRLPRHRPCRRGPPCWRRRCPLMPDSPQLHQPPPPPAPPPASATPAAPAAANAQPKLTAVKLRMIIKGVLGRYQRWNPVHPTAGTFWGVGLGVGCGVGWGPGFGPEVIGYVGAGCGVGFSVGFTLAGVGIGLPQHSLIRNHDHGGFASSVPVDSARFYALTIIRGLVWDAISYVGNVAAMRKESRQKLPRFQDSPQVPGGVDLPKLGKGVSSSIRSTVECIRAFKDQRWPP

SEQ ID NO: 70682 - protein, 225 aa, Zea mays
  Clone ID: LIB3354-056-D12_FLI.pep
DKGKARERRRRLICCRSAKRKRKRKRSAGVVKMFLVDWFYGVLASLGLWQKEAKILFLGLDNAGKTTLLHMLKDERLVQHQPTQYPTSEELSIGRIKFKAFDLGGHQIARRVWKDYYAKVDAVVYLVDAVDKERFAESKKELDALLADDSLANVPFLILGNKIDIPYAASEEELRYYLGLSNFTTGKGNVNLADSNVRPLEIFMCSVVRKMGYGEGFKWMSQYIK

SEQ ID NO: 70683 - protein, 161 aa, Zea mays
  Clone ID: LIB3354-008-C7_FLI.pep
DTEGLPQGSDLCLRKSLPKHPLEWHIAYSQPCQRTQVVYFEDAFHKQFRERSGHPHTDSHGRMLCKLSGETPEAKHGVDTGCCCGCKDWEVAWRALAVQGYPCSICLHVKRPEVPWQGQGRDRFSKRCWCEIAVGKTDCFMRGYVGASCLPPKLLGGPLVS

SEQ ID NO: 70684 - protein, 255 aa, Zea mays
  Clone ID: LIB3354-010-D4_FLI.pep
QKRRWLLEASLAGSVATNAPRKISSPTAMAAADASRTLLAAVSLALAACCLAQLAAGDTNGVYEPCSDGRIQRGDGFTFGVVFAGYNAFFSGNTQLSPCDRRLNLAASGQLAVFRPKASAGGFMVAFAGRKYAARSIPIFVSNTSVTVSSFTLVLEFNKGRLENLHWKKDGCGACSGKSNFVCLGKQTCAIRTQSCKSQGPVDCSVGIQLAFSGTDKHESVLNSWYEVSNLRQYSLYGLYSNLKGTLSGQFNKIF

SEQ ID NO: 70685 - protein, 116 aa, Zea mays; identical to SEQ ID NO: 48140
  Clone ID: LIB3354-018-A4_FLI.pep

SEQ ID NO: 70686 - protein, 77 aa, Zea mays
  Clone ID: LIB3354-034-B4_FLI.pep
TELFVLFYLGQVITGSWDKTVKCWDPRGVSGPERTLVGTYAQPERVYSLSLVGNRLVVATAGRHVNIYDLRNMSQPE

SEQ ID NO: 70687 - protein, 347 aa, Zea mays
  Clone ID: LIB3354-053-A2_FLI.pep
GAWCWSRRRRCARRGSRSPRGPTPSAPWMPSASGTRSGSTICSTSATGEAAAEVSLKIQSKSGPHEIRCVKRDFLLRTLADELPEGTIRYSAKVVAMEEDGVGGAKTLQLHLADGSTIKAKVVIGCDGVNSVVAQWLGLPKPILSGRSATRGLAEYPGGHGFGPEILQFIGHGFRSGVLPCSDTSVYWNYTWYPSPADGDAEESVAKMRSHVVAKLRGAKVPAEALEVVERSEMSDVASSPLRFRSPLALVRGSISRGGVCVAGDALHPMTPELGQGGCAALEDGVVLARCLGKAFALLGHERDEGRVVTAALEEYAAARRWRSIQLITAAYVVGFIQQSNNAVVRR

SEQ ID NO: 70688 - protein, 407 aa, Zea mays
  Clone ID: LIB3354-053-E3_FLI.pep
YADTAPIRIVVFASLADPPLPSPRFKMQIFVKTLTGKTITLEVESSDTIDNVKAKIQDKEGIPPDQQRLIFAGKQLEDGRTLADYNIQKESTLHLVLRLRGGMQIFVKTLTGKTITLEVESSDTIDNVKAKIQDKEGIPPDQQRLIFAGKQLEDGRTLADYNIQKESTLHLVLRLRGGMQIFVKTLTGKTITLEVESSDTIDNVKAKIQDKEGIPPDQQRLIFAGKQLEDGRTLADYNIQKESTLHLVLRLRGGMQIFVKTLTGKTITLEVESSDTIDNVKAKIQDKEGIPPDQQRLIFAGKQLEDGRTLADYNIQKESTLHLVLRLRGGMQIFVKTLTGKTITLEVESSDTIDNVKAKIQDKEGIPPDQQRLIFAGKQLEDGRTLADYNIQKESTLHLVLRLRGGY

SEQ ID NO: 70689 - protein, 113 aa, Zea mays
  Clone ID: LIB3354-065-G7_FLI.pep
GASSILIINLTFLWITQNLIGLCELLELLGVTALVGVVLDSGLAVGLLEVVLGRRLGHPEDLVVLGVVALLRRAPEHLALAAFAAAAAPLLRGGGVWRNRSGGEGRRSKLVAE

SEQ ID NO: 70690 - protein, 152 aa, Zea mays
  Clone ID: LIB3354-076-A11_FLI.pep
STSSSKLTQSKHPTQRYHRRLPSTSRPGTWFNRVLDFGEVDFDETNLPGNRNRRVITSASSRWRKVTLQEMDVGATSRLFPLLLLLLLLLAAWRRRRLLLCRSRAPRSPSSSLGLPPGAPACIAGHRQRATTASVREQKKRMYIEDVHVLAS

SEQ ID NO: 70691 - protein, 160 aa, Zea mays
  Clone ID: LIB3354-093-F11_FLI.pep
PKHAQHTNTHRAQLRGDLPAAGEMSRGTGAGYDRHITIFSPEGRLYQVEYAFKAVKSAGVTSIGVRGADSVCVVTQKKVPDKLLDQTSVTHLFPITKYVGLLATGLTADARSLVSQARNEAAEFRFKWGYEMPVDVLAKWIADKAQVYTQHAYMRPLGVG

SEQ ID NO: 70692 - protein, 300 aa, Zea mays
  Clone ID: LIB3354-100-C7_FLI.pep
TMATASEIAAVGVIGAGQMGSGIAQLAAGGGCAVLLLDADPTALSRAVVSISASLRRLAAKGQLSQAACEDSIKRIRCVSAVQDLRDADLVIEAVVENEDVKKKLFVELDKVTKPSAILASNTSSISITRLASATKRPSQVIGMHFFNPPPVMKLIEIIRGADTSDEVFAAVRSFSERLGKSVICSQDYPGFIVNRILMPMINEAFWALYTGVATKEDIDAGMKLGTNHPMGPLQLADFIGLDVCLSVLRVLHSGLGDNKYSPCPLLVQYVDAGRLGKKRGVGVYSYGHRPSSVRPKSSL

SEQ ID NO: 70693 - protein, 239 aa, Zea mays
  Clone ID: LIB3354-100-G2_FLI.pep
PRPDRQRARRPEKESESPPPTHPLPRAGSGRRTRCRRTGIWTGRSRSCATASTCPRRRSRCSASRPRPSSWRNGTCSPCAAPSPSAATSTASSMTSSSSSASAATLPTPTTSSWATTSVPHEGPMCDLLWSDPDDRCGWGISPRGAGYTFGQDIAQQFNHTNGLSLISRAHQLVMEGFNWCQDKNVVTVFSAPNYCYRCGNMAAILEIGENMDQNFLQFNPAPRQIEPDTTRKTPDYFL

SEQ ID NO: 70694 - protein, 125 aa, Zea mays
  Clone ID: LIB3354-101-A5_FLI.pep
NLLLDISLLLPQPVQGAVCVALSTDKPRESKRCEVTIIQAIRIQVANVDLDRGMVLGSDDPVCGRALPGDIEVHSLTLLVLHGGSWGNYRKSNINRTQRAIHYGHGEAREYNFDPVAISSTSSRT

SEQ ID NO: 70695 - protein, 327 aa, Zea mays
  Clone ID: LIB3354-101-A9_FLI.pep
LPPRWLATTAAAGVGIWAAPRGEEEAARSPSAMAGSSDPDKLMSKADKLTKLSFTRWNADWKSATSLYEQAAIAYRFRKDNEKAKDAFEKASKGQEMISSPWDAAKHMESAAALAKELGRWNEVSDFYHRASELYRECGRPQPASDALAKGASALEEKSPEEAIKMYDEACSVLEEDGKEQMAFDLYRAAAALYIKMEKYSDAAALFLRLGSAADKCNAINSQCKAYLSAIIIYLYAHDFQQAQKCYNDCSEVQAFLNSDQNRCATKLLSAYEEGDAEEIKRIAQSSAFNHLDHVVIRLARKLPTGDLQAIKKADDGEESLDEDDLT

SEQ ID NO: 70696 - protein, 139 aa, Zea mays
  Clone ID: LIB3354-102-E10_FLI.pep
VLQREDDLNEIVQLVGKDALAESDKITLETAKLLREDYLAQNAFTPYDKFCPFYKSVWMMRNIIHFNTLANQAVERAAGTDGHKITYSVIKHRLGDLFYRLVSQKFEDPAEGEEALVGKFKKLYDDLTTGFRNLEDEAR

SEQ ID NO: 70697 - protein, 305 aa, Zea mays
  Clone ID: LIB3354-108-F4_FLI.pep
CCAATQPASSSPPPTATSSKTTSAPPRQPPPPRILPVTPLRLQSLARRPPIPCSNSSTRSPAPCHPSPNASASASPPRRLRPRTRDHPIHPMEVEIKLRLPDAAAHRRLSAFLAPRLRRTHAQRNLFFDDAARTLGAATAALRVRLYDGPDDRGPSRAVLALKRRPRIEAGVSRVEEIEEPLEPALAVACADDPARLGGLDSPIIRLVAAEYGVGGDAAPFLCLGGFGNTRAVYEYELEDGGGGLVLELDETRFDFGTRYELECETAEPDRVKEVLERLLTVAGVPYEYCRNSKFACFMTGKLLP

SEQ ID NO: 70698 - protein, 203 aa, Zea mays
  Clone ID: LIB3355-005-D11_FLI.pep
RGGQEDRRPSRAGARDGNGTGPQNLRSFLPARPCPSTRRSCRPRPTSALSSSRGIGYATGCAMVLWVFGYGSLIWNPGFDFDDKILGFIKGYKRTFNLACIDHRGTPEHPARTCTLETDDEAICWGIAYCVKGGPEKELKAIQYLERRECEYDQKISIDFYKEGDPLKPAVTGVLVFVSTPDPIGNKYYLGPAPLQDMARPRR

SEQ ID NO: 70699 - protein, 159 aa, Zea mays
  Clone ID: LIB3355-008-D7_FLI.pep
QLFHLIHLLFQTLSKTVLFRTCILCTVFYTTDRMHYVLDTSLCFHLLTRSLTERHIKKHIRLASAGAGDPEIRLPVVRAGAEHRPALARGILDRVLQLPDRQPALVLGRPELRPRSLPSLLVVLPLPLPLGRAGAATGGRSRCVGGRREGALRLSSLRA

SEQ ID NO: 70700 - protein, 298 aa, Zea mays
  Clone ID: LIB3355-028-F5_FLI.pep
LVHGETSREPLATSLPGESSTTSSPGSGSSLIAPVACSRAQARPPPSQSVALSCSSLPPSLLRLARRQDRIASWAWEYRPQTERWSGHEDPVRRVRGRGCHRGVLRRRGRAVRALRRRDPRRQQARQQAPAPPARGSLRQPPALRRLPGTYITSALRMRHTRHKAGRHELTTRPPPRPARARRRKRRSSSAWRTGRSSAGTATSPSTSRARSPGTTSATSPPTSASASPPLRQRAVTPATPTTTPTTTPRPRPPSPPRRSRCPRRRSSCHRAGPSTSSCSSPTASPATRQDDSASSGP

SEQ ID NO: 70701 - protein, 97 aa, Zea mays
  Clone ID: LIB3355-029-C3_FLI.pep
LATLTIQVFMSDLDIQIPTAFDPFAEANAGDSGAAAGSKDYVHVRIQQRNGRKSLTTVQGLKKEFSYSKILKDLKKEFCCNGTVAGPRTWTGHSAPG

SEQ ID NO: 70702 - protein, 126 aa, Zea mays
  Clone ID: LIB3355-036-E2_FLI.pep
MAASAAAAATPVAPTEGTVIAIHSLEEWSIQIEEANSAKKLVVIDFTATWCPPCRAMAPIFADMAKKSPNVVFLKVDVDEMKTIAEQFSVEAMPTFLFMREGDVKDRVVGAAKEELARKLELHMAS

SEQ ID NO: 70703 - protein, 89 aa, Zea mays
  Clone ID: LIB3355-047-C12_FLI.pep
AIAGKLGWALELLALEGEHGGLLIQPHQRRAVGVERPVVVPHQRRAVGVERPVVVLHEGFRHRVRVHRHHLAAAAGRHAPRVSRARLDR

SEQ ID NO: 70704 - protein, 172 aa, Zea mays
  Clone ID: LIB3355-048-F9_FLI.pep
KGNATGHPWDATDLGNNSFQRDKPRGVSGTNTGPPVLDRLVGNGELCKIVANHLRLDLNLVEGLAIVDTNNAPNHLGDNDHVAEMGLHWLWLLADRSILFRLAQLLDERHGLPLQTPLEPSPGARWEELNEVVGGHVKQRIEVDAAVAVLAERPLLGSTGGDLRLDIDVRHV

SEQ ID NO: 70705 - protein, 282 aa, Zea mays
  Clone ID: LIB3356-039-B3_FLI.pep
RISESETLAACLPVRSPLVRATRRRRRVSAGDLFVADSPATKMRPVFVGNLDYDTRHSELDHLFYRYGRVERIDMKSGFAFVYFEDERDGSDAIRALDGYPFGPGRRRLSVEWSRGDRAARRDGNKPEVNTKPTKTLFVINFDPMDTRVSDIERHFAPFGNISSVRIRKNFAFVRFETLEEARKALEATHATMLLDRVISVEYAFRDDDERSDRYDSPRRGGGYGRRGDSPAYRSRPSPDYGRPASPVYGSYGRSRSPVRDRYRRSPAYRSRSPPANRRAYD

SEQ ID NO: 70706 - protein, 73 aa, Zea mays
  Clone ID: LIB3279-004-G6_FLI.pep
VFLLGDSKARPFDSVLKMNSFNNYHHLSHVPHSSMMCHHELLFHDVWYIHDHSRLDLSHNIMLKSWSSCFYAA

SEQ ID NO: 70707 - protein, 139 aa, Zea mays
  Clone ID: LIB3279-019-C1_FLI.pep
IRVWDLATLQCIQTLSDHTDVVMSVLCWDQFLLSCSLDQTIKVWAATESGNLEVTYTHKEDQGALALSGMPDAQSKPVLLCSLNDNTVRLYDLPSFSDRGRLFSKKEIRAIQMGPGGLFFTGDGTGELKVWQWVDLAQT

SEQ ID NO: 70708 - protein, 212 aa, Zea mays
  Clone ID: LIB3279-038-D3_FLI.pep
VHNTRTEELANYQKDSDKFASSFELLKVQKFSLVTALEIVDHIIRNRSDCLECSTLNHEARFGSHRLPLGADHLTAGLGIRLELVILGFPQAELLRATGGLHMLHADMDPLPDDAAINLLVDLDADGALGDVPDAPGAAVVELVRHALVHGAVNLDVDVVADLVGAQVRGEWDVPLLAEGPREQVAGPRPQPVPRRHLPAPSSLLRLGGDGG

SEQ ID NO: 70709 - protein, 69 aa, Zea mays
  Clone ID: LIB3279-048-C5_FLI.pep
NYSVSLHIVMFYFYFCRAITDSAPRWRHWRVVLPLVWCVCVWSHLPASRGACLYLDYCFHCRRHRLTLS

SEQ ID NO: 70710 - protein, 153 aa, Zea mays
  Clone ID: LIB3279-012-G5_FLI.pep
RSRALWASRAAAYLRISTFPRAFSTVLKDLKYADTHEWVKVEGDSATVGITDHAQDHLGDVVYVELPEVGVSVSQGKNFGAVESVKATSDINSPVSGEVVQVNGKLSEEPGLVNASPYEKGWIIKVKLSDSGELSSLMDGDKYSKFCEEEDGH

SEQ ID NO: 70711 - protein, 240 aa, Zea mays
  Clone ID: LIB3279-016-G11_FLI.pep
TQQSRYKILRLHRLYNIKQASYQRMVHPHLFCLTEFASCFLFLSACGGRTTTCIVITPPGTSPTGTRDSASVRLFSNILPALISFKSLTVFGVISLSCGHRARMNSLSEETVVEGSYLVGPMSVPSKSRNLTSIGSFPPAISSPPDRRRRPTTPPLPKIQAPDQRPIGARKRPKKRKSTETRARWEFDDEFLLPRGVKARGRQLGGGGEEDESQGGERERDGVVGFLLSVRVLTDTPKHK

SEQ ID NO: 70712 - protein, 295 aa, Zea mays
  Clone ID: LIB3279-019-A1_FLI.pep
EMVESSTIIGPVREESLRLLKNFQDQLDSWERFVATQMDLTSEYNWDFDHYLEEDIPAALEYIKQHSRAKDGKLLAIGHSMGGILLYAMLSRSGFEGVSSNLAAIVTLASSVDYTTSNSSLKLLLPLAHPAQALNVPAVPLGTLLAAAYPWASGPPYLFSWLNPQISAQDMMHPELLAKLVSNNFCTVPAKVVLQLTTAFREGGLCNRNGTFSYKDHLRECQTPVLALAGDKDLICPPDAVYETVKLIPNHKVDYRVFGKPQGPHYAHYDLVGGRLAINEVYPCIIEFLSRHDGY

SEQ ID NO: 70713 - protein, 419 aa, Zea mays
  Clone ID: LIB3279-037-D1_FLI.pep
DSGGCRGANVAEADDKGRRRLQEQVHVVVVAAEEDNVVDSAIEQARPHRELQHMHLPSRAAAPAPDQLMFLLLRDYRSSCLATAELVGDHPLVGAAGLQQADDSGLGAVHGHDVLEEDPEDEQVAGPGCAGGVEQRDERRHVHGHVLGQVHVSLHQHAGRDDDAVEEEGDEMRHHLPDEEEGVEEVELLPQRHPVAVEDLREHLAEQVGGAARPPVLLVAVRLEGAGQLVAHDQVAHVDEAPAAEAGAHGQVHVLHGGALLPAARVRQRGDAPHPGRTVEAEEGVAGGAHLLLHGEVVVEGHLLDAREDALVGVDVAPARLHQPHPGVPLQQRHGAAEEVGVRLEVGVEDGHELAVPGVVLLEALAHGARLVPVAVAAVLVADAHALARPPRALHLHQLPDGGVRGVVQHLNHKPLRWP

SEQ ID NO: 70714 - protein, 317 aa, Zea mays
  Clone ID: LIB3279-046-D6_FLI.pep
CTRLRHPTNYSITLAKPHAAAATSSAGRMDSLRGAKLPGVPKGGSALVKVALLGGAGLYAVLNSFYNVEGGHRAIVFNRLEGIKDKVYPEGTHLMIPWIERPIIYDVRARPNLVESTSGSRDLQMVRIGLRVLTRPMPDQLPKIYRNLGENFNERVLPSIIHETLKAVVAQYNASQLITQREAVSREIRKILTERANNFNIALDDVSITSLSFGKEFTHAIEAKQVAAQEAERAKFIVEKAEQDKRSAVIRAQGEAKSAELIGQAIANNPAFLALRQIEAAREISHTMAASSNKVFLDSRDLLLGLQQLNVGAKQKK

SEQ ID NO: 70715 - protein, 294 aa, Zea mays
  Clone ID: LIB3279-047-D11_FLI.pep
GSVRPLPRRRNGGQEVKPGATVSCKVGDGLVIHLSQAALGESKKASENAILSVNIDDKKLVLGTLSVEKHPQISCDLVFDKDFELPHNSKTRSVFFRGYKSPVPLFESNSGEDSSDEELKTDQIPLQNNEIKISAAKVPAKDDDDDVFIILAMMMMIYSSDDDDDDFTTSDSDNEMSEEDDSSDEDEMSEEDDSSDEDEMSGGADPSDDSSDESGSEHTSAPKKTDVVVGKKRAIKAEAPYGKKAKSEQSSQKTGDKASTSHPAKQSIKTPADKSRKTPTADKKSPKSGSHGCK

SEQ ID NO: 70716 - protein, 275 aa, Zea mays
  Clone ID: LIB3279-048-F11_FLI.pep
PATLPLVAAGLWRLCDRISSPLRLPRPTHLMFLSRIVLRDLDSIDSPASMASSKKVVTRDEWELKLRDVKIRKEDMNRLVMNFLVTEGFVDAADKFRIESGTQPEIDLATITDRMEVKRAVQSGNVQEAIEKINDLNPTILDTNPQLYFHLQQQKLIELIRVGKINEALEFAQEELAPRGEENQTFLEEIEKTVALLVFEDVKNCPYGELLDVSQRLKTASEVNAAILTSQSHEKDPKLPSLLKMLKWTQNQLDEKAAYPRINDFTTAALEDPSI

SEQ ID NO: 70717 - protein, 116 aa, Zea mays
  Clone ID: LIB3279-051-A4_FLI.pep
LLQQRLIFAGKQLEDGRTLADYNIQKESTLHLVLRLRGGMQIFVKTLTGKTITLEVESSDTIDNVKAKIQDKEGIPPDQQRLIFAGKQLEDGRTLADYNIQKESTLHLVLRLRGGQ

SEQ ID NO: 70718 - protein, 110 aa, Zea mays
  Clone ID: LIB3279-174-A4_FLI.pep
LAWFSSCDGSKHCPRHRQRDVEMADGEDAAAARRRAAITDYRKKLLNCRELESRVGTGESSRSPPLLPSPTLLGSSLPRVRRARFPCLTRGIMAVCAGSSWRFGCRVVFV

SEQ ID NO: 70719 - protein, 189 aa, Zea mays
  Clone ID: LIB3279-186-D9_FLI.pep
LEFYYYNPFNIGFLLSECDLADVELLVRVVIAVHLIAPFLRTDRRWSSSPDALLSRRWSSSVVLSDGAPRRSSPWSSALSPFLPRYPLERSILYGAPVLFPFPTTPVVGCLPVAMEKSPRSTPIGSGPARAGTRKDVAEAANGTRLIDGSRRTGIVDTSNIDYGTSRLRPRHRLCTIHDPICFSVNNIK

SEQ ID NO: 70720 - protein, 150 aa, Zea mays
  Clone ID: LIB3279-201-G8_FLI.pep
RPTRRRGAPRVYPPTTFRGAEALLPSCRAESGLMRVTTYNPQRLLVATRFSRKTAEPAPPSPAGSCRGGWPPLLRSAPFGRKPNHSGQWPLDPLSFPSTLQARDHRSQTAVVVVSYHGNHGITMNGPDGPARVVRQKGSTHRPWCGSAGR

SEQ ID NO: 70721 - protein, 245 aa, Zea mays
  Clone ID: LIB3279-212-E1_FLI.pep
LQPYLRAPAARKDQLPAVTFFSPYVAEGLDKLSRALHEDGVRGVEPEGRRGAAEAAGQRRRRGRFPPGPPRAEGRRLGPGARRLPGQERRGPAVCSAIAGRRHGNARVGGGAQAQAEGGGTARCVETGVVWYTAPWIGNLVFVCKLEASTADLGCRVPVRFCLCAGSSTANLLQALEDYLPALLGLVKEGSVLRNKVHFTWSNQEDNAEETAMPDAWYEVLSMLHLMAMVCLLQANALLLPRSYG

SEQ ID NO: 70722 - protein, 230 aa, Zea mays
  Clone ID: LIB3332-022-C2_FLI.pep
LIVDWLIITQQPLSVLSEQSRNEEEARLNSNEPAIEGKQNEITGMGDEVITDEERARVDRRNGDSEGTGSFGDDAADEVVVADGAVGRDVDLADPLVELVHLELLSDGREDVAEVGDGDGAGAVLVEDAEGVAERAVEGLGPEVGAHEAEEAWEVEGRRELLLRGDVPELRLGWVPAEGAHEDAQLRGSDAAVPVRVEQREGLPHRGDLLLCQVLAAHRRRWGRRIGEPE

SEQ ID NO: 70723 - protein, 274 aa, Zea mays; identical to SEQ ID NO: 38967
  Clone ID: LIB3332-031-E9_FLI.pep

SEQ ID NO: 70724 - protein, 230 aa, Oryza sativa nipponbare
  Clone ID: LIB3431-038-C6_FLI.pep
QRAIASQDSPVRFSAVPGRSSVQGRRAMVGTSSWSSSSTCTSSLGSLDDDVVVACVVKAADAAAEGTFVKFLCSYGGRILPRHADGALRYVGGDNRVVSVDRSLPFHELQRKLREMCGWEAVCLRCQLPTEDLDALVSVTGDDDLANLLEEYDAASRDRLQPLKIRAFLFPRTTTTTPPPPSRTVPHALYHRQTGSAPSCASRWAAHQMSSPPARVLHQQQHHNRHSGEA

SEQ ID NO: 70725 - protein, 274 aa, Zea mays
  Clone ID: LIB3960-023-F9_FLI.pep
LGAAAGQLSSGPLSLPYCLLLHTKIATRAWRELRRGRRLHPARRRSGRPTTMSSASPSRTLWVPQAPSPTPREASSSCAATAAGSCPAAPTARCATSAATTGSSPSTVPSGFTVVHIFVPANRHESSEQSFDFSDFSCRLFLSAVLQRKLRELCGGWEAHLRCQLPTEDLDALISVTCDDDLAKLLEEYDEASKDRLQSLKIRAFLFPTRTPAPSILQRRSPPSIAHLHWQNTSPPAAAGVSLTCAPRWWAGPQASRQAQAPQAQNYDRHSLGE

SEQ ID NO: 70726 - protein, 215 aa, Zea mays
  Clone ID: LIB3593-002-D12_FLI.pep
DRYQSMAGTSSWSSSSSCASSSGSPDHDVVCVTEPDSVGAAGAVADAEGSVKFLCSYGGRILPRRTDGTLRYVGGDNRVLSVDRPIRFYVLQRKLRELCGGWEAHLRCQLPTEDLDALISVTCDDDLAKLLEEYDEASKDRLQSLKIRAFLFPTRTPAPSILQRRSPPSIAHLHWQNTSPPPAAAGVSLTCAPRWWAAPQASRQAQNYDRHSLGE

SEQ ID NO: 70727 - protein, 219 aa, Zea mays
  Clone ID: LIB3245-118-G4_FLI.pep
DRYQSMAGTSSWSSSSSCASSFGSPDHDVVCVTEPDSVGAAGAVADAEGSVKFLCSYGGRILPRRTDGTLRYVGGDNRVLSVDRPIRFYVLQRKLRELCGGWEAHLRCQLPTEDLDALISVTCDDDLAKLLEEYDEASKDRLQSLKIRAFLFPTRTPAPSILQRRSPPSIAHLHWQNTSPPAAAGVSLTCAPRWWAGPQASRQAQAPQAQNYDRHSLGE

SEQ ID NO: 70728 - protein, 237 aa, Zea mays
  Clone ID: LIB3591-094-H5_FLI.pep
SSCWAAIQRATEFTLLLLLHTTKIATRAWRELRRGRRLHPARRRSGRPTTMSSASPSRTLWAPSPTPREASSSCAATAAGSCPAAPTARCATSAATTGSSPSTVPSVLQRKLRELCGGWEAHLRCQLPTEDLDALISVTCDDDLAKLLEEYDEASKDRLQSLKIRAFLFPTRTPAPSILQRRSPPSIAHLHWQNTSPPPAAAGVSLTCAPRWWAAPQASRQAQAPQAQNYDRHSLGE

SEQ ID NO: 70729 - protein, 320 aa, Oryza sativa nipponbare
  Clone ID: LIB3475-010-C4_FLI.pep
LISSCSQPRQSFTDGGSEPRGHCPGREDRRPPRRHLQAAVAEPIRRGGRALHRPRHGVRPGEPRRRGQARPGGAGDAGGAHPPLLRRRGPPRGALRRHARRLRQPARPPRPLPVLRQLRQPEQAGVRPPRPLRPRHCPHPRRLRRVGPAAVQLPRARRAPPAGRGVRQLRPVRRGQRAGEEAVPRRRRGPRRAHGVPHRRRGDPDGGARRVRRRVPGGARGHGGRGEGRGDRAPGRAHGGRRGARRAERARGARVPVPDRRSRGHPAGRVRRAGRVPPRRRGDQLRHRRSQGRPASRRRARRRTRRGSSGEPAVQVLQDG

SEQ ID NO: 70730 - protein, 319 aa, Zea mays
  Clone ID: LIB3606-005-B2_FLI.pep
LQPHGAHLGLELLPHLAPPHLALHLQLLLHALQPPRRLPPVRRPRAPPLLQLAAALGELRQRLPVHDRHARGRGAAVLRRAREPVRRRVGRGALRHPWRGRGRARRHRGGREAERHGRRRRSGRRVRDGGGGDGRPGVGRQPGRQHGRGHEQRRRRSGSLLWPLSDELLREVLEQPLVPAPLVGARLRRRAAAVPQLPLLLLLEHLPPLAEALGRAPGHLGGDLLPLVAVLGLQADHQALLLLGERALLDPGAEVVLPALQARLGVAVEGHVHALRHQVPLAGAVLPDVGAQDGVFLRPPALSLLHLQRPSPIPHHHTS

SEQ ID NO: 70731 - protein, 319 aa, Zea mays; identical to SEQ ID NO: 70730
  Clone ID: LIB3632-033-D2_FLI.pep

SEQ ID NO: 70732 - protein, 319 aa, Zea mays; identical to SEQ ID NO: 70730
  Clone ID: LIB3069-033-F11_FLI.pep

SEQ ID NO: 70733 - protein, 376 aa, Zea mays
  Clone ID: LIB3591-094-B1_FLI.pep
PMESRRGGSVAEDASGAMTSFGPPQHGINTDVNSMQPSRVTDFGALAQSAGFRIEDLVNLNANALFNLKSNTHTINNIPLQFGSYGKFEQGLVAVPTASDSSDKSRDKLDQKTLRRLAQNREAARKSRLRKKAYIQNLESSRLKLTQLEQELHQTRQQGIFISTSGDQPQSTSGNGALAFDMEYARWLEEHNKHVNELRLAVNAHAGDNDLRGIVGSVMAHYDEFFRLKGVAARSDVFHVLSGMWKTPAERCFMWLGGFRSSEVLKQSSQQAEDALSQGMEALQQSLAETLASGSLGPAGPSGNVANYMGQMAMAMGKLGTLENFLRQADNLRLQTLQQMQRILTTRQSARALLAISDYFSRLRALSSLWLARPRE

SEQ ID NO: 70734 - protein, 209 aa, Zea mays
  Clone ID: LIB3245-574-D3_FLI.pep
VVLIARAASHLGHGHSHRHGAANVGAAVVRVATPPDLAVGAGLDAEQAELLHGAAEVGEEGSGVGRVELHQGLGAGVRPQLLVGAEQSEAALQVDEVHVVELAGSHDVVERGDGGVLEVVLAHVLQPPGVGRVHAGVERLRLPALAAEVVEAVGELLAVGEAQRVGAGQRHQLLHREPLGAEHLDEAVHGEVGVRQLDVGRCGRRRQRV

SEQ ID NO: 70735 - protein, 173 aa, Oryza sativa
  Clone ID: LIB4371-032-G2_FLI.pep
AGVRGGSGREVELGPVPADGARGVVVGERGGLGVGEGAEPDADALDGVADLRRPLPPRPAPHAPVLRRLPAPARRRRRRLLGAEDERLVLGGRLLLLRLLHHHLLVIGVVVEVAERGLEVVGARALLLGLVGVARPDVARRDAPRRRRARYELRKDRSAAHLWLLLFFCFWVL

SEQ ID NO: 70736 - protein, 122 aa, Zea mays
  Clone ID: LIB3587-286-D3_FLI.pep
LIVLLHTSSQFKPITRAEKLNQHACVQMCTYLGAGGFSASAAGASAGLLAFSAAGSGLAAAAASSMPAVGSFSLRSMVSFLAAAAPPPGRPSRSSVPTSTSAPAIASSAGASSWLASLSRPS

SEQ ID NO: 70737 - protein, 136 aa, Zea mays
  Clone ID: JC-ZMSHLIB3569P018A08_FLI.pep
RGYTATTTINRAATGPASHCSRHTRPDTNRLVHLLDLGARVDFVWYYEEVATGRPVRWNFFNGMQQHVMSFEVGGVLEDSKWQAPARCFSGGNADTAKAAADGVHGEEAGSVDVMDSMIRFAGAPAAAVAASFDQR

SEQ ID NO: 70738 - protein, 196 aa, Zea mays; identical to SEQ ID NO: 50652
  Clone ID: JC-ZMSHLIB3569P036A10_FLI.pep

SEQ ID NO: 70739 - protein, 55 aa, Zea mays
  Clone ID: LIB3594-019-B2_FLI.pep
KHGKAEEAEQSFVGASMAGTWVKMEQKGAGPGARSSHAITLLGGTAYSFGGELTP

SEQ ID NO: 70740 - protein, 167 aa, Zea mays
  Clone ID: LIB3587-229-G5_FLI.pep
PQIPQQAKIINRIIKQLTNQTMGSRRVGGRPDPPIDRRPAVQGKASVLPEVREVQDRVVELGQELVRRRRGHRRRDLRVGVGAQPGLAGRADLRRRRLPRHHLLLRLAVPPDRRGKDVAGVHRRQREVLARVVGRRGRRRLVLHVQQRVLLHLDREVAVARARRAGG

SEQ ID NO: 70741 - protein, 126 aa, Zea mays
  Clone ID: LIB4073-019-F8_FLI.pep
PTGYIHMTRRASRPPLSSAELVAAEVLLDQLEVPSGGHGHGHGAAVTPRGRPRLLLGAGAVWATGLRIRAHLARRVDVEGGQVLREHEHALRRATLVAARALRRHRSRRLRRGRQVRWEARGWSLW

SEQ ID NO: 70742 - protein, 114 aa, Zea mays
  Clone ID: LIB4074-009-C9_FLI.pep
SRTTSAALSAGTSSSTTTRPPYEMVSCALGDGDGPGPAPASRSSCVDRSAPGIRGSTPTVPAGRSSTVVVVATAAAFTYRLSTPHAAANRAPWPWTLPAAAIVLNSRSACCCPA

SEQ ID NO: 70743 - protein, 277 aa, Zea mays
  Clone ID: LIB83-008-C11_FLI.pep
CIYHRAPSLSLFPSLARHGGRRRHLYAPCCRRPTSFVLSSSSTLCDETELLEEEDDGRASRHARPHQVPPPATATATTYRDNWFDKLAIGYLSRNLQEASGMKNRKDGYEGLIEAALAISALFRVDQQWDTVASALQRAFPSYILTMIKVMMPPSRFSREYFAAFTTVFFPWLVGPCEVRESQVDGREERNVVYIPKCRFLESTNCVGMCTNLCKIPCQRFIQDSLGTAVYMSPNFEDMSCEMIFGQQPPEDDPALKQPCFRTKCIAKQNHQVNCSI

SEQ ID NO: 70744 - protein, 146 aa, Zea mays
  Clone ID: LIB83-012-G1_FLI.pep
SAFLPSTSSPSPPSSSQAPAPAPFRLSGKSQRRGGLIAVPQASRVARRSVMAAAGAAAAAPAAAKLEDADALIDSVETFIFDCDGVIWKGDKLIDGVLETLDLLRSKGKRLVFVTNNSTKSRKQYGRKFETLGLSVDEEEIFASSF

SEQ ID NO: 70745 - protein, 182 aa, Zea mays
  Clone ID: LIB84-015-G3_FLI.pep
GDEESRSEEQRRKGKGAMLASPALAGAHSFAASVYGNILVPSPPVPAPARRAALSVVAKVKVATPQDDRIARHVRLRKKVSGTTERPRLSVFRSNKHLYAQVIDDTKQCTLASASTMHKSLSKEFEYSAGPTIEIAQKIGEVIAKSCLEKGINKVVFDRGGFLYHGRIKALADSAREHGLEF

SEQ ID NO: 70746 - protein, 350 aa, Zea mays
  Clone ID: LIB84-028-H3_FLI.pep
TKYTLPSHPMAPLLSPPLLADSVTKFHAASTPVSCSGSPQRYVITGLAGAGRGEHDWRRRTWGRTNLRVKAVAAESRSSEGGIAEDYYAVLGVMPDATPKQIKKAYYNCMKSCHPDLSGNDPDVTNFCMFINEVYTVLTDPIQRAVYDEIHGYAATATNPFLDGSAPRDHVFVDEFSCIGCKNCANVCSKVFEIEEDFGRARVYDQSGSTELIQEAIDSCPVDCIHWTSAAQLSLLEDEMRRVERVNVGLMLAGMGGSIDVFRMASSRWEKRQAKVLEKVRRRMSQDDSRKGGSWSDIWGAPTRYEKNEEEVKERAKRAAAAARRWREYSRKGADKPPTFKLPEAVPSKE

SEQ ID NO: 70747 - protein, 102 aa, Zea mays
  Clone ID: LIB3600-006-A12_FLI.pep
TRLASRFIYIDIYIDNPYVQRTSTISLYVLSYSSDTVTRPRKLDTIGLNWTDGDTDRSAGPSEDLGEAGALLVGELRGEHDLELHPEVAARAVLPPGDRHAL

SEQ ID NO: 70748 - protein, 192 aa, Zea mays
  Clone ID: LIB3596-060-A8_FLI.pep
SDSLPYNAPQTHLNTASPPNAQLDLYMIFYYDTCVILQHQQARQTWGQGNPASPTPLRAGAGVVDDDEILAVAAAEREVPEREAHDDGDEHAAVERHDGEHEEVAEAGVDPEHRGHGHTRRPAPGEGGREERRPRVGAGGWRDGGGWLGGSFRDELHADPQGLEVLVKGGGEEQGHEGEKVAEPRGGAPAVE

SEQ ID NO: 70749 - protein, 123 aa, Zea mays
  Clone ID: LIB3689-228-E11_FLI.pep
SIHLSYTSFILASLVSLVIYAEGRRSGLHIREVRRSESINTQLGISNHTTYVALNPCICQLAHLALVVTIKSPRIREIDNNLRLRCSTEHPTGVTFRTSISSPSNTGKISPPSHIHKHAKYII

SEQ ID NO: 70750 - protein, 89 aa, Zea mays
  Clone ID: LIB3689-231-E4_FLI.pep
GSRDRKFLHLWLYMSLLMVLARARDKIRLVKSAGRRSNCCWDSGGSSGMTERTGRNSGREVIPYSARASSSVLPPSFSMALLYSGIGDG

SEQ ID NO: 70751 - protein, 164 aa, Zea mays
  Clone ID: LIB3607-013-G3_FLI.pep
GRRGHERQHEQQEQHCHGDQHQQRRRRRQRGQDEREDHQRRGDADEQQSRKRQVPGAEAAGATAATRLLLLLLHHPVGGPLVGVGRRRSARRGRGGSAAPLHIAGRGGRCAAVGASGGTVDQLLGVLRPGTHRFRIGLSERSVSSSPRRRACSARSYLATTSSL

SEQ ID NO: 70752 - protein, 78 aa, Zea mays
  Clone ID: LIB3732-004-C8_FLI.pep
SSLSKWLLQGYSLNNSTSLSEEEEEEEEGEAAAAVEAEVAAVVAVVMAVVMEEEVAVEETRLPCFCSSLVSVSIVLGW

SEQ ID NO: 70753 - protein, 230 aa, Oryza sativa
  Clone ID: UC-OSFLCYP110F05_FLI.pep
GGGAVDEALAGGVHAEVELVQLAVAGLVAVALHERLGADAALDGALDLGQRVVAAVGRHAAVAQRGEHGQPRPEAERRLEVAVLVAERRRGAGAVLLPLVRPEPDAVVARARQRRPLRAHAPQQVAHLGGVELAVRVAVLRVAAVVAVGPEAVDAEVGRRLAGARVAAALLRVAVRPGPLQHQEEEVVVLRADAHHREQQRKPDPRRCPRRRRHGCFTHSLTHCNLFLSL

SEQ ID NO: 70754 - protein, 104 aa, Zea mays
  Clone ID: LIB3061-112-G3_FLI.pep
ATTAMVLYFKARPDAGDYTIYMGADKNENEELIKYGLPEDVWYVRTSSLAAATSYFLATTTTTTTCRMRFSGELNHGEAIRWWVGFRSTATCARLGLPLHVEAA

SEQ ID NO: 70755 - protein, 128 aa, Zea mays
  Clone ID: LIB3059-005-F12_FLI.pep
PALSQLAMMNPAAYLQQQQLLSSSPLAVANAPTYLQQELLQQIVPALTQLAVANPVAYLQQLLPFNQLTMSNSVAYLQQRQQLLNPLAVANPLVAAFLQQQQLLPYNRFSLMNPVLSRQQPIVGGAIF

SEQ ID NO: 70756 - protein, 272 aa, Zea mays
  Clone ID: LIB143-016-B12_FLI.pep
LMLRSTHPPSPTSGSSAAPASSSDAAAMVGGGAAAGSGGAPSGAKLLQILNVRVVGSGDRVVVLSHGFGTDQSAWSRVLPYLTRDHRVVLYDLVCAGSVNPEHFDFRRYDTLDSYVDDLLAILDALRIARCAFVGHSVSAMIGILASIRRPELFAKLVLIGASPRFLNDHDYHGGFELPEIQQVFDAMAANYSAWATGYAPLAVGADVPAAVQEFSRTLFNMRPDISLHVCRTVFNTDLRGVLGMVRSPCVVVQTTRDVSVPASVAAYLKAH

SEQ ID NO: 70757 - protein, 220 aa, Zea mays
  Clone ID: LIB3066-035-F11_FLI.pep
RNSNKRRKKRGGRLAIMAPLGFASLGPKELEAFPVHDGRARLVVLSLGNPHLLEGAERCQDGSSNPDTVLPFWRSNHLDLHAARSQGGDFLAHPVSNAREHSGTTGEDDVAIQILPNIHVALHDGVVGGLVDTSSFHPNEGWLEEDLRAAEALSTNGDDLSVRQLVALLNRRAGLGSLHLLVVVQGNVGELLLHVPDNFPLSSGGEGVAAFSQDLHEVVG

SEQ ID NO: 70758 - protein, 94 aa, Zea mays
  Clone ID: LIB3088-050-F2_FLI.pep
AATKIPKHGIKEKKSQIVHDHDFNIETPPSLSPPLPRYFDKTKPYQVPHHPFLFCFFLKLITEGQQHWQAAPQSTRCRTSECQTAYVRRRGSQS

SEQ ID NO: 70759 - protein, 152 aa, Zea mays
  Clone ID: LIB3115-008-D1_FLI.pep
RSPTLPADHRQPVPAFQSTISLPLLSHPPKSKLRPDRPTARAHTHRDRETARSFGVPLARRTTRAWRSATRRRSPRSCGRRRSRSAPTTAASRATRPRRTCARAASRRRGRRRRRLRSRPLPPLPQLPRRPPRCRSRGRRSWARRCSWRLRP

SEQ ID NO: 70760 - protein, 216 aa, Zea mays
  Clone ID: LIB3115-012-B10_FLI.pep
VVGAGALGDSDDELALGVGGRGHGRARAGREAEAPAVELESGGPIVVVDAAAAVGGGEAPDDDLGDPRVDLDGVRAGAIGGDPVDGRGDEPQRRRVLLDGHVRVGREGELQHLGEDVRQAAQLLPAECARRRRRRRRGAALHGDGALPRSRVDPHGEVPCRVVGVLGAQEGDGQTLATDARARWRGPGRADRRGASELVHVEGCGLRRSVRARLVL

SEQ ID NO: 70761 - protein, 183 aa, Zea mays
  Clone ID: LIB3115-034-G7_FLI.pep
EVMLLIDSFHIVILLGIRKASMPVKLHLNVYHEDYHTRQSYICLCDEGRGGGALVPPGRGEGTNGLVVTGETVDTGLDENEAELAVLVLAVGLEVLADGNGLLDEHVEVLWDIGAKAVGLEDSEDLVASDDLDLGDTVAVTEDLTNLRWCSTLLRELADLVDNLLGSGLQPRRSAAGVGDGGG

SEQ ID NO: 70762 - protein, 169 aa, Zea mays
  Clone ID: LIB3116-013-B9_FLI.pep
LPAGPPRRRGSSWCAGGAVVVGREPVLEAHLPAAALAVLGVGEGELLPAPPRGAPGLALLARVAAPRPHVRLQDLPLALPRNQPLDGVAAVRADDDGAALVRRLGAAVVPVGPVRGAEDLAAAVAVEGQEVELVAVRLVAVRAQVRERLRAPPRHRSPPLYLFSAASAV

SEQ ID NO: 70763 - protein, 93 aa, Zea mays
  Clone ID: UC-ZMFLB73153A10_FLI.pep
RRLSHRKIPKSAAERREPERGAQPERSEKGKKMVRVATYFAMTFGAFLFWQSMDRVHVWIALHQDEKKERMERELEIKRMQAELLAQAKENES

SEQ ID NO: 70764 - protein, 301 aa, Zea mays
  Clone ID: LIB3150-057-E11_FLI.pep
QAGRSLAMEVKVMSSRLVKPSYPPGVPQPDTTQHVPCSVFDKITYHIQMAIIYAFSPPVPSIADIEHGLAAVLGVYRAFAGQVRPGPDGELGVLLNDHGAQLIEAFVDAHLTVVAPARPSPELQQLHPGLHVEIEEVVQVQLTRFTCGSLMVGFTANHAVADGRATSSFLVAWGRTMRGFPIGLPPPPLHHHPGLFPPRDPPRFEFEHRGVEYRPTPPASSSSSSHLVTAHGQTTHRHDIVIHKAHFTGEFITALRAKASEGRGHPFSRFETIVGHVWRAMTRARGLRDPRQRPPYESPST

SEQ ID NO: 70765 - protein, 100 aa, Zea mays
  Clone ID: UC-ZMFLMO17240D06_FLI.pep
KLPQKGNKYIEQLVNTRLLIAMIPPTPRVLSVFLPALKCYTNLHLKVAVFLKAVVSKPWDLGEEGPHSRFAGKVASWQDPEIYTIYVSRGLTQHIFTAGS

SEQ ID NO: 70766 - protein, 194 aa, Zea mays
  Clone ID: UC-ZMFLB73212F11_FLI.pep
SGMPSGWRNTAGIMACCSSSSLSLSLVLLVVILALTPAEASRAMPTTTTTTAIGGTTTNSNDSQQKHGQRAAASGVNADQKTFLPGYVGGVGGFAGAGAGLGGIGGVAGGIGGGVGGLGGVVGGGLGGFGPLGGAGGGSGLGGGSGLGGLGGLGGGGGLGGGGGLGGGSGSGLGGSGGLGGGSGLGGGGGCLHP

SEQ ID NO: 70767 - protein, 234 aa, Zea mays; identical to SEQ ID NO: 48922
  Clone ID: LIB3115-036-E3_FLI.pep

SEQ ID NO: 70768 - protein, 234 aa, Zea mays; identical to SEQ ID NO: 48922
  Clone ID: LIB3592-103-B6_FLI.pep

SEQ ID NO: 70769 - protein, 191 aa, Zea mays
  Clone ID: UC-ZMFLB73123G03_FLI.pep
VPVAAHRRHGRRCPPVGGPDPHEGDAPAGRVRIRRALEVQGRPHLQALVRAPDGGMGEVGPHMAMRSDGQRTDRLLPRQWRRREREATVPVPPALRGLPLLVYPPVQPRRTAVRHPPGARQGLAPALTGCTHGSPIACLCSVPAISDKVCGAVSDVCPRIPGRLNGNGSHGPCRRQQLEMEPLQHPREGGS

SEQ ID NO: 70770 - protein, 306 aa, Zea mays
  Clone ID: UC-ZMFLB73260G08_FLI.pep
TERTGTNQHKTQQAAAAAGMGHRATDTGPHHHYHPTHTLFSPRHSQPAPDTSTRQSLLATYRATYETHTHTERDANNNRSVLNSKIPCHTAMYARERLPRHARTPIPWALAAAAACARPHSLAFSGSSGAATSSASAAGSWGPAGAGASGSSAASSSGAAASASATGSAAAGSSAPAGGAAAASSSAAASCSAAGVSSGPAGAAASASAAGSAAAGSSAPAGAAASGSAAACCSAAGSSSGSAGAAASASASASASAGADSSGTTAGGGVSTTGASSAATTVGVWTSAVAIGGDEKADGYTKEWRG

SEQ ID NO: 70771 - protein, 245 aa, Zea mays subsp. mexicana
  Clone ID: UC-ZMFLTEOSINTE067A06_FLI.pep
FHSGASSSAGISGAYVLPATDGREQGDVVTGTISVDSFAAHALFDSGASYSFVSEDFVSRAGLSVQRLGHPILVSSANGSISSCSVCQGCSIILADEVFSANLVVISLGAFDVILGMDWLSQYRAVISYFWKTVLLQASSGKEVVFLGSSPKFTLSLLAQLLPDRRSRKSGIFFSMVVEGEAALRVQDIQVVCDFADVFPAELLGIPPERDAAFEIKLIPGMQPIHKAPYRMAPKELLGTCSQIL

SEQ ID NO: 70772 - protein, 323 aa, Zea mays
  Clone ID: LIB3060-035-C8_FLI.pep
GGAAQARRAAHLEPEHAAAVPRAGHGPRRRRARQEAVDAAPLVAAHGGQERAAGERVAQDGADVGGEELDVREPAAVQPLGVAGAEADHRGAARRPEAVRVHRVHQQRRRPELGVAAAAGEEPQRRLVGPVGGHVRVLGAHQLEPLLQPMHQLPRDAHPPVGRRDAEAKNVADSGEGGRARAALAGGDRLDGSPDEGDDPAVRPGRLSYQHEVVRRVADARDGVAEQVGVQRHPAGGGGRADLALPLDGLRAVAVRLGIVVPYRHHRPSSSLLSLVSHGGNNHRRPIAARPPLLLIQRVYILYSVWHSIQYYAASYMYLYMHM

SEQ ID NO: 70773 - protein, 370 aa, Zea mays
  Clone ID: LIB3607-015-D1_FLI.pep
VLNDVKPYLAMVLLQVGFAGMYIVAVASLKRGMSHFVLVVYRNLCATAVMAPFALWFERNARPRMTITIFLKIMGLAMLEPVLDQNLYYMGANLTSAGFASALINILPAVTFVMALVLRMEKVRLRSVHSQAKIAGTVLTVAGAVLMVLYHGPVVQFPWSKGQHHHDSAGGQGANSAAGGGGFLTGIITIVIACVCWSAFFVLQANTLKSYPAELSLTALICLMGSLMSGSVALVAERRNTQAWVIGFDTRLFTAVYAGIVCSGVAYYVQGIVSRQRGPVFVTAFNPLCMIITAVMGSIILKEEITLGSVIGAAIIVLGLYALIWGKSKDSVADVSASGGSKGASAAAAVELPITLAQPNGNGNCKHEVG

SEQ ID NO: 70774 - protein, 164 aa, Zea mays
  Clone ID: LIB3912-057-A1_FLI.pep
TVSPTIDSGIRLLIFPCEFSGQRDLIHGEAGVRHEQSRGRVRAVLQLAGYHQQVCHHQVQLPRTADRPAVPDLGGWSVGAREARLPLPRRLQPPDRQEVCAGRGCLLPCHLHQHPPPQACKRRHFHRVQIPDSSPGGYRRHHLPEATVPFQAHVLVPRDHFGRR

SEQ ID NO: 70775 - protein, 279 aa, Gossypium hirsutum
  Clone ID: LIB3585-032-G1_FLI.pep
LYLLQLFVFGLESSVFLLPFSSKSFNLSTMLLKASPAFSLLKNPQVETRVPLFSRNGSGVGSGAVVVCATKGANNKPLTGVIFEPFEEVKKELNLVPTVPQMSLARQKFADECEAAINEQINVEYNVSYVYHAMFAYFDRDNVALKGLAKFFKESSLEEREHAEKLMEYQNKRGGQVKLQSIIMPLSEFDHAEKGDALYAMELALSLEKLTNEKLLNLHNVAERNHDSQLTDFIEGEFLAEQVESIKKISEYVAQLRRVGKGHGVWHFDQMLLHEGAVA

SEQ ID NO: 70776 - protein, 364 aa, Zea mays subsp. mexicana
  Clone ID: UC-ZMFLTEOSINTE060G07_FLI.pep
AVPVDRDDGQERGGEVDGAEDDGAHERGVAAEPGRLEQHGREEGDDDDPRELLEQRDRHGHGQVVPVLPPEDPAERALLVGARGLHGAGHVLQLRVHVRLGAPDAPQRGAGLLRAPAHEKAAGRVRDEQRPREDDGGGRRGQAQREAPPPRRDARGAVVHQVRRQVADAEEELEPRREGAPPLGRRRLRQVHRRRLVGKADAEAQQHASDDEHSDVDGGGVDGGAGEEERAAREHDGLPADRPGDAAGDERGGQPGQVQRRGERREDVAVVDAVLVPPRRGHPAQHPREEGRQERLHRRHAPRDADVVAEDEAAGGRHEAGHDDREGHPAAVVDGRAIGHGEATPGHACLCLTARSSAAGFTYY

SEQ ID NO: 70777 - protein, 159 aa, Zea mays
  Clone ID: JC-ZMXLIB3526050BG11_FLI.pep
LGVVTSSLLVRLPVALSRLAGRRRQTSSSSSTRRPGPGHAMPEKEAQAAAFCGEAVIAEFESLTRDAAAVQRDTLRRILADNACAEYLRCRGLAGRTDAASFRACVPLATHADIEPYIARIADGDTSPVLTAKPITSISLSSGTTQGKRKYLPFNQELA

SEQ ID NO: 70778 - protein, 276 aa, Zea mays
  Clone ID: LIB3060-066-B6_FLI.pep
EPIRIQCLITISQLNGQVNVPQIITDPAHIFLLLPFLLLLSSPYVQAQQRITLGSSLTTQGPNSFWLSPSGDFAFGFRSIEGNTSSYLLAVWFNKISDKTVAWYAKTADPDPALVQVSSGSCLELTSSGALSLQDPTGKEVWNPEVVSATYASMLDTGNFVLAAADGSSKWGTFDNPADTILLTQVLTPETKLHSRTIATDYSNGRFHLNLQNNGVFFYATAVQSDPQHEYNWSMPGNATNLVFNATGMIYITLDNGTQVKITSGKTSSIADYYHR

SEQ ID NO: 70779 - protein, 248 aa, Zea mays
  Clone ID: LIB3060-073-B10_FLI.pep
LAVTAADRARQEGASIRAGELVAHGPPGLLRGAGAGRERHWRRRRRGRGGARGRRRDLRHQHGDPAGGAVPGAAARHRAQLAGQVRALVRRPGRGRGRRGGGVAERRRVVLRGRPGRDQEARAAEHPRGGLRRRGCERRRGGGGRERGRVRHLPRRVRGRREGARAAAVRPRVPRPVRRRLAAVPRLVPDVPPPRHGRQACQCQCHRRQGSGPAERPPPGQRHRRRGHCVRDDGGEHGRGHGPMAIAS

SEQ ID NO: 70780 - protein, 171 aa, Zea mays
  Clone ID: LIB4338-011-B6_FLI.pep
YFEHSETHQARRTSNDLTTMATKILALLALLALFVSATNAFIIPQCSLAPSAIIPQFLPPVTSMGFEHLAVQANMQQQALAASVLQQPIAQLQQQSLPHLTIQAITTQQQQQFLPALSHLAMVNPAAYLQEQLLASNPLALANVVANQQQQQLQQFLPTLSQLAMVNPAAY

SEQ ID NO: 70781 - protein, 173 aa, Zea mays
  Clone ID: LIB3205-035-D8_FLI.pep
RACMIVSQFPTERRPCALSIFSPSLALARCHFSPVPAVAAMPLLRATTRAFRVPPSIGGSRIDLKGATKLRLSHFIIFISIPHVRLLGQIKPQLNDTVAELVGEHDDTTAGERAAACGSGRALRRPAAPGLRRYATGTWWWRATGRARCGRCGRLCLAAAWRASALVWSLDES

SEQ ID NO: 70782 - protein, 131 aa, Zea mays
  Clone ID: LIB3236-088-C5_FLI.pep
SMESAIAAVAGELVSRFISFALNRCCSSSYERSEEKRERLRHLLMRSHTVVEEADARHITNSGMLTQLKVLSEAMYQGYHALDALRFQLDDEVSDDDSPACSSSATRRLKRRRAVLAPAAKGEGKAQAALE

SEQ ID NO: 70783 - protein, 195 aa, Zea mays
  Clone ID: LIB3245-066-B12_FLI.pep
SGPNQRSRAGSDVRQPSGRVELVVLVDGGGDVPGAAEPLGEDDEVAGAELHALRRPLDVRPHLALEQVARLPRVELHRELPRRATPPAHARQQLHTPRRSGAGDEKPRSKLAGSDRRQRCSLGPRPDAELLQARLRRVALDGDGEAAAKRVGVHAVRFRVRGHGRAWQRATAWRRSTENGSSGGGATARSYGEAA

SEQ ID NO: 70784 - protein, 97 aa, Zea mays
  Clone ID: LIB3279-187-H10_FLI.pep
PSSLEMSGSRQPLSGILASDRAARTHPKFMPRISSSIAATMAVSSVATEVQSQLASAMVSGDETTNSEEAHGPQATRPQADQRISSVRWAFCDGLDV

SEQ ID NO: 70785 - protein, 205 aa, Zea mays
  Clone ID: LIB3279-202-B5_FLI.pep
NLNMKRGGDIASLFRKHEAKKLATSPTYPSSTPAVNQGQPSNEQEEEGVIEENHNHMPSSSPPPASQSSAPPVYDINRLPHDPGERQPISNYHVNDHDAIRRAYVLKGPLQPYGHEFPKRKIGDRDRNFNFVWFHNFPWVEYSIKNDAVFCFVCYLFKNKKSKGKGTDAFTVGGWRNWNIGSKSLLKHAGSMAHKAAQEKYIGYM

SEQ ID NO: 70786 - protein, 180 aa, Zea mays
  Clone ID: LIB3354-088-D9_FLI.pep
GGAPPPPGRAPRGHPRTRAWRWRAAPPATAPRGRRSTRRAAPPGGCPGTGPAPPAGSSSAAAAPPPTPRPGPPRASSRGAGPAAPRWCPGPRGCTAMSGYGHSPPLLASLFGSRFGIREHGGRVCALCRVQTKTNDLALELNPRSQPLPAPRYKINSSAAKRELHEFRRLSYPLGRFMKS

SEQ ID NO: 70787 - protein, 200 aa, Zea mays
  Clone ID: LIB3354-113-G5_FLI.pep
CSVLFIRKQVRPLVARRARGPWNGRVALQIPSTPAGPRAADATHGYYHSHVYRHYGRTYLRRWPDARLASQAGPGLSSGRWQCAIAPHSDSATAAVRRLVHANTHESRQAALRVSSVVYVGSDGEAAAGGARHSRRGRRARVRRGSAALGGVLLVELPRRAQHRAPGHVAGRHEQHAQRRRRAPRLLPRLLRQCEQERPC

SEQ ID NO: 70788 - protein, 239 aa, Zea mays
  Clone ID: LIB3354-114-D12_FLI.pep
RSARSRGPKSFDRRRMAKVHPNVLLSSSSPAEGAAAAAAGGEGEETSLTVWRKSLLFNCRGYTVFDARGDLAYRADSYDAEAEVVLMDPAGRPAFTVRRRRLSLSGEQWLIYAGEETRRPRTPSSAAAAAGSRWRASRRAPPCPPQLGPPRCPRTRWRGPTRAAAAWCTTPTSAAPSRRCSPRRRSARTCSASWCSRGSTCRSPWPWSWRSTSCLGGRRSSGAGPRHRFMFSFLCSNSV

SEQ ID NO: 70789 - protein, 61 aa, Zea mays
  Clone ID: LIB3355-061-E11_FLI.pep
GMENSVLIPPIILQIYSSGSVACRFLILLYLAFSTSELSCQLEFRKKNNISHCFNGAITML

SEQ ID NO: 70790 - protein, 194 aa, Zea mays
  Clone ID: LIB3587-208-D6_FLI.pep
QFAIICNRSKLNTFTFFFFAALPGTSRSSNLSGGGTGRCGGFTCHGLSLPERSLLASLGNSLQDGVRCHIALHGDLLFHDVYVVGLDAFHLAEDPLDSSNTALTGHANLEHNSLGHSARGEEDDEEGADDEEEEDEDEEHGGGGGLSGTRRPPTFPSPRLSVHVAAAGQMARNGSFRSPRSFSMTDLHSAAGYE

SEQ ID NO: 70791 - protein, 157 aa, Zea mays
  Clone ID: LIB3597-066-C11_FLI.pep
GRWQREHAGPGPGPAERIPCPHGGTRGLPPRVRPVGRGHEGVHVVGVRPSRGPLPALRCLRARGLGPPLHHRPRPAAPVVPRHLRRRGRAPPRGGFHLREGWARRGRGAVQGVRGVPPGARALGAGHGNARGASGGRGHVRGAALAAAAGGCGGRGQ

SEQ ID NO: 70792 - protein, 183 aa, Zea mays
  Clone ID: LIB3632-052-F3_FLI.pep
PPSMSLPLYIMLQRLRPVPSPINSVLEITEMPTGRLSGNITQDWEPVVLRRTKPKAADLKSSKAVNQALRSGAAVETVRKSAAGMNKHSAAVAPARKLDETTEPAAVERVAVEVRAAIQKARVAKGWSQAELAKHINERAQVVQEYESSKAAPAQAVLAKMERALEVKLRGKGVGAPLAAVGK

SEQ ID NO: 70793 - protein, 119 aa, Zea mays
  Clone ID: LIB3689-257-G3_FLI.pep
FSPPIRSTTANIYPSSPTRRELQRQSSDRHYERPHDQVLHELRRPEEGGDEGPGGGGRRDRAPGGGRRRRHGRAPARVLPGGGGGEGGDGGHPRRARPPARRQRGGQVAAPGGRPPRAP

SEQ ID NO: 70794 - protein, 172 aa, Zea mays
  Clone ID: LIB3732-049-B5_FLI.pep
AAKVATTSTRLTTRELRNCSTGDPEQDVSNQEGDECRVVGLGEQLDFGLDLDLAGAPDRVDVAAEAARGADQVPRDAAPRVPWRPAPRQRRAVGVRGARAREARVQALARHVRRRRGRRARARRRHARHRRRERVPQLRRLRVAARGPRLVRQPCRGPPCGRRGRGGLSAPR

SEQ ID NO: 70795 - protein, 119 aa, Zea mays
  Clone ID: LIB3824-001-D6_FLI.pep
KFLAREILGRESAGIMEPRVGNKFRLGRKIGSGSFGEIYLGTNIQTNEEVAIKLENVKTKHPQLLYESKIYRILQGGTGIPNVRWFGVEGDYNVLVMDLLGPSLEDLFNFCSRKLSLKT

SEQ ID NO: 70796 - protein, 144 aa, Zea mays
  Clone ID: LIB3824-001-E2_FLI.pep
VLAAAFSFFAAAAASSNLLPEEAPSKRHSCPLRARSLFMSSKEKPTLGGTRIKTRKRNIAAPLDPASFSDAIVQIYLDNGGDLELVAKSIESSDLNFSRYGDTFFEVVFVGGRTQPGTVKPEEGDRHPYSMLDCVAQRETILPF

SEQ ID NO: 70797 - protein, 228 aa, Zea mays
  Clone ID: LIB4721-018-B4_FLI.pep
SRCGSAVTFDPGSSSQLLGCYFCGLFLSFFLPSCLSFFLCVRVVFRRFNAPILDLLYAGLPITLNSGGSCLLLHHSAAVLFCACAGEHTDRGGVREPPMQPAGSHHGAGGAAPRHLRAQQAGGEAGEGTRRLGFHAFLFLVLRLAPSLHDGCVRVSMCLQESKFLKFLGFMWNPLSWVMEAVAIMAIALANGGVSSAASFFTPCGHGLQPSERAFWRLASEVFPGRPR

SEQ ID NO: 70798 - protein, 517 aa, Zea mays
  Clone ID: 700083601_FLI.pep
MSVLNSLGILLLLTAPAFAAALSADGLSLLAFKSAVTDDPSMALSSWSDADADPCRWLGVTCVNSSSSDGLRVVGVAVAGKNLSGYIPAELGSLAFLRRLNLHGNRLSGTVPAALANATALHSLFLYDNRLTGPFPAALCGIPKLQNLDLSQNALTGALPLELGRCKQLERLLLAENALSGNIPAAVWQDMVGLQMLDLSSNNLTGAIPAELGKLAALAGTLNLSHNHLSGGVPLELGRLPATVTLDLRFNNLSGEIPQSGSLASQGPTAFLNNPGICGFPLQVPCRVAPPSSSSLPPPPPSSSATTNGGAGGARLPIKTSLIVLISVADAVAVALVGVIVVCVYWKVCDRRRAAKDKGDDSEYEEGCGLFPCPCCMRADACGDSSSECSEVDGKCNGGGGTGEGGYLVAIDKGFRMELDELLRSSAYVLGKGGKGIVYKVVVGNGTTPVAVRRLGGGTAAPERYREFAAEAGAIGRVRHPNIVRLRAYYWSADEKLVITDFVNNGNLATALRGRSG

SEQ ID NO: 70799 - protein, 207 aa, Zea mays
  Clone ID: UC-ZMFLMO17289E05_FLI.pep
NIEGEIAMKYGPLTYVSSMEDTTGASNAVQIWRHRVWRHTVTHHAMPRTKTPMETAMPKAEKMKGDICTTGERPLSGWGEKHVWGRWGRLLRPRLYTAPSQVSACCATTSAELLPCLRKLLHAAKGLSPSVKLNPKVQGDGLVPRRLHEVQAAYLGSYSYLRTLLHAANCKAPYRHQPNELKYHHQILELMKMCSRLVNCTIPYEMS

SEQ ID NO: 70800 - protein, 256 aa, Zea mays
  Clone ID: LIB3115-036-E4_FLI.pep
EESKLRLQQWGYRFLVRSIMPVHTGNVESQPEKKKSDPAGEQPTRRREMEQAKEHTLKKIQISLLFRFPLLHQQREQLQTNLPYVHRDGQTETGLRRRRSPPASWPRAHPPRRSVRGATRWRSGTWRRGRTPSAPSAPAAPGPSPPSSPPRTASAAPHPAPAPGPPGSRPSPTTPAAAPTTWLPPPTPRQRGPPRCPRRRGARPWTPPGGRGTRRRMLRTVPSPLDWICLVAPSLCLAGLLFDFRVLWWLTALWFK

SEQ ID NO: 70801 - protein, 577 aa, Zea mays
  Clone ID: LIB3689-209-D9_FLI.pep
KKIHFLLLWEVFDHGIREALCCLGRAKYLTVLEEDEVYSVARLLGDLVAYRASGTGHLELLAGLALLQKHGNLSELQTDLVEASHELMQEAAFLHPFAEACYTGPLLDFGRNPILFPCAWVYRQGVLTPWARRRRPALDGDNWWRGHAAAFLRFVNIPPKALLKGRVCQSKREAAYFVVVLHDKRTVVIGVRGTETPEDLITDGLCRECAFTMEDLDGLVNEQLPATTRERVISTFPHYGHGGIVESARELFMQLNGENTSSGRLGFLSTLLGEGSECHGYKVRLVGHSLGGAVATVLGMMLYGKYPSVHVYAYGPLPCVDFVIAEACSHFVTTIICNDEFSSRLSINSILRLRSAAISALSDNSPADTAMIQKLARRILHVNRYHDNGPDDGIIQGYADHTRTADTTVPNERQISHQIPLCNTELDLHNTQNGFFRYNGSSASIDEHLSYEGISSGHDMQIIPLDGADSGFEGHQTSYREIPVEPPEMFLAGLIVHIVRQRRSLFPLWKCWSIQETEPPYKAVLAKRENFRDIVVTPYMFTDHLPWRCHFAMQKIVEAQTPMRRAHSDPPVQQHLV

SEQ ID NO: 70802 - protein, 320 aa, Zea mays
  Clone ID: UC-ZMFLMO17341F11_FLI.pep
PDGLLEAPVLPFLTVPHQARLPALPHQRHRPHRSQVSPLRHHLHVHGWHAVALGSPGVWHVGLRLGPCEVELKAPAAAAAEGLWHHANLRRGAAMSEGGGRVGAVGGVLNADAAREVQLDGSAGAVGDDAVSVLEARDLDAEVGIQFREEVVQLHVLGLHVEVQRVRVLLLLGRRVLLVGLGNGRLAGTEQHGLHGRGGGLGADGGDGDPRVAPGQRVGVVDVGVAGGAEHGGVGLARDGGGGQLADLAHPHALVAQARVRGPGVARRAEEGSTNARAAVHRRRGPLAAAAPPAPHAPVLVQLHRTWSPSSRCARPPSPG

SEQ ID NO: 70803 - protein, 230 aa, Zea mays
  Clone ID: UC-ZMFLMO17377B02_FLI.pep
SKTVIQIRSHAQKYFLKVPKNGTGEHLPPPRPKRKAAHPYPQKASKNVSQAILSQEQPTQREQGSVMPMDTATVRNTNANVAVPSWDNTLAQPFSAGHVQGAAATNNCSSSMESPSGTWPTSEAVEQENMVPPLRAMPDFAQVYNFLGSIFDPDTSGHLQRLKAMDPVDIETALLLMRNLSMNLRSPDFEQHRRLLSSYSYGGADHVKSEAMENHGSPQSGHLPFLVTSE

SEQ ID NO: 70804 - protein, 78 aa, Zea mays
  Clone ID: UC-ZMFLMO17382H08_FLI.pep
AYASGYRHPIRHILNNKRKVYPLLFLMCLFMFVISRECESTDSYSLNLDRAKTESDPLMGRAGRAVSRINGGTTSPGP

SEQ ID NO: 70805 - protein, 361 aa, Zea mays
  Clone ID: UC-ZMFLMO17398B10_FLI.pep
VEAQMEEGRVRLVQLLQRTMISARKADLKNIPPCIKKITFLDFNEEHAKSYNELVVTIRRNILMADWNDPSHVESLLNPKQWKFRAATLKNVRLSCCVAGHIKVAEAGQDIQETMDELVQQGLDPSSDEYQLIRYSLLNGASCFRCSVWCRLPVITPCRHLLCLDCVALDSEKCTLPGCGYHYEMQSPETRARPENPNPKWPVPKDLIELQPSYKQDDWDPDWQSTSSSKVAYMIEKLRSLREAHMNHGNNITNSVGHSNTLSYQPQAMLDKVIIFSQFLEHIHVIEQQLTIAGIIYSGMYSPMPLASKVTVLVNEHKCASSSRISYGNANQAWVAQKALPLLRNEPSLAAKALQKREVHL

SEQ ID NO: 70806 - protein, 119 aa, Zea mays
  Clone ID: UC-ZMFLMO17185F09_FLI.pep
QLTDCSFKPATSTTHSGTTTSKQKKRQQHKNNATLPHSKIDPNLRHDTGKKKKKKLVSDEEHVVLHILVQPREVSDVKGPPSLGLGRHHGSLVVEPATVGREVGVVDGRRQRHRLGAPR

SEQ ID NO: 70807 - protein, 130 aa, Zea mays
  Clone ID: UC-ZMFLMO17092B09_FLI.pep
KRLYFIYCLVSFLKKRIGILIMNVGLFCSSSNNMTVPNCSHLHNFYSDVAFFITSQVGTVTAICVTCFLIRCVVVALSAFDADVSLEVLDHPVLDFFYYMFAEILPSALVLFVLRKLPPKRVSAQYHPIN

SEQ ID NO: 70808 - protein, 467 aa, Zea mays
  Clone ID: UC-ZMFLMO17117E02_FLI.pep
KKAAPSLQQKKGRDRTRQATSSFQREGKPRGRELEMGEGRAGDGLIKLFGKTIPVPETAAVGEAAKDIQQSGGSGSGTTDPKGQENNVQDSTGSPPQQEVADTEDSSADKQQGEAGNPKEKLKKPDKILPCPRCNSMDTKFCYYNNYNINQPRHFCKNCQRYWTAGGAMRNVPVGAGRRKSKSASATSHFLQRVRAGLPVDPLVCAAAKTNGTVLSFGSAMSSLDLTEQMKQLKEKLVPIAGDERSVGSRTQGPSAKAEDPDRKENVTADKSARVVQHPCMTNGVAMWPFSCAPPVPASACYGPGSIAIPFYPAAAAAAAYWGCMVPGAWSGAWPPHSGQSETGSSITSASPAASTKSNICFTPGKHPRDRDEEGGAKGNGKVWVPKTIRIDDVDEVARSSILSLIGIGGDKAGKDGGRGCKLARVFEQNEEAARTATPHSAAINGLPFLQGNPAALSRSLTFQEGS

SEQ ID NO: 70809 - protein, 347 aa, Glycine max
  Clone ID: 700870907_FLI.pep
RNLRSLQTLLMSHILPTRIASHHWPSDDLRHRTLSDHRLHLASKPSGHRTVDSAEILRADDVLRPDGVIHGIERLIVPRSVQEDFNRRRNLAAISAVLPEGAPEVDPRTHRLKKPAPVPAGAPPVLPIYDAMAPGPSLAPAPAPGPGGPKHHFNGERQVKDFIHTLLHYGGYNEMADILVNLTSLATEMGRLVSEGYVLTVLAPNDEAMAKLTTDQLSEPGAPEQIMYYHIIPEYQTEESMYNTVRRFGKVSYDTLRLPHKVLAQESDGSVKFGHGDSSAYLFDPDIYTDGRISVQGIDGVLIPPEEEEERTRRTTPLVKVAAPKPRRGKLMEIACSMFGSFGQVCQ

SEQ ID NO: 70810 - protein, 190 aa, Zea mays
  Clone ID: UC-ZMFLMO17240G10_FLI.pep
MLQRLTAVWYGRHRFLVVWWRRAGGVRHRRRRSVGGRLGGRRLRCGSVRRWGRLGCRRLWGRGVRRWGRLGRRRLWGRGVRRWGRLGRRVCGRLGAWSVRRRGRLGRRRLGRRGVRRRGRLGCRRLWRRGVRWRGRLGRGRLGSRWLRAWSVRRRGRLRCRRLGGRGVRRWGRLGRRRFGAWSVRRRGRL

SEQ ID NO: 70811 - protein, 198 aa, Zea mays
  Clone ID: UC-ZMFLB73272F10_FLI.pep
AIDLPTRCPPPQCAHGARPHSLAFSATSAAGSAFSGSSAAGSAAAGSSSAAAASGSAAAGSASVSAAGAAASSFTSPAAAGSGSASFGVSSSASTGAASGSAAAAGSVSAGAAGSSTLASAAGAASSGTTAGGAGVSTAGASSVATTVGVWTCAHVHARREYKLILASSVVINAGGSAVAMGDDQKADDYTTEWLATS

SEQ ID NO: 70812 - protein, 297 aa, Zea mays
  Clone ID: 700798807_FLI.pep
DPESRQLRAALAEDSRLESDYILAGCGADELIDLIMRCVLEPGDKIVDCPPTFTMYEFDASVNGALVIKVPRLPDFSLDVDLIVEVVEQERPKCIFLTSPNNPDGSVINDEDLLKILDLPILVVLDEAYIEFSSLQSRMAWVKKHDNLIVLRTFSKRAGLAGLRVGYGAFPLSIIEYLWRAKQPYNVSVAAEVSACAALQNPTYLENVKNLLVKERERLFNLLKGIPFLKPFPSHSNFILCEVTSGKDAKKIKEDLAKMGVMIRHYDKKELKGYIRISVGKPEHTDALMKGLNALRL

SEQ ID NO: 70813 - protein, 384 aa, Glycine max
  Clone ID: 700795892_FLI.pep
KMLQVVAPSLSLVSSQPSTSKDAESASAANMDFNVDLTTGARNLSSTLQKLLLWEKKLFNEVKAEEKMRVMHDRKCHRLKRLDDRGSDFHKVDSTRTLIRNLSTKIRMAIQVVDKISMTINKIRDEELWPQLKELIQGLTRMWKSMLECHHDQCEAIREARILGSIGSRKKSGDSHLQATKQLEQELINWTFQFSGWISAQKGYVRALNNWLLKCLLYEPEETPDGIVPFSPGRIGAPQIFVICNQWSQALDRISEKEVVDSMHVFTMSVLQIWEQDKLEMHRQVMKNKDLERKVRNMDRDDQKLQKQIQALERKVVLVSGEGKGLSVSENIIYQSDKSSSLQASLQRIFEAMERFTDESVRAYEELLQRSEEESAARNHERVS

SEQ ID NO: 70814 - protein, 75 aa, Zea mays
  Clone ID: UC-ZMFLB73233D02_FLI.pep
QRIMFVNMVVVLPIIFCSYAFTNFYICSYPFQLAQLPQSPLLAQVVVFLASTAADLLQRSWRRLCAHKIGCDASI

SEQ ID NO: 70815 - protein, 244 aa, Zea mays; identical to SEQ ID NO: 59981
  Clone ID: UC-ZMFLB73021A09_FLI.pep

SEQ ID NO: 70816 - protein, 183 aa, Zea mays
  Clone ID: UC-ZMFLB73238D10_FLI.pep
ICMHGGIGRSINHIEQIENLQRPITMEAGSVVLMDLLWSDPTENDSVEGLRPNARGPGLVTFGPDRVMEFCNNNDLQLIVRAHECVMDGFERFAQGHLITLFSATNYCGTANNAGAILVLGRDLVVVPKLIHPLPPAITSPETSPEHHIEDTWMQELNANRPPTPTRGRPQAPNNDRGSLAWI

SEQ ID NO: 70817 - protein, 399 aa, Zea mays
  Clone ID: UC-ZMFLB73416B11_FLI.pep
PFFLFIELALVLCFITLYYRHLQSKKTSPLEPTEWPVVGHLPGLVANIHRFHDWATGVLAGVGCNFEARGGRTGLRYFITCDPSNVRHIFTSNFANYPKGEEYAAIFDVLGGGIFNADGESWRRQRVKAQMLMTGPRFRAFTARCSRDKVERSLLPFLAHHAAADDEGRPTPCDLHDVFLRLTFDMTCTLVFGVDPGCLALGLPGVPFARAMDDALETLFLRHITPTACWKLMSVLGVGQEKKMAAARRTIDCFVATTVAKRRADKLREGEGEGVCSSFDLLSSFICHEDDSSENDDDDDVFLRDTTVNLLLAGRDTTGAALSWFFYLVSKNPRVEQKLLDELAPIVASRRRAGGAAADAASGMVTFDADELGSGLVYLHAALSECLRLYPSVPFEHKV

SEQ ID NO: 70818 - protein, 445 aa, Zea mays
  Clone ID: UC-ZMFLB73091F02_FLI.pep
YISASIWPLAIGLWILLHRMGIDRQDVRIVCHFNLPKSMESFYQESGRAGRDQRPSRSVLYYGLDDRRRMEFILRNPKTKKSQPSSSSNELSEKALADFSQIIDYCEISSCRRKKIIESFGEKVQPTLCQRSCDACKHPNLVLSRLEELRRVPNCRFNKISPVFQSSVKEAHLDTEFWNREDEASLSAEDISDSDDGNEVVSNIAISKVPAKAGLDAKFKALERAENAYYQGKGQAKQQGGGLADKKSISETLRDACRKRLLDALGQAKLRLGNIPCGDEASATHLETECFKKYVKAGKTFYNSQIAATVRWLSSATLSQMRDRLDTLIDRTKDDGASGCPDIVPESPPASPEIVVGARSGETSNDKPQHICELKSSDESAKGAASSTGNMVLPAIPTFREFLSQKGRDRAKCYSNSNATNQPSGIRRKFSGPLDKEEASKRMKS

SEQ ID NO: 70819 - protein, 476 aa, Zea mays
  Clone ID: UC-ZMFLMO17002H06_FLI.pep
SRLRFRPPRTRLPSRRLLRSSIVLGLRRRKSRSGTRSSNLPCPPPPRLPPSPSRSVAGMGVLGGAPPASCPATRHCAEWARIYLRYCLCSQKEGAALALGLISVISWGFAEVPQIMTNYRQKSTEGLSVAFLMTWIVGDLFNLVGCFLEPATLPTQMYMALLYTITTLILTVQTIYYSHIYHRLEAKKSRAASKAQKHQRADASLRERLLGAKDGVLSRNNGSDATVLIPSSPIPVNVKLVDQYHGSSPNTDYYYMSARSLSRSPVPTAGTWLGSNRQSLMTPPQTNDQRGSLIGEIAPAHSAPSTVTKNALSVAPWMGLLLGTCLLHILIGNTHREMPSGTVIPVGRRLLVFVEGHGNSSLSHGNGSEIGRYLGWAMAIIYMGGRLPQILLNMQRGHAEGLNPLMFTFALLGNSTYVGSILVNSLDWSKVGPNLPWLVDAGGCVLLDSFIILQFLYFHYRKQRELSDEHDKADKA

SEQ ID NO: 70820 - protein, 827 aa, Zea mays
  Clone ID: UC-ZMFLMO17012A05_FLI.pep
DEVSFSGASHPANMYTQEDLPKQVSRTLNQGSNVMSLDFHPVQQTILLVGTNVGDIAVWEVGSRERIAHKTFKVWDIGSCTLPLQASLMKDAAVSVNRCLWSPDGTILGVAFSKHIVQTYTFVPNGDLRQQAEIDAHIGGVNDIAFSHPNKTLSIITCGDDKLIKVWDAQTGQKQYTFEGHEAPVYSVCPHYKESIQFIFSTAIDGKIKAWLYDCLGSRVDYDAPGHWCTTMAYSADGTRLFSCGTSKEGDSHLVEWNETEGAIKRTYNGFRKRSLGVVQFDTTRNRFLAAGDEFLVKFWDMDNNNILTTTDCDGGLPASPRLRFNREGSLLAVTTSDNGIKILANTDGQRLLRMLESRAFEGSRGPPQQINTKPPIVALGPVSNVSSPIAVNAERPDRILPAVSTSGLAPMDASRTPDVKPRITDESEKVKTWKLADIVDNGHLRALHLTDTDTNPSKIVRLLYTNNGVALLALGSNAVHKLWKWQRSDRNPSGKSTASVAPHLWQPANGILMTNDTNDGNPEEATACIALSKNDSYVMSASGGKVSLFNMMTFKVMTTFMAPPPAATFLAFHPQDNNIIAIGMEDSTIQIYNVRIDDVKSKLKGHQKKITGLAFSQSMNVLVSSGADAQLCVWSIDGWEKKKSRYIQPPANRPGTLVGDTRVQFHNDQTHLLVVHESQLGIYDGNLDCLRLWSPRDALPAPISSAIYSCDGLLVYAGFCDGAIGVFEAESLRLRCRIAPSAYIPPSILACAGRVYPLVVAAHPMEPNQIAIGMSDGKVHVVEPLDGDPKWGSAPPQDNGAHPHPHPAISAAPSTATNQASDQPTR

SEQ ID NO: 70821 - protein, 67 aa, Zea mays
  Clone ID: UC-ZMFLB73031G06_FLI.pep
SSSKAHNHITNVSYHSSYCSKAHNYITLAAPELISHKITKATLMLQAVQKPLDNHSSFLYPLVLRYK

SEQ ID NO: 70822 - protein, 363 aa, Zea mays
  Clone ID: UC-ZMFLB73150C02_FLI.pep
VEAHKRSVWSRRKPEERGKSKISSSTSGFSHSKVESSSTNLQTPMEPVQTPQYALFQDSKKIGEVQHANQFMFPGYGYPPAYPFPTIPLVSNIQAEGYQTKPAGTSYRTSEDYLKQSSSTEMSQDIPSRPLTMTPQEKIEKLRRRQQMQALIAIQQQQQQFGQQGPGSDTMVSQAYTPGNKNPDSLGSSIVIDENTNKVISPEMIPTDHDRVHKSSAISDDPFIEEKIYYQLQDALGKLDTKTRLCIRDSLLRLVHSATERKIDGDRSTNKTNKDEDEASEDASTRKTRSPNKEAETTTNPIDRIVAHLLFHRHCSKVAKATKEIISSIPLTLEPEPKVPLGTPRVPSKDQRDEQEIVLQPSQ

SEQ ID NO: 70823 - protein, 749 aa, Zea mays
  Clone ID: UC-ZMFLB73157G04_FLI.pep
IPRRRRRFSRVQNAAVGSEVEQEEPKKEAMAGVGETLRSFMEEFGDQGEDSIILSPRLKDISTPDRPAALGFLGEKYNNLMERYKKYKKQVVKCSEECEPRYNGLKKKYTDECAERRRLYNELIELRGNIRVFCRCRPLSSDEVNRGCLSVVEIDPSQESELQFVPSEKERKPFKFDHVFGPEDDQGTGKTFTMEGVPENRGVNYRALEELFRTSEKRSASVAYTFSVSILEVYNEKIRDLLDESNDQSKRLDIKQNADGTQEVHGLVEAPVYNIDDVWEKLKFGAQNRSVGSTNSNELSSRSHSLVRVTVRSEHLVTYQRSRSHMWLVDLAGSERIAKTGVEGDRLKESQFINKSLSALGDVISALASKNSHIPYRNSKLTHLLQSSLGGDCKTLMFVQISPSSMDSGETLSSLNFASRVRTVEHGPARKQVDPAESLKFKQMTEKLRHEEKENAQLNQSLQLMQLKYASRENVFRTLNEKVKDAEQACRNYQQRIRELESELGNEKRVSRDSARSSRPPLVPTRQKQPHGRNAPPSGPSRWRLKAPTIHNKENIPVMMNKSNPGDDPNKAVGRARRVSLTPVIRQIPIQPKRRSSIAILPSVREHLSVLNEKRAASRLSQVNMPRRSVATFGLNLGPGTPLAGHGGPVDATPDGAKFRRFDLGSSSSKFTSPPPNVTPQRKMGMAPAGGPPNAAKLCFSIQKRVTPAHVRAKPGMGIFDPALRENMVVGRTGNALRVLNGKRRQSVV

SEQ ID NO: 70824 - protein, 517 aa, Zea mays
  Clone ID: UC-ZMFLMO17012D05_FLI.pep
LVNSCLCARARGAGRAAVDPMTGAAAVDPPVPRPRRLTVLPLIALIFYDVSGGPFGIEDSVRTGGGALLPILGFIVLPVLWSLPEALVTAELASAFPTNAGYVAWVSAAFGPAVAFLVGFSKWASGTLDNALYPVLFLDYLRSGGGLALPPPARSLAVLALTAALTYLNYRGLHIVGLSALALTAFSLSPFLALTVLAAPKIRPSRWLAIDARAVDLRGYFNSMFWNLNFWDKASTLAGEVEDPRKTFPKAVFGAVGLVVGAYLIPLLAGTGALPSETAAEWTDGFFSEVGQRIGGPWLRVWIQAAAAMSNMGLFEAEMSSDSFQLLGMAEMGMIPAIFARRSKYGTPTFSILCSATGVVILSFMSFQEIIEFLNFLYGLGMLAVFAAFVKLRVKNPDLARPYRVPVGTAGAAAMCAPPAVLIATVMCLASARTVLINAAVVVAGVALYYVVEQAKRRPWAEFLAPVPPADSSHGPATAPDDADAADLEDVRAGLLAGEPADEEGSKVEYSRLEIRA

SEQ ID NO: 70825 - protein, 502 aa, Zea mays
  Clone ID: UC-ZMFLMO17265D07_FLI.pep
RLYATLLRPSLLDVAGRPPVPPQRGNVLPQVAVPVQHHVGIDKRVGELLPVPVLVALALLLHRRLYRHVDHLALAVVVVAVFHHDGEHKRAYLKVVVHVQDGLQGLDHLPHGGPGLGVLAQALVRHHSGASGPLARVLALHGWIHDPVELVGLLEVGSGPVHQALLPGPPRPIDGPTARQELQQHYPEAVDVALGGEVPRHDVLWRRVPVGPHDARCYVGRVALRPVLGEPKVRQLGAVVLVKQDVGGLEVPVDHRRVRAVEEGEALGRADGDLHPRHPWHGAVETSEEVFLEALVAHVLVHEHAVVVLVAVADERDEVVVSELGKEEDLGQPLAVALRAAVEVEVLDGHRLRVEARAEAGGDAAPVDGAEAAAAEVVGAGEARGGGPQLGAGEGVQAGARQRQGQVLGRQRPRRTPQARQRHPRRRRRGRRQQQQLEPLPVPVPPAPALPLPPRRRRRLVGVVVSRRRAAEQRPPRLRRRHRARPIESPEGNAPCLACLIE

SEQ ID NO: 70826 - protein, 114 aa, Zea mays
  Clone ID: UC-ZMFLMO17086E11_FLI.pep
LREADDSNRVLTLQGKPKHTACQGTPTPHMTTVPIDSPSASRPHCLGIQCSTDPGCRRAVTTLVPTIASMGDPVLGRMRDKVRARLHSGTRFTGYHFSQHVLSTFKSLTQVSTH

SEQ ID NO: 70827 - protein, 163 aa, Zea mays
  Clone ID: UC-ZMFLMO17079F10_FLI.pep
GKWFLKGLDSHRQVTSEVYLPSSNTWSAIDDEMVTGWRNPSISFNGRLYSADCRDGCKLRVYDENTGTWTRFMDSKHHLGSSRAFEAAALVSLNGKLCVIRNNMSITLVDVSNPTMSVETDSARMWETVVRKGQHRSFVANLWSSIAGRNLKSHIIHCHVLQV

SEQ ID NO: 70828 - protein, 319 aa, Zea mays
  Clone ID: UC-ZMFLMO17015F05_FLI.pep
PLPAGHPHTPRSSPPQPQVSSARALRAMDYSGTKESPPSGAWWSRETVAVVTGANRGIGHALAARLAEHGLTVVLTARDGERGEAAAAPLLARGLAVVFRRLDVSDAASVAEFAAWLRDAVGGLDILVNNAAVSFNEIDTNSVEHAETVLRTNFYGAKMLTEALLPLFRQSSATSRILNISSQLGLLNKVGDPSLKALLLDEERLTEAGIEAMVSRFLAQVKDGTWGEQGWPKVWTDYSVSKLALNAYSRLLARRLEARGVSVNCFCPGFTRTDMTRGWGKRTAGEAADVGARLALLPPTELPTGTFFKWRTPQLYSKL

SEQ ID NO: 70829 - protein, 424 aa, Zea mays subsp. mexicana; identical to SEQ ID NO: 67531
  Clone ID: UC-ZMROTEOSINTE037E01_FLI.pep

SEQ ID NO: 70830 - protein, 114 aa, Zea mays
  Clone ID: UC-ZMFLB73224C12_FLI.pep
LLSDLVDHSYLQSGGVGYVCGVCRATAVLPQELVEEVYHNPLYETRPALRLHVRVPQDEGHACLPSVHELLQLASHLTVHLSTLWYHEPGFLSLGCRIVWVYLLMRGYMCINFS

SEQ ID NO: 70831 - protein, 131 aa, Zea mays
  Clone ID: UC-ZMROB73052D05_FLI.pep
ALGGSDALRPGVNVSAEARGAVDRVGNAGAHRGGRRDARADERRRARRDGDGQAHQDRDAVRAVPRRHQPLAGGVGDGQRRVGRGARAVQLHRPERGVRRTGCRAERGGCGAGGGRVVMVRWRFFSVGVGL

SEQ ID NO: 70832 - protein, 382 aa, Zea mays
  Clone ID: UC-ZMFLMO17344D11_FLI.pep
LASRHMVGSQYDDDDDNVVGRRQTRWYAVTGGRGFMARHLVAALLRSGEWRVRVTDLAPTLALGPGETDGILSDALRDGRAVYASVDVCNLDQLAKAFEGVDVVFHTAAADPSKNNLQLHYKVNVEGTKNVIDACKICKVKRLIHTSTSAVVFDGVHGLFDADESLPYPDKFPDAYAQTKAEAEKLVIKANGINGLLTCCIRPGSMFGPGDIMMPTLDRYGWSNVTIGEGKNYDDFVYVENVVHGHLCADKTLSTIEGARTSGGKAYFITNMEPMNMWDFLYLVQEELGYKRIFKIRVPIIVIKPASYLIEWAYRAVFSHFGTCQPQILTPARIRYVTLNRTFSCNKAVEELGYKPIVTLQDGLKKAVKLYIQLRDKDLPKI

SEQ ID NO: 70833 - protein, 143 aa, Zea mays
  Clone ID: LIB148-032-E12_FLI.pep
IIRWRYIYYCCCCLGASTCTGDLAQAGGGGDGEAVAGELGELGVVLGHDRRELLALLEALVAGVHVGAHGVEHGAGGVAVAGGEGLGGLVEAVGDVVERLDAVVQRAARQRLRPGVVGERARRGLGLGGLGAHGAHGQPQHAG

SEQ ID NO: 70834 - protein, 110 aa, Zea mays
  Clone ID: LIB3059-014-C6_FLI.pep
TKPRKHKTPLRWTTQRVNSQYGRQKQNDNQGPFFQQTQNYHKLWSLDTKNEKLYVDCFIEGLQASLLEGFTHGRVCVACSSNVLTGCSILQGDDSFVDDLTSIRCHNVHA

SEQ ID NO: 70835 - protein, 99 aa, Zea mays
  Clone ID: LIB189-028-A11_FLI.pep
LILLDMHADRGGRPRGVVVRRRRRRCRSRRGQPAAEDEAGDPHGHEDSRADVHGDVNDLLQPADASSHHHSQQDLEHEVHGRRRLQLRRPERGNKVVAS

SEQ ID NO: 70836 - protein, 245 aa, Zea mays
  Clone ID: 700168731_FLI.pep
RGEPEVVPNQRRKKVGSGASQPAAAMRRTSKKSSSSTATASAGPTKAVSKEVERIDQFFYTYADNSSGMIDPEGIETLCSHLEVPHTDVRILMLAWKMGCDKQGYFTLDEWRTGLKALRADSISKLKKAFPELVQEVTRPSNFQDFYIYAFRYCLTEDKKKCIEIPVACELLNLVLGLQFRPQVDKLNNYLMYQNDYKVITMDQWMGFIRFCNEINFPSLDNYDSDLAWPLILDNFVEWLRENKS

SEQ ID NO: 70837 - protein, 326 aa, Zea mays
  Clone ID: UC-ZMFLLIB3205430F11_FLI.pep
AAKEVPTLQDGAFHRRGARISPAEPAGPEPAARHHPAGAAQGASAGRAAELQARRRPPAGVPPGRDRSVLPRPGDRTGSRVVDALYFSVVTMTTVGYGDLVPSSDAAKLLACAFAFAGVALVGTFLSKAADYLVEKQEALLFRALHARNRKALRVVEANRVRYKLYTAAALLAAALASGTAFMVEVEGMRPVDAFYCVCATVTTLGYGDQSFSSVAGRAFAAAWITVSTVVVALFFLYAAELGAERRQRALARWVLRRRTTCTDLEAADMDGDHRVGAADFVLYKLKELGKISQEEIAEFLEEFDELDADNSGTLSPHDLIVAQPG

SEQ ID NO: 70838 - protein, 553 aa, Zea mays; identical to SEQ ID NO: 58887
  Clone ID: LIB3079-039-B4_FLI.pep

SEQ ID NO: 70839 - protein, 345 aa, Zea mays
  Clone ID: LIB3689-246-A12_FLI.pep
KGLFPLSIIYTRGHCTFFRPSHTAFYPGKIKDGMQQRMTWHCSAAWRPSLQARRPLGGAGDDGEQVVAEGVAEVLGEVLHGAFAGDVGLDEEGEHGEHGQPAVLDLLHLEDGGLVGVAGQAQGVEGPTGVQLVLKVQSVGDPVVLGAADEDDLRDHGHHQVDGDAVAEVVEGVAVQEQRAGLEPDSLRATVSAELVAGLWDDSASGTEHGPSGMDQLVGLVLGEVLWLLAQAKRVVAIVSRDLSGEVLRHLRPVQQPIRQVDPPVRTIPLGELVADVWRRRRYRSGLGLLGRLLAEKGDNLLSPRGGRCGGVAGGAREVELGAQNLGWSERRHCRRPTIQRKICS

SEQ ID NO: 70840 - protein, 289 aa, Zea mays; identical to SEQ ID NO: 58704
  Clone ID: LIB3637-239-F10_FLI.pep

SEQ ID NO: 70841 - protein, 425 aa, Zea mays
  Clone ID: LIB3632-027-H12_FLI.pep
GTRRRASLTAGSGVLRNPPPHPHDATTDDGEPRSPSTAPPPPPRIKQQQKNKGMAKDGGPDWNGLLKWSLAHGDSTNPPRALSEEDRKWFMDAMQANTVDVVKRMKEITQVMKTPEDVLQSQGVTPENIEDMLDELQEHVESIDMANDLHSIGGLDPLLSYLKNSNAGIRAKAAEVVSTIVQNNPKSQQLVMESNGLEPLLTNFKSDPSTNARTKALGAISSLIRHNQPGVSAFRLGNGYAGLKDALGSDDARLQRKALNLIQYLLHNYKADRSVATELGLPKLMMHLVSSDDSLVREAALGGLLELARDKTSGNALPDQEKLKDMLKSRIEGISAMDTDDLHAAREERQLVDSLWKECYNEPSSLREKGLVVLPGEDAPQQPPPDVAGKMFEPPLRAWAAARPAQEDDSDSGSGKKDPPLLLKF

SEQ ID NO: 70842 - protein, 235 aa, Zea mays
  Clone ID: LIB3356-057-C11_FLI.pep
GAGERTTAGAAGATPLAHRRSKPTHPWPRAELTCGPPNTPLCLPPAATPSSSSSAGSAKMPAPERAHGKGGRSTDGQAEHQPTAPDLARASHWRQQQHPHHQPAAHHQHRRTVHHSHGRRGRPRNWSPTDCLPPESAAGSCRAAPPKTPPPQPWRRDLRQCRTNPDKGSRSRPPRAPAKRTQQHAHHPPPSLPSAWASQPRSRAAARTGKAGDGGLGRQVQVRPCRPWAADAGET

SEQ ID NO: 70843 - protein, 311 aa, Zea mays; identical to SEQ ID NO: 62543
  Clone ID: LIB3732-005-B5_FLI.pep

SEQ ID NO: 70844 - protein, 688 aa, Oryza sativa; identical to SEQ ID NO: 62844
  Clone ID: LIB4506-016-G8_FLI.pep

SEQ ID NO: 70845 - protein, 251 aa, Zea mays
  Clone ID: LIB3069-050-B6_FLI.pep
WQNIYRSVFWSNWLTKVNECCSSHLINNWLAAGMYKPVMVDLAYLKKQKYEAYWHVMLTVHQPMKQPGPDAACPAAVRPPSYNGRRRGTGARCIRTPLPPIPKVGFRPPARQWGARPPTTSSPPLSPPPIPGPMRAARPRPSPHRGAETPPRCAASAWRSSAPRPTADTRSPPRTLPTSARSPSSVTRCGASWRPRSRPPRPGPRRCSRFRLPPPSWSLPRPPASRRGRRPRSRRSRTPSQRSGGSLGRRR

SEQ ID NO: 70846 - protein, 522 aa, Zea mays; identical to SEQ ID NO: 57881
  Clone ID: UC-ZMFLB73219C11_FLI.pep

SEQ ID NO: 70847 - protein, 242 aa, Zea mays
  Clone ID: LIB3150-050-H8_FLI.pep
DYNNGLQVLGAEHNASSHRKCRITTRKQKSDPAGEQPTRRREMEQAKEHTLKKIQISLLFRSPLLHQQLEQLLTNLPYVHRDGQTENGLRRRRNPPELAARAPTLGGACEARRDGGVVHGVVEGLRLRHPRPQLPGLLLRHHPHELPPRRLILRRRRGLQVVGLPRPPQQRRPPLGSLRRPRDSVDRPGARGGAGPGRGRRRAGGERDDACCGRCHRHWIGSVWSRPSLPALAGLLFDCFGG

SEQ ID NO: 70848 - protein, 64 aa, Zea mays
  Clone ID: LIB3600-038-B1_FLI.pep
CARAAATPAPSAPACSGSRPPRRRPTPPSSSQSSTAGRACSTCSPPRPTTASAPRSSAPCSTRR

SEQ ID NO: 70849 - protein, 166 aa, Zea mays; identical to SEQ ID NO: 61337
  Clone ID: LIB4074-015-C5_FLI.pep

SEQ ID NO: 70850 - protein, 298 aa, Zea mays
  Clone ID: UC-ZMFLB73210A05_FLI.pep
RRWQSQVVLPDMFKSTYESITQGTPMWIELPVSTSTLYPWDPSSTYIHEPPYFKDMTMTPLGPRPVKDAYCLLNFGDSITTDHISPAGNIHPDSAAATYLKERGVERKDFNSYGSRRGNDEIMARGTFANIRLVNKFLKGEVGPKTIHVPSGDKLSVFDAAMKYKNEGHDTIILAGAEYGSGSSRDWAAKGPMLQGVKAVIAKSFERIHRSNLAGMGIIPLCFKAGEDADTLGLTGHERYTVHLPTNVSEIKPGQDVTVTTDNGKSFTCTLRFDTEVELAYYDHGGILPYVIRKIAEQ

SEQ ID NO: 70851 - protein, 230 aa, Zea mays
  Clone ID: LIB3068-024-B8_FLI.pep
ATIMVTKVDEPSKYGVVVMEEATGRVERFVEKPKIFVGNKINAGIYLLNPSVLDRIELRPTSIEKEVFPQIAADQQLYAMVLPGFWMDVGQPRDYITGLRLYLDSIRKKSAAKLATGAHVVGNVLVHESAKIGEGCLIGPDVAIGPGCVVEDGVRLSRCTVMRGVRIKKHACISNSIIGWHSTVGQWARIENMTILGEDVHVCDEVYSNGGVVLPHKEIKSSILKPEIVM

SEQ ID NO: 70852 - protein, 470 aa, Zea mays
  Clone ID: UC-ZMFLB73216E03_FLI.pep
ESGQHTYGKMADIVIRDLERVVKVALAIKKAVETAKQNKEDCVKIGERAAEVSTHMKRLKENTKAMEDPLMSDTLKSMEETLQRALKLVNECQRKHVVLHYLNAGGMSKKLRQVQEDISYKLWNGVLATVVDTRIALEKQIQSAIDAPLHQHQQRAGQVETSQSSHSRTDQASEKGKAMLARVKREQSELLSGVPQFSLSQLNAATNEFSEGCVVERGYYKGVLHDGLDVAIKKLAVSDDTQERRLQLELNIRAKLEHGNILKLLGYCLDAQEKEKLYFLVEEYIPNVESLEKFINVSRLDWSSCFKIIQGIAKGLHCLHKHHILYMDLNPANILVRSDMNPVVINFGSSIVLDRDDDKVTGDAVAGTLGYVAPEKLMEAYASMMSDVFSFGIIIIEIITGRRASPFVDLPEWGSVDEMITSAKGLFDPALANESQLMKINRCREVGLKCIERDPKRRPTMGNVLEMLSS

SEQ ID NO: 70853 - protein, 567 aa, Zea mays
  Clone ID: UC-ZMFLB73192D09_FLI.pep
ASPPRPEPSPDTRQDRPAQRDATAASGSAHHHVHGLPGAAQAAEASVPAGGEQHPGHRGRAARRRGPAQGVVARARGDPGAPAGAHVPGRVPACRGHGAIPDAPAARCVPGGLRVLPHQPQLPRPVRDVPGALPRVAGLRRAQRPVHDAPAGAVGARGGDVPAVRAALHPAVARPGVLPRRGRARHLLGHRRPARQDRGLPAGHRHPGGELQPVRADAVLRGHGRAPVQAPRRRAQRAPRRDGVQRGARLRGAGPEPAAGGAAGRARAGGVHGDHHPQLLHGRGARDAAAQLPVPHGRRGGAAVHRRRRRAVPPGARGAHAARRVGRRVPLRVPGGGRARQRGHQPVQGPDEHRGRRAEGEHHGDGAPGAAGVGAAAVRAVLHRAQGAEQPDQALHPGLPHGVRALLHPRGRARRDRRAPAQPDAVGRAGGGVADDAAPVRQHLQQLPLVRARLRRGQGPHAQGRPRLDDRLRLRLQVQQRRLGVHPPRRQRRRAVGQLHPPVPRAHSRRAQALSPAPAPVSCRALPFPFPPRPVAIAPAATFGLWTSKRTAGTAIGRGRELGWWNM

SEQ ID NO: 70854 - protein, 314 aa, Zea mays
  Clone ID: UC-ZMFLB73208A01_FLI.pep
YVYQSYFRFRPLPVYFPHRTFVSDVSEIPISFPFPELPFSILFPIKNMKTVMVLVFTDRLRPFSSLLTIYVLLLLLTTAARDPGIVPRASHPPEDIHYDNLSLTDTPGILQFPCVKEVIVNGMPVKVKYCETCMVFRPPRCSHCSICNNCVERFDHHCPWVGQCIGKRNCRYFFLFVVSSSLLCIYLFVISALYIKFLMDGDYPTVWKALKHSPASLALMIYCFISLWFVGGLTGFHTYLISTNQTTYENFRYRSDGRLNVYDQGCLSNFQEVVCAKIEPSKHKFRAHIQEEVRGPLANRAGETEEEQVGGPRA

SEQ ID NO: 70855 - protein, 254 aa, Zea mays
  Clone ID: 700084118_FLI.pep
LTEKLIASESSLKSLETSLNSVSREKEDLGMQLTDALLDMESERSIWTAKEKEYVEANHRLNICLDENHKLSEDLMKVMQELGCCREQCKTMEDKLVLSMKSDMNEKVTECSEACKASDQIVENGGTIPGAACENMRSMVAEAEVLKENCNRKLIHAKDTIDELSSRISVMEANLKNDTASNNKEKTKLRMEIRWLRPQLDAHRGRLKEAMNEMKTMDAKYQEACTTLKKDLSQHGREILRLREMLKESQSASN

SEQ ID NO: 70856 - protein, 329 aa, Zea mays
  Clone ID: UC-ZMFLMO17198B07_FLI.pep
LSQTFPPASLNLPRELLERTSLDPTDMAGAQSWRTYLCCVGGSAAVEDDGSTLRRRRRRGCGGGSSKDSPRSSSSRMSLTSLGSSSETLSPEDLSLTLSGSNLHAFTYAELRSATASFSRANFLGCGGFGPVYRGAVGEALRPGLRAQDVAVKYLDLEGGAQGHKEWLAEVFFLGQLRHKNLVKLIGYCYEAEHRMLVYEFMSFGSLENHLFKSTNGALPWMTRMKIAVGAAKGLAFLHDADPQVIYRDFKASNILLDSDYNTKLSDFGLAKDGPQGDETHVTTRVMGTHGYAAPEYILTGHLTAKSDVYSFGVVLLELLSGRQSVDRS

SEQ ID NO: 70857 - protein, 208 aa, Zea mays
  Clone ID: UC-ZMFLB73108C09_FLI.pep
TSMKPLVARLLLCYSLLCLAPAAAPLRLQHDHVRGHGHGHAHPPPYARNATAYGVSAALCPGCGAWADALEFLYYHNLVRLASLEPPLAWSPRLASYAGWWAAQRRGDCALRHSFPDGQFALGENVFWGGPGGAWRPRDAVADWAAEGADYSYADNACAPGRECAHYTQIVWRRTTAVGCARVACDGGGVFITCNYYPPGNVVGERPY

SEQ ID NO: 70858 - protein, 119 aa, Zea mays
  Clone ID: 700170347_FLI.pep
LGRSLGLLVGVGGLGLVRVGLLLLEPLLELLLPLPLHLLDVDALLGALLLAEHAPLPVAEEAPAARRRGGRRGAQARGEGSQRGPHRHLVLSSRTRVESGWAAPALRVLGAALLAGWVD

SEQ ID NO: 70859 - protein, 106 aa, Zea mays
  Clone ID: 700193315_FLI.pep
LEDGHDSALQPCSMSERDSAMGLASLGADTQSCVDVHSDNWTSVSISGRDEVLTAAKIASRKRSNPGDRIEDLDASLVGSPNQDECSGGRCSVRPRLILEISSDSD

SEQ ID NO: 70860 - protein, 209 aa, Zea mays
  Clone ID: 700072641_FLI.pep
IPWQRPVSSNVSASTSTEASGSEDWLEGMVTEYLVETFADYFGDVKMYIEERPFRRFVEACIEETIVVYVDHLLSQKNYIKEETIERMRLDEEKLMDFFREHVNVTKVESRVRILADMRDLASAGSLDSFTLIFTNILEHQPDCPPEVVEKLVAMREDIPRKEAKEIVQECKEIYENSLVDGNPRKSGFVFGKLKCLTAKKGIWRKLGQ

SEQ ID NO: 70861 - protein, 204 aa, Zea mays
  Clone ID: 701186269_FLI.pep
SPSHLSLPRRSRMPAHRDFLPARFAALLDSSCVPTGPRHAAAEALPAGSSDSSLGWLVGWVAGMSTAVARPAHGGFRRSGSGKPDPDEADRMMRSANAYLVQEEEEEEHGDEAAARREEEEEEAVSEASSIGAASSDSSSSIGENSASDKEEEEEVESKAQGLGMMGLATLESLDDALPSKRGLSSFYAGKSKSFTSLAEAAAA

SEQ ID NO: 70862 - protein, 475 aa, Glycine max
  Clone ID: UC-GMRONOIR063F07_FLI.pep
GDFVSSYTERKSGFMKWFGKIFNIGSSRGRGGGRHLQQPVEENMVWPAPARSLDDRARSRKEEEDLDHAIALSLGENFKRPTGYRWRTGTDEDYAKALQDRRFSSAHPPYAPVPFYPRGYGVPLHNRTCGGCNQEILYGNCLGVGHSYFHPDCFRCHSCRYPITEREFSLSGKHPYHKSCFKELTHPKCEVCHQYIPINAAGLIEYRCHPYWNQKYCPSHEYDNTARCCSCERLESRGERYYRLEDGRILCFECMESAITDTGECQPLYHSIRDYYEGMNMKIDQQVPMLLVGREALNEAIVGEKNGFHHSPETRGLCLSEEQTVTSVYRWPRIGGHRLISMRSQAQRLPRKCEVTAILVLYGLPRLLTGAILAHELMHAWLRLKGYQNLSLEVEEGICQVLSYMWLDAEVMSCARTTPSTSSSASSSSYSNSSKKGVKSLVENKLGGVGWWHLGAAMVLGGGFGERQLRLLLGR

SEQ ID NO: 70863 - protein, 860 aa, Glycine max
  Clone ID: UC-GMROPIC007D11_FLI.pep
NHARSVADERSLVRSVEMASSEVTMKGNCLNHNDGGATEPHSPSTAKDAEAALFRELWHACAGPLVTVPREKERVFYFPQGHIEQVEASTNQVADQHMPVYDLPPKILCRVINVQLKAEPDTDEVFAQVTLLPEPNQDENAVEKEPPPPPPPRFHVHSFCKTLTASDTSTHGGFSVLRRHADECLPPLDMSKQPPTQELVAKDLHANEWRFKHIFRGQPRRHLLQSGWSVFVSSKRLVAGDAFIFLRGENGELRVGVRRAMRQQGNVPSSVISSHSMHLGVLATAWHAILTGTIFTVYYKPRTSPAEFIVPYDQYMESLKNSYSIGMRFKMRFEGEEAPEQRFTGTVVGIEDSDPKRWRDSKWRCLKVRWDETSNTPRPERVSPWKIEPALAPPALNPLSMPRPKRPRSNAVPSSPDSSVLTREASSKVSIDPSPANGFPRVLQGQEFSTLRGNFTESNEFDTAEKSVVWPPTAVDDEKMDVSTSRRYGSESWMSMGRNEPTYSDLLSGFGTSGDPSHSSLKDQMSPAYSARKQSLDHEGKLHMPHPWPVMPSSLSLNILDSNAKGPTHGGDTSFQARGNLRFSAFGEYPALHGHKVEDSHGNLMPPPPAPQTQYQSPCSRELMSKHVSAKTCEAVKPKDGDCKLFGFSLISGPIVPEPSLSQRNVSEPAGQMHLTAHQQRTSENDEKSDHSKGSRPVDDLVVDDHDRPLQTSQSHTKDVQAKPLSGSARSCTKVHKKGIALGRSVDLTKYSGYDELVAELDQLFEFGGELLSTKKDWLIVYTDNEGDMMLVGDDPWQEFCAMVCKIYIYPKEEIQKMSPGTLSSKNEENQSVMASDGADAKVVKCQPHQKFNSENGLDA

SEQ ID NO: 70864 - protein, 805 aa, Glycine max
  Clone ID: UC-GMROPIC016E08_FLI.pep
GSWYTSDGNPDLLSSNVADIKLQSSSAPAQPLGFHGYVLTGKLKSPKLWSAEKPYLYTLVVVLKDRSGRIVDCESCPVGFRKVSKAHKQLLVNGHAVVIRGVNRHEHHPQVGKANIESCMIKDLVLMKQNNINAVRNSHYPQHPRWYELCDLFGMYMIDEANIETHHFDYSKHLKHPTMEPKWATSMLDRVISMVERDKNHTCIISWSLGNESGFGTNHFALAGWIRGRDSSRVLHYEGGGSRTPCTDIVCPMYMRVWDMVKIANDPTETRPLILCEYSHAMGNSNGNLHIYWEAIDNTFGLQGGFIWDWVDQALVKVYEDGTKHWAYGGEFGDVPNDLNFCLNGLTFPDRTPHPVLHEVKYLYQPIKVALKEGKLEIKNTHFFQTTEGLEFSWSISADGYNLGSGLLGLVPIKPQSSHAVDWQSGPWYSLWASTDEEELFLTITAKLLNSTRWVEAGHIVSSAQVQLPTRRNIAPHVIDINGGTLVAETLGDTIVVKQQDAWDLTLNTKTGLVESWKVKGVHVMKKGILPCFWRAPIDNDKGGGSASYLSRWKAAGMDCLHFITESCSVQNITENSVRILVVFLGVTKGEDGSLSNQDKSKVLFTTEMAYTIYASGDVIIECNVKPNPDLPPLPRVGIELNVEKSLDQVTWYGRGPFECYPDRKAAALVAVYEHNVSELHVPYIVPGESSGRADVRWATFRNKDAFGIYASKYGSSPPMQMSASYYSTSELDRATHNEELIEGDSIEIHLDHKHMGLGGDDSWSPCVHEQYLIPPVPYSFSVRLCPVNPATSGHDIYKSQFQNS

SEQ ID NO: 70865 - protein, 282 aa, Glycine max
  Clone ID: JC-GMLE01810064B05_FLI.pep
FLLCKKNVDLQLKIRNDFDPVLSPESSLFVLKSNKKVAYQDIVAILDSAKFCSSVQKFIDIYIRLPGIPSNGQLSDSDCIRVRICEGRFALLIREPIKEGNFIIQPKVDFDISISTVAGLLNLGYQAVAYIEASAFIYQDGKILIEVDHLQDVPGPYIQIKGANKDAVAAAGSMLKLDGSYTTKSYLEIILERLPAIERTSGGIHSQQSARLLEIVEFIQSQGCSSASDSSSSRVVSPIEGVIEEMQSKIRRLERWLAINTVLWTFLMSALVGYSLYQRKRQ

SEQ ID NO: 70866 - protein, 243 aa, Zea mays; identical to SEQ ID NO: 63168
  Clone ID: LIB3180-005-F6_FLI.pep

SEQ ID NO: 70867 - protein, 231 aa, Zea mays
  Clone ID: LIB3180-039-A9_FLI.pep
RREFLAPRRRYQMTSGGGVVSPPRSKDYRRWRRWGRSGSIGRRCFASHPPPTVWTTSASLPPRWCRQRRGRGRWATSGSGVLSSLRSQDYRQWRRRGKSRSIVWICFAAHPLPTVRPTLASSPSSSLSTATWVRVLGATKALSGDKRQQGPLSSSISGLSAVVAMGQIKINWDEMFHNSPSPDRGSTSASPAPRRCQQRRGRERWAPRRRYRATSGSEVSRQPPMEEVLSA

SEQ ID NO: 70868 - protein, 537 aa, Zea mays
  Clone ID: CC-ZMPO148074D03_FLI.pep
LVPSSSGPRRRLLFFPPSSTAPPHRLTASHSRGERSRGRTRGGDVHRRVREEMPGSQNGGPRPRPVKAETIHDLARAGDLAGVRRKLLENPSLLNDKNPVMCQTPLHVAAGYNNTEIVKFLLNQQGTETVDLEAKNMYGETPLHMAVKNSSCGSTNLLLEHGAHIEAKANNGMTPLHLAVWHAIQAGDFSTVSVLLSYNPDCFVKDDEGKMPLNHIPGGAGSEKLLKLLTHHMEEQRKRKALMSCLEGKAMSEFEEAMSQIVGLQELKMQLRRWARGMFFDEKRRAMGLGIAKRRAPHMAFLGNPGTGKTMVARILGKLLHMVGILPTDKVTEVQRTDLVGEFVGHTGPKTRRKIHDAEGGILFVDEAYRLIPMQKSDDKDYGLEALEEIMSVMDSGKIVVVFAGYCEPMKRVIASNDGFCRRVTKFFYFDDFSTTELAEILHMKMKIPSDCSLLYGFKLHPSCSIEAIGELIAREITEEQRKQMNGGLVDTLLINARENLDSRLDFSCNDADTMITITLEDLEAGLRQISRQRQLQ

SEQ ID NO: 70869 - protein, 609 aa, Zea mays subsp. mexicana
  Clone ID: UC-ZMROTEOSINTE030G11_FLI.pep
NSGVSIHAPLLVESGQKASPGVELRGIEVDAHVLEQAKMVSALEPDSTPEVCADKLEPSGADDVGMIVVQEAASVDDHNRAQGGEAHCSEQIKMASIAQAVSSMALVGYSSSEDSMVDAAARVTDADFVDSKAAGVYRQETMPTQTTSTLPENMDSPATAATMVESKFAASSEHVAGPEPIDETSVMQVELATSTGDGCAADGHNLVSSETVVEVKLAQEIVVPSPGGSIEANNTSTISEVYKDTQSRASGEACNDGQSHGDENMKLGEAYTELQLAPSSGEEAMTCMCSELPSQEVEAPSSDPLENNEETKNEAAAQGSVNEDSAPRAENAKIDEADTEQELLPSGEATVDESSELLSQDEKVARKDAKMEESAAAAAAQRQLTTEVAHASENAKLGEDGTELQLPPPSMVDISREQLSQEVEVASSGPSGTDETAEMKRLNTEHSPGDETSKLVGTDLGLQLSPSGDAMVDISNKPPSCQDVKEAPSSDILGNDENSDTEKTPAALHGRLNTELAPSGRNTEFSEADTGKQETPVSAEAMVESSSEPRSHEAKEAPTPDLSGDDEKAKSARAAVVAELFGDATEGGSDQPLPSPREQGKEAEADGGF

SEQ ID NO: 70870 - protein, 611 aa, Zea mays subsp. mexicana
  Clone ID: UC-ZMROTEOSINTE031C11_FLI.pep
GNNSGVSIHAPLLVESGQKASPGVELRGIEVDAHVLEQAKMVSALEPDSTPEVCADKLEPSGADDVGMIVVQEAASVDDHNRAQGGEAHCSEQIKMASIAQAVSSMALVGYSSSEDSMVDAAARVTDADFVDSKAAGVYRQETMPTQTTSTLPENMDSPATAATMVESKFAASSEHVAGPEPIDETSVMQVELATSTGDGCAADGHNLVSSETVVEVKLAQEIVVPSPGGSIEANNTSTISEVYKDTQSRASGEACNDGQSHGDENMKLGEAYTELQLAPSSGEEAMTCMCSELPSQEVEAPSSDPLENNEETKNEAAAQGSVNEDSAPRAENAKIDEADTEQELLPSGEATVDESSELLSQDEKVARKDAKMEESAAAAAAQRQLTTEVAHASENAKLGEDGTELQLPPPSMVDISREQLSQEVEVASSGPSGTDETAEMKRLNTEHSPGDETSKLVGTDLGLQLSPSGDAMVDISNKPPSCQDVKEAPSSDILGNDENSDTEKTPAALHGRLNTELAPSGRNTEFSEADTGKQETPVSAEAMVESSSEPRSHEAKEAPTPDLSGDDEKAKSARAAVVAELFGDATEGGSDQPLPSPREQGKEAEADGGF

SEQ ID NO: 70871 - protein, 269 aa, Zea mays subsp. mexicana
  Clone ID: UC-ZMROTEOSINTE049F05_FLI.pep
IKSEAARAERESEGGADAESFLHPASAAVSDRMFLTRTEYDRGVNTFSPEGRLFQVEYAIEAIKLGSTAIGLKTKDGVVLAVEKRVTSPLLEPSSVEKIMEIDEHIGCAMSGLIADARTLVEHARVETQNHRFSYGEPMTVESSTQAICDLALRFGEGDEESMSRPFGVSLLIAGHDENGPSLYYTDPSGTFWQCNAKAIGSGSEGADSSLQEQYNKELTLQEAETIALSILKQVMEEKVTPNNVDIAKVAPKYHLYTPAEVEAVIARL

SEQ ID NO: 70872 - protein, 284 aa, Zea mays; identical to SEQ ID NO: 58591
  Clone ID: UC-ZMFLMO17122E04_FLI.pep

SEQ ID NO: 70873 - protein, 358 aa, Zea mays
  Clone ID: UC-ZMFLMO17241D01_FLI.pep
HSSMQSHSTATNPSGASLHMKFFTETVKRAMYNGIKPKILMRRAEGSPLVLGLDKDVLVELSRVVPAEVLRHAARLETLPALPVLPVRVEAVPERLDQLVGLGAVKSPPEPGVAERVERRHGVPEPAHGVHHRDGAVRHRVELVQPAGLEAGRHHQHVGARRDAMRHRHREPDPPAHLVGMLPLQVLQHSFQVGAPGAQHHQLHVLPRDPRHRVPDDVHALLSIQTPDEAEQRHVVAHFQAQLPLQGRLALPLSSVECLEGVVGVAVRPQVHVHLGVPLLVVDAVHDAIDLPVVRTDDVVEAPAAFHCLQLPQVAAADSHHPVCHLQTRGKDVGGSVQASPCTGIHLQDHGPGGRCYV

SEQ ID NO: 70874 - protein, 158 aa, Zea mays
  Clone ID: UC-ZMFLLIB3205472D11_FLI.pep
FSPKLKKKKTGSHEAESSAAPLTAMMSVKRHLRGPGAIPIGRPSIHPSPIDLKGKAYELLREKASSFLLDDFYRTPGGIQFEGPGSDAKPITLTIENQDYMGDIEILKEYLGKVRTMVKPGCSREILKAAISSMVSVTDVLTVMSHPLNAELPLYHFK

SEQ ID NO: 70875 - protein, 85 aa, Zea mays; identical to SEQ ID NO: 45311
  Clone ID: UC-ZMFLMO17340C08_FLI.pep

SEQ ID NO: 70876 - protein, 481 aa, Zea mays
  Clone ID: LIB3592-035-F10_FLI.pep
TSDPTMAADALRGLLPGVYAVLMVIAVASAASSDVSSVVVGLAKCADCTRKNLKAEAAFKGLEVAIKCKNSKGEYESKAMGKIDGSGAFSIPLSTDLHGADCVAQLHSAAGNPCPGQEPSRIVPQSSKGNFVVVPGKTDYPSKECASATLCGSIKKHLLDHFHKKPVPPKPKPEPKPEPEPKPENHPPTPTYGSSTPIYHPPSRQLFDKKHMFDHFHKHHDYHHFFDHFHKKPVPPKPKPEPKPEPKPKPQPEYHSPTPTYGSPTPIYHPPARHLFDKKPLLDHFHKDHDYHHFLDHFHKKPVPQKPKPEPKPQPKPEYHPPTPTYVSPTPIYHPPAETEMKYDKKHFFDHFHKDHDYHHFFDHFHKKPVPPKPKPEPEPKPKPQPKPEYKPPMPTYGSPTPIYHPPAKKEVAFDKKHFLDHFHKDHDYHHFFYHFHKKPVPPKPKPEPKPELKPQPEPEYHPPTPTYGSPTPIYHPPAKH

SEQ ID NO: 70877 - protein, 411 aa, Zea mays; identical to SEQ ID NO: 49056
  Clone ID: UC-ZMFLB73107H04_FLI.pep

SEQ ID NO: 70878 - protein, 300 aa, Zea mays
  Clone ID: UC-ZMFLB73402E11_FLI.pep
LTIILLLMLVSHSCAFDVIQNDLLPSIELVTKMIEDVELLEEKAKVAKHELSVAGTGILAKVEELREMITYAKEANDMHAGEVLGEKAILTTEARELLSRHQRLSDERNKYLVIIEEIHQILAERLVAAQQEIAAAEKENAEKEAAAQAVLDEQEKMMNSIVEESRKLQKEAEENLKLKEFLVERGQIVDMLQGEMAVTCEDVSLLKRVVDERLPLSKLQRSAMSSLSSSLHSSHHKSWTSSDKAIGSPDKHTLAEPASPVGKDLDGNECTVEVSDGNDSGEGILKRVDSKEDGDGWELC

SEQ ID NO: 70879 - protein, 407 aa, Zea mays
  Clone ID: LIB3607-049-C1_FLI.pep
PLLHPCAALSQLSRLRIQIRRHQRLLLPLLLHHHHQEVQQGGSGSGGGGDMGRDGGGGVAGGMSDSVLRKVLLSYFYVAVWIFLSFSVIVYNKYILDPKMYNWPFPISLTMVHMGFCSSLAVALVRVLRVVDLPTSPSMTPQFYTSSVVPIGALYAMSLWFSNSAYIYLSVSFIQMLKALMPVAVYSIGVLFKKETFRSSSMLNMLSISFGVAIAAYGEARFDVRGVALQLAAVAFEATRLVLIQILLTSKGISLNPITSLYYVAPCCFCFLLVPWAFVELPRLRAVGTFQPDFFVFGTNSLCAFALNLAVFLLVGKTSALTMNVAGVVKDWLLIAFSWSVIRDTVTPINLFGYGIAFLGVGYYNHVKLQALKAKEAQKKATQADEEAGSLLQERDGHSDRKSDNQA

SEQ ID NO: 70880 - protein, 112 aa, Gossypium hirsutum
  Clone ID: LIB3585-013-A8_FLI.pep
SIPKNLSTMLLRPVSSLCVQAKQGDNLICSLKGSPVTSSSSSALSFLPRKHGRALGVYASIGTNNHALTGVVFQPFEEVKKEELDIPIAPHLSLARQKFADACEAAINEQIK

SEQ ID NO: 70881 - protein, 346 aa, Gossypium hirsutum
  Clone ID: LIB3165-036-G11_FLI.pep
RHQRYQILTSFFFISQFKPMTETPFSKLPEDVVLNIFSKLEEDLASWASLACVCTRFSSLIRNTCLKLKCSKTIPAVSADLLSSSSAPPGGWASLHKLSVCCPGLLHAGVLLDNSDFGLERELGPDENYQRPAHSHLSTPSADPNSSKTECNSNPNMETDVPGSDCPWSLFDDLYFDTVYNASDSMDSYPSETMDTATIKTGREFPVCKRRKISRSLRSHLATGVRNLSREQGNKLLASRFRGDCLYICDWPGCVHTEEKRNYMLFRGVFKNFKKSRVWRTINDGNRSKIDLDCAFCSCKETWDLHSAFCLRRVFGYHDDGEPVVRAFVCENGHVSGAWTDLPLYT

SEQ ID NO: 70882 - protein, 478 aa, Zea mays
  Clone ID: LIB148-045-H7_FLI.pep
RPPSPPQGSPLGGLIGNPIMAEVLSGSHEHRLSSALDGHYDEKRKSNVEYTEDEKKAVIAALKKKALSASQKFRHSMKRGRKSSKVMSISILDEREPEEVQAVDAFRQLLVLEELLPSQHDDYHMMLRFLKARKFDIEKAKQMWSDMLKWRKEFGADTILEEFEFEEADKVAECYPQGYHGVDKEGRPVYFERLGQIDVNRLMQVTTMDRFVKNHVKEFEKNFAVKFPACSIAAKHHIDQSTTILDVQGVGMKQFSKAARELIGMLQKIDGDNYPETLCRMFIINAGQGFRLLWGTVKSFLDPKTTAKIHVLGNKYQSKLLEVIDASELPEIFGGTCRCEGGCMKADKGPWKDPEIMKMVQSGDGRCGSLGTASFEAPEKMICEDDTYPKKQALFDGETQLAGDEHSQSQKISRGRIEHPHVSPLHEELIPTSIHTPGSPYSCDVPMVEEAIDAICKSHGTPPDEKIAITKAIINVSN

SEQ ID NO: 70883 - protein, 699 aa, Oryza sativa
  Clone ID: UC-OSFLM202111B11_FLI.pep
SRNWRASADREMAGNEWINGYLEAILDSGGAAGGGGVDPRSPAAGAASPRGPHMNFNPTHYFVEEVVKGVDESDLHRTWIKVVATRNARERSTRLENMCWRIWHLARKKKQLELEGILRISARRKEQEQVRRETSEDLAEDLFEGEKADTVGELAQQDTPMKKKFQRNFSELTVSWSDENKEKKLYIVLISLHGLVRGDNMELGRDSDTGGQVKYVVELARALAMMPGVYRVDLFTRQVSSPEVDWSYGEPTEMLTSGSTDGEGSGESAGAYIVRIPCGPRDKYLRKEALWPYLQEFVDGALAHILNMSKALGEQVSNGKLVLPYVIHGHYADAGDVAALLSGALNVPMVLTGHSLGRNKLEQIMKQGRMSKEEIDSTYKIMRRIEGEELALDAAELVITSTRQEIDEQWGLYDGFDVKLEKVLRARARRGVSCHGRFMPRMVVIPPGMDFSSVVVPEDTSDGDDGKDFEIASPRSLPPIWAEVMRFLTNPHKPMILALSRPDPKKNITTLVKAFGECRPLRELANLILIMGNRDDIDEMSAGNASVLTTVLKLIDKYDLYGSVAFPKHHKQSDVPEIYRLTGKMKGVFINPALVEPFGLTLIEAAAHGLPIVATKNGGPVDIKNALNNGLLVDPHDQHAIADALLKLVADKNLWQECRKNGLRNIQLYSWPEHCRTYLTRIAGCRIRNPRWLMDTPAD

SEQ ID NO: 70884 - protein, 495 aa, Zea mays
  Clone ID: LIB4172-034-D4_FLI.pep
FIQGREVRRKMMQQEPWNAAAAMGLLRPTKSAPCSPIKPPPATMLRTHFHVAHKVPVGDTPYVRAKRVQLVDKDPEKAIALFWSAINAGDRVDSALKDMAIVMKQQNRAEEAIEAIKSLRSRCSDQAQESLDNILLDLYKRCGRLDDQISLLKHKLQLINQGHAFNGKRTKTARSQGRKFQVTLEQEATRLLGNLGWALMQKENYTEAEGAYRRALLIGPDNNKMCNLGICLMKQARVLEAKDVLKQVRPAAVDGLRGADSHLKAYERAQEMLRDLETKLIGRPRADQLDTNWLFDALLLGSSSSIWQPQPCTDHLLPPPVPAPATAPRGHFADENAGVSKKLAVLQENMLNVDAQPFYSLRVSSLAAKSHNTLPQRQQQQKPAPVHDPLGNLKRTRSGNCMDKAGAVVFKEQSIDENSGRRKSLSAEDRWPELPDHSAFDEALVAAVLAPVLDDEPTATEVKLPASCGTSPAVKEKIGKRLRIFQDITQTVNSF

SEQ ID NO: 70885 - protein, 359 aa, Zea mays
  Clone ID: LIB3279-207-H1_FLI.pep
ATPNATPIVRLLPHRAPPSLPSVPFNRWITPLSITVYPWLCSASGSATGPMAAPRAAAASAKQVTRQNFAEAVLELRAHLEACDYVAVAAQKTGAPTGWRRALPVDTAETAYLKAKLAAESFQPLQIAVCPFRQRNSYPSTLVAYPYNFHLFPRDELQLGMPSYSFSCQPCYLSTIANDGFDFNMCIYDGISYLSRVQESLAREKIFTRPHQLLSSPNTSVADSVFMNRIKSRIVNWRKRYADPSKKHDGSLVSSLSRLILGAETYGSRPSMSIDVCSDRQVQLVLEAVNHISDDLVSLVPHKAGVGRAVRVIFTNSKEDKNLLLMDIQKLEDEQNFKFRGFREVIDLLSSSQKPIISY

SEQ ID NO: 70886 - protein, 449 aa, Zea mays
  Clone ID: LIB3354-015-G6_FLI.pep
KEKKINGEEKETCSLLWMGSIQLGGSGGRSTPPAVGMYKNQLQELAQRSCFSLPSYVCTREGPDHAPRFRAAVTFNGETFEGPSGCTTLRQAEHAAAEVALARLSLRGPSTTLAARVIVSHRPSSSRALLLAGAELDVEVKPCPLCQDETGVYKNLLQETAHRAGLKLPAYTTVRSGPGHSPVFSSTVELAGLSFAGDPARTKKQAEKNAAMAAWSSLKQSTSSAQSRKHKPCAYLYASRGIINGPRHGLCSAGGSQGARRRRRAGARGCRQSARGAEAARRRRRKGGAASAEAQQQRLFFLRSSEPVAVQTPMAASDQYPCPAPAAEDGGPAPAAAGRPKDPAPAASATTAGVRLQGRRGGRAGADAGARHGARPGGNAAFTVLLRGACRLGVPPRQRAEDLRRGRVPRPGCERAVGDPGVRRPAAAADPGQGGKEWPGDTLRRMQEG

SEQ ID NO: 70887 - protein, 407 aa, Zea mays
  Clone ID: LIB3354-066-A4_FLI.pep
RRPAAMPPGRHRRRRARRRHGACRHGRGRRTGRRTAAARAARYSRSFCSPGGRGEHAAEPGARGGEHPGLPVLQQLQLWRAPAAAAVPPGGVPAARRTGASDDWLRTPAPARGHRGREGGEAAAARAGQPRVRPPDHPPPPGHPGRARQEGRRPVVAEREHEEGEGRGHGGVPVAQGGEQAAQRRGGEDVQEAGDASAAAGGRILGAGAAAAGVPVLSGTAGTSAGALCLGLLAAQRRRRERAARQPAAALPAALRVVLPGRSGPARVAIVRARAAAAGVPGPARRNGRGGHGRRPVLAHARPRGRQAERARRYRRGPGLRLRLRRRGSAERQGQGGAGEEAEEGPYQAQAHARRRPPRLLRAVVGAAKSLDRHCGHARHRGAGGDSIGFLLGGELNSFVISSVFFS

SEQ ID NO: 70888 - protein, 440 aa, Zea mays; identical to SEQ ID NO: 70339
  Clone ID: LIB3591-086-F10_FLI.pep

SEQ ID NO: 70889 - protein, 372 aa, Zea mays
  Clone ID: LIB3591-091-H7_FLI.pep
YEVLRFVEHSERQEHGSKRLPAMRGAWLDPPQPPAIWQSEGSAPNRTSSTGVPFNSGPVHPRPRVFDSTACRCSGKKLRTQLARAGEGAPREPGHAEAAAGRGRERVVGAGGVGAVLAVGLRAAERLPGRGPLQLQPEAAAPRGRRLRRRVEPHEAAVRAAELRGHPDAVGRGRAPRHEGAAERQRRASRRRGPRGVGVDVAERVGGAVERRQQQRAGAVEQHDGVGRAHVERQRRVQLHPAAAPLRHAPAALRHQRRRRDHQPLRRGRDGRDPVRRAVQRIEHERRRRRRRVGGGGAPDLVRRVAAAVACAERVRHGRRPARRAHPRMARRQHQQQREESDTHLGDGVEDPNAYLVSSRLSYVICMNYFFY

SEQ ID NO: 70890 - protein, 105 aa, Zea mays
  Clone ID: LIB3592-100-F5_FLI.pep
SSFPIIPGAAMQTISSSLPRFTHRPSVQGAMAAACICLQLSLPSNHSSSACPPAYRKRVALAPGRGNRLLCTASGASSSVVVTKEQEEGSPEPEIFSYKDDPNFR

SEQ ID NO: 70891 - protein, 154 aa, Zea mays
  Clone ID: LIB3608-052-A3_FLI.pep
KRKLRASSIKRKRNPDGRKGRRRRKKGRRRIAIAANRSWGTSHWRPGDGNGARRLCRRSVGRWPSVTYAARASGGTERWGPRGQVILFATVMFTLVQRVYLRSSRLLLPICVFDCKVALCQLLVLCSSSAPADPCINQHGLWIDGCCYSCQDLF

SEQ ID NO: 70892 - protein, 631 aa, Zea mays
  Clone ID: LIB3632-001-C4_FLI.pep
EQRVQGRGQVEQLTFLCSRTRGAPVFCLLCRALLKVQLSPMALSGRALLLFKLLLLLLACLLFLLELSRGKEEAFSLRNLPPFHKASSYPAGCPTTYDYIIVGGGTAGCPLAATLSHRYRVLLLERGGSPYGDRNVSYMQNFHIGLMNMAPDSPSQAFISTDGVINARARVLGGGTCINAGFYSRASPSFIQEAGWDEDLVNKSYPWVEDKIVQWPKIAPWQAALRDGLLQAGVAPFNGYTYDHVSGTKVGGTIFDETGYRHTAADLLAAGDASNLKVLLHASVHKIVFGSRQGRLKARAIGVEFTDEDGRHHQAFLNSNRDSEVIVSAGAIGTPQLLLLSGIGPKNDLKNHNIPVVLHNRYVGKGMADNPMNSIFIPTRSPPRQSLIETVGITEEGVFIEASSGFGQSSESVHCHHGIMSAEIGQLSTIPPKQRTLEAAQKYAHNKLNLPKEVFHGGFILEKIDGPMSTGHLVLTDTDVRNNPAVTFNYFSHPQDLNRCIYGIKTIERILKTNRFSELSADGAGLSMERVLNMSVQANVNLIPKHTNDTESLEQFCKDTVITIWHYHGGCHVGKVVDQHYRVLGVSGLRVVDGSIFSKSPGTNPQATVMMMGRYMGVKILRERLGRAAGV

SEQ ID NO: 70893 - protein, 266 aa, Zea mays
  Clone ID: LIB3637-203-H2_FLI.pep
TQINIKKNPFPNDHTLHSSAQPPFPLKPLHQPRVRERGPRHKAGSRQRARQPAMGKDCGNHGDDDFRQSCRRLLAILLTMALLVGVVALIVYLVLRPTHPRFYLQDAALRQLDLSNGSAPLLSTAAQVTVASRNPNGRVGVYYDRLDVYATYKYQQVTLASRLPTVYQGHGDVDVWSPVLAGPAVPFAPFLADALAKDLAAGYLVLQLRIDGRVRWKVGSWVSGHYHMFVTCPAYFISSGAGSGYRGAVGAHGLRFQTTTYCRVEV

SEQ ID NO: 70894 - protein, 344 aa, Zea mays
  Clone ID: LIB3912-046-D9_FLI.pep
PDSRGASAAHPSAMAPAAPDADAYDIPWVEKYRPSRVADVVGNSDAVARLEVIARDGNMPNLILSGPPGTGKTTSILALAHELLGPSYRDAVLELNASDDRGLDVVRNKIKMFAQKKVTLQPGRHKIVILDEADSMTSGAQQALRRTMEIYSNTTRFALACNTSSKIIEPIQSRCAIVRFSRLSDQEILGRLMIVVAAEKVPYAPEGLEAIIFTADGDMRQALNNLQATFSGFRFINQENVFKVCDQPHPLHVKNMVKNVLDGKFDEACSALKQLYDLGYSPTDIITTLFRVVKNYDMAEYLKLEMLKETGFAHMRICDGVGSFLQLSGLLAKFALVRETAKAP

SEQ ID NO: 70895 - protein, 107 aa, Zea mays
  Clone ID: LIB3959-004-D11_FLI.pep
RGGRLLRRRGPRHPHVHRDHHPCHPRPEHTREKGRRIRELASVIQKRFNLSEGGVELYAEKLNNRGLCDIAQAESLRYKLLGELAVRRACYGVLLFVIESGTKGCEV

SEQ ID NO: 70896 - protein, 569 aa, Zea mays
  Clone ID: LIB3150-018-B2_FLI.pep
EYNDNNMYSATTYWEKFVDQETKKVVNEVKLTALLSSSQHRQSIVAPDKVSWVEKPWIRLLSVDAHPTEPWIITGHECGHLAIRNHDTQMLLCSFKVSRGGVFCVKFIAQKQWFICSSGEGFIHVFSYETQEIQNVNNFRAYDDNSRWLPISLAVHPSRPYVLSWCRYDSEIIMKLWDWDKGWECARTFRSGGINVDHIAFDPKETNRFVATDCLDGKVMIWSLDSPEPEYHLPKTDFKGIMFLEFFTRYGRQCLIIAHEDHKAHVWDFRLRKFVSEKRKLLSREASVFLRPNVSLLLTPSSKGTCRFWDAKKFSFYGVIDNSAGGDVLGIACLMGSKTRFVIGQYYALTILHLDNALYQKDPRQSIEPQLCAHTRQGDTSSEEKYGEEMVWHHGPNFDWQHEPFDAAIMRASGGENAHEQYTLFDIMIDSTEVRAQRMSSSFCSMSLSSHQPKEQELEVARLREELRQRDEHHKVQQDYMFSFIQQQHAIIQELSQQHGLDVVLPEFRPPLPPMLPQLSPFLSTISQATTDASGTEPTGMAFVESFAYPPPATDSNHNSNNPCSDFGA

SEQ ID NO: 70897 - protein, 345 aa, Zea mays
  Clone ID: LIB4074-014-F10_FLI.pep
KRHRIVCRFKQPRTVTHTLCTLVSRVEEPTGCPAMSSPAAGTAAEPHVVEDCLGFVQLLSDGTVRRSTDYSMLRPIGRVPSDTDLPVQWKDVVYEDTRGLRLRMYRPTGAAAGETKLPVLVYFHGGGFCLLSFEVASFHAGALRLAAELPALVLSADYRLAPEHRLPAALDDAESAFAWLRAQAAPPSAAGAESDPWLAESADFARVFVAGDSAGGNISHHVAVRHASSGGGLSVAPLRLAGCVMLWPYFGGEEPTPSEAAFPADQPMDTALFDQMWRLALPAGATKDHPFANPFAAGSVPLRDLGAAFPPLLVVDPDQDPLHDRVVDYVARLKAAGKAVELVVF

SEQ ID NO: 70898 - protein, 304 aa, Zea mays
  Clone ID: LIB4172-002-A12_FLI.pep
RYWVHWLGTLAYFCAVAWTARMGSRLTLTSDMLPLVLLAVSSSRQVFSALATLTSCQFCIIHIMQCNGVWFFFFANSSAFVCLCNLQIILYMELYACCIEYLILESDNLSKLFPNAHLTMGNLTLDSHMLFAILTALVVMPTTWLRDLSCLSFISAGGVIASIVIVSCLFWVGLVDHVGTVESEGTALNLPGIPIAIGLYGYCYSGHGVFPNIYSSLKKSNQFPAVLFTCIALSTVLFAAAAIMGYIMFGESTESQFTLNLPPNLVASKIAVWTTVTNPITKYPWTSTSAFCVHLFPYLTSNIT

SEQ ID NO: 70899 - protein, 78 aa, Zea mays
  Clone ID: LIB189-028-A6_FLI.pep
PNSKHCTNSLYMYVAQLSLSIYITINYPNNLFLPPIDRCVVPSSMNVCSQPIHPLNICTSSNNNNRSLSSTIISYLNH

SEQ ID NO: 70900 - protein, 106 aa, Zea mays
  Clone ID: LIB3116-010-A4_FLI.pep
MVSCTKVEELQADVASMDTEVSALMKLFRKITESDRAPPPRDRNDDLSLECEPVHLDDTVDDIDLEKMEKEMSAYVSALSAAKENPTDEFMRAVADARLRLQAVVL

SEQ ID NO: 70901 - protein, 243 aa, Zea mays
  Clone ID: LIB3060-052-C9_FLI.pep
GNSSGAKIASPVARNWRRRRRGCGTREKGQEPAGVSPAEPDDEEGSSMAASHLRQRLGWGGRLLEASPTTRTRRHEGQEEWAASQVSMQATWKAWPHCGSTRTSSRGANSERQMAHSARTSAAPSAARAATASSYARLGSALSAFFLSPLLAAAGAARERAHRATEASPTTQMSAHRSAARMTTTSESTASGLGGSAAGSVGYCTELVCRSRRAGDAICRIKADVRMGAGADWSSVVPCRAVP

SEQ ID NO: 70902 - protein, 146 aa, Zea mays
  Clone ID: UC-ZMFLMO17072D11_FLI.pep
FARVLILPPPPLPAASGGEDDAAWVRAISAATKSTSAPKTLTLDGTVKSSMGGLPSAALLERFATSLEELSIAGVRLSSLTGLPRLPALRCLSLPDNRLSGSAALAAVAEACGATLRHLDLGNNRFAEVQELAPLAGVRVESLDLF

SEQ ID NO: 70903 - protein, 267 aa, Zea mays
  Clone ID: UC-ZMFLMO17058A01_FLI.pep
RRANYFCSRIYIQRVCSWKEPCIVLCPHWSLRLGPAVHLLRRWHADKRCLLVVEQGNGAELSLKPFMPLAIQVLECSFLSGVRAGKIDPLLGVLKPKFVMLPEGLKSRCSIKGVPWSFLYYSKGKTIELSNLREDIEVHLATDVAFRLQPRQLNETTAVARLRTKLLVSNGRYQLASAEKQPDQSKRHLLHCSTIDPGRLLSALREKGMVCSFAADDSPTASESSVLVTSPGDALVRITPDTTVIYCDDERTSNQIYDALSSVCKGI

SEQ ID NO: 70904 - protein, 99 aa, Zea mays
  Clone ID: LIB3078-033-D12_FLI.pep
AGDPCLCELEWREKKKEQRRANDRDAGEAVGRRGGRASPGDGPREAPQGHHRPPARRRRQRNNYMHLLICWIEYIEHLCNTFGENTGHLYILLSLSIPV

SEQ ID NO: 70905 - protein, 78 aa, Zea mays
  Clone ID: UC-ZMFLB73233G11_FLI.pep
TVQSYAGFKQLAGCHRFIIESLVAFHFFLKYRMHHRFNFTHIFFLYFVACHQNLFHHAINKKIAQFLTGKVMFFTCYL

SEQ ID NO: 70906 - protein, 99 aa, Zea mays
  Clone ID: UC-ZMFLMO17012D09_FLI.pep
EGAEGSTRDCTAGRVAPAIMPDLIHLEFNVPIAALYKRTDNGCSCYSLGWECLPSLHKIKARVDYDGTYTADFEKPVAEMMQAAKLHPNQPIIEMVTQF

SEQ ID NO: 70907 - protein, 98 aa, Zea mays
  Clone ID: UC-ZMFLMO17014A02_FLI.pep
SSVLARNRLEKVPVEGSTVGLSSTPIHGGATFVCNCFECLGHDEVNIGGCGHHWHRNTTSKLWDSALRVGKGVILGLSTETICSHEEHRLELVGRKKT

SEQ ID NO: 70908 - protein, 164 aa, Zea mays
  Clone ID: UC-ZMFLMO17019E08_FLI.pep
INASDALALYRLEYKSSDPKKGAAKSKLASPLNEIRQRMGRLTADSPVENKRTARSKPKANQNQKDTNANTRPHVNTPNQVNAPNAYQTTQQVNQMAFLNGNVVYGPHLPHSESVVYGPHLPHSENVVYGPHLPHSENVVYGPHLPQGYSAEGSSFFWNPSDGT

SEQ ID NO: 70909 - protein, 124 aa, Zea mays
  Clone ID: UC-ZMFLMO17019F03_FLI.pep
NSSKAHNYITNVSYYSSYCSKAHNYITLAAPELISHKSTKATLMLQAVKPSDNHSSFLYPPILRYKLSLSRTPSTRRCCSLMHQLQLVQSRLIIIKLMAHINLEVLSKGLRLSCPLEVPFGSIT

SEQ ID NO: 70910 - protein, 125 aa, Zea mays
  Clone ID: UC-ZMFLB73072A01_FLI.pep
PNHRRSTTERRAQPCLLETNWHRRRPPRKRKRQKKGAHLALGLEAAVGVHPEDVGVQHRQHLVDAVGDLLSRRDPGGVDVVDTGADARAVLDALAEHGEQLLVGPRVLNGDHVRVHVDDRVDDVV

SEQ ID NO: 70911 - protein, 175 aa, Zea mays
  Clone ID: UC-ZMFLB73073D06_FLI.pep
VVEVPAEEEAPKPKPKNPLDLLPPSKMVLDDWKRLYSNTKTNFREVAIKGFWDMYDPEGYSLWFCDYKYNDENTVSFVTLNKVGGFLQRMDLCRKYAFGKMLVVGSEPPFKLKGLWLFRGQEVPKFVMDEVYDMELYEWTKVDISDEAQKERVNAMIEDQEPFEGEALLDAKCFK

SEQ ID NO: 70912 - protein, 108 aa, Zea mays
  Clone ID: UC-ZMFLB73073F11_FLI.pep
VGELHFLGRHRRAVPVAELPGARIPAGDCLWACCRVSLWVRPFFPWVAWPWLPAPGTTRPAGRCVLEGAAAGSWCACNCQPNRILDYVWLAMSLILVGVYRSSSIIAS

SEQ ID NO: 70913 - protein, 139 aa, Zea mays
  Clone ID: UC-ZMFLB73073H11_FLI.pep
ISSRCRFLGTDGKLDQLIINWRKNRKKWDTKKKFHENLAAVLDFALPSPPSVGDKAKDDEQADCGICYAKHLPVDDELGAHSGCATDYMCENPSCSRAFHSVCLRDWLRSITTTRQSFDVLFGNCPYCSDPVAVKITGH

SEQ ID NO: 70914 - protein, 82 aa, Zea mays
  Clone ID: UC-ZMFLB73075B08_FLI.pep
SRMSIFLLQFNTIMPQNNKSKKKKNSLALQVQLLHKKNRRSYNIPHPNADENQLVHRNNSMIASKRPCANATPPSKQPQGGY

SEQ ID NO: 70915 - protein, 275 aa, Zea mays
  Clone ID: UC-ZMFLB73075G11_FLI.pep
RIATGLSGNTDPSALTQTRSICGRCYHRILFLFDFFSAEDVAAANGAAGAVLFSEEDLREVSGVRWGEDFVEVTCGCTSHRYGDAVGRLRVFASGDLEINCECTPGCREDKMTPAAFEKHSGKETAGKWRNTVWVMVQGEKVPLSKTALLKYYYLAHKSGNGSHKGRNGRPSHRDEFICCAGCGKERRFRLRSKEECRVYHDALAKASWTCADLTTDRVTCDDEEERASRKVLRGCSRAPSCTGCMKCVCFGCETCRFKDCDCQTCVDFYRNSKE

SEQ ID NO: 70916 - protein, 312 aa, Zea mays
  Clone ID: UC-ZMFLB73078D08_FLI.pep
ELQETVQYPVEHPDKFEKFGMSPSKGVLFYGPPGCGKTLLAKAIANECQANFISVKGPELLTMWFGESEANVREIFDKARQSAPCVLFFDELDSIATQRGSSVGDAGGAADRVLNQLLTEMDGMNAKKTVFIIGATNRPDIIDPALLRPGRLDQLIYIPLPDEQSRLQIFKACLRKSPVAKDVDLHALAKYTQGFSGADITEICQRACKYAIRENIEKDIERERRRKDNPEAMEEDEVDDIAEIMAAHFEESMKYARRSVSDADIRKYQAFAQTLQQSRGFGSEFRFSDQPTAAAGAADPFASAADDDDLYS

SEQ ID NO: 70917 - protein, 107 aa, Zea mays
  Clone ID: UC-ZMFLB73083B06_FLI.pep
ERPHDAFLARGVSRTDAVASVGCSAIASKKLYMIPAADSDWRMPASFFIHIVHQGPVLTSDCCKERMRRHTQRSQFIRDLEEARKDEAAAVPCPTVLPVSCRGVLLS

SEQ ID NO: 70918 - protein, 198 aa, Zea mays
  Clone ID: UC-ZMFLB73084E07_FLI.pep
KSAVVSRERATQKKYTCRVSVLRQQLPGRGLCLSEGKALFPLPGAGVGEGHRGREPMDSNNLLAAWPVLGPGVAGAVFGAGWWFWVDAVVCSAAAVPFLHYLPGFFASFAALMFNCVNREDIGDGYYSPYDDSEWRVKLWLFISYVVSFVSLAGAVGFLVQDALTDTGPSAWTGSAGILQCVFVLVSGLIYWTCHSED

SEQ ID NO: 70919 - protein, 81 aa, Zea mays
  Clone ID: UC-ZMFLB73085H04_FLI.pep
NHIIYVAPVSAGVQFVKKQSLLKLKSHPAYNLNSAFIHRGFTYTNTANLALQANDPQDLLTPQLKVHQVLVGCKEKDPKKL

SEQ ID NO: 70920 - protein, 150 aa, Zea mays
  Clone ID: UC-ZMFLB73086E03_FLI.pep
VQVRACADRDVQRVGPDREVRAADPVLETDLPEGHAGGCLGAVPVHPGLLLHGQIRRPGVHDLPNLLPGAHQRVPHRVCAHGGAQGVQGPRAERSGQRARRLPPRRPLLRRRARLALAHWQGLVSTVFCAWVFEGDRLDFRSLFRPLVFA

SEQ ID NO: 70921 - protein, 553 aa, Zea mays
  Clone ID: UC-ZMFLB73274F12_FLI.pep
KNRSHVGKLKMSRTSSGRKRSRSNAQKPPIWQEVERSSFSVGDSMDILNTSANDLKTHELDEDPEVESMARMFSSSNTSSLLLPSSDSAYSSNYCGANVLQDSYLKLRCEVVGASIVKSGSGMFAVYSISVTDANGNSWSIKRRFRHFEDLHRRLKEYAQYNLHLPPKHFLSSGLEVSVVRERCKLLDIYLKNLLQIPIVSSCIEVWDFLSVDSQTYIFTDTLSVIQTLSVSLDERSNGKNIKALNSSGALNGNSISGGQSLHGHIDDTVHKDSDIACDGLRFRKGNVNKNLGNGVSHTTDSVSNTTANHYQDNSGSDPEQNDHSFSIDSLNPKKLRSTETNDTSQIPESGGFSVSPNDWMAPNLSVPLFHLVDVVFQLQDGGWIRRQAFWVAKQILQLGMGDTFDDWLVDKIQLLRKGRIIAFAVKRIEQILWPDGIFMTKHPKRNSPPPPPGAQSNGMGNYLSDEQRIEAAHRANFVRELIIDKAPSPLVSLVGRKDYERCAHDIYFFLQSPVCLKQLAFELLELLVLSSFPELDGTVRKWHEDKEQFCAQ

SEQ ID NO: 70922 - protein, 422 aa, Zea mays
  Clone ID: UC-ZMFLB73282H09_FLI.pep
GHVLPAAPPGRPRRHGGGGVRARARGGRRRRCLRGGEIVQQPRVPDVRRPAPPRRVAALVLRRRGVVPVGGVPGGPAVRRRVGRLGPEPQGPEHGRHAGAGGRPQRRRRRRRRVRGADLQHLRHLARLPGGPPRLPDVRPRRRARRRRPRPDLRHAQAPERHGRRRGQPGVAGGALLRRDPDTRNERRQHERQGHAEPPHRRHRRRQRWGQYPQEEKYARDPERRELGPPAAHGRHLRSVPQDVQVRRPGLVLPPRGVPAGRVRRRGVRLGHRHPPREPVQGDHLLAPPEHRDHGLRPRHSAGLCAVLEAEEGAQVPGVLERVPPLGGVHGDRAGRRQRLQGHGHPGRGAEVEDGLRRRRLRAGRRRRGAGGRHVGRRAAAPEAGGKDLQRRPLAAVYVIYIYIPHRRRRRGRLTIYLSDLI

SEQ ID NO: 70923 - protein, 388 aa, Zea mays
  Clone ID: UC-ZMFLMO17195H12_FLI.pep
SSGATRPTNAMKEEGGGGGDAGFVRADQIDLKSLDEQLERHLTRAWTMEKRKEEASAGAGAGARQHQQSRRPRREDWEIDPAKLVVKGVIARGTFGTVHRGIYDAHDVAVKLLDWGEDGHRSEQDIAALRAAFSQEVSVWHKLDHPNVTKFIGAIMGARDLNIQTENGHIGMPTNICCVVVEYLPGGALKSFLIKNRRKKLAFKVVVQIALDLARGLSYLHSKKIVHRDVKTENMLLDKTRTVKIADFGVARLEASNPSDMTGETGTLGYMAPEVLNGNPYNRKCDVYSFGICLWEIYCCDMPYPDLSFSEVTSAVVRQNLRPEIPRCCPSSLSNVMKRCWDANPDKRPEMAEAVSMLEAIDTSKGGGMIPVDQRPGCLACFRQYRGP

SEQ ID NO: 70924 - protein, 132 aa, Zea mays
  Clone ID: UC-ZMFLB73181B02_FLI.pep
KRRTPSSYIIYWSGSHQQTSSGMLCRPGSHSPPACIRRAAASAARRTLRRRSDCSLCSAPGPAAAAARCRWRSLLAAATRPPSPSAATICLSSRLLTTILTRTAPPTSSLDRRRPPWCSRSRAWAAAALDCG

SEQ ID NO: 70925 - protein, 210 aa, Zea mays
  Clone ID: UC-ZMFLB73180F08_FLI.pep
VTCCLRFPGQLNSDLRKLAVNLIPFPRLHFFMVGFAPLTSRGSQQYRALTVPELTQQMWDAKNMMCAADPRHGRYLTASAMFRGKMSTKEVDEQMINVQNKNSSYFVEWIPNNVKSSVCDIPPRGLSMASTFIGNSTSIQEMFRRVSEQFTAMFRRKAFLHWYTGEGMDEMEFTEAESNMNDLVSEYQQYQDATADEEAEYEDEEAIQDE

SEQ ID NO: 70926 - protein, 698 aa, Zea mays; identical to SEQ ID NO: 64737
  Clone ID: UC-ZMFLB73003A01_FLI.pep

SEQ ID NO: 70927 - protein, 773 aa, Zea mays; identical to SEQ ID NO: 65112
  Clone ID: UC-ZMFLB73015D08_FLI.pep

SEQ ID NO: 70928 - protein, 134 aa, Zea mays
  Clone ID: UC-ZMFLB73016E03_FLI.pep
LPDTPMSFKLIFSSAIIFSAICFGPINILCTLPIYSWDCNCKACNSSHMCLVPAVVAMEQKIHVNPLKILSQTKCTHIQNSSSSCPNQLRRIRMPWILRGRSPPIARSLCKLMQMRQLPRLRLLASSGGHYTPH

SEQ ID NO: 70929 - protein, 667 aa, Zea mays; identical to SEQ ID NO: 65119
  Clone ID: UC-ZMFLB73011H01_FLI.pep

SEQ ID NO: 70930 - protein, 285 aa, Zea mays
  Clone ID: UC-ZMFLMO17211B04_FLI.pep
ASLSLGYFFTAGHRIYLRRGCSPQPKPRPWAMACSSHVLAGAPPSPMPQRSSSHPLPALVLQLGSPPCRTSLPLLGVPSARFQLRVRAPISHGRVPWCSGVISSVPALGFPFFHGARPAVELPCARVLLPCSHRRAAPCVHPWLNASPWSASDSLLLGQNSSSPSHRSSLFSHGHTVVGTGTSWSVHGRSLRRWCSAINPLRRARSCPSHRARIPSVSPPSSSLAKSSPCCRALRPRRVPSPSRSLSQCTWRCLLRKNAKPCGVRWTIRTEERGRSREVKSNWSW

SEQ ID NO: 70931 - protein, 111 aa, Zea mays
  Clone ID: UC-ZMFLMO17207C03_FLI.pep
ANPNANPWFMGTGVPLANARWGNYAFSAAFGGLFPMLSFQVHGFPDAAAYAQPAGFHYGYGHGHGFHGGHMGHAHGVHRQAPLGQQQQADIYLKALLFMIGILVIASLIAF

SEQ ID NO: 70932 - protein, 356 aa, Zea mays
  Clone ID: UC-ZMFLMO17259B08_FLI.pep
CCGEHGSPQESTNSYIKEMLQVSKFLRVINLQGIDIGESLPTAIGNVAHLQYLGVTACSLKYIPSTIENLKKLQTLDVRHTFVYKLPEAFWSITTLRHVFGEGLFLPKQVGDLKHLQTLESIDPDKDNGWDSSTFEKMAHLQSLHVWDSKYNGVNAEALSAVIDKANFLEHLDTLTLDVHDIPLSVFTSSSLRRLRTLILDGKLDMLVLQSKEKESKFHFPNISFLSLAKTEVSQNFINKLGKLPSLTTLILDIKSYKDDQDQLAFQAGGFTSLTKLRLSDLEIVKLEIKKYALPELTDLEVESYYDDIEIEVYGEHEFVKKIEQVDEYLYGRITQVPVAPKKIGQLPSMKQRVAS

SEQ ID NO: 70933 - protein, 183 aa, Zea mays
  Clone ID: UC-ZMFLMO17214D09_FLI.pep
CLNLCGCVKAVTDRALQAIAQNCGQLQSLNLGWCDDVTDKGVTSLASGCPDLRAVDLCGCVLITDESVVALANGCPHLRSLGLYFCQNITDRAMYSLANSRVKSKRGRWDAVKDGLANLNISQCTALTPPAVQAVCDSFPALHTCPERHSLIISGCLSLTSVHCACALHPHRAGRALMANHAY

SEQ ID NO: 70934 - protein, 206 aa, Zea mays
  Clone ID: UC-ZMFLMO17269C12_FLI.pep
RTPTTKNSAAVHPVHQTSDRNWEGLIGLIRLILVVEFNQLIAIWDSGFVILLPQSSCGPETRITMVPGIATKTAARPVAWAPQPRNMFVFGAGFVGRYVSERLLAQGWQVSGTCTTVTTKRELEMLGMNASVFDGTEDSLENIHSLRQATHLLISIPPIPGVGDPLLINLDEDLRRILGHGNLEWLCYLSSTSVYGDCGGVLVDEE

SEQ ID NO: 70935 - protein, 97 aa, Zea mays
  Clone ID: UC-ZMFLMO17013A08_FLI.pep
FRSLTEVNWLTQEHGGELAFSRTRRCCTQTTDMDGCSSTFLNKPIHVMFGKCKPHAYPLDTVIDRSFTSCQYSVFQCQVTYSEQQLEICSCTDSSRS

SEQ ID NO: 70936 - protein, 725 aa, Zea mays
  Clone ID: UC-ZMFLB73161D01_FLI.pep
LNHMGKSFHTGPDKVNLSSVTQSEASLYPIDPLEQGDFSPLIKQNFQPLHSSDEVPFFKEHSSCNDFLRNKTEAHFLEPLVCSNPQEVYTTSTDQMGAEQSQSGCGQKYNDARVQTASHERHQSSTLCDNQNSCSVVLQGVASDSTQKFVDTQKGPSKARQNGSKAKVRGRPKKKTDDWDSLRKKVLSNGGDKQRSHDARDTVDWEAVRQAEVREISETIRERGMNNMLAERIKEFLNRLVTDHGSIDLEWLRDVQPDKAKDFLLSIRGLGLKSVECVRLLTLHHMAFPVDTNVGRICVRLGWVPLQPLPESLQLHLLEMYPMLEHIQKYLWPRLCKLDQRTLYELHYQMITFGKVFCTKSKPNCNSCPMRAECKHFASAFASARLALPAPEEKCLVTLEDPNVVEFSHQTYINSGSVGQLEWSANYPKHAVSGNHQPIIEEPLSPECETENIEAHEGAIEDFFCEESDEIPTINLNIEEFTQNLKDYMQANNVEIEYADMSKALVAITPDAASIPTPKLKNVNRLRTEHQVYELPDSHPLLEGFEQREPDDPCPYLLSIWTPGETAQSIDAPKTFCDSGETGRLCGSSTCFSCNNIREMQAQKVRGTLLIPCRTAMRGSFPLNGTYFQVNEVFADHCSSQNPIDVPRSWIWDLPRRTVYFGTSVPTIFRGLTTEEIQRCFWRGFVCVRGFDRTVRAPRPLYARLHFPVSKVVRGKKPGAARAEE

SEQ ID NO: 70937 - protein, 453 aa, Zea mays
  Clone ID: UC-ZMFLB73149F09_FLI.pep
GGRNITDAELERLQQALRILSDAEKQIRLSSERSTWFTAALLQLGSGHNSEITQSRSSSKQSAKATSETMMEAMRESSASRSTAHHLSTFPDSKKIVDLKTTSGHSSPHASLSSRMRHNENMIYAEHMSVDRALLDSAQTSISSEQKGMHSGISDNLTRIWMKCIENCHSKTLRQLLYDHGKLTSVKECEGTIVAFIAFEDNDIKFRAQRFISSIRNSMETVLKCNVEVRICLMQEFLAGGLKHETYPDETAESDVLSCSTNSERRKGVLNLSGAGGVQPNNVPMIISEETSGMHRTRGQDVSIEQLKVSAFDEQRLESAWLQAAEKPMPGMLNQGRPERNQILPQNGGQHHGRSSMATVVPSRHVDKDLSNELKALKISDSHGPHNGQDVQMESGYAISPSLLHRNNHLANCDNESVVSESGAPGCHGLFPCWKTEKTKRRKGKGQTRLRSS

SEQ ID NO: 70938 - protein, 306 aa, Zea mays; identical to SEQ ID NO: 68852
  Clone ID: UC-ZMFLB73160H10_FLI.pep

SEQ ID NO: 70939 - protein, 422 aa, Zea mays
  Clone ID: UC-ZMFLB73159B11_FLI.pep
RIAAESIGAHGRTPAARPAATASPRMLRACTRVGGAGAGGCGRRERLMASLIPFLPPSPYSTHLPRQPQSQPPTAATQPAAAARPSRFRLLFARAAAQRQRDSEPAPAAEERRSLAVRTGELFLGLAALLLRGTGAERSGGAAVEEMEARDGVVWEQRPQDVDAERRRRELTSPGFSFSAAGLLFPYHLGAAQCLMDRGYITETTPLAGSSAGAIICAVIASGNTMQDALQVTKVLADNCRSKGTAFRLGAVLKDVLVEFLPDDLHIRCNGRIRVAITQLSWRPRALLVDQFDSKEDVINAVITSSFIPGYLAPRPATFFRNRLGIDGGLTLFMPPTSAAETVRICAFPASRLGLQDIGISPDCNPENRASPRQLYGLSRIMLSLSPRMINPLSLIELSSVCPEVILVSKAEFMRIHACNIL

SEQ ID NO: 70940 - protein, 396 aa, Zea mays
  Clone ID: UC-ZMFLB73180D09_FLI.pep
ILMFLGVLTVVYICFVSSNCWTFVSLYCLKRSHKEKRSSYAPESGVRYDGVYRIEKCWRKIGIQGKFKVCRYLFVRCDNEPAPWTSDDHGDRPRPLPKIKELQGATDITERKGRPSWDYDDKDGWKWVVPPPVSRKPVLSGDPETDKQIRRATKRVHLSVAERLLKEFACSICRAVIKEPLTTPCAHNFCKTCLLGAYDSQSSIRERSRGGRTLRAQKIVKTCPSCPTDICDFLENPQINREMMELIETLQRKAVEEAKMTSDDAEECGDGDSEENDGDLVKGEDVSGLNEGEQDSADADANVEGSVKIVVEIKEEGKDDKRSKMGATEVVDVLVDEDAVKQTKKRKVDAEAGTNGGKRMKSSSTVEEVAVCVTPVKRSRKSGDMDDERNGSPAVS

SEQ ID NO: 70941 - protein, 223 aa, Zea mays
  Clone ID: UC-ZMFLB73152B05_FLI.pep
LVASADSGSGVIDMNWFETLNRIKNIPVKQTSEDNLETAVTLMKSTYNFYRESPCGTFPSGINLYTVTPSQAPIEGLPPTAAVVETLDLSIPRKLLLWVYTLVHGRYSNISSVVKYCDEMKLRSKRGTPAASASSQVVQPVSHSTVSSQVVSKEKSSQVEPAEAAQNPSDLAATCVPAYQEVGGASASQSAIEAQKATAAASQLTRSGSSRAMENAQDGGERK

SEQ ID NO: 70942 - protein, 369 aa, Zea mays
  Clone ID: UC-ZMFLB73151C11_FLI.pep
KFKDVVNWLRQNQAGSIVVSSPSSLKDDKSNLPAADDSKLLVQPSSDNKQKAPIMASSSSSFQNSSLPNLFSSPSQQKTPDYSGMFADKKNTSSDSSKPAFQFGGNNVIFGGKKDAPVDSSKPFQFGPNNGIFGDKKDTPSDSSKPFHFGANKGIFGDKKTTSGDSSNPFQFGANNGFPTSNAPSIFSSVAQSFNPQSPPLFSMNQQSVLPGNQNTSEASADADEDAEPEKPSSPSVKKAEEKGVVVVHETKCKVYVKHDDATKGWKDIGVGQLSIRSKEGTEKASKESTPTIVIRNDVGKILLNALIYKGIKMNLQKNTVASIFHTSDAQSSESAGDTVVARTYLFRLKNVEEATKLSTAIKENAPSD

SEQ ID NO: 70943 - protein, 200 aa, Zea mays
  Clone ID: UC-ZMFLMO17269C02_FLI.pep
TARPPILSIYIHSYHGGGIPGGRNPMAGRRGRRRRGGACLLGPSSSQGSHAGRHLSAEAAVPPLPGVVVGALLRHHARRPGNRRRRRWCNKRDDCEPRLGGRAAARPCRAAEEAGARPDGGLLHVRWQGEDAQRARPPRRPEPRPQDDRLHRGVNECVPSHRMDPEDSFQQANGRSTRSSLAEGYTTIQEDDDCSRVIIY

SEQ ID NO: 70944 - protein, 363 aa, Zea mays
  Clone ID: UC-ZMFLB73150G10_FLI.pep
LSPTLLLSMDWWLGFHPTRVLHTQQLAPSPTSQVLRVYSVPVLVPPHLGPLLAEPLPAEADAAELAGAIAELADGDGHAGLVLLHPLRGLQVARVAHGHGRLVQGRRGSARRVEVRSGRCRRRRGVEQVEVVRPHVVRRVRHRTGRWVARGSGRGSRRGRGPARGGAGDRLLPAHGCRRQDHRAVPRRAGAGVERRVSLRGIVDGGRRRRDALLPAERLHVVELHHAVVVLSPPPLRLPLVEHVAAEADSLYVVASAAGGGDEGDLDAGLHLGRPLPRHAVLFNDDNLFILLIVLLPDARYPARARAPDVLREATADLGSRGGAGRVRRRPHVAVALGGPVRREARVVNDARVRGQAAVAVEA

SEQ ID NO: 70945 - protein, 228 aa, Zea mays
  Clone ID: UC-ZMFLB73182G10_FLI.pep
LSGFEKYYKSVGVDIKLDPNMKVPCSIVHGNQSCTGHVFSFLLQAYGRAVPVYVPVYLVPALVVHRQHLMKRPYSIIGKSFLGVARSSLFLSVYCASAWAWTCLLFRIFRRANTPLVILGTFPTGLALLVEKKSRRIEISLYCLARAIESFFTWMTDAGLCPPILQIKRADVVVFSIATSIIMHCYAQEREVFRSKYLNVLDWVFGVPPPPDSEDKNCYLPDEAKKCQ

SEQ ID NO: 70946 - protein, 169 aa, Zea mays subsp. mexicana
  Clone ID: UC-ZMROTEOSINTE116A09_FLI.pep
RPLFPYSWEEAIGESLLAQADSGRLKEETFVMCKTLKGAGKFLVLTEKLLLLVSSPYLVDLGSPRFIGVPPDPQWSIDTEMHLKSVVHLDRSQEVVNIVGSNGQTSPRDKRGGTRNRVMSSAFVPLFHLSIELPNEEDAEGTVQVLQALIEKGKARRWDKNILHRSNIS

SEQ ID NO: 70947 - protein, 336 aa, Zea mays
  Clone ID: UC-ZMFLB73365D10_FLI.pep
GSKKIIEDCIASSENLPPDGTTNVVEVTANDASSSKNNLSFGYSSTKVVIEDHAELSGFNKDLAGSNVFGTHSSSVEAVQSRQLDYSHFISLPLALHPDLVNKLNYFQSSILGEENSNKDGSQSEGSIGEMDYDHKQAEAKMGAKGSQSDFGIDKSIFIKPETFHLTVLMLKLWNKERIDKASDVLQSVSTQVNEALENRPISIQLRGLTCMKGFPAKARVVYVPVLEVGSEGRLAHACKVITDAFIKAGLVFERDVRELKLHATVMNVRHRKSRNKRNTWTDSFDARGIFGRFGKAEWGAYPIHEIHLSQRFKFDRSGYYYCCSSIPLPAEMHTE

SEQ ID NO: 70948 - protein, 439 aa, Zea mays
  Clone ID: UC-ZMFLMO17292C12_FLI.pep
TKLVWNLSLWLSDLKFEKSGDVVPISTVGTVLKCLSKAPRLPTTDWGAIVRRCIKAEAQISHKLTNQEDPKILKEACLYLTLAHAAHISPLLQFLDDLTDILRFQRLDINVQSILLKHLLHLMKLFSDSRLDKLHEDFTEYLYSPTSSYLNYSSEQKSMLRMSFWEGIYTCLVDVSEESGVFSFIEKCIQCLLPLLTLHSDGQPEFMKEWSVAILCLTNAQKKWLDDILQIRSTALVNEGHVDVAKKIILRARLCATGCGSTHELGNIKTAILCTKADGVWWSVLVEITSALNSAENIIKRQWLLDALDIGCVTAHPSTVLCFVGLLCGSCCIYMPLLLVNSINVLSDLPVTLPAFLSTIVSDDFRNSVADRLWLLTTDIYTWAEQLAHGHDQPGHDRIHRSETEIATFLANILLSTCITVEDYLSVDKRLKLANLEAL

SEQ ID NO: 70949 - protein, 608 aa, Zea mays
  Clone ID: LIB4704-004-G1_FLI.pep
SLVTLIAMEPRHGRSAFTISFSNPNGFANQCTAIPAVSYSAAGSSQLDVLAPTRGCKRKWTELALGLGDTSSSDSSKQSIGTGCTVSSLKGSDDVSCMDYDISFKLSLGNEDTSKLHKQACGSKRTMEKPRLDLKLSLAPSQSDVTDADLIRGSAPQDMFVQPYLMSSVPTVDEGSTSARHPSGGMVVSFLNQAGISPNQLPPLNSHLVQGPACSAPTVLQLPKSSAATSSGFVRPQQRNGSTKICSEPGCAKGARGSSGRCIAHGGGRRRQKEGCNKGAEGRTIFCKAHGGGKRCERLGCTKSAEGRTDFCIAHGGGRRCSHDGCKRAARGRSGLCIKHGGGKRCQTLNCTKSAEGRSGMCIAHGGGRRCQYAGCGKGAQGSTNFCKAHGGGKRCTHPDCSKGAEGSTAFCKAHGGGKRCSADGCTKSVHGGTQFCVAHGGGKRCVVEGCGKSARGRTDRCVGHGGGKRCHSAGCGKSAQGSTDFCKSHGGGRRCSWGHPGSDLGSGGAPCDRLARGKKGLCDRHNPLVHDNSVHGGASFGGFSVVSAAALSEGDGSPSPGTETSMRSFFMHAVEAPRCVAASAHEGRVHGGNFMPIMLDGGVGLGK

SEQ ID NO: 70950 - protein, 228 aa, Zea mays
  Clone ID: LIB4732-001-G11_FLI.pep
NKLSSAYNVCTQLKHASALHRIYPTKRQLAMMASSLLFVVVLLAALSSPPPSAVLAADDDGTTHLHFFMHDVATGSNPTAVQVIKGAGSSVVPGLAFGDTTVIDDALTETSSPTSAAVGRAQGFYMMSSQSGFVLMVCANLLLTAGDHNGSTLAVVGRDDVAADVRELSVVGGTGRFRMATGYVLWKTSSMNGPDATVELDVHVRTATTAATGSGTTGAFSGAPAGLE

SEQ ID NO: 70951 - protein, 597 aa, Zea mays
  Clone ID: UC-ZMFLB73137G12_FLI.pep
RAVLDDDETPGADAYAAMVASRLRERDLTRAEALFGAAPAAARGLYLDTAMLDGYAKAGRVDRARELFDAMPVKNVVTWTSMVSGYFRAGRVQEARELFDVMPERNDYSWTTVVQGYARNGMLREAREMFDRMPQRNVVAWTAMVKAYVDCGQIQQAWELFDMMPERNSYSWNAMISGFLSIGKVAEAVQLFERMPHRHKNVVSWTTMVAGLANNGLACRAREFFDRMPAKDTAAWNAIITVYANNGQLNEAQRLFDSMLAKDLVTWSTIIEAYSKNERKHEALNMFLLMRHSAVSPNIRTLISILVISESTVEVKQIHGLVIALGFLSETSLGNALLTMYSRSGDLMSAWFAFKRLEQKDAITWTSIVQAFADHGCGYHALLGFAQMLRHGYKPSSTTFTAVLSACRHVGLVGKGRKMFKSIYHVYGLEPTIEHYSCLVDLLGRAGYVREAKELVDGMQQGMRDEAILATLLGACVVHNEVEVAREVGEDLVRFDPSGTGGYRLLANVFASHGMWDETANVWKVMRGSKAKRTPGFSQIEVNMRNHVFYSRDQEHPQCAEIYEMLIDTIAPQMKGSSCVGLWELTLLSDPRESTAW

SEQ ID NO: 70952 - protein, 580 aa, Zea mays
  Clone ID: UC-ZMFLB73192F09_FLI.pep
DATKSAVFLSKSCACESLGGFLIPEELTWEVGTRRQPAGLSLRRSFQQVVSEPRRSKMSKTVDSSATFRKSSDDTSKDGAVVQRVIREVSAGSGYPTLTKTNYSDWALLMKVKLRARMLWDIIEHGGADIHEEMMALDALCSALPPEMVSSIADKSTAKEAWKTIADLRVGDDRMKTAAVLLRRKFDLATFNDGESVEDFALRLNGMAAELSTLGAGVEEEKIVEKIARSVPPRFKQIVLSIMTLLDLSTLTVSDMVGRLRAAEDAFEEAPGSLQHSGRLYLTEEEWNARRKKEVEHHPGSSSGGRSGRHDGGYRGRGRGRGRSRGRGGRSSGGPPAGKVTGDECRRCGKMGHWARECPSRHKKEQAHAVQEEEEATLLVAKTFPVKTSTLKPCCKMSSSHLEIREEKVFLQHEEEEKLEEGTWILDTGATNHMSGSRAVFTDLDTRVLGTVRFGDNSVAQIEGRGTIKFMCKNGETRSFVGPYFIPRLTTNIISIGQLDEAKYKIHVDDGVMHIREPDGRLLARIVRAENRLYLLHLKIQQSVCLAVRGREDEVAWRWHERFGHVNMAALRKLEKEELV

SEQ ID NO: 70953 - protein, 448 aa, Zea mays
  Clone ID: UC-ZMFLB73306C02_FLI.pep
AIELLRRSGNSVELLDVSSELPELVRRPGLSTWKVQDRESWFQSHDEVPHNRKNVVFPSMFPASNSTEESHTVCGDVEVNINNMNSFSRNINIEETSKLNQDMDGVSVSPTKILECTSNIVSSKFPLHRCMRIVPHDQNSGAFFIAVLHKLSPLNGSQIKDTKIQHRLGTDRTIQFQKEPKPETRPYETTLTRRQHNVSEVDDTEVLGRGQKLGTDSQTSKDKNSSEVEIVSILAESGDRMELQKQSRWEGVDPVLVLNDEAVIKSIQSFFGIKESFPLEGHLVTRSPDNARRIYYVSKSVKEILELNSKVGGQLKIASLGVKMFERHRSKDPCPCAYRLSYDGLSLVLPSISKRILYASALEFHRLVQYRSISFAHFTDTRFGEQAASLTPGCCVVVLLEGNRRVDSICKDPSTIAVVCWRGKGTINVMVSPSDRKDLLERMAYRFG

SEQ ID NO: 70954 - protein, 300 aa, Zea mays
  Clone ID: UC-ZMFLMO17005E04_FLI.pep
ITRARKSLATPFYHSLSHSPPQRQPPRAEQTSSTSRRAAHQTLLGMPTPTMVRPFPLFFFIVVVLLVRSPAGAAADGGGNATTDSCPLDLGYVRTFPWDPLPCAGGAPNVTACCQTLLSLFGIGLAERLRGTGHFRLPSAAASTACIESFTDLISAAPASLSGSSLVAECFPDPSQFAITSSYCAGVSTATEFVAAVGNDSAQALNSSCGPDLASPATCALCYSAGVAATAHLTSAAANDSKSGSCFYLTVLYAAGISNSAGPTYPPTAACALGLGLLSPAPTPSKSSHAAVYAATIPIA

SEQ ID NO: 70955 - protein, 585 aa, Zea mays
  Clone ID: UC-ZMFLMO17016D02_FLI.pep
WILQPQFSGRKSRHLYLVAPLSVETATSSVTWHRRLGHPGRDVMSKLSSSTSGSGCRGSFEHLYHACQLGRHVRLPFPTSSRAAGTFDLIHCDVWTSPVISISGSKYYLLILDDFSHYLWTFPLRQKSDTFPTLSHFFACVSTQFGRTIRSIQCDNGREFYNNVSRDFFLSRGVHLRMSCPYTSPQNGRAERMIRTTNDVVRSLLFQASLPTHYWAEALATATYLLNHLPTKAIAHPTPYFALFGIHPSYNHLRVFGCACYPNLASTAPHKLAPRSTRFVFLGYSPDHKGYRCLQQEFAMKDLGALHHFLGVTVERRPQGLFLHQRQYTVDILERAGMADCKTCATPVDTQGKLSAAGPLVVDPTGYRSIAGALQYLIFTRPDIAYAVQQVCLHMHDPREPHLTAMKRILRYLRGTLDFGLLLRRSSATKLRVYTDVDWAGCPDTRRSTSGYDVFLGNSLVSWLSKHQPVVSRSSAEAEYRAVANGVAEAAWLCQLLHELHSPLATSTLVFCDNVSAVYLSTNPVQHQRTKHVEIDLHFVRKRVACGAVRVLHVPTTSQFADVFTKGLPSVVFTEFRSSLNICSG

SEQ ID NO: 70956 - protein, 538 aa, Zea mays
  Clone ID: UC-ZMFLMO17246D10_FLI.pep
ANSTSSRSHCLIRISLTSFDAPERKRARNKLWMIDLGGSERLVKTKATGKRLKEGKAINLSLSALADVIDALQTKKSHIPYRNSKLTQVLKDSIGCESKTLMLVHIRPNEDDLCESICTLGFATRVRSIRLENEEPQEVKARKEHLLMELEKEISDLEQECEGIVRKIKKLKETMEHFKGHQPSAEANFDISHPSSEELKTVMPKNTKDSKNRRDVSSRLPRFMKPTASSQHRIDLNKHIPVSNKTKPPVPPKRRPSSVYAESVRLPVNAATWQSECSSECSISMTSDMNWIPSIQDGTECSQDTSEYETKQVIFSEHEKPPQSQVISFEESGEMQDKTKEMGIIDIDSWIHQQIIENTGICQCHTERTLDVIEVNEYETYNSNTASPVQKEFTNGSKPSLDEDNNLNLCPPTQNTEDSKETRAVNQFRKTELYTPPLKELCGSAKIKEHKNEKLGRHGSCRRSLQEELGNCKPEQPDKEPKADPNMQPEIEFHDNKHHIGKLTKFIQALRTAWIGALLGLGTMNLGLEQDFFKSLTL

SEQ ID NO: 70957 - protein, 742 aa, Zea mays
  Clone ID: UC-ZMFLMO17246E06_FLI.pep
PRTLLPRFKSIRRYRAPNAKAAAYQSHADPKKPPSPAPAFRRRAARRRAGAQELRGSSRAEGRRQHRFVGGVAPVLLAGGDAGLGGGRRAEDHPLVQPRADGLRCPPHRRGGGDAAAQGGVSAAVPRGVPAAGDHPLAGLPRPPHGQGRLLEPLRLRPRRGDWPPRHRHPAQPPVLRRRRAAAAAQEVEGRLPVPVDRRRRVQQQGHRRARVRERGHQRLGAARGRRGPRHAHGQHGGGQLRAERRRAGQRARHGVRDGAARAPGHLQGVHAEPVLHHGHRCRPGRRRQGRRRRALLLHQRHGRRAVQLRPHRHRHVQGHGARDLRQRRGGQRRPRRGLHHQRRAMDAHGRGGHHGPRDTHHRNGDPEARDCSTLVEAEVRGKVVLCESRTITEHVEQGQMVSAYGGAGMILMNKAAEGFTTFADAHVLPASHVSYAAGSKIAAYIKSTPRPTATITFRGTVMGSSPAPSVAFFSSRGPNKASPGILKPDITGPGMNILAAWAPSEMHPEFADDVSLPFFMESGTSMSTPHLSGIAAIIKSLHPSWSPAAIKSAIMTSSGTADHAGVPIKDEQYRRASFYSMGAGYVNPSRAVDPGLVYDLGAGEYIAYLCGLGIGDDGVKEITGRRVACAKLKAITEAELNYPSLVVKLLSHPITVRRTVTNVGKANSVYKAVVDMPRAVSVVVRPPVLRFARANEKQSFTVTVRWNGPPAVAGAEGNLKWVSSEHVVRSPIVIPPAKAVA

SEQ ID NO: 70958 - protein, 375 aa, Zea mays
  Clone ID: UC-ZMFLMO17238E01_FLI.pep
PCDYTYAGAIAACGELGALKHGKQLHGHIVQLGFEGSNSAGNALITMYARCGAVKEAHLMFLVMPNIDSVSWNAMISALGQHGHGREALELFDRMVAEGIYPDRISFLTVLTACNHSGLVDEGFRYFESMKRDFGIIPGEDHYTRLIDLLGRAGRIGEARDLIKTMPFEPTPSIWEAILSGCRTSGDMELGAHAADQLFKMTPQHDGTYILLSNTYSAAGCWVDAARVRKLMRDRGVKKEPGCSWIEAGNKVHVFLVGDTKHPEAHEVYKFLEMVGAKMRKLGYVPDTKVVLHDMEPHQKEHILFAHSERLAVGFGLLNLPPGATVTVLKNLRICDDCHAAIMFMSKAVGREIVVRDVRRFHHFKDGECSCGNYW

SEQ ID NO: 70959 - protein, 128 aa, Zea mays
  Clone ID: UC-ZMFLMO17238F01_FLI.pep
ATKPMTTRTICLEHTLHHEGINFLHTYLKIIQHLQLFLCCRPITPVFKSSTSRSVGPGSSTWGAGSTFLASRATCQRLEILSRLVVDLVSQVGRLVPQFSPDSPKAHYTTYFLDLGEKAMDDLDLGDI

SEQ ID NO: 70960 - protein, 184 aa, Zea mays
  Clone ID: UC-ZMFLMO17248E10_FLI.pep
AIPMLYCGQELINGNFTTAFLPPPSIYYTWPPRNISPPWRPDDKDGHYVFAVGENLTPRYRILNKMGEGTFGQVLECWDLENQEAVAIKIVRSLQKYREAAMIEIDVLQRLGKHDFTGSRCVQIRNWFDYRNHICIVFEKLGPSLYDFLRKNSYRSFPIDLVREFARQILESVACEYSVYSGYT

SEQ ID NO: 70961 - protein, 527 aa, Zea mays
  Clone ID: UC-ZMFLB73016C05_FLI.pep
EPDQAGAREDVRRRAPQRDRLVRRGRERQRARGRQASAGRPERALRHRGPHLRHRPELGADAGGLHRGVRPPVAPRARAPRRVPARRGRHRAAEDVHEGLLGGPGGRARQGHADRGRGRGQPAHRGRVQRGAQDHGAVRGQPARPAPALLLEGADRRQRLRRGAVPAVRVLRAGAVVRGVAGEARRVRLLAHHPRVHGADGVRERRRRDADAGAGLHQGRARDAVGVRDDRPQDGGGARRRGRGAGAGAAEGRGGAEARGLLVPVAAGHPGVPRPEPPCARREDAGAGGAERVRQELGAGSGAAVLRAHVRARAPGRQGRAQVQPAGAAARGGGGTAGAVPVRGEHPREHRVRARGRDGGGGGGGGGAGERAPVHRGAAGGVPDAGGRARGAAVGGAAAADRDRARAGEAGGHRAAGRGDQRAGRRVGAVRAGGAGARGVRAHHHRGGAPAGHGARRAHHRGHRRRQGGGAGVALAPAQAPSRRVLRADAAAAAADGRGGRARAVDLVQRGRVGRNGWMDGFGSSRD

SEQ ID NO: 70962 - protein, 795 aa, Zea mays
  Clone ID: UC-ZMFLB73018D07_FLI.pep
VDQQAHPWFLMEASSSLRFQVSRFSSFKIWLCLFLVLVLQNCSPALSDSPYLVGMGSYDITGPAADVNMMGYANAEQIASGIHFRLKARAFIVAEPNGKRVVFVNLDACMASQLVTIKVLERLKARYGDLYNENNVAISGIHTHAGPGGYLQYVVYIVTSLGFVRQSFDVIVNGIEQCIVEAHNNLHPGKIYVNKGDLLDASVNRSPSAYLNNPAEERGKYKYNVDKEMTLIKFVDDESGPIGSFNWFATHGTSMSRTNSLISGDNKGAAARFMEDWAEQNGIPKQAAHVNHDGLESSHMTSRLPRRVSPIIPEPNEITDDLVQLASSYEASGGRRLSSSSITKRIRSTQQNRPKFVSAFCQSNCGDVSPNVLGTFCIDTGLPCDFNHSTCNGKNELCYGRGPGYPDEFESTHIIGNRQFQKAVDLFSSASEEIQGKIDYRHTYLDFSKLEVNVRTSTGSQQVVKTCPAAMGFAFAAGTTDGPGAFDFKQGDVKGNPFWRLVRNLLKTPGKEQVECQAPKPILLDTGEMKEPYDWAPAILPIQIIRIGQLAILCVPGEFTTMAGRRLRDAVKAVLTSDNSGEFNNIHVVLAGLTNTYSQYITTFEEYEIQRYEGASTLYGPHTLSAYIQEFQKLATAMVANKEVPTNFQPPDMLDKQIGLLPGVVFDSTPPGVEFGDVSSDVPASSTFRKGSVVNATFYSACPRNDLLTDGTFALVEKLDGSNSWVPAYDDDDWSLRFKWSRPSKLSPRSFATLEWTVPGDAPSGVYRLRHFGASKPLIGSIKHFTGTSRAFAVR

SEQ ID NO: 70963 - protein, 747 aa, Zea mays
  Clone ID: UC-ZMFLB73029G11_FLI.pep
NRLSGDVPAWLGKLAAVQHVDLSDNALTGGLPDSLGDLKALRYLSLSRNQLSGAVPASMSGCTKLAELHLRGNNLSGSIPDALLDVGLETLDVSSNALSGVLPSGSTRLAETLQWLDLSGNQLTGGIPTEMSLFFKLRYLNLSRNDLRAPLPPELGLLRNLTVLDLRSTGLYGAVPADFCESGSLAVLQLDGNSLSGPIPDSIGNCSSLYLLSLGHNGLTGPIPAGISELKKLEILRLEYNKLSGEIPQQLGALENLLAVNISHNRLVGRLPASGVFQSLDASALEGNLGICSPLVTEPCRMNVAKPLVLDPNEYTQGGGGGDNNLETGGGGGVEAPRKRRFLMSVSAMVAIFAAVAIVLGVIVITLLSVSARRRVEAAGVGGPGHDRKEVDESIVTTSSTTTTKSSSSPPPGGKVKEKLATGKMVTFGPGSSLRSEDLVAGADALLSKATEIGRGALGTVYRAAVGDGRVVAVKKLAAAHLVRSREEFEREVRVLGKARHPNLLALRGYYWTPQLQLLITDYAAHGSLEARLHGGGEAAPMTWEERFRVVSGTARALAHLHQAFRPALVHYNVKPSNILLADAECNPAVGDFGLARLLHGSGSGRQVAMAGSRFRQGGGGGMGYVAPELACQSLRANDKCDVYGVGVLILELVTGRRAVEYGDDDVVVLTDQVRALLEHGNALECVDPGMGGRGHVPEEEVVPVLKLGMVCASQIPSNRPSMAEVVQILQVIKAPVGGGGRMQASF

SEQ ID NO: 70964 - protein, 434 aa, Zea mays
  Clone ID: UC-ZMFLB73043C08_FLI.pep
RMCAQVFSAFGFVHKIATFEKASGYQALIQFSDAETATSAKAALDGRCIPSYLLPELDVACTLRITYSAHSVLNVKYQSHRSRDFTNPYLPFLDSAKDGSGPDGKKQEAESNILLASIENMQYVVTIDVLHEVFSAFGFVQKIAIFEKNGFQALIQYPDIQTAYAAKEALEGHSIYEGGYCKLHLTFSRHTELNVKVNNERGRDYTKGNATPSSDQPSILGPQPIPSVGAAIPPAQGSVPSAATNSVMPPGDPSVALPSNPSSEPLLQAPVVSSGGPPHYPNQAILQGPLGVVARFPGYGALQFAQGSAQAQMVQPSGQGSQHMSGHVNYQLPPGSAQFMQYLSNGSHPLPNAPGPQTMPYPALSGQQLPPGLQMMQAQGFGGLPFSQGPGQPMPQFPMYGTQQFPPGMEPKMMRFSEQGGQQFTFAPRGPNSR

SEQ ID NO: 70965 - protein, 146 aa, Zea mays
  Clone ID: UC-ZMFLB73048B05_FLI.pep
ELVFLILMFQLLHHGLSMYAIGLALLSGKAHMYILMVLFTEITTPFVNLRWYLDVAGQKTCNLYLYNGVALFVGWLIARIILFIYMFTHMYFHLDQARSIFSLGFYSLVAVPSVVAVMNVFWFWKILKGMVKTLSRRKHSENGRTD

SEQ ID NO: 70966 - protein, 474 aa, Zea mays
  Clone ID: UC-ZMFLB73043D12_FLI.pep
IEGAWNEDGKGESNWDHFCHNHPERILDGSNSDIGANSYHMYKTDVRLLKEMGMDAYRFSISWPRILPKGTKEGGINPDGIKYYRNLINLLLENGIEPYVTIFHWDVPQALEEKYGGFLDKSHKSIVEDYTYFAKVCFDNFGDKVKNWLTFNEPQTFTSFSYGTGVFAPGRCSPGLDCAYPTGNSLVEPYTAGHNILLAHAEAVDLYNKHYKRDDTRIGLAFDVMGRVPYGTSFLDKQAEERSWDINLGWFLEPVVRGDYPFSMRSLARERLPFFKDEQKEKLAGSYNMLGLNYYTSRFSKNIDISPNYSPVLNTDDAYASQEVNGPDGKPIGPPMGNPWIYMYPEGLKDLLMIMKNKYGNPPIYITENGIGDVDTKETPLPMEAALNDYKRLDYIQRHIATLKESIDLGSNVQGYFAWSLLDNFEWFAGFTERYGIVYVDRNNNCTRYMKESAKWLKEFNTAKKPSKKILTPA

SEQ ID NO: 70967 - protein, 443 aa, Zea mays
  Clone ID: UC-ZMFLB73038C07_FLI.pep
FPCLSNMGANCCVAAKERTQPCITPIEVSTYRNVRRSPSWNIRWDNRTHIEDIMDIPTLFSNHSSGSIHPDTKSGSIAPTEGFSNGNSLGTSPSNVFHGAKWHKSDKKMEARKVTKSDSRADRSTASNSSPETKLSRKSLDISSVASDLKTSVSVPSTPPLVSRADPSSSKGHSQPTDSDLMKKAWRSPGYQLYRQVSDSKIPSLRSLNEIRSPEGRPPSSMLSACSNDLSAAGSYGESSDGWSMRTFSEMVSTSQRERWSLDSELLGSISSKMTRSSASSSTTRPPDQDVCKLCLKLLKERSTWNAQELAVVAVLLCGHAYHADCLDSITTEADKYDPPCPVCTHGEKFSVKLFGKLESKIKNKIPKNVSVDINLDGNSSNKHQKKGRREPRLGTSSSMKVPFSRPFLRRHFSIGSRPPRSVSETDSTRKKGFWARHWERVE

SEQ ID NO: 70968 - protein, 557 aa, Zea mays
  Clone ID: UC-ZMFLB73064H06_FLI.pep
FRSLYKHAVCKCRSLETLYRHTLYHGRKISLLQPRPRAAQRALPPGRCSALLSLGWNHEGAPHDVVVGDPLEVALGAGDVGLAGPPHRHREALLLVQRREPERRRLHGHRHVLGHVHHRGVHGARLPHVGHRAVHRDGLGQQVDDEGRVVQLGFGDGPEAAAGDGAVGDLRDAVVAQPQPAEVGDVVVGAEVVDQARVECERRVHVARAQGVEGGVPVLLVLDGQPRAVHRVGRRHHRRLDRRGRPVRVQALEERGDAAQVRRRHGRPGLDEEGQVGPAVGELRVRVARRPRREDVHSGPRDVRLQDPRARLARPAGREEGDRRRRVRADNRPLEVDARRPVGRGVQVGQDLGPGLVADVRSREDVRVGEGGVPLRLLVHDDHAHAAVRRHGLARLDAVAQAPALAQHHLASHLGAAQHAAVAARVEAVRAGVHQRDRVRGGVVPRLEQGLAVELLAVAELDIGPYRAVHGARRDGEHPRRAVADRAGLWPRVARGAADEDASLRGLERRDGDGVVVELRARVGADGEGQHVDAVLDGGVQPGDDVHDGAAAARAHL

SEQ ID NO: 70969 - protein, 623 aa, Zea mays
  Clone ID: UC-ZMFLB73080A04_FLI.pep
SLINRSHATRVRVRVYGHEQTSSSATSVIAQPRARPWRPCTRRRAPRSRRWRPPRHPRGRWIRKWSWERWKRHFALIEESERLVDELQLQLQASVYREDYRSAHKLRLAIATIVKNDTVGRAVSDLNMAIDEERYKDAAYIRDHAGTGLLGWWSGISGNLSDPYGLIIRISAEHGRYVARSYDTRQLTSDSSGLPIFEIYFAEANGGYNLQAVHLKPDDSDSDQVPNMLREKLGMDSINISSSSVGSNHEEFDGSVNMDDKDSDDSNIDAGPGSKDLSSDPTAVPRIKILKVVPMQNVDKDYIINIFDQISEENDDPEVENESSEDAGDEDNSGVAETVSAEENGDESGDESDIEPLVSIDFVIENNDDYASHPSAEAFERMPARLEKRDRFSFSFYTEEYSKKLDAGKAQQTSKKTVRLHTDQQDYDGFVELDRVKLSGSNKKLSILQLGIKRNNKVQKKLHGVTHFSRIQMPISSDPLTGLYLTASGFDSEILSLQRKFGQWREDGPSEEHSDLLFYEYVEAVKLTGDNLMPAGQVVFRAKVGEHYRLPHKGIIPRELGVIARYKGQRKIADPGFQNPQWVDGELLILDGKFIRDGPVIAFFYWTSNVHLFEFFRQLKLPD

SEQ ID NO: 70970 - protein, 112 aa, Zea mays
  Clone ID: UC-ZMFLB73092F09_FLI.pep
YNVSHAQVMVKSKIWESRLLFSACWIYHTFSTYIYFKTCFLVFHFVFVIPRDLSHNNLNGPIPDFYVKCHHLHFYISFLVDRPTYFNIAQNPSFYVYFLLFCRDLSSNNLNG

SEQ ID NO: 70971 - protein, 357 aa, Zea mays
  Clone ID: UC-ZMFLB73076E07_FLI.pep
AFSWYRRQKQKIGSSLEVSDSRLSTDHFQQKEACRRSASPLISVEYSNSWDPLSAGGAGVGSPGQVVGDSFRFNLEEVECATQYFSDVNLLGKSGFAAATYKGILRDGSVVAVKSLSKTSCKQEESDFLRGLKMLTLLQHDNLVSLRGFCCSRGRGECFLVYDFMVNGCLSRYLDVKDGSSGATVLDWPTRVSIIRGIAKGIEYLHSKKGSKPPVVHQNISADKILLDHHLAPRLSVPGLHKLLADDVVFSALKASAAMGYLAPEYAATGRFTDKSDVFAFGVVVLQVLTGRRDVSQLKVGAAAVSDLGGLVDANLDGAFSRTEAARLAAVAAYCTSETPGQRPTMEAVVQQLSSTQ

SEQ ID NO: 70972 - protein, 623 aa, Zea mays
  Clone ID: UC-ZMFLB73099E05_FLI.pep
NNRVVRELIQSLLVRIGKGHPQALMYPLLVACKSISILRQRAAQEVVDKIRQHSGGLVDQAQLVSKELIRVAILWHEMWHEALEEASRMYFGEHNIEGMLAVLEPLHAMLERGDETIKENAFIQAYGHELLEAHECCLKYRATGEDAELTKAWDLYYHVFRRIDKQLPSLTTLDLHSVSPELLKCRKLELAVPGTYAADSPLVTIEYFVPQLIVITSKQRPRKLTIHGSDGNDYAFLLKGHEDLRQDERVMQLFGLVNTLLENSRKTSEKDLSIQRYAVIPLSPNSGLIGWVPNCDTLHALIREYRDARKIFLNQEHRLMLAFAPDYDHLPLIAKVEVFQHALQNTEGNDLAKVLWLKSRTSEVWLERRTNYARSLAVMSMVGYLLGLGDRHPSNLMLDRYSGKILHIDFGDCFEASMNREKFPEKVPFRLTRMLVKAMEVSGIEGTFRTTCENVMQVLRTNRDSVMAMMEAFVHDPLINWRLFNFNEVPQVSNYGNVHAHTVVSSEEAVANRELMQPQRGARERELLQAVNQLGDANEVLNERAVAVMARMSDKLTGRDFSSGSALAGAGSSIQHGSEHLASGDARDAQPGLSVKVQVQKLILQATSHENLCQNYVGWCPFW

SEQ ID NO: 70973 - protein, 639 aa, Zea mays
  Clone ID: UC-ZMFLB73111D09_FLI.pep
KDEFYSVATAAAVKVIDFGSACLEGKTVYSYIQSRYYRSPEVLLGYPYTTAIDMWSFGCIVAELFLGLPLFPGATEYDVLQRMVKILGGQPPDELLREAKNTVRFFKHVGSIYAGNAAPIGLSSAYRILSEEEVEAQRDSKRQKMGKWYFPHLKLDRLICTYPWNNSELAETEKTDRLGLVDFLKGLLEFDPNKRWSPLQALHHPFITGESFTGPYEPIPETARIPVARAAAIDHNPGGGHWLHSGLSPQVGSVNRYLPLNNVYPPKVPFSYGSSYGSFGSHGSYTGNAGFGNSYGSIGDANAINMYYSPLGSSGLTQIGPSPDVRLRMRLSHDRGIRLSPGSLGPMSVGASPSQFTPPNYHMQIPANSTGTHGSGSPASGVIHGSPLGKAAAVGPYNMRRNLPMPPHDYVSQHGQGRFRDGVSFSHSDACAQGHTGHSHNAAVPSSYHSGWRPKIGSRSGISLEASSSHVPSKAPSQSFDFSASSTLDPANWDPNYSDESLLQEDNSLSADLSSNLHFGDATGQDHIFATSNPVPTNQRGDQLFHVSSQGVSAHSSVLINYGGYNPQNYPQQNARPRHGQPILHQRYNQATSSPMRPMGSHHNGQPAWPSSFGMGDGVPWGGTRGHSFTTRKDYGSIF

SEQ ID NO: 70974 - protein, 579 aa, Zea mays
  Clone ID: UC-ZMFLB73098C08_FLI.pep
AVITGLTGAGDLDTASELLDEMPVKDAVACNAVLHRYVRCGRVDEAFALLKRIGSQCDSDGILPWNDPFVLTTVVGACADRTQYEIGRQAHTRLVVANTGIDSILGCALIDMYCKCGDLDSAHQVLDRLEHVDEISLSALVYGYASCGQLHKALCLFDKMESPSIALWTSLISGCNPAYHGDGAFVLFVRMLRSEMLPNSTIYAIVLNMCGFLGMLKPGQQTQACALKSGAVNDLIAASALIDFYSKCGLWADACQAFSELRHHDTIVLNSMITVYSNCGQIDEARRVFRLIPSKSVISWNSMIVGFSQNGHALDALELFCEMHRLGLQLDNVAISSVLSASGSICSVSSGEQIFGLAIALGLQSDHIVASSLIDLYCKCGNLANGRRIFSGIANPDEVLWNSMLIGYASNGYGLEALKLLDLMQSRGLKPSERTFVGVLSACCHSGLVEEGLRWFYRMKEDFGVSPSAEHYACVTDLLVRAGRLDEAVEFIENMPFKADAISWTSIIGGCKAQGNEVLLDKVANKLMETGLSTHSSLYVQLSSTLAAHGDWDKSAEIRSMMHDRRISKNAGRSWVDRA

SEQ ID NO: 70975 - protein, 635 aa, Zea mays
  Clone ID: UC-ZMFLB73124H02_FLI.pep
HTGDWKIDESPVDGKKFDRQALEELSKEGVTLMMSDSTNVLSPGRSISESVVAGSLLRHISEAKGRVITTQFASNIHRIGSIKAAADLTGRKMVFVGMSLRTYLEAAFKDGKAPLDPSTLVKVEDMDAYAPKDLLVVTTGSQGEPRAALNLASYGGSHALKLSKEDVLLYSAKVIPGNETRVMKMMNRLTDLGPKIIMGKDSGLHTSGHAYREELEEVLRIVKPQHFLPVHGELLFLKEHELLGRSTGIRHTTVIKNGEMLGVSHLRNRRVLSNGFVSLGKEDLQLMYSDGDKAFGTSTDLCVDERLRIASDGIIFVSMEIFRPQKEHGLAQSGLKGKFKITTRCLWLDNGRLLDALYKAAHAALSSCPVNCPHSHMERMVAEILRKMVRKYSGKRPDVIAVATENTTAGFSEHLDTKASGNFGPSSATSHLSRSPATSLEGSYKTHPDNPEVDAEEILPETVRTTPDDATTSSNGEALFSSDLHQPKTLEHFWESFKSPTAVKIARIVNGGDKQNFGKIGIMGQDSLIQSAPAPVKSSKRNKWKPEEIKSLIQMRGEMNEKFQSVKGRMVLWKEISDTMLNQGVSRTPAQCKSLWTSLVQKYEESKDTESMKTWPYFSAMDKILSQQGEMATKG

SEQ ID NO: 70976 - protein, 658 aa, Zea mays
  Clone ID: UC-ZMFLB73154E12_FLI.pep
KFISATDTIKRMKTNIVGMEANMEQLLTKITSVQSRSDTVNTSLFDKRENIEKLHRTRNLLRKVQFIYDLPTRLNKCIKTEAYADAVRFFTGAKPIFEAYGDTSFRDCKKASEEAMDVVIQHLQTKLYSDSEPIEARAEAVVLLKQLKFPVDNLKSNLLEKLEECLLNFQNETTHASIGDISKTFRAYLIIFPDSERRLIELAQALFLNRYETVRENLKKRIPSTDLLAMLRSLWEDATIIDEVISEAALPAFSLETTRDIVKQHIATAFLHLQSEISEALVRTHSTSNEKLEESQLQTAMETSKIKVSQGCIDLLQEFHHLVDGNIELLVKLRDLIIDWVQEGFQEFFQKLDGHFHVLSGRSKTNLQEPTMDSMQTDKTPTVLVLMLAQLCVYIEQTTVPKVTEELASFFGGGAHSYEYGPPFVPGEICRLYRSSGEKFLHHYINMKTQKISKLLNKRFTTPVWIKHKEPREVNMFVDLLLLEINGLVSEVKQILPGMVRRHRHSDSTGSTTSSRSNPMREDMLNRSNTHRARSQFLENHLAKLFEQKMEIFTKVEYTQESVISTVLKLCLKSLQEFVRLQTFNRSGFQQIQLDMEFLKTSLKEFVDDEAAISFLLKEVNNAAHERCLDPIPLEPPILDKLINAKLAKIKERNPNMR

SEQ ID NO: 70977 - protein, 1077 aa, Zea mays
  Clone ID: UC-ZMFLB73155B12_FLI.pep
AKGYRVGPVYDDVLAMAWFFLELIVKSMGLEQSRLFYHNLPLGEDVPPLQLKEGVFRCIMQLFDCLLTEVHERCKKGLSLAKRLNSTLAFFCYDLLSIIEPRQVFELVSLYMDKFAGVCQSVLHDCKLTFLQIICDHDLFVEMPGRDPSDRNYLSSVLIQEIFLTLDHDDLSQRAKAARILVVLICKHEFDARYQKSEDKLYIAQLYFPLIGQILDEMPVFYNLNAIEKREVLVVILQIVRNLDDATLIKAWQQSIARTRLFFKLLEECIIHFEHNKTGDNMLLGASSRSPDVEHPASPKYSERLSPSVNTYLSEASRHEIRPQGTPENGYMWNRVSPQLSSPNQPYSLREALAQAQSSRIGSTARALRESLHPVLRQKMELWEENLSTAVSLEVLGITEKFSVAAGARSITTDYAKLDCVTSILMGLLSRNQSLAFWKAFLPVVYNIFNVHGATLMARENDRFLKQIAFHLLRLAVFRNDSIRKRAVVGLQILVRNSFNYFKNTTRLRVMLTITLSELMSDVQVTQMKFDGSLEESGEARRLRKSLEEMADVRSKDLLKDCGLPVTALEAAPEGSSDNRWSWVEVKHLSKCLVQALDAGLEHALLGSVVTVDRYAAAEGFYKLAMAYAPVPDLHIMWLLHLCDAHQEMQSWAEAAQCAVAVAGVIMQALVGRNDAVWSKEHVASLRKICPIVNTDVSAEASAAEVEGYGASKLTVDSAVKYLQLANKLFTQAELYHFCASIQELIIPVYKSRRAYGQLAKCHTSLTNIYESILEQEASPIPFIDATYYRVGFYGERFGKLNKKEYVFREPRDVRLGDIMEKLSHIYEAKIDGSHTLHIIPDSRQVNADELQPGFCYLQITAVDPVMEDEDLGSRRERIFSLSTGTVRARVFDRFLFDTPFTKNGKTQGGLEDQWKRRTVLQTEGSFPALVNRLPVIKSESLEFSPVENAIGMIETRTAALRNELEEPRSSEGDQLPRLQSLQRILQGSVAVQVNSGVLSVCTAFLSGEPATRLRSQELQQLIAALLEFMAVCKRAIRVHFRLIGEEDQEFHTQLVNGFQSLTAELSHYIPAILSEL

SEQ ID NO: 70978 - protein, 327 aa, Zea mays
  Clone ID: UC-ZMFLB73161F04_FLI.pep
LHMIYIDGQSNPRDFVRPPCMLLLVLGSSLRTQVDRSSSSPISRRSGASSSPRRGGRTPPPPRRPPPRLWPPSCRGARGTRSRRCPGQPPPPRPPRSCAAARAPGPSSPRASRTGRRRRRRGRPSRRGAPCACAPSPPSCTSPSRPGRSRTLRPRPRLHRTACRTATAAAGVRVVARGLAAVPAAGATAVFVVVGGARSVVPAVVAVVSGLVVPATAGATAVVVAAATAVVIAAAGLVVATAAGATAVVVAAGPAVPIAAAAAVVVIAARLVVATFATAVVISAGLAVVAAVVVVAGAGPAVAAAAVLVRHGSRLLLSSHTFSTEEE

SEQ ID NO: 70979 - protein, 330 aa, Zea mays
  Clone ID: UC-ZMFLB73157G08_FLI.pep
RFEVRGILKNADILNSPNVICSLSFDRDEEYFAAAGVSKKIKIFEFDALLNDRVDIHYPLIEMPSKSKLSCVCWNNYIKNYLASTDYDGTVQLWDASSGQGFTQFTEHRKRTWSVSFSDVDPTKLASGSDDCCVKVWSINQKNCVDTIRNVANVCCVQFSPYSSRMLAFGSADYKIYCYDLRNTRIPWCTILGHGKAVSYVRFLDPYTLVSASTDNTLKIWDLNQTNCSGLSTDSCSLTLNGHTNEKNFVGLSVHDGYITCGSETNEVFSYYKTFPMPITSHRFGSIDPITGQVTNEDNQQFVSSVCWRGKSNMVVAANSSGSIKVLELV

SEQ ID NO: 70980 - protein, 507 aa, Zea mays
  Clone ID: UC-ZMFLB73157H07_FLI.pep
LARWRRRWWCSGAARTGRRLAAVGRRRWTRASTCATPPSRSRRSSESTASAPSPAVLRTFSQRLSRGFNDAVNGFPDDGWSLMSSDGAEDVTIAINSSPNKLIGPHVNSSQLFTAIGGGILCAKASMLLQNVPPALLVRFLREHRSEWADPGVDAYSAAALRASPYAVPGLRASGFTGSQVILPLAHTLEHEEFLEVIRLEGHSLCHDEVVLSRDMYLLQLCSGVDENAAGACAQLVFAPIDESFADDAPLLPSGFRVIPLDAKTDPPSGTRTLDLASALEVGSGGTTRASSDASSTCNTRSVLTIAFQFSYENHLRESVAAMARQYVRTVVASVQRVAMAIAPSRLGGQVEMKQTPGSPEAHTLARWIGRSYRFHTGAELLRTDTQCTDASLKALWQHSDSIMCCSLKAAPVFTFANQAGLDMLETTLIALQDISLEKILDDDGRKALCTEYPKLMQQGFAYLPGGVCVSSMGRPVSYEQAVAWKVLSDDDTPHCLAFMFVNWSFV

SEQ ID NO: 70981 - protein, 565 aa, Zea mays
  Clone ID: UC-ZMFLB73153H09_FLI.pep
NGCYPFLQLILRGSLPDEDANRNNVRSIVKAPSDDMKKIQGLLELRTVTNEMVRLIETATAPVLAVDIAGNINGWNNKAAELTGLPVMEAIGRPLIDLVVTDSIEVVKQILDSALQGIEEQNMEIKLKTFHEHECNGPVILKVNSCCSRDLSEKVIGVCFVAQDLTRQKMIMDKYTRIQGDYVAIVKNPTELIPPIFMINDLGSCLEWNKAMQKITGIKREDAINKLLIGEVFTLHDYGCRVKDHATLTKLSILMNAVISGQDPEKLFFGFFDTDGKYIESLLTVNKRTDAEGKITGALCFLHVASPELQHALQVQKMSEQAATNSFKELTYIRQELRNPLNGMQFTCNLLKPSELTEEQRQLLSSNVLCQDQLKKILHDTDLESIEQCYMEMNTVEFNLEQALNTVLMQGIPLGKEKQISIERNWPVEVSCMYLYGDNLRLQQILADYLACALQFTQTAEGPIVLQVMSKKENIGSGMQIAHLEFRIVHPAPGVPEALIQEMFQHNPGVSREGLGLYISQKLVKTMSGTVQYLREADTSSFIILMEFPVAQLSSKRSKPSTSKF

SEQ ID NO: 70982 - protein, 537 aa, Zea mays
  Clone ID: UC-ZMFLB73178D10_FLI.pep
AELLCCLLPAIDSFVPRDGRWRYGPRRCCFSSDRRWEVALAHLRCLVDDVGGAGEVAGSDGPALALVVVVEGVGCVRDHGVGLEARRAGLDGLAVRAAGAARVVQRRLEPMLPGHRVRHAPRLPGRHLHPARRVGAGAARPAAVLLPPEAAVALAGAAAAEDELDVVHLLLVGVEDAVVALGGRPGLLVLVEEREEVHVDVGVGAARGAGVAGEHAAGQVAVVRRGVCRRSARLVGVALGRPPRLGDHDAHAVVALPEPADRGEHGVQLRVEEAVVLEAVPGVEHAGVGAEQGVVEGDVSRIAGVSEERVRVHHEVRPGLRQEVEHGLHDGLREVLPERARRGRVGRRERRERDGRRHLDGPVEAQPGQRGVHVGHGRDQLRRHVLGRREHLVAHGDALDLRGRVVRRHVPAHPQQRVGRARRRRRDLLVGQRHHHLDAGVCEGAQHGGVGVVQLHLRHALLLQQLHNRRWVRQVVRHAAVVHAHRPRLCRRKEERNRRGEEDGGEERAWGRHALLCSAARRGRAKTGAGVTGGVDE

SEQ ID NO: 70983 - protein, 259 aa, Zea mays
  Clone ID: UC-ZMFLB73158G11_FLI.pep
HEHNISNRSFFSMDLLWKKKSSQVNRGNVFLLLSCVRWQHPGREGNRERDPRAARRRRRRRGDRPREGGGAEGHGGGEGGDRPRGGGAGAAGAVVRADVPGDPDGRVHAAHLLGAVVGRDGAHLLLRHVHVLHGRLRLLPPHQEGAVVRRLLREPVRGQAEARDARPGLRPPQVRGAPESLRRGGAAAPGPDPLRERGRGAGERPLPLLLPLPLILASLGSFLSFFLCCSCPFGGDDDSCIHLMRARMQKKKKHTELRF

SEQ ID NO: 70984 - protein, 442 aa, Zea mays
  Clone ID: UC-ZMFLB73177C01_FLI.pep
DLRRDELPSHPNSGTNKLPSHPNSASTGSRRTRIRPTTPRRRRSKKMAAVDTFLFTSESVNEGHPDKLCDQVSDAVLDACLAEDPDSKVACETCTKTNMVMVFGEITTKANVDYEKIVRETCRNIGFVSNDVGLDADHCKVLVNIEQQSPDIAQGVHGHFTKRPEEIGAGDQGHMFGYATDETPELMPLSHVLATKLGARLTEVRKNGTCPWLRPDGKTQVTVEYRNEGGAMVPIRVHTVLISTQHDETVTNDEIAADLKEHVIKPVIPEQYLDEKTIFHLNPSGRFVIGGPHGDAGLTGRKIIIDTYGGWGAHGGGAFSGKDPTKVDRSGAYVARQAAKSIVASGLARRAIVQVSYAIGVPEPLSVFVDTYGTGAIPDKEILKIVKENFDFRPGMIIINLDLKKGGNGRYLKTAAYGHFGRDDPDFTWEVVKPLKSEKPSA

SEQ ID NO: 70985 - protein, 646 aa, Zea mays
  Clone ID: UC-ZMFLMO17139G08_FLI.pep
FNRIKLGFFLHSPFPSSEIYKTLPVREELLRALLNSDLIGFHTFDYARHFLSCCGRMLGLSYESKRGHICLEYYGRTVSIKILPVGVHMEQLKTVLGLPETEAKVSELMEMYSGKGRVVMLGVDDMDIFKGISLKLLAMEELLRQHPEWRGKLVLVQVANPARGRGKDVAEVQTETYAMVRRINEAYGEPGYEPVVLIDEPLQFYERVAYYVIAEVCLVTAVRDGMNLIPYEYIVSRQGNEKLDRMLRQGKPEEKKSMLVVSEFIGCSPSLSGAIRVNPWNIEAVADAMETALVLPENEKRLRHDKHFRYVSTHDVGYWANSFLLDLERTCKYHSQKRCWGIGFGLRFRVVSLDLTFRKLSLENILMAYRRAKTRAILLDYDGTLMPQAINKSPSTESVRILNSLCRDKDNVVYLCSGYDRRTLHEWFPCENLGIAAEHGYFLRCKRDAEWKTCVAATDCSWKQIAEPVMCLYRETTDGSTIEDRETVLVWNYEDADPDFGSCQAKELVDHLESVLANEPVSVKTTPHSVEVKPQGVSKGLVARRMLVSMKERGQCPDFVLCIGDDKSDEDMFQLIATAACGDSLASKAEVFACTVGRKPSKAKYYLDDAAEVVRLMQGLSYVSEELALANQRDEDEDSSLDDVWE

SEQ ID NO: 70986 - protein, 600 aa, Zea mays
  Clone ID: UC-ZMFLMO17159B08_FLI.pep
AEDSKQQHTKAPSFWRLAELSFAEYFYALLGSAGAACFGSFNPLLAYTISLIVVAYYKIGVRDVHAEVNKYCSFIVGMGIITVLANFLQHFYFGIMGEKMTERVRRMMFSAILRNEVGWFDDEENSADILSMRLANDATFVRAAFSNRLSIFIQDTSAILVALLLGMLLQWRVALVALATLPILIISAVAQKMWLSGFSRGIQEMHRKASLVLEDAVRNIYTVVAFCAGNKIMELYRLQLGNILKKSFIHGMGIGFAFGFSQFLLFACNALLLWYTAAAVKDGHLSLVTAVKEYIVFSFATFALVEPFGLAPYILKRRKSLTSVFEIIDRVPKIDPDDASGLKPPNVYGSIEFRSVEFCYPTRPEMMVLSNFSLRVSGGQTVAVVGVSGSGKSTIISLIERFYDPTAGQVLLDGRDLKLFNLRWLRSHMGLVPQDPVIFSTTIRENIIYARHNATESEMKEAARIANAHHFISSLPHGYDTHVGMRGVDLTPGQKQRIAIARVVLKNAPILLLDEASSAIESESSRVVQEALDTLIMGNKTTILIAHRAAMMKHVDSIVVLNGGRIVEQGSHDSLVQLNGLYVKLMQPHFSKGFRQRRLI

SEQ ID NO: 70987 - protein, 306 aa, Zea mays
  Clone ID: UC-ZMFLMO17150F09_FLI.pep
PSCSRTRSSRTRLSGTKKPSRIFASSSYHEENDDNYVEEPDAGDEFDSDFGEDESETDDEPEKEVRERLPIKKRLMFPGKTLRKTNVKKKKATPKPEDGTKADKSADKPSSSTQADLPDELEAEKAIRKSTRTSVIVRQAEREAIRAEKEATAKPIKRKKEGEEKRMTQEEMLLEAAETEIMNMRNLERVLAREEEVKKKAVVHKDTYEGPTIRFFSRDGESRLEFINGASFGSELCTTSSPYPEKPVCVVTGLPAKYGFLTPVYDIPSCSLHSHTSFNPSPLFCCSYMFHFNTSNRLDRHESFNV

SEQ ID NO: 70988 - protein, 298 aa, Zea mays
  Clone ID: UC-ZMFLMO17154B04_FLI.pep
YVHYVPNVALLIGMLQEATYLWEDDDDRFSVENIPLYDSADDEPTSINKEILVSSDGMVTQYSNISRVQSTENPGNTGTNEFAPIIVDELTTSSNGLAPMNVEPLTVSSNEFTPSNAMPMVARLVENGSTGYSAQDTHDASQNSAPKAANHANQTGPQNNSNHSTLVPVKPAPKRRGRKPKRVVHKQLDIPDICDRLTSSVACEEILYCEEVKNHAVSEIDALYDEIRPAVEEHERDSQDSVSTSLAEKWIEASCRKYKAEFDLYAAVLKNVASTPLRSKDDVGPREQNGLKYLENGS

SEQ ID NO: 70989 - protein, 527 aa, Zea mays
  Clone ID: UC-ZMFLMO17160E11_FLI.pep
MAMAMMAMRRAVALGARHIPAAAASSFRVVSLRHMSADAGAAMEKIRAAGLLRTQGLIAGQWVDAYDGKTIEVQNPATGEVLANVSCMGSRETSDAIASAHSTFYSWSKFTASERSKALRKWYDLIISHKEELALLMTLEQGKPMKEALGEVNYGASFIEYFAEEAKRIYGDIIPPTLSDRRLLVLKQPVGVVGAITPWNFPLAMITRKVGPALACGCTVVVKPSEFTPLTALAAADLALQAGIPAGALNVVMGNAAEIGDALLQSTQVRKITFTGSTAVGKKLMAGSANTVKKVSLELGGNAPCIVFDDADIDVAVKGSLAAKFRNSGQTCVCANRILVQEGIYEKFAKAFIQAVQSLKVGNGLEESTSQGPLINEAAVQKVEKFINDATSKGANVMLGGKRHSLGMSFYEPTVVGNVSNDMLLFREEVFGPVAPLIPFKTEEEAVHMANDTNTGLAAYIFTKSIPRSWRVSESLEYGLVGVNEGIISTEVAPFGGVKQSGLGREGSKYGIDEYLELKYICMGNLG

SEQ ID NO: 70990 - protein, 518 aa, Zea mays
  Clone ID: UC-ZMFLMO17179A01_FLI.pep
SRGMEERELIDSFLKMALPGTSSGLHIVHIAAEMAPVAKVGGLADVISGLGKALQKKGHLVEIILPKYDCMQHNQINNLKVLDVVVKSYFEGNMFANKIWTGTVEGLPVYFIEPQHPGKFFWRAQYYGEHDDFKRFSYFSRVALELLYQSGKKVDIIHCHDWQTAFVAPLYWDVYANLGFNSARICFTCHNFEYQGIAPAQDLAYCGLDVDHLDRPDRMRDNSHGRINVVKGAVVYSNIVTTVSPTYAQEVRSEGGRGLQDTLKVHSKKFVGILNGIDTDTWNPSTDRFLKVQYSANDLYGKSANKAALRKQLKLASTQASQPLVGCITRLVPQKGVHLIRHAIYKITELGGQFVLLGSSPVQHIQREFEGIADQFQNNNNVRLLLKYDDALAHMIFAASDMFIVPSMFEPCGLTQMVAMRYGSVPVVRRTGGLNDSVFDLDDETIPMEVRNGFTFLKADEQDFGNALERAFNYYHRKPEVWKQLVQKDMKIDFSWDTSVSQYEEIYQKAATRARAAA

SEQ ID NO: 70991 - protein, 745 aa, Zea mays
  Clone ID: UC-ZMFLMO17175F05_FLI.pep
IDLSTNQLTGDIPEDFGNLKNLTILFLYNNQLSGTIPASIGLLPQLKDIRLFQNQLSGELPPELGKHSPLGNLEVSINNLSGPLRESLCANGKLFDIVAFNNSFSGELPAELGDCITINNLMLHNNNFSGDFPEKIWSFPNLTLVMVQNNSFTGTLPAQISSKMARIEIGNNRFSGSFPASAPALKVLHAENNRLGGELPPDMSKLANLTDLSVPGNQISGSIPTSIKLLQKLNSLDMRGNRLSSAIPPGSIGLLPALTMLDLSDNEITGSIPSDVSNVFNLLNLSSNQLTGEVPAQLQSAAYDQSFLGNRLCARADSGTNLPTCPAGCRGCHDELSKGLIILFAMLAAIVLVGCIGIAWLLFRRRKESQEVTDWKMTAFTQLNFSESDVLSNIREENVIGSGGSGKVYRIHLGNGNASHSEERGIGGDGRMVAVKRIWNSRKVDEKLDKEFESEVKVLGNIRHNNIVKLLCCISSQEAKLLVYEYMENGSLDRWLHHRDREGAPAPLDWPTRLAIAVDAAKGLSYMHHDCAPPIVHRDVKSSNILLDPDFQAKIADFGLARILVKSGEPQSVSAIGGTFGYMAPEYGYRPKVSEKVDVYSFGVVLLELTTGKVANDSGADLCLAEWAWRRYQRGPLLDDVVDEAIREPAYMQDILSVFTLGVICTGENPLTRPSMKEVLHQLIRCEQIAAEAEACQASYQGGGGGGTPLLESRKKGSRRRSMSDSGRWNDDDEEDSGNFVVHVV

SEQ ID NO: 70992 - protein, 410 aa, Zea mays
  Clone ID: UC-ZMFLMO17173D11_FLI.pep
SWAYADTAPIRIVVLASLADPPLPSPRFKMQIFVKTLTGKTITLEVESSDTIDNVKAKIQDKEGIPPDQQRLIFAGKQLEDGRTLADYNIQKESTLHLVLRLRGGMQIFVKTLTGKTITLEVESSDTIDNVKAKIQDKEGIPPDQQRLIFAGKQLEDGRTLADYNIQKESTLHLVLRLRGGMQIFVKTLTGKTITLEVESSDTIDNVKAKIQDKEGIPPDQQRLIFAGKQLEDGRTLADYNIQKESTLHLVLRLRGGMQIFVKTLTGKTITLEVESSDTIDNVKAKIQDKEGIPPDQQRLIFAGKQLEDGRTLADYNIQKESTLHLVLRLRGGMQIFVKTLTGKTITLEVESSDTIDNVKAKIQDKEGIPPDQQRLIFAGKQLEDGRTLADYNIQKESTLHLVLRLRGGY

SEQ ID NO: 70993 - protein, 580 aa, Zea mays
  Clone ID: UC-ZMFLMO17215F03_FLI.pep
DRDNLDKAVECYQMALSIKPLFAQSLNNLGVVYTVQGKMDSAASMIEKAIHANPTYAEAYNNLGVLYRDAGSITLAIHAYERCLQIDPDSRNAGQNRLLAMNYIDEGSDDKLYEAHREWGKRFMKLYPQYTSWDNSKVADRPLIIGYLSPDYFTHSVSYFIEAPLTHHDSTVCKVVVYSGVVKADAKTLRFKDKVLKKGGLWRDIYGIDEKRVASLVREDKVDILVELTGHTANNKLGTMACRPAPIQVTWIGYPNTTGLPTIDYRISDSLTDPPMTKQKHVEELVRLPESFLCYTPSPEAGPVCPTPAISNGFVTFGSFNNLAKITPKVLQVWARILCSVPNSRLVVKCKPFCCENIRQKFLATLEELGLESLRVDLLPLIHLNHDHMQAYSLMDISLDTFPYAGTTTTCESLYMGVPCVTMAGAVHAHNVGVSLLSKVGLGRLVAKTEDEYVSIALDLASDVNALQELRMTLRELMMKSPVCEGERFTRGLEAAYMDMWRRYCDGDVPSLRRLALLEEHPVANEPDSDKTSEKLADLKAQRASATVEEDNQPPAMANGVRSPSSPAAAKCESNGHSSQ

SEQ ID NO: 70994 - protein, 1018 aa, Zea mays
  Clone ID: UC-ZMFLMO17202G02_FLI.pep
QNQLQELVHERGIFPMRQPSTEPEWQLCGVEGPYRMRKKLEHSKFKIDTIQNVLTSNLGSNGGKIINKEDGELLLTSGSDTMSGLNLLTYDTEQRDLDAVEFSSFKDDDDIFKGGSTISGPIGWTDDKSSVNEQSLHSATEFGAKSSSLSFHMTESHQGKSELSSPRRAPSVKGTDARTSEDKSEKELLDNGEYLIRPYLEPYEKIRHKYNCERVAGLDKHDGIFLIGELCLYIIENFYIDDSNCICEKGSEDELSVIDQALGVNKDIMGGSESQLKSPTTWGGTAKVLLGGRSWAYNGGAWGKEKLCNSSNLPHPWHMWKLDSVHELLKRDYQLRPVAIEIFSMDGCNELLVFHKKEREEVFKNLIAMNLPRNSMLDTTISASSKQESGEGSRLFKVMAKSFSKRWQSGEITNFQYLMHLNTLAGRGYSDLTQYPVFPWVLADYESDVLDLRNPQTFRRLDKPMGCQTEEGEEEFCKRYDSWDDPDVPKFHYGSHYSSAGIVLFYLLRLPPFSTENQKLQGGQFDHADRLFNSVKDTWVSAAGKSNTSDVKELIPEFYYLPEFLENRFNLDLGEKQSGEKVGDVVLPPWAKGSAREFIRKHREALESDYVSENLHHWIDLIFGYKQRGKAAEDAVNVFYHYTYEGNVDIDAVSDPTMKASILAQINHFGQTPKQLFQKPHPQRRTDRKVPPHPLRYCAYLTQQEIRKTASSVSQIVSYNDKILIAAVNCLLKPLTYNEYISWGFPDRSLRILTYDQDRLLSTHENLHGGSQIQCTGVSHDGNILITGGDDGVVAVWRFVKDGIRRLLRMEKALCAHTGKITCVSVSQPYSLIVSGSDDCSVILWDLTSLVFVKQLPRFPASVSALHVNSLTGEILTGAGVLFAVWSINGDCLAVVNTSQLPSDLILSVTSATHSDWQDTNWYVTGHQSGAVKVWKMLHCSSDEAVNSKSKSPAVLSGGLSLNGQAPEYRLLLQKVLKSHKHPVTALCIPPDLKQLLSGDGSGHLLSWSLKDDSFKGS

SEQ ID NO: 70995 - protein, 776 aa, Zea mays
  Clone ID: UC-ZMFLMO17209B01_FLI.pep
NKESGQLALLPYNWTTTVAVSRPLTHVKKLRAKVLGLTDETMRVCAVLANWNGSDNESFEGFDIGNGPEWDTTRQMFEQFVDIFINAMFDLIGPRKYSQWGGSLIDSVVGTFLTQNSADNLSSQAFMNIAAKFPKSERHCQDNATQLIDGVDRKMKSKEAFDNFDLVHSHFDEYIKSEEEVDFDKKVKSQYGEDYNRIIGNFAASMKQKNISTWDSDLMNLVKDKYGNPVCDENNLRKILASLRQPVTASNWKELQEEAYKKGYNNKSQTETSDVVDWESVLNAPFSEVAKCIAIRGQHNILAVRILAFLDHVKKAQDGSFDLDWLRFVSREKAKKFLLSIHGIGVKSADCICLLSLRHRAFPVDVNVARIVTRLGWVKLQPLNGADFHLIDLYPILDDVQRYLWPRLCTIDKEKLYELHCLMITFGKVVCRKKNPNCGACPFSASCKYYNSSLAKKSLPLPEKHEQGEQQTSMVAYGSCTPSSQQMYRYQIAISSTTTETPPIHSCEPIVEMPPSPEYEYNETPNEQEDFYEDYACDIEDFAPGVQYDSEINICSNKHTLNNNSWTPNCGKDLAVINPKCSFGQSKKLKNTGRLRTEHNAYVLPDGHVILEEFEDRVPGDRCPYLLVVISCPDDYKVKGTVLIPCRTANRGKFPLNGTYFQENEVFADYSSSRNPITVPRECIGMLERSIVYFGSSIHSITKGQTRQDIQECLKEGYICVRSFHRKTRIPLRLCSTLHATNTKPAREKPMKRTRTSPEGKKNGTSPEGKKNESLF

SEQ ID NO: 70996 - protein, 769 aa, Zea mays
  Clone ID: UC-ZMFLMO17201H12_FLI.pep
PLFPRQETTLRPSVLLVVDLNLSSSRSQTDIDPSDRLRIASLHLLPSVRVCLVRAPAAKAGAEMTMPGSPARPSFSALRGARWRAYLGVIPGFAAVSTDELRRAAADSRRRYANLRRRLLIDPHLSKDEEGAPDLIVENPLSQSPGSTWGQYFRNAELEKMLNQDLSRLYPELGDFFQTSTCQSMLGRVLLVWSLRYPEFGYRQGMHELLAPLLYVLHADVQHFRQVRDLHEELLGDDFDGQTFPDRSKLNRSDRKNSVEGRTEKFMEHDAYSMFENLMNGAQGVVAITDFYSLSSAPESSMGLTPVREASSAIYHLLASVDSSLHSHLVELGVEPQYFALRWLRVLFGREFSLDSLLFIWDEIFSSPNHSYCTDIRSRADYQFKVLCSPRGALILSMAVSMMLHLRSSLLGSEHATSCLVRLLNFPEDIDLKSLIEKAKLLQSFALEANLPSSSSRGSSLLSTPNYWEETWKILQPSMDQKGGGVLKMKGRGFLRRSLSSTESNVSRSKAANFENNDMTSTRQSTTDEFHNADVVPAELITSVPHMLIEKQKHHVGKGTAETIGSNSKNGCETGQHDGYCSTSGEIRDPLGAASGYLSRSSSITLSCGTEYDHDTHHLEEPCDPCDDRVVNEPDPLSVHNTRTDEAATTDRTSGIVDTYPVRQRRLCSVDGKLKIKTRNATSAKGDEKETLAICSISNVADKELSRTLRSLGESMVENIQDIELLLKPNSLSTSVEKLEEAIPGSTEQAKAVAALKELRKISDLLRQI

SEQ ID NO: 70997 - protein, 522 aa, Zea mays
  Clone ID: UC-ZMFLMO17305C04_FLI.pep
PPPARHCSARLPRSSICGLASQPHAGSGSMDQPPNGFAAGGFFTHIDGQNRSPPSIIVIGGGISGIAAARALSTASFNVTLLESRDRLGGRVHTDYSFGCPIDMGASWLHGVCNENSLAPLIRMLGLRLYRTSGDNSVLYDHDLESYALFDKHGQQVPQEIVSKVGETFERILKETVIVRDEHANDMPLFQAIGIVFDRNPHMKLQGLEYEVLQWCICRLEAWFATDMDNISLKTWDQEHMLTGGHGLMVNGYDPVIRAPAQGLDIHLNHRVTKIIQRYNKVIVCVEDGASFVADAAIVTVPLGVLKANIIKFEPELPKEKLSAIADLGVGIENKIALKFDTVFWPDVEVIGRVAPTSNACGYFLNLNKATGNPVLVCMVAGRFAYEIEKLSDEESVNFVMSQLRNMLPQATDPVQYLVSRWGSDPNSLGSYSCDLVGKPADLYERFCAPVGSLFFAGEAACIDHSGSVHGAYSSGIAAAEDCRRRLSAQLGISAGLFQVGKAAMREEMTAEAMVPFQISRL

SEQ ID NO: 70998 - protein, 351 aa, Zea mays
  Clone ID: UC-ZMROB73075E12_FLI.pep
DPSLITIFLNAAAPRHRARLPDPDPAIRLLPFLRSAGPDHSSTMAAAAGGGAVRALSQKEQDIQMMLAADVHLGTKNCDFQTERYVFKRRSDGIYIINLGKTWDKLQLAARVIVAIENPQDIIVQSARPYGQRAVLKFAQYTGAHAIAGRHTPGTFTNQLQTSFSEPRLLILTDPRTDHQPIKESALGNIPTIAFCDTDSPMRYVDIGIPANNKGRNSIGCLFWLLSRMVLQMRGTILPGHKWEVMVDLFFYRDPEEAKEQEEEAAAAPEFAAITDYQGTDQWGGDQWTSDVAAPPVAPTGADWGAALAPVPTGEGWDQAGAPVPADGTVHPVVAPTGWDQAAPPTAQGWE

SEQ ID NO: 70999 - protein, 595 aa, Zea mays
  Clone ID: UC-ZMROB73079F04_FLI.pep
GEVYKGVLDDNSLVAVKKYIHNVKEDFAKEVIVHCQINHRNVVRLIGYCIGENALMMVTEYISRGNLSDILHSSEISISLETRLSIAIGCAEALSYMHSQMYGKVIHGDIKPANILLDDNLTAKISDFGISKLLSTDNTLYTTHVLGSIGYMDPLFARSGRLTSKSDVYSFGVVLLELITRRKAVDGGQISLTENFTQALAKRNKIREFYDVKVADENSLRILDGIGKLAAKCLAMEIEKRPEMKDVAEQLRMFRKTQYQSQEKIFFFGWVRRSKQPPQNMVQIHKNRGNQVLKAEVQTQEVSKVDKDVHNVTVVRDRSSKLYSFGSSQGIELEKLLEASAEVLGKGKYGTTYKTTLHDGSTLIIKRLKTLDVPEAVFKKRIVAIGTIEHELVVPLRQYYYSKDEKLLVYDYFPNGSLASNLHGKDVKPVGWETRSAIALSVARAVAFIHSTNAAASHGNISSSNVLLTSNYEGLVSEHGLKTLVSIPTLLADNNIAQKDDVYSFGVILLEMLTSKSPIVTDEPDLVDWVLSIPHEHWATQAFDKKLLTNKTVVEELVQFLKLAIHCCDKNPTMRPAMAEVVQRIEGIRRFYSWE

SEQ ID NO: 71000 - protein, 440 aa, Zea mays
  Clone ID: UC-ZMROB73070H02_FLI.pep
SKNRKIFGGEGMMLEGKSYLVSRSVPSSCEPEAEWEYLAHAVLSGKRPAPEDDVEVEDPDETGSGGKRSKPPSPQPHTPDICEGHGSNRHATGSGEQRITGSNPMTSIGRDLTLNCLLRLSRSDYGSVASLSRDFRSMVRSGEIYRLRRQNGVAEHWVYFSCNVLEWDAYDPYRERWIQVPKMPPDECFKCSDKESLAVGTELLVFGMARIVFRYSILTNSWSRADPMNSPRCLFGSTSVGGKAFVAGGTDCVGNILSSAEMYDSETHTWTPLPSMNTARKMCSGVFMDGKFYVIGGVANSNRVLTCGEEYDLKRGSWRTIENMSGGLNGVTGAPPLIAVVSNELYAADYGEKDLKKYDKKNNRWITLGKLPERSVSMNGWGLAFRACGDRLIVIGGPRTYTGGTIELNSWIPDERPPVWNLIARRPSGNFVYNCAVMGC

SEQ ID NO: 71001 - protein, 439 aa, Zea mays
  Clone ID: UC-ZMROB73077D07_FLI.pep
YFWCLFAGIMVLKSHTNLLDMCCEDVFDFQQPLRSPRHVVNSPGIISDPDWESSNDGNSVGSMPFCFKRKIIVANFLPVICAKNEATGEWSFAMDDNQLLVQLKDGFPIGNEVIYVGSLNVQVDPIEQDRVSQKLFKEHRCVPTFLPAELQHQFYHIFCKQHLWPLFHYMLPVCHDKDELFDRSLFQAYVRANKIFADKIVEAVNSDDDCVWVHDYHLMLIPTLLRKKLHRIKVGFFLHSPFPSSEIYRTLPVRDEILKSLLNADLIGFQTFDYARHFLSCCSRLLGLNYESKRGHIGIEYFGRTVSLKILAAGVHVGRLEATLRLPATIKKVQEIESRYSGKLVILGVDDMDIFKGISLKLLGLELLLERTPKLRGKVVLVQIVNPARSIGKDIEEAKYEAESVAQRINDKYGSANYKPVVLIDYSIPFYEKIAFYAA

SEQ ID NO: 71002 - protein, 394 aa, Zea mays
  Clone ID: UC-ZMROB73049G11_FLI.pep
RIVAMAAAALLRRIPAARAPATAFMAARPVSDSTAALTIETSVPFTSHLVDPPSRDVTTTPAELVTFFRDMSLMRRMEIAADSLYKAKLIRGFCHLYDGQEAVAVGMEAAITRSDSIITAYRDHCTYLARGGDLVSAFSELMGREAGCSRGKGGSMHFYKKDANFYGGHGIVGAQVPLGCGLAFAQKYKKEETATFALYGDGAANQGQLFEALNISALWKLPAILVCENNHYGMGTAEWRAAKSPAYYKRGDYVPGLKVDGMDVLAVKQACKFAKDHAVANGPIVLEMDTYRYHGHSMSDPGSTYRTRDEISGVRQERDPIERVRKLLLAHDLATAAELKDMEKEIRKQVDDAIAKAKESSMPDTSELFTNVYKKGFNVESFGPDRKELRATLP

SEQ ID NO: 71003 - protein, 360 aa, Zea mays
  Clone ID: UC-ZMROB73058A09_FLI.pep
TQDRQANEARVLTTTIPCCNDAAGDGVHLRRGGAAIFRRVPASAAPAPSAPALPPPPPRAPLHRRPLPLLQFRPEPGPPSAGLRPGERQRRRPRGGEGPDQAVGALRRVALPAQGARHLRRRQPDGVHGGVPAADGAADAAGLRRHAGAREGRHRQPRRGSHGGPLLAPRPGPRSQLLPPEQDRDRTRQNPRLLSRCRLWKGIGGSALGPQFVAEALAPDNPPLKIRFIDNTDPAGIDHQIAQLGPELATTLVIVISKSGGTPETRNGLLEVQKAFRDAGLQFSKQGVAITQENSLLDNTARIEGWLARFPMFDWVGGRTSEMSAVGLLPAALQGIDIKEMLVGAALMDEETRNTVVSHY

SEQ ID NO: 71004 - protein, 696 aa, Zea mays
  Clone ID: UC-ZMROMO17068C07_FLI.pep
FMNLLAMATMSAACFLPWRRSHRCCASSLRASTVLFVLAVLVSDVGGRHHRHICPPYFSCGGLSDISYPFRRQGDPSGCGVESYELVCTDTDATIRIGSGTYTVLSINSTYSYFWVVDADLDIQSSCPLPRWDYHLFPFILRIDNSHRRRIEFSHDTPFSSYMDSVWAIFVNCSQPLENNDTDKYHRYEPVSCLSNSSFIYLATGYRYDGYVSAGDLKPSCGYLAMTPLGGPGMPVPWNTSYPDVVKFMRSGFALRFPFSYGDNIRECLANNMRTFLKDPRSSTGIKELIVDILTVVDIFWACVIYQLQSTNNNGVTTVLIGIIETIQYVSGVLKYTAVVCRFVLMPLAVFVFLVYKYWKTRITVDAVEKFLRMQQMLVPMRYAYTNIIAITGHFRDKLGQGGYGSVYKGVLQPGEVHVAIKMLGNSNCNGDEFISEVATIGKIHHVNIVRLIGFCSEENSRALIYEFMPHGSLDKYIFSSEKSLSWDKLNEIALGIARGLNYLHHGCDMQIVHFDIKPHNILLDNNFVPKVADFGLAKLFPKDDNFVPLSAMRGTIGYIAPEMVSRSFGVISSKSDVYSFGMLLLEMTGGRRNADPHAGSSSQAYYPSLVYSQLSQGDANEISEGVDMHELEKKLCIIGLWCIQMKPQDRPMMSEVIEMFEDGVDGIQMPPRPFFCDDEGDSYYSAISKLDTIEE

SEQ ID NO: 71005 - protein, 645 aa, Zea mays subsp. mexicana
  Clone ID: UC-ZMROTEOSINTE005A06_FLI.pep
DILRRIRHDNVIALHDSVKDHGSIYLILEYCRGGDLHAYLQRHKRVSEKVAKHFIRQLASGLKMLRDNNVVHRDLKPQNILLVENNENTLLKIADFGFAKFLQPFALAETLCGSPLYMAPEVMQGQKYDAKADLWSVGVILYQLVTGIPPFNGDNQIQLLKNILRTHEIRLPSDCELSHDCIDLCRKLLRLNSVERLTVEEFVHHPFLSEHAPERTLSRTLSEIRDGFPINNISPTRPSSQSSQEDCMPFPLDDESSGQDEGPIPDSKSPMKSYGFPTGKRLDKTSGQSPSKHTSLFSRYVLGNNHAPSSQHHGHTDKMTKESKIHEVQGPKGVYPEDSPIIDSLEFVDQEYVFVSGPHPEGSSSSTNASQQLNLPAKYDNLSVSPPKLTFLSAPMPINGLPINRQQSAGTGSFDSHYSPASVISQGSADISDAMDQPPSDYLTRIRLLEQYASAIAGLVRDEIKGGRHLVAFSIQLIVLATWKQAIHLCNTFVASLARESPSQDIHMKGLSADASHLLANSKLADDVCVQIEKQFLSEVEYAEELASTVGQIADGTEMPDAIEMIFQSALLTGRRGGVDEMFGKAADAMTGYTRAVSMLRFLLIEAPSLALNPPLTLTRSDRHRLRTYIEALNTRLCQMQSQRH

SEQ ID NO: 71006 - protein, 300 aa, Zea mays subsp. mexicana
  Clone ID: UC-ZMROTEOSINTE042D09_FLI.pep
KSAMATPVQMPDLIDTGDQDGLATSSGQESNGQKNTGKAYVSSVDDLLGGEPIADTSVTADSNGSDPFADVSFHEVEAKETNDLFSGLIVEEKSSATMHGSSSSNKNELPDIFGSPPDSFIQGSVTDQGTVNDLMSGLNLNGTGQAHPPVKAEPNSTFSGSQFFDTNNEIGHVASAAALNGIVGQNSFYQQQQTPLQYSFPQHMMLNQSFPGQQLNYGAMGILLAQQQQLLQNFGNFNAELGNSSFNSMNSGNASVLPDIFNSSNQPQNHVAAMSSSKKDDTRAFDFVSDHLAAARASRK

SEQ ID NO: 71007 - protein, 371 aa, Zea mays subsp. mexicana
  Clone ID: UC-ZMROTEOSINTE070B07_FLI.pep
NEEVQKAAAALKGSDHRRATTVAARLDAQQKKLNLPVLPTTTIGSFPQTVELRRVRREYKAKKISEEEYISAIKEEISKVVKIQEELDIDVLVHGEPERNDMVEYFGEQLSGFAFTANGWVQSYGSRCVKPPIIYGDVSRPNPMTVFWSKTAQSMTARPMKGMLTGPVTILNWSFVRNDQPRFETCYQIALAIKKEVEDLEAAGIQVIQIDEAALREGLPLRKSEHAFYLDWAVHSFRITNCGVQDTTQIHTHMCYSNFNDIIHSIIDMDADVITIENSRSDEKLLSVFREGVKYGAGIGPGVYDIHSPRIPSTEEIADRVNKMLAVLDTNILWVNPDCGLKTRKYTEVKPALTNMVSATKLIRTQLGSAK

SEQ ID NO: 71008 - protein, 485 aa, Zea mays subsp. mexicana
  Clone ID: UC-ZMROTEOSINTE115B12_FLI.pep
RSKPMEPDRLFDCLPSTLRPSSESQPEGGKNPSENQQNPEAVVYSPPALIEPKFVPLLSKLAQQLVQAGCQQQCSEIYSEARSSALESSLKNLGVEKLSKDEVQKMPWEILESKIGNWIHFMRIAVKLLFAGERQLCDQVFECSQSLRDKCFAAITKNSLATLLSFGEAIAMSKRSPEKLFVLLDMYEIMCELQTEIDTIFVGESGSQMRDSALSLTKCLAQTAQKTFSDFEEAVEKDATKNIHTDGTVHPLTSYVINYVKFLFDYQSTLKQLFQEFKEDGTGSELAAVTMKIMQALQNNLEAKAKQYKDPALMHIFLMNNIHYIVKSVRRSEAKDLLGDDWIQRHRRIVQQNANQYRRIAWAKVLQCLSGQGLTSSGGSGHVGSDGGNSSGASRTAVKERFRSFNVLFEEIYHKQCGWSVPDTELRESLRLAVAEILLPAYRSFIKRFGPLIENSKAPGKYVKHTPEQLELLLGNLFEGKQERA

SEQ ID NO: 71009 - protein, 120 aa, Zea mays subsp. mexicana
  Clone ID: UC-ZMROTEOSINTE117B01_FLI.pep
NKLPRTEQSRHSLQDNNFPRHRVLVHDKSPIFIPGEKLLHQFVPTRSTSRFCFRGCFAMSIRGWCSAILLLNLLFRQVRSMRNIQGLCSLESILVFLLKTLQSLHLLLRRWSRFLLAVYH

SEQ ID NO: 71010 - protein, 403 aa, Zea mays subsp. mexicana
  Clone ID: UC-ZMROTEOSINTE117D05_FLI.pep
AGKGKYKNPELWTDVLSEHEKDVLESADAVNNNQLLVNYMSDVKHILQIRDLRTGNFIHQLPLEIGSVSEISCRREDKEVFIGFTSFLSPGIIFRCNLASTIPEMKMFREISVPGFDRTSFQVKQVFVPSKDGTKIPMFIMSKKDIDLNGSHPTLLYGYGGFNISITPSFSVGRVVLCKNMGFVVCVANIRGGGEYGEEWHKAGALAMKQNCFDDFAACAEFLISNGYTSSRRLCIEGGSNGGLLVAASINQRPDLFGCALAHVGVMDMLRFHKFTIGHAWTTDYGCSDKEEEFQWLIKYSPLHNVRRPWEQSSGNNCQYPATMLLTADHDDRVVPLHSLKLLATLQHVLCTSTEDSPQTNPIIGRIDRKSGHGAGRPTQKMIDEAADRYSFMAKMLGASWTE

SEQ ID NO: 71011 - protein, 394 aa, Zea mays subsp. mexicana
  Clone ID: UC-ZMROTEOSINTE120C08_FLI.pep
RSQADRVFLRTMASAAPVEEPTAAAEAKGRLTGDSFIRRHLRTLAPYQPILPFEVLSARLGRRPEDIIKLDANENPYGPPPEVAAALGSLKFPYVYPDPESRQLRAALAEDSGLESDYILAGCGADELIDLIMRCVLEPGDKIVDCPPTFTMYEFDASVNGALVIKVPRLPDFSLDVDLIVEVVEQERPKCIFLTSPNNPDGSVINDEDLLKILDLPILVVLDEAYIEFSSLQSRMAWVKKHDNLIVLRTFSKRAGLAGLRVGYGAFPLSIIEYLWRAKQPYNVSVAAEVSACAALQNPTYLENVKNLLVKERERLFNLLKGIPFLKPFPSHSNFILCEVTSGKDAKKIKEDLAKMGVMIRHYDKKELKGYIRISVGKPEHTDALMKGLNALRL

SEQ ID NO: 71012 - protein, 181 aa, Zea mays
  Clone ID: UC-ZMFLMO17255A02_FLI.pep
EFLNVLPPGGCDLAEANFSRADLSGADFRKANFDHANLYKVNLSQAQLRHGTVEEAFLQGADLSQANLKGANLGRALMKEVNLSLINLSEIHLKALPNKEQINCAGCALRGTIFQGANFQNANFEYALMEKALLAGAILRGANLIDACLRGADLRNVNFQNSHISGINLAKTIMPDGSVHP

SEQ ID NO: 71013 - protein, 311 aa, Zea mays
  Clone ID: UC-ZMFLMO17251A07_FLI.pep
IISLSYQRQHQKRYIKGIAVAVISAAIDIYQAQQLGKFIFPKDAVAIFTVVLLNGILGYVQERGAEKALAALKDLSTSRVRVIREGKTTEVESTELVPGDLILLEAGVKVPADGRILEGANLQIREAALTGEAEAVMKQGDVLLPADSALGDRLNLVYSGTEVVQGRGTVIVTATGMKTELGKIASALQSVEPEPTPLQKRMTQLGNVLVSGSLILVAIVVVGGTLFKPDLFMQLVEVSLSMAVAVVPEGLPAVITVTLALGTQRMAKRNALIRQLSAVETLGSVTTICSDKTGTLTQNKMVVQSIISDHQ

SEQ ID NO: 71014 - protein, 488 aa, Zea mays
  Clone ID: UC-ZMFLB73052D07_FLI.pep
SDSERHPKMSSGSRDGRTRSAHSLSSVLSQYRGDDDTDFPGSEATSGSKRWGNVADVTYGRQNQKQREPLNFPQRKGPLDGGFFSRRSFKEIGCSDEMLGALRNFDFPRPSHIQAMAYGPILEGRSCVVADQSGSGKTLAYLCPIIQNLRNEEVQGLHKSSPRNPRVIVLTPTAELASQVLNNCRLISKSGVPFRSMVATGGFRQKTQLESLDQELDVIIATPGRFLYLLQEGFVQLANLRCVVLDEVDILFGEEGFEQVLHQLITVAPVTTQYLFVTATLPLDIYNKVVETFPDCEVIMGPGVHRTSSRLEEILVDCSGDDNEEKNPETAFSNKKTALLKIIEESPVRKTIVFCNKIETCRKVENALRRVDRKASQIKVLPFHAALDQAQRIANIKEFLNKQTADSMFLVCTDRASRGIDFANVNHVVLFDYPRDPSEYVRRVGRTARGASGNGKAFVFAVGKQVSLARRVMERNMKGHPLHDVPCV

SEQ ID NO: 71015 - protein, 496 aa, Zea mays
  Clone ID: UC-ZMFLB73001E08_FLI.pep
VGSGSRVPAIIKIITDFFGKEPRRTMNASECVARGCALQCAILSPTFKVREFQVNDGFPFSIALSWNGDSQNAPQQTLVFQKGNAIPSTKALTIFKSSTFEVDVLYVDPDNSQIPQKISTYTIGPFQTSNGEKAKLKVKVRLNIHGTVTVDSVIMLEEDVEVPVSSANEAPNDTMKMDTDDVPSDPAAGSDVTMQEQPPAAGNGAQDNEEKSVSMETDAKVEPSKKKVKKTTVPVHELVYGALAAADLQKAVEKEYEMALQDRVMEETKEKKNAVEAYVYDMRNKLYDKYSDFVTPEDKEGLIGKLQEVEDWLYEDGEDETKGVYIAKLEELKKVGDPIEVRFKEWEIRGSAVSQLLYCIKSFREAALSKDQKFEHIDMSEKQKVISECSEAETWLMEKRQQQDALPKHANPVLLAADLKKKAETLDRFCKPIMTKPKPVPKPQTPPPAETQAPEPQTPEQQRSNGESTTSEGAAEEPPAEQMETDKPEGATDPSA

SEQ ID NO: 71016 - protein, 144 aa, Zea mays; identical to SEQ ID NO: 51137
  Clone ID: UC-ZMFLB73006B03_FLI.pep

SEQ ID NO: 71017 - protein, 460 aa, Zea mays
  Clone ID: UC-ZMFLB73058D05_FLI.pep
SKGVSEKFTQASDNQKLEAKSRLLDLVNKGVEASLVQLLETGLLHADPHPGNLRYTPEGRVGFLDFGLLCMMERKHQRAMLASIVHIVNGDWASVVYDLTEMDVVPPKTNLRRVTMDLEDALGEVTFEDGIPEIKFSKVLGKIWSVAFKYHFRMPPYYTLVLRSLASLEGLAVAADGTFKTFQAAYPYVVRKLLSENSLETRRLLNQAIFNKRKEFQWQKIDAFLKLASARTNFKYNSEVLPEPDMKSMNVASLVEISDAYSLDRAIATPERALHTANLCVRLLLSKESIVIRRLIMTANAKSLARDLISRDALMFRVLLSKVIADVVYQWMLSATGLKRVMETKIQTPMTTGKNEGHLVLAEEPSTLMVLQAAVKDRRIQLMFTKFVRELREEPVLMIRVSWNVFLISVSSAAVGLHRFLVFFLKEDGARFLDDKVKKMKIWLMEFSKRTANLEIQGIL

SEQ ID NO: 71018 - protein, 255 aa, Zea mays
  Clone ID: UC-ZMFLB73155E10_FLI.pep
LFYSYLLVSPSRRQADRRRPDDPGGPDRGGGGARVRAVRGGVGGREHLRRAREPGRDLRRLRGRQHHPVPRAPVLGGAAAGVHRGVLPAPLLDGRAGHGHLRADGRVGVGGAGAGDRDDLRAGVHGVRDGGGPEEGQPGHHRPHCHRLHRGGQHPGGRRLRRRVHEPRRVLRPRPRQLGVGLPVGVLGRPPHRRRPRRRHLRAALHLPHPRAAPLHRLLKAEADRPRGAQRSAASIQRSLPARRRLVSLVHVHAS

SEQ ID NO: 71019 - protein, 127 aa, Zea mays subsp. mexicana
  Clone ID: UC-ZMFLTEOSINTE065A05_FLI.pep
SQRLNPAPPNYITAQLLEPGAIYRLKTHRHGHCTGQRCPALAPLCRRRGGSGIDLGVHGVVLGADATAVRAADVAPRRQPAQRRPESGAGSRLDRRQPALQGGSGHVPDVHLAAAVLGAAPGAGDPD

SEQ ID NO: 71020 - protein, 178 aa, Zea mays
  Clone ID: LIB4863-002-E8_FLI.pep
AKKKKANHSFSPISSSSSPEGEQPGGGGASSSRRWKMSYLLPHLHSGWAVDQAILAEEERLVIIRFGHDWDETCMQMDEVLAAVAETIKNFAVIYLVDITEVPDFNTMYELYDPSTVMFFFRNKHIMIDLGTGNNNKINWALKDKQEFIDIVETVYRGARKGRGLVIAPKDYSTKYRY

SEQ ID NO: 71021 - protein, 225 aa, Zea mays
  Clone ID: 700086072_FLI.pep
VAASQRPTRLCSNEPSLPNLHAVPALASAPDPDPGWNRERPYTMADFSKESCPSVKNILLLDSEGKRVAVKYFSDDWPTNASKLAYEKSVFTKTLKTNARTEAEITLFDGYIVVYKFVHDLHFFVTAGDDENELILASVLHGFSDSVGLLLRGDVEKRTALENLDLILLCIDEIVDGGIILETDANTIAGKVATNAVDGSVPFSEQTISQALATAREHLARSLLK

SEQ ID NO: 71022 - protein, 343 aa, Zea mays
  Clone ID: 700224494_FLI.pep
TQSRRLTPQNPLAVADRSSLPLLSLSLLPFLPSTPPPSATMASSVAVSLRALAAAPLPKSSPATSCPFFVLLAPALPRRLLRLRSARRLPLAPLAASDSAFESSVGVNYAEPDDSEKDKEVELFGSGDDEGAGELVDDHSVEVSAAVEDEVEEEVGEYVEPPEEAKVYVGNLPYDVDSERLAQLFDQAGVVEVAEVIYNRETDQSRGFGFVTMSTVEEAEKAVEMFHRYDVNGRLLTVNKAAPRGSRVDRPPRQSGPSLRIYVGNLPWQVDDSRLVELFSEHGKVVDARVVYDRETGRSRGFGFVTMASQDELDDAIAALDGQSLDARALRVNVAEERPRRGF

SEQ ID NO: 71023 - protein, 168 aa, Zea mays
  Clone ID: 700264033_FLI.pep
TRIPNGGGHSARQVAILRFSCHLPSSPSPSISGEGQSRPLALGGGLREGENMAAAAVLVVLTVSALAGAAAGGDIVHHDDEAPKIPGCSNDFILVKVQSWVNGKEGGEFVGVGARFGPKIVSKEKHANRTKLTLADPMDCCSPPKHKVGIIQLVMKVGNRIVRINLIF

SEQ ID NO: 71024 - protein, 356 aa, Zea mays
  Clone ID: 701180894_FLI.pep
CTEVLSSQQSLLPRFFRTPPSIGPSSTIDLPNSAVIGTNPARALAPCRSPRPARAAGGSLPSTSSGRSSALPAAGFLLLDWIAARGVVSIAPSILTDTDRPLLSWGHEDRYTIYVHASRDIPSHSSPIFAGRDIRSEKVIWGTISMLDAEKRLLAHALQDPENQHFVLLSESCVPLHNFDYIYSYLMETNVSFVDCFDDPGPHGAGRYSEHMLPEIVKKDWRKGAQWFTVKRQHAILILADTLYYGKFKRYCKPGNEWHNCYSDEHYLPTLFNMVDPTGISNWSVTHVDWSEGKWHPKVYRAADTSFDLLKDIAHVAQRRPCVWNGMKRPCYLFARKFYPEALDNLLNIFSNFTII

SEQ ID NO: 71025 - protein, 489 aa, Zea mays
  Clone ID: LIB3245-182-D8_FLI.pep
QQALAVVPLLCLVGPSSSSSPSPVLLASRTRGQPVDPRCRHCWGGPCSSLVRLAGLLAVEYSGGGVVFFASIGLHPPLLHSTCASLQPTGRGRGASTNSSRPRRAAGLARVPSPMAAAAIHQFAECITCHAWSPDQSMIAFCPNNHEVHIYKFFTDKWEKLHVLSKHDQIVSGIDWSNSSNKIVTVSHDRNSYVWTQEGSDWIPTLVILKLNRAALCVQWSPKENKFAVGSGAKSVCICYYEQENNWWISKVIRKRHESSVTSLAWHPNNIYLATTSTDGKCRVFSTFIKGVDTRGSQSSTSTNSKFGEQIAQLDLSSTWVFGVRWSPSGKTLAYAGHNSMVYVIDEVESSPVAQNLTLRDLPLRDVLFVSERTLVGVGFDCNPMIFAADDTGLWSFVRFLDEMKAAPSASKASQLSEALGKLYGQSKQGASSDTVEPSKARGGAHENCITCIVPLRKGSDGTIKRFSTSGLDGKVVVWDLENHVSIAK

SEQ ID NO: 71026 - protein, 206 aa, Zea mays
  Clone ID: LIB3279-221-A8_FLI.pep
KKFSSTRARTVQICVELATTKKRDSTAADYYRKITGLANELAAAGAPLQDDEVLSYLLAGLSAEYDLFVTSITTKTDPLSLDDVFAHLMVFEARQLQHQAEIQLNTGMSANYVGRGGRGHRGRGRNTCGCGHFAPRGGAPPRASGGHGSSSRPTCQICEKEGHTAIKCWIAWMNPTLRHLHPQLWWPLLRTRSIQTGILIRALPIT

SEQ ID NO: 71027 - protein, 271 aa, Zea mays
  Clone ID: LIB3689-213-B11_FLI.pep
RQNGDYLYITGCTQPGGVAVLSEETGFCMFMPDTNKEDLVWQGETAGVEAAVDFFKADKAFPLSQMQKILPELIEQSKGVYHNVNTTSSYKNLDAFRRASLNNKVKDLTNYTDELRWVKSKSEIKLMRESASIVSQSLLQTMLMSRTHREESQLAAKIEYECKMRGAQRMAFHPVVGGGANGSIIHYSRNDRKIRTGDLLLMDVGCEYHGYLSDLTRTWPPCGRFSPAQEELYSLILETNKECIKLCKPGTSINEIHNHSTYLPKKSIKCR

SEQ ID NO: 71028 - protein, 236 aa, Zea mays
  Clone ID: LIB3689-248-D3_FLI.pep
RGCDNAGARQLSAPHGDPLHHVLELAEVDAAVAVAVDVADHLLHSGQVPSLGQAELLEHGLQLGGRDEAVAVLIEHPERLLHVPLVVVILGHSHRHGAEQRVPERAVEGLEVVEAEPRGAGRDVPANRGLQAGAVGAEAERVERRGHLVEADLAVAVAVEEVEHAAQAQCVEAAVPEAERRRGLLGQRRLSDGGGGVLHRHVNSRRSVSSFLRVFCGREDTRADYFWSSLSVAGYR

SEQ ID NO: 71029 - protein, 88 aa, Zea mays; identical to SEQ ID NO: 66095
  Clone ID: LIB3824-002-E6_FLI.pep

SEQ ID NO: 71030 - protein, 288 aa, Zea mays
  Clone ID: LIB4171-027-C11_FLI.pep
TSRAMARSRPRVWLVAGCAAVLLWASVAQLVAVGRFLLLFGLAGDADPSPPPSALPPPRIYTSNGYLKISCNGGLNQMRSEICDMVAVARLLNLTMVVPELDKRSFWADQSNFGDIFDVRHFINSLRDEVHIIEQFPEKLGPRDSNIIVLEMPPVSWSDEKYYLHQILPLFNKYSIIHFNKTDARIANNGISTELQLLRCRVNFHALKFTPQIEGLGNKLVHKLRAKGSFVALHLRYEMDMLAFSGCNHGLSPEEAQELKKMRSGSVCFKHLIWSRSFRIDHRPHNPL

SEQ ID NO: 71031 - protein, 195 aa, Zea mays
  Clone ID: LIB4302-007-G6_FLI.pep
AYLRDSKLLPFPTAAAAPPHSVDTMRECISIHIGQAGIQVGNACWELYCLEHGIQADGQMPGDKTIGGGDDAFNTFFSETGAGKHVPRAVFVDLEPTVIDEVRTGTYRQLFHPEQLIGGKEDAANNFARGHYTIGKEIVDLCLDRIRKLADNCTGLQGFLVFNAVGGGTGSGLGSLLLERLSVDYGKKSKLGFTV

SEQ ID NO: 71032 - protein, 196 aa, Zea mays
  Clone ID: LIB4302-014-G8_FLI.pep
AYLRDSKLLPFPTAAAAAPPHSVDTMRECISIHIGQAGIQVGNACWELYCLEHGIQADGQMPGDKTIGGGDDAFNTFFSETGAGKHVPRAVFVDLEPTVIDEVRTGTYRQLFHPEQLISGKEDAANNFARGHYTIGKEIVDLCLDRIRKLADNCTGLQGFLVFNAVGGGTGSGLGSLLLERLSVDYGKKSKLGFTV

SEQ ID NO: 71033 - protein, 332 aa, Zea mays
  Clone ID: LIB4302-017-H12_FLI.pep
NPCGGYLSLTPFLASRRLPFPPSRLSPRGRRRRPLVASCCPPPNLPQVREGICCFSSVLPGDWLWAEMLVLFETPAGFALFKVLDEGKLDKVEDLWKEFTTSDSARKVVELKAFNKFENTSDALSAATLIIDSKPSKGLRKFLQKHCEGETLAVADSRLGNAIKEKLKIDCLHNSAVMELMRGLRNQLTELITGLGAQDLGPMSLGLSHSLSRYKLKFSPEKVDTMIIQAIGLLDDLDKELNTYAMRVREWYGWHFPELTKIVTDNIQYAKVVKMMGNRTNAVNLDFSEILSDEELETQLKEAAVISMGTEVSDLDLSNIRELCDQVLALSE

SEQ ID NO: 71034 - protein, 197 aa, Zea mays
  Clone ID: LIB4303-009-G8_FLI.pep
LAYLRDSKLLPFPTAAAAAPPHSVDTMRECISIHIGQAGIQVGNACWELYCLEHGIQADGQMPGDKTIGGGDDAFNTFFSETGAGKHVPRAVFVDLEPTVIDEVRTGTYRQLFHPEQLISGKEDAANNFARGHYTIGKEIVDLCLDRIRKLADNCTGLQGFLVFNAVGGGTGSGLGSLLLERLSVDYGKKSKLGFTV

SEQ ID NO: 71035 - protein, 209 aa, Zea mays
  Clone ID: LIB4740-003-F7_FLI.pep
LRLRHTHREMERNRRVRVVLNSKPVPCRRARDKAARPRAEPSISRPAVRRRSARTAHGLTRWPSRPPQRPARPSRAPQRPAQPPRAPRQQQPRAPRLPVLLLSRQRALPLPPSPLQPPPAPAPPPLASLPPPPRGPPRAQRRQLARSPPGQLAPPPWPRRREQPPRARRRPEPGSPPPALPRSPRRSGSGPRQWPWVTIRRLMTTRPSG

SEQ ID NO: 71036 - protein, 146 aa, Zea mays
  Clone ID: LIB4740-032-F8_FLI.pep
PASPQSLSNMISLDLQTIYSLHRGQYLADSGNNGVRGGAPKGIDHLPEDDRHDHHRHAVAQRPNHAGQHQQNVRSVGTLKHAVERNLSHCHHLLATLLHFPTLHCIASGSFYDAFFCHVVLGCLAPAGFSLLHMAPAALLYGEFLL

SEQ ID NO: 71037 - protein, 560 aa, Zea mays
  Clone ID: UC-ZMFLB73092G12_FLI.pep
LSTWFWSMEDNGAAAAAAAPATSMPAEKRVAVIQGDAPPEPAAGLLPCGPRKTGLHLFVMNIRSVFKLDGLGSEVLRIAVPASLALAADPLASLVDTAFIGRLGSVEIAAVGVSIAIFNQVSKVCIYPLVSVTTSFVAEEDAIISKAVRGNSSQEEDVEKASHVGFDPETSNLHASGPAGMAECVNSCIPTECAADPSGRQGRCEKRYVPSVTSALIVGSILGLLQAVFLVLSARFVLNIMGVKSGSPMQGPAVRYLTIRSLGAPAVLLSLAMQGVFRGFKDTKTPLYATVVGDAANIILDPILMFVCHMGVTGAAIAHVVSQYMITLILLCRLVQRVHVIPPSIKSLKFGRFLGCGFLLLARVVAVTFCVTLAASLAARHGPTVMAGFQICCQLWLATSLLADGLAVAGQAVLASAFAKNDSKKVAAATSRVLQLSIVLGMGLTVVLGLAMRFGAGIFTSDVPVIQVIHRGIPFVAGTQTINSLAFVFDGINFGASDYRYSAYSMVAVASVSIPCLLYLSAHNGFIGIWIALTIYMSLRTIASTWRMGAARGPWTFLRN

SEQ ID NO: 71038 - protein, 455 aa, Zea mays
  Clone ID: UC-ZMFLB73206G03_FLI.pep
PNVEENLKHRKEEEFPQSRGSQEGCSSSSSPSASAAGKEISPPPATPRPQQQAQSAALPPPPSPSPASTSREDDPCRTAHSGSSGNQSPEPAARNAPPSEASSPGPSEYRVCRPVGAQDAATQTDDSERDAAENHSTRVAGASTMDTTSDAEIQECHRRSSPLSPKVPETVRESPPAVCSSDAASPGGRVETLESLIRAEASRRSSFRTLEEGHMLGPVGVKLKPANLLMQLITCGFVSVKEHRGFGFIPTYRPRFTQVEFPSPVFSTPVALRHLDRIPCNTKATGSTRAPEPECFSGSLVVETKQQDEPGRGIASLKRSSSYDEDRVYRAAHPKSNTESSCEAGSFRCLPQTIRIISCKQSRSGTVLSPPASDVRNGSIQQEHSTMSSPLGSSKSASNRMADPSPPGKLSCARAESLFREEKDMIKIEERLPSGARVIIQSAPLCEEESDDSSE

SEQ ID NO: 71039 - protein, 156 aa, Zea mays subsp. mexicana
  Clone ID: UC-ZMROTEOSINTE088A08_FLI.pep
GNHAATPAPSGTPSKGKSAAAQAAALGHGSSSHHHSAGGGGGGADASATTLKRKRGVFQKDLQHMMYGFGDDPNPLPETVALVEDIVVEYVTDLVHKAQNVASKRGKLLTEDFLYLIRKDLRKLHRATELLSMNEELKQARKAFDVDEETLATTNI

SEQ ID NO: 71040 - protein, 229 aa, Zea mays
  Clone ID: UC-ZMFLMO17042E04_FLI.pep
LRTSNILLTESYRAKVCCSELSKSGNIVLLKGTGGYIDPEYLETSELTAKSDVYSFGIILLEIISSHGPQDWDVLMNHRQSSVVQWALEKFYDDLMNEILDYRMEDRVDGDVVRDLLSLALSCVVSRGADRPSIVVVGERLWKIWQDHRRNVGEQHEYQGSWAEFIEQEGILRHHKCVLKRSWEPSTTQQDWSVYVRQIELVQEAYDTPWGEEIFSGSVSLDDITVYSR

SEQ ID NO: 71041 - protein, 387 aa, Zea mays
  Clone ID: UC-ZMFLMO17073E03_FLI.pep
GEKNNYNTDGSPMQPGKHPVDPKTSVLDKCDSSMHESNKSTNSLQDRNGSTHCPPDGNPLLGLPSGKEKSYINSNKQDSQKPKPQMVCSPLKENKLDSHSTPLKPNGSKLTPQSRQYNAQNGGRHGTAKHAIPSPADTSSPARKDNTSTAYALKEARDLKHKANRLKGEGKELESTRLYFESALKFLHVASLLEPPSFDGLKQGDAAQSMYSDTAKLCNFVGHAYEKCKKMAAAALAYKCVEVAYLKAAYYKHPTASKDRQVLQAVVQTAPGESPSSSASDIDNLNNNGLSKASSSKDANSPQVAGNHLLLAARNQPHLMRLLAYTNDVNSAFEATRKSHMAIASAAGNHENGVDGLPSVKTVLDFNFRSVNDLLRLVRISMESISC

SEQ ID NO: 71042 - protein, 480 aa, Zea mays; identical to SEQ ID NO: 69780
  Clone ID: UC-ZMFLMO17073G12_FLI.pep

SEQ ID NO: 71043 - protein, 183 aa, Zea mays
  Clone ID: UC-ZMFLMO17090B02_FLI.pep
SFSRHQPKFQKPCCSILTNVQRKHRGITNSKMTKSSMQLIKPLKSLDMPRKIFPCSTSSSCSLSPSQVTPNSNSSRLEEEHGTPTRHLLQRCVKGTTAVIQRQLQRADPDHVPLLARRDAAAAAQAGARARVVRGAVTAEEAGGAGVPGILLLPVGAADVPPHFRQSRRDRLLRRPQERAERK

SEQ ID NO: 71044 - protein, 128 aa, Zea mays; identical to SEQ ID NO: 58723
  Clone ID: UC-ZMFLMO17158A03_FLI.pep

SEQ ID NO: 71045 - protein, 536 aa, Zea mays
  Clone ID: UC-ZMFLMO17125B12_FLI.pep
NNNRKRRAVETQEKPRRLSGRTVETVNSLPLVDGAVAQVREWSFGNVPKKDASRFVRAVKKFGNATQIGLIVDDVGGVLAKVPHEAQIELFDLLVDGCQEAVKENTDIKGTVLDFFGVAVKAYELLARVEELQFLAKRIARYKDPIKQYRIQLPYKKPQWSASCGWTETDDARLMVGIHWYGYGNWEKIRLDPKLGLTTKIAPATLGERETFLPRAPNLDNRASALLQKEYAKFSGKSLKVKGNTRQTVNNDSNSGVRSMRGRQKDVPEKDDNKPNKDDIQKRRVIVEAEAREEGEISESEAETRYRQDKEEKWLEWCSEVLDEEQETLKRLDRLQNTSVNLPKEKVLSRIRKYLLIIGDKIGEVVRQHSESYRQSRMVMRLWNYVATFSNMSGEQLHDLYLKLSQDQLEGGVGPSHGGNFTSIPPNKGGNSNQLHPSRNQRPTRSLQYNSESFHNESSGSSEAWKRRRRADTDNQFDTQPLCQPPIMTNGNRLQESSSSAGILGWGPVEIRRYGNERPKRAVHPSHFPTGHGPLL

SEQ ID NO: 71046 - protein, 209 aa, Zea mays; identical to SEQ ID NO: 58348
  Clone ID: UC-ZMFLB73199F01_FLI.pep

SEQ ID NO: 71047 - protein, 409 aa, Zea mays
  Clone ID: UC-ZMFLB73206B02_FLI.pep
GSCGCRHPLLAVLLPLLLVLAMVPESAQLQSSQTWSLLKIQQLLSYPPVLRTWGNGTDFCYGGDYKTASAFVECYGDSVTQLHIMGPGGAPPLPKTFNLDALFTTLTRLPDLRVLTLTGLGLWGPLPGKVSRLASLEIVNVSGNYLYGQLPEGLSRLGGLQTFIADDNMLSGELPGWLGRLASLAVLSLRNNSLQGAVPESVRDMGSLRSLALACNNLSGQVPDLSALTNLQAVDLSNNSLGPAFPRLGRKVASVVLSGNRFGNGVPAEEVASLYLLERLDVSRNRFVGPLPPALLALPSIEYLSVAGNRFTGLLAANMSCGENLRFVDVSSNLLTGTLPSCLKTLPSSSNSKQVTVLAASNCLSGGAGSTQHPALFCQNQALAVGIVPVHARGGGKAKGKEKKKAGAV

SEQ ID NO: 71048 - protein, 241 aa, Zea mays
  Clone ID: UC-ZMFLB73208G09_FLI.pep
IPSSNSASRTSSIRQILQPTKSPHRILHPESAAFARYPVPSIIILFHDNMVGPFLLLLVAHAVLMDHLPEEIREDSLVSWHLGVAREVVDVNDEIAVAGADVADHVEVEELQAQRAAEAARDLVDECGGRHDGVLETLFAVVLLRRALSGEVGDLGEGDGSLGRCVILGGHVGQATALDASDVAADDVDLEDDAAMVDELLEHKRRAELAEALAVVDERHLVGLGGAVGDEGLGDEREAER

SEQ ID NO: 71049 - protein, 331 aa, Zea mays
  Clone ID: UC-ZMFLB73257E03_FLI.pep
QLPPLGKPFLRSASYLKEALLALAEGHHGGCHLKSPLDVALKLAAYKTFSDHSPVLQFTNFTATQALLDEIGGSTSSCIHVIDFDLGVGGQWASFLQELAHCRGAGGAALPFVKLTAFVSAASHHPLELCLARDNIAQFAVDLGIPFEFSAISADMINPAEFISATDDEDVVVVLPTGCSARAPPLPAILGLVKQLAPKIVIAIDHGADRADLPFSQYFLNCFQSCMFLLDSLDAAGIDADSACKIEKFLIQPRIEDSVLGRGKVDNPIAWRSAFAAARFVPVPPSNWAEAEADCLLKRVQVHGFHVEKCGVGLTLYWQHGELVTVSAWRC

SEQ ID NO: 71050 - protein, 150 aa, Zea mays
  Clone ID: UC-ZMFLMO17235A08_FLI.pep
AATRPHIGDVVTALSYLASQAYDPNAPVQHVRSNSSTPRARNPAGWNGDQRSVRSPNHHSPDPRRRDAAGASKYGAEVSRTSSTSDSGRRSGLDDMDLTGSQVGSPAQTGRRREAPRGTDRQRAVAEARTWGENSRERTNGHGSFDSTHE

SEQ ID NO: 71051 - protein, 63 aa, Zea mays
  Clone ID: UC-ZMFLMO17236D11_FLI.pep
VLISQEFPNSTQSKNSFSVWKHLSESDLINHPTGNGNYIQLVHIEHLPRFCNDYHLICKRIVP

SEQ ID NO: 71052 - protein, 263 aa, Zea mays
  Clone ID: UC-ZMFLMO17238A03_FLI.pep
QIAGGQPRTHRPWKKIIVIVEGIYSMEGELCKLPEVISVCKKYKAYTYLDEAHSIGAVGKTGRGVCELLGVDPADVDIMMGTFTKSFGSCGGYIAASNEIIHHLKHTCPAHIYATSMSPPAVQQVISAIKVILGEDGTNRGAKKLAQIRENSNFFRSELQKMGFEVLGDNDSPVMPIMLYNPAKIPAFSRECLRQAVAVVTVAFPATPLLLARARICISASHSREDLIKGLEVISKVGDLVGIKYFPVEQEKTTAVENLKKIQ

SEQ ID NO: 71053 - protein, 224 aa, Zea mays
  Clone ID: UC-ZMFLMO17238G08_FLI.pep
GVQITEVPGSSSKQNKTHHTSTVGHGVEAQVELHVAVQACQPSNEMKDGGEAPPNATGPSNAQLVEARMGVNGNNNGSKRKPTGAGRGRKKLRVSQAPQQRRPERVREQPLVCTICNAICDTRAVFDIHLVGKKHQSRLKRSQGPDVLFGPLVGHIPPNQSAAHMTGAPEPLYFGFKSMGASLVEQEAYLAGAMQHVLPVLPQAGPTIMAADYPAQPVASNRCC

SEQ ID NO: 71054 - protein, 180 aa, Zea mays
  Clone ID: UC-ZMFLMO17239F11_FLI.pep
RKRSSSKATDGEATNSGRDPAPEKAPSISNSNLVFGYLNLFSDGVHNFTDGMALGSAFLLHGSVGGWSRTLFLLAHELPQEVGDFGILVRSGFTVSKALFFNFLSALVALAGTALALSLGKDPGHSSLIEGFTAGGFIYIAVAGVLPQMNDQKTTIKSSVAQLISLAMGMLVALGISLVE

SEQ ID NO: 71055 - protein, 333 aa, Zea mays
  Clone ID: UC-ZMFLMO17242C05_FLI.pep
KRTDKIGDYSGSSKWGKKPVSLDDDRRSTYDQHYSRNSSLFAALDDERKLLVPVGVQQPHAYARSLARFASKLGPVGWDVAANRIRRALPPGTSFGPGWVVDGEPPQNSQWAPAASTNPSSEPTAPPNMPSKNDVLDHKSGPSSNGDVTGEEHLTRTQTVASTSASFDKSSDISSKVTKLENGVTESCGGTDNTGSAAPPMQQHSHSREIHSNINGFTAMSNAMSQYAGQGLFGSGIHMTHAQVLGMFSGMNGKVNGYIHRHPVTADSLKTAGQNGDVGKATVNPVQSAGQDPKTATENSSAHPGLNSRAQSSGSSPRGKLANPKHPDLALQL

SEQ ID NO: 71056 - protein, 303 aa, Zea mays
  Clone ID: UC-ZMFLMO17244F06_FLI.pep
AKPKARKPSSLKDPSRGARKQTPPTGRRRGPRQGQRKQHHSGAAGLSQPSTGARGFRNTLRICGIRGGISRDLLVSGETMVGFAGKRKELEQVMDGLSDFSLSGPAAKSRRLDAELPPIMEEEPPAPSMPFQMLGEKINNGVDIPSMEFMMEDLTTHHVPSEDMALVLYKPVDNSAPFGRGISSSSFIVSSDLIRGLKNHAFNQANYHVVEDESPERRNSLALVPWTPPQVSIRSDWVAAEPERTRIFEVPMDADETEVTSMDVEETPEAVSGGFNGENLGQWLHCVTPPSLPNPSAHVMWSR

SEQ ID NO: 71057 - protein, 74 aa, Zea mays
  Clone ID: UC-ZMFLMO17249D02_FLI.pep
RIELSSQTPRWDLFSGTTSRGTDSSSRTPRSNLAQLRVEFIQVHRGLLESTHKKIRSLNPTNIATHNPSLPFSI

SEQ ID NO: 71058 - protein, 213 aa, Zea mays
  Clone ID: UC-ZMFLMO17253E04_FLI.pep
PEKISRARFVVAISSYGKSQLYRWCSLADWPKIQVVHCALAADYLQQEITPVPEVPQLVCVGRLCEQKGQLLLVQAVRQLRDNGIAVKLVLVGDGELRSPIEELIEQYQLEENITITGWASSAMVQQHLLASRAMVLPSFAEGLPVVIMEAFALGRPVISTYVAGIPELVKPGVSGWLVPPGSIPDLVEAMQSVLTMSCEQLTAMAAMGQQAV

SEQ ID NO: 71059 - protein, 236 aa, Zea mays
  Clone ID: UC-ZMFLMO17266G08_FLI.pep
LRACPVRRELWRPWRGSRRSRRRTTRRRRWRASAAASRRSARRRTSRACARGSAGGGSAGCAGTRWARSWGARGPRPSPPPRRWTATPAPAAGRPRRRRPRAAPTASSLRCACCCAAGSGPRRRRGRRGPRRAARRATPPTPASPPSPRGRPGARWRARGAASPRSSNEKGKRGRTDGRGKDQGSLSLSFCLQCVMYFCSFLSMEECVGSSTRGANKHPCIYDGEEDRRRSVLFII

SEQ ID NO: 71060 - protein, 163 aa, Zea mays
  Clone ID: UC-ZMFLMO17278C01_FLI.pep
GNFMMPMNMNQPLISNAPFNYPLQQDGNPQYFSAPFQMPPLPDTGSDQGSMSSVQPPVGPMSFPEGLQRPWAMGMMGNPFHPMALGQGMVDGAGDPQGGGGLAFMQAGFGGMPDGSMNTGMPDRGDGRGVRAQMPTPMQMQMSLPPPPPTQPPSGSQQTFNRT

SEQ ID NO: 71061 - protein, 252 aa, Zea mays
  Clone ID: UC-ZMFLMO17030B05_FLI.pep
MLQRLTAVWYGRHRFLVVWWRRAGGVRHRRRRSVGGRLGGRRLRCGSVRRWGRLGCRRLWGRGVRRWGRLGRRRLWGRGVRRWGRLGRRVCGRLGAWSVRRRGRLGRRRLGRRGVRRRGRLGCRRLWRRGVRWRGRLGRGRLGSRWLRAWSVRRRGRLRCRRLGGRGVRRWGRLGRRRFGAWSVRRRGRLRCRRLGGRGVRRRSGSGFWCGFVGRRGGSVCGWRRLGGRRGGSVRRRRGFGARGVRGRRRLV

SEQ ID NO: 71062 - protein, 406 aa, Zea mays
  Clone ID: UC-ZMFLMO17021A08_FLI.pep
DPCALRIGGRWPVAMAPTTCLRIPFLPARGRSANVNAPPSWLPRRLSLKSSATNGDNSLPNPISTSPTSPPWLTVVDVNGLRRPPAPVSAPTIPGDRGPRWLPRPFTSADVMGADWKGLKVAYQGCAGAYSEAAAKKAYPNCEAVPCEHFDTAFQAVQNWVVDRAVLPLENSLGGSIHRNYDLLVQHSLHIVGEVRLEVHHCLLANPGVKIENLKSVMSHPQALAQCEHTLTGLGIEHREAVDDTAGAAKIVAEHMVQDTGAIASSLAAKLYGLDVLAENIQDGKNNVTRFMMLARKPNILRNDRPFKTSIVFSLEEGHGQLFRALGVFAQRKINLTKIESRPHKERPLRLSDDCSSLLKNFDYLFYVDLEASMADPKIQNALGNLKEFATFLRVLGSYPTNVNEP

SEQ ID NO: 71063 - protein, 138 aa, Glycine max
  Clone ID: LIB3050-023-A3_FLI.pep
EKTTEGNRKLTKLDDNTADYIRTGLSPRWSDLDINQHVNNVKYIGWILESAPQPILESHELSSMTLEYRRECGRDSVLDSLTAVSGADMGNLAHSGHVECKHLLRLENGAEIVRGRTEWRPKPVNNFGVVNQVPAEST

SEQ ID NO: 71064 - protein, 237 aa, Zea mays
  Clone ID: UC-ZMFLB73125E07_FLI.pep
NQDSFVGRVTPIARDGLLRTICGSSSSPGGYASLAQANTSQTNGVSAPGVTPRGYESAVPSLSLGNSESTGVKQVNSAPRMTPEGQKFLSLGIAPRSPALRDLVKCQASSTLVAMPPAGLGKSRSMKIEGHDSLAPSVKEPKGNGGLAPSKTPKLHEPVIADMSIKSCDSLALGIAPNGHTHDGPASGSGEAKKEQAALVTGSQSKSSVPSLDASSHVTGAASALVALSTLREKGGR

SEQ ID NO: 71065 - protein, 113 aa, Zea mays
  Clone ID: UC-ZMFLMO17190H04_FLI.pep
MSTSYTEAQFGSLLDLPAGDDLTSWFTHLCGEEQAAALPAFQAPVAMADPRKRSAEYHLLEGEASGVKRQRSPTSSSRENSAGSNDGDYEHTSAAAAAAAAAAAAGGGGGGRG

SEQ ID NO: 71066 - protein, 136 aa, Zea mays
  Clone ID: UC-ZMFLMO17201E01_FLI.pep
LIVNNAALLPIKNRTEVFLMLHDRIVDYLGCADKTKKKKKKRILSSLPYKEDWLDTAKANTKINQWVANVQNEYRATPHDLLRLNRNVRSHMHRYSDGDDIEEVLYCEWPELLMVMQKMLHLEGELEGTDIQNKFG

SEQ ID NO: 71067 - protein, 268 aa, Zea mays
  Clone ID: UC-ZMFLMO17206F07_FLI.pep
CQSTEALGAVNFPNYIWGCSAKTASNCARAGEGSLEAGLALEMVKAKARVRYEPGPAFEEVKEEAMLDISPTDSTEFWLIQWPKDQIDVLDFHGKELSLKLHSDGNLGNLENSSGKSYEIASFAAQKPDATVFLPSGSETKPVGKISRRVSLVRYPKPEEFTKPSFGSLTPSIKKSAGSKKTMSRFTGVSKNPSSQGSALSLGQRSAEPTPKHKGKRKDESSLGHSNVSGKATEGSEARGVGSNTASEMPQSPPEKSKKRRKKDKIVE

SEQ ID NO: 71068 - protein, 63 aa, Zea mays
  Clone ID: UC-ZMFLMO17219B01_FLI.pep
LVKLNFSYLIAKYLSNRLAIQLANLSGSLRPYLGQLQLQKIWWSWWSRSLSAPENRGAGAVSL

SEQ ID NO: 71069 - protein, 84 aa, Zea mays
  Clone ID: UC-ZMFLMO17257B11_FLI.pep
NGAPTFSDQTVEEIMKIVEEARTPPQSPAPVAGFGWAEEEEQEDGKKPEDDEQDGEDEQYDGEDEYDKQVKQVHASGDFRHLIK

SEQ ID NO: 71070 - protein, 151 aa, Zea mays
  Clone ID: UC-ZMFLMO17261C03_FLI.pep
AAPVRRHFQRRSRVSPPARLLIVVSRSSSTPAHQATVMGLRLVRTRRHRSTRALASVPMAARRDAVPSSTPMLAQNTLCPRRLQYSGSINVFDLLLWSPCSSTLARNSVKWRRTNWRREIYKILWMKKKMKLKSNAPNRSCARGLRVGLNY

SEQ ID NO: 71071 - protein, 74 aa, Zea mays
  Clone ID: UC-ZMFLMO17267D12_FLI.pep
QGAVKRCDAMRCGRLARGPRLGAFGLLLALESSKSCCDWDASHSLRPFCFPSPKPAAPELARFMVTIRILQRVS

SEQ ID NO: 71072 - protein, 114 aa, Zea mays
  Clone ID: UC-ZMFLMO17268G07_FLI.pep
TTRSCFDGFVSETQHKVACHVWVSLEEQTHNLTTVLRYSNSNLKKGLHITEGLVYSEDLKLHVDCIFKVSRAKDELPQAVCLGMVLCPLLFTLWWKHAAACRSRPASSLLDLGH

SEQ ID NO: 71073 - protein, 215 aa, Zea mays
  Clone ID: UC-ZMFLMO17129D07_FLI.pep
PRSCSQFYGGDTPLHSPPCHPHKISSAAAMALSSSRPKHLLRPILRGFHASARALARVEPHEFSKPSEYLGSWEPAAEPREAWARLDRLRKGYASEVRELRRQYAYEVQLLQAERQRKADARAEAARAANQERKAAKLAAAQTRAAERRAFEEDFRQTLMKERAEKLESWRKKEKRKEEKKAIKKELLRRKSSMWLSEDKIEEQIQTAIMQTTPL

SEQ ID NO: 71074 - protein, 86 aa, Zea mays
  Clone ID: UC-ZMFLMO17190C11_FLI.pep
PRVRSFWGRVWNLFRDDKGDKRFASISVQPIIPGWNSCRGTDTAVPLLLKGFLMTAIFLFVIRSKLRYTGKRIDRPTQAKIPAEPE

SEQ ID NO: 71075 - protein, 56 aa, Zea mays
  Clone ID: UC-ZMFLMO17202A07_FLI.pep
HFKQTLERILYSSLILFYNSCFKLTPIKVKKGCASSSVSSKKRVKQGSLHINNSTN

SEQ ID NO: 71076 - protein, 69 aa, Zea mays
  Clone ID: UC-ZMFLMO17202D12_FLI.pep
LVCTAASSFKTAEEHTKEELKNRWKPSHCRSLLTELGKQMWRAFTVAAPSIFMCPLMLGHLHIAGELGP

SEQ ID NO: 71077 - protein, 168 aa, Zea mays
  Clone ID: UC-ZMFLMO17209B09_FLI.pep
CDYSSTHIAEGFHCLASTASNKVWLNLSSSRVLCPRELATSLPNDDQSKITTMGLLTTWAPPSLHAYEPATTCLLATRAPLLPLLAASIFILNALFSPARAKRSRLGETVTDTPAGSTTATTYRAAPGPTLVTVRRTVTEPLSPRTATDGWFSWCGGGGRGGHGTERS

SEQ ID NO: 71078 - protein, 240 aa, Zea mays
  Clone ID: UC-ZMFLB73086F02_FLI.pep
ESKALEVMELDQKIDLVHELDGHIMRCVRDQNGNHVIQKCIECVPTEHIGFVVSAFQGQVTSLSMHPYGCRVIQRILEHCGGNSQGQCIIDEILQWVCILAQDQYGNYVTQHVLERGKAHERSQIITKLAGQVVTMSQNKYASNVIEKCFQHGDIAERDLLIRRIVEQTEGNNNLLAMMKDQYANYVVQKILETCNEDQRELLLSRVKDHMQALRKYTYGKHIVSRVEQLCGDGTAESGS

SEQ ID NO: 71079 - protein, 119 aa, Zea mays
  Clone ID: UC-ZMFLB73227F10_FLI.pep
FGSLPIVIFFAECFFRALGKEVICRVPRKKPSVKENTRQRNFLPSVLFLTLSKEFLCRVSFFDTWQALWRVSQIQHSAKSSLPSVFSPTLGKNNLKITFLNSKLIQMKRFSTINLYNSS

SEQ ID NO: 71080 - protein, 331 aa, Zea mays
  Clone ID: UC-ZMFLMO17071G11_FLI.pep
EDGRTLADYNIQKESTLHLVLRLRGGMQIFVKTLTGKTITLEVESSDTIDNVKAKIQDKEGIPPDQQRLIFAGKQLEDGRTLADYNIQKESTLHLVLRLRGGMQIFVKTLTGKTITLEVESSDTIDNVKAKIQDKEGIPPDQQRLIFAGKQLEDGRTLADYNIQKESTLHLVLRLRGGMQIFVKTLTGKTITLEVESSDTIDNVKAKIQDKEGIPPDQQRLIFAGKQLEDGRTLADYNIQKESTLHLVLRLRGGMQIFVKTLTGKTITLEVESSDTIDNVKAKIQDKEGIPPDQQRLIFAGKQLEDGRTLADYNIQKESTLHLVLRLRGGQ

SEQ ID NO: 71081 - protein, 275 aa, Zea mays
  Clone ID: UC-ZMFLB73280E12_FLI.pep
ARIRLLAKHRSDIRELIGVSGAIPALVPLLRSTDPVAQESAVTALLNLSLEERNRSAITAAGAIKPLVYALRTGTAPAKQNAACALLSLSGIEENRATIGACGAIPPLVALLSAGSTRGKKDALTTLYRLCSARRNKERAVSAGAIVPLVHLIGERGSGTCEKAMVVLGSLAGIAEGREAVVEAGGIPALVEAIEDGPAKEKEFAVVALLQMCSDSPHNRALLVREGAIPPLVALSQSGSARAKHKAETLLGYLREQRQGVACRAGAVAATSLAR

SEQ ID NO: 71082 - protein, 449 aa, Zea mays
  Clone ID: UC-ZMFLMO17171E08_FLI.pep
LYIPQTCKLCEFGWSSQVLHCVEMGRHSCCYKQKLRKGLWSPEEDEKLMNHITKHGHGCWSSVPKLAGLQRCGKSCRLRWINYLRPDLKRGAFAQDEEDLIIELHAVLGNRWSQIAAQLPGRTDNEIKNLWNSCIKKKLRQKGIDPSTHKPLTEADRGGAAPTISTERTSGSSDVNPSSTGPLGNLSPLLSETAQSSMLMPVYDKNRAETPNLARPKLPPKELFLEQLTAGHESPSTCHSSGQTLYFPFQQPLGYNSESGSSDGANMNSLWFNQSDFNCSTISTVMPPVSPSALSTSMGLNLPPDNPRHGGTGIGSTAVDSFYWDGTNPSSSSSTGSRGSNSMGFEPQSTSTILENSVFTWTDIGQEKDTRAHLVAELKWPDSFAETTTAMQNQSQTLYDDVIKAESQFSIEGICASWFQNQQPQQQLQVAPDMYDKDLQRMQLSFENI

SEQ ID NO: 71083 - protein, 314 aa, Zea mays
  Clone ID: UC-ZMFLMO17173E08_FLI.pep
GPSPRPPRNPTSRIETRVRVSSLPPRFEPIRLGPRRAMAAGSIVVDFPSMGAALCFPNLESLLRDSASGFLSAVSAAPAPGAADLTNFHRVFSRVLSTYSDPPLEVVWFFSALSFHDRPDDLRSLLQLLSAFAASSPGAAKPLALLAPVVSELFHSDKPRRETEAVVEAVLSYISICSSRPAPSSTEGTTADAVRLLPAFGDLVKVWSVRHSRERCPFQVLFPLAGDEARRELMKEGCSVDYLAGVVLVEAFLLRLCLKVQNATGVPRSELQKELKIWAVSSIPVFQSHQFFGVLLNMLLNSPLPVYSLVVCVS

SEQ ID NO: 71084 - protein, 110 aa, Zea mays
  Clone ID: UC-ZMFLMO17169E03_FLI.pep
VSIYYVATGGNFCLHVTTLYSYIHLPLSTPTGNSCCASGTFKFQLHPRKPTYAKKKLKKNTRILQEAYGCRLSRPQRSNCLSSRVLKALKAVCWKHFASVATKKLCKLFG

SEQ ID NO: 71085 - protein, 480 aa, Zea mays
  Clone ID: UC-ZMFLB73219A02_FLI.pep
ARNQNSRSPARWCASVVFATMNSIEPFNRLVKLAARAFYDDVSMKGDNQPKTSRGDNRGMAVVVLDALTRRPWVREEDLAKALKLHSKQLRRILRFFEEEKLVTRDHRKESAKNAKAHNAAAANDGQTVAKEGEEKVKMHTHSYCCLDYAQICDVVRYRIHRMKKKLKDELDSRNTIQHYICPSCNKRYSAFDALQLVSYTDEYFHCETCNGELVAEDDKLASEEMGDGDDNVRKRRREKLKDMQQRIEEQLKPLVAQLDRVKNLPAPEFGSLQTWERAHIGAFAIGDPAAADSSRNSQGQYGTPMPYLGQTKVEVDILSDGEKEGAESGKDGSELKVIPPWMIKDGMNLTKEQRGEKIESQKLEKSEAKDDKKQDLKDDQSVQEEYIKAYYEALRKKQEEEEAKNRMQQEGKISVPDSQTERQVGKKYKRDDDDDEDIEWEEHQPTAAGNATETYKLADLNAEAQESGDDEDDNVWEEG

SEQ ID NO: 71086 - protein, 81 aa, Zea mays
  Clone ID: UC-ZMFLB73224B10_FLI.pep
PESFFCPACHPNNGEESVSLARSEDDEDRSSTGAGAHTPPDRVVERDLIKLLSCHSGSSWSESRRAPHRTARRRSSFVGLL

SEQ ID NO: 71087 - protein, 408 aa, Zea mays
  Clone ID: UC-ZMFLB73230D02_FLI.pep
ACLDFLDKFKTPVVTGDEPDRDTLKMIARTTLRTKLYEGLADQLTDIVVNAVLCIRKPDEPIDLFMVEIMHMRHKFDVDTRLVEGLVLDHGSRHPDMKRRAENCYILTCNVSLEYEKSEINAGFFYSNAEQREKMVAAERRQVDERVKQIIELKNKVCAGGDKNFVVINQKGIDPPSLDLLARAGIIALRRAKRRNMERLVLACGGEAVNSVDELTEDCLGWAGLVYEHVLGEEKYTFVENVKNPRSCTILIKGPNDHTIAQIKDAVRDGLRSVKNTVEDEAVVLGAGAFEVAAKKHLIDNVKKTVKGRAQLGVEAFAEALLVIPKTLAENSGLDTQDVIVSLQNEHDRGLVVGLNHHSGDPIDPQMEGIFDNYSVKRQIINSGPIIASQLLLVDEVIRAGRNMRKPT

SEQ ID NO: 71088 - protein, 56 aa, Zea mays
  Clone ID: UC-ZMFLB73029A08_FLI.pep
TLYWRGVVGLVCHCYPVICPEWLLSCYVSVGSYLSVVVWFTTYVVRLYSPALLLGY

SEQ ID NO: 71089 - protein, 610 aa, Zea mays
  Clone ID: UC-ZMFLB73069H09_FLI.pep
ASPPLERARQARGEVFEMKVIEKILEAAGDGRTAFSFEYFPPKTEEGVENLFERMDRMVAHGPSFCDITWGAGGSTADLTLEIANRMQNMVCVETMMHLTCTNMPVEKIDHALETIKSNGIQNVLALRGDPPHGQDKFVQVEGGFACALDLVQHIRAKYGDYFGITVAGYPEAHPDAIQGEGGATLEAYSNDLAYLKRKVDAGADLIVTQLFYDTDIFLKFVNDCRQIGITCPIVPGIMPINNYKGFLRMTGFCKTKIPSEITAALDPIKDNEEAVRQYGIHLGTEMCKKILATGIKTLHLYTLNMDKSAIGILMNLGLIEESKVSRPLPWRPATNVFRVKEDVRPIFWANRPKSYLKRTLGWDQYPHGRWGDSRNPSYGALTDHQFTRPRGRGKKLQEEWAVPLKSVEDISERFTNFCQGKLTSSPWSELDGLQPETKIIDDQLVNINQKGFLTINSQPAVNGEKSDSPTVGWGGPGGYVYQKAYLEFFCAKEKLDQLIEKIKAFPSLTYIAVNKDGETFSNISPNAVNAVTWGVFPGKEIIQPTVVDHASFMVWKDEAFEIWTRGWGCMFPEGDSSRELLEKVQKTYYLVSLVDNDYVQGDLFAAFKI

SEQ ID NO: 71090 - protein, 320 aa, Zea mays
  Clone ID: UC-ZMFLB73417A06_FLI.pep
SFVHSECHTFDAYVDAGTLMNNYAHIFDLLTRLRQAVDHPYLVAYSKTAGHPEGMKNEGNESMESQCGICHNLAEDVVVTSCDHAFCKTCLIDYSAALGNVSCPSCSIPLTVDLTAQNSVGKVTRSVKGRKCSGILSRLPSLVDFKTSTKIDALREEIRNMIEHDGSAKGIVFSQFTSFLDLIQFSLERSGIKCVQLNGAMNITEKGRAIDTFTHDADCRVFLMSLKAGGVAKNLTVASHVFLMDPWWNPAVENQAQDRIHRIGQFKPIKSTRFVIKDTVEERILQLQQKKELVFEGTVGDSSYAMSKLTEADLKFLFQI

SEQ ID NO: 71091 - protein, 323 aa, Zea mays
  Clone ID: UC-ZMFLMO17097F07_FLI.pep
EDAKRIVEEERANAHTEIETAKGSVQRVQQAVQEHEKMSQNTGKQDMEELKKEVREARRIKMLHQPSKAMDLENEIRILRNTFAEKSKDCVNLLKELEMHKRLKENGTIPSFDLEGLQCLGSMLRIAGLSGTHMDLSNISIQWFRIHPEESNKEIISGATRPVYALEPHDVGRYLQAEIDVGGEIAVAKTAGPVDPDAGLVDYVETLVRKPETEFNVVVLQLNGIDLPKESVHVLNVGRLRMRLTKGKSVVAKEFYSSSMQLCGVRGGGEAASQAMFWRPRNDLSLVLAFESTRERNTAIMLARRFAVDCNIILAGPGDKTPW

SEQ ID NO: 71092 - protein, 438 aa, Zea mays
  Clone ID: UC-ZMFLMO17097H06_FLI.pep
VLQASEAMDMNESGEKGMEGNASSGIPVDWQTQFSAAAFSCAPPQQQQVPMMDSAFASAGLWASTSQAMALSDAGGRSAARAGFLAPVPGFLPQGLAHFPVDSGFIERAARASCFGGGGVMAAFGAAADHQPMNSAFSGSSEALLDHQRTKDGSDKGEPELGRNGHDGVLSSEAAAAGDCSSKGTSDSKKRRRPNEVMGGDQVQSSNLPADSANESVHSKDKGEESSLATTTTGPGKSKGKGARETSESQKEDYIHVRARRGQATNSHSLAERLRREKISERMKLLQDLVPGCSKVTGKAVMLDEIINYVQSLQRQVEFLSMKLATVNPRLDLNIEGLLSKDLLRFPGVPSSSLGFSPEMMHPQLQLSQPGLIQGGAAGMANPDVFRRIMQAQLSAKDGSQMPPHALNGAFSDVAQQQMAYPSSQDLSIGPSQDGFQM

SEQ ID NO: 71093 - protein, 236 aa, Zea mays
  Clone ID: UC-ZMFLMO17100D05_FLI.pep
GDSSRQGSEDTARRPPSVKASLSVSFGQRAPHRASTRDSSPVRRTVTRDGHRSSYSPSRRSGSREGPDHDRSDRELDHSSRDRDRARDRSNRDRYHSSRDLDRDKDARDYHRHERDSRDREYYRSRHSEERRDDRRDHESSRHRRSSSRHRSRSRSRSRSRRSRSRSTSRRSLNEQRSSPFRDANKEKAATVSSNLAKLKDLYGDITAKKEDSDAEKLHRDSCAEEVIRLGGPRWR

SEQ ID NO: 71094 - protein, 361 aa, Zea mays
  Clone ID: UC-ZMFLB73145G12_FLI.pep
DESQIWWNSLGVESAPALVFLKGPGTTPFVHHGFFSKSEFIEMMEEHKHHELRQLRSDTSLELGCDARGHSRAGNDAAIWYCVIVAGRPGAELSKKRQILRKAQDKLLGDVDRSAGNVDNSVETSSAATAFKDDRLTFVWLDGEVQKQICAFYLATDYTGACGPRDFGDDNDKPEIFIVRFQRNATYEALKAEKKNNLVDVLQGQHADASQLVARYKGPVEIEEINRWISQIIKDGDTREIPYFTSKVPDLVPEETSKAWNSKSIRSAGKSLKENIGFHFQDYLTHPMIGSTLLMCGCISMGILWFRNNTPTQSTRQEKARKDKAKRPRPKLSTSLFGEPSVPDVDPKDAHQWEMSGSDSD

SEQ ID NO: 71095 - protein, 226 aa, Zea mays
  Clone ID: UC-ZMROB73080G12_FLI.pep
EQTLDANSPVQTGQDGAAYRLPRKWAHSIPMPESGCVLVATEELDGNGTFERTVILLLRLGSRDAYDGPFGIILNRPLYTKMRHVNPSLGDQATPFVDCSLLFGGPVDMSIFLMSAGDGRPIKGFEEVVPGICFGFRTDLEKAGALIKKGAVKPEDLKFYVGYSAWDHDQLLSEIDAGYWVVTSCSTGLIADALTTTDPSCLWTEVLQLMGGQYSELSQKPKQDGM

SEQ ID NO: 71096 - protein, 176 aa, Zea mays subsp. mexicana
  Clone ID: UC-ZMROTEOSINTE020E06_FLI.pep
DLNTLSSVIVPTTVLIAVLYFVAADVFLWRNKNISAGILGGATAIWILFELLGYHLLTFVCHGLIFALGVLFLWSNASSFIHKAPPKIPEVIIPEDLVVNIALSTRYEINRAFANLRQIALGRDLKKFLMVIAGFWLLSVLGSCCNFLTLVYIGKGSKQLLERTLLFTPPEMYLIG

SEQ ID NO: 71097 - protein, 999 aa, Zea mays
  Clone ID: UC-ZMFLMO17238B04_FLI.pep
DHQRIASSRSEKRKGGEGAGDCEPVLMAAAAVAAAGSSNVEFIRARSDKREYRRVVLANALEILLISDPDTDKAAACMEVEVGSFSDPEGLEGLAHFLEHMLFYASEKYPGEHEYTKYIIEHGGSYNAYTSSETTNFFFDVNVDNFEEALDRFAQFFIKPLMSQDAVLREIKAVDSEHKKNLLSDGWRMYQLQKHFASKDHPYHKFSTGSWETLETKPKARGLDIRLELLKFYKNYSANVMHLVVYGKENLDCIQGLVERMFSDIKNTDQRSLKCPSHPLSEEHLQLLVKALPIVEGDYLRIIWPITPSIQFYKEAPCHYLSHLIGHEGEGSIFHIIKELGWAMNLMAGECSDSNEYSFFSVSMRLTDAGHERMEDIVGLIFKYLHLLKEDGVHEWIFNELAAINEMEFHYQDKVRPINYVMRTVSTMRLFPPEEWLVGAALPSKYASQRINMILNQLIPETVRIFWESKKFEGSTSSAEPWYNTPFSVENVTPSVIQEWIEKAPTEKLHLPKPNIFIPKDLSLKEVHEKVTFPTVLRKSPLSQLWYKPDMLFSTPKVHIIIDFHCPLSSHSPEAVVATELFVDLLVDYLNAYAYDAQIAGLFYSIYVTSAGFQVSLGGYNDKMRVLLNAILVQIVKFEVKPNRFSALKETSVKDYQNFNFRQPYSQASYYVSLILGDKKWPVAEKLEALSKLESDYFAKFVPHLLSKTFLECYVQGNIEPSEAKSIVEEIENTIFTTPNSLFKSMSPSEYLIKRVIMLENDLKCYYQTEGLNQKNENSSVIQYIQVHQDDAILNIKLELFSLIAKQPAFNQLRTVEQLGYITSLSLRSDYGVLALQVVIQSTVKDPSYLDVRVDEFFKMFESKIYELSDKDFKRNVKSLIDSKLEKFKNLWEESHFYWGEIEAGTLKFDRVESEVAMLRELKKEEFIEYFNQYIKVDAPQRRTLSVQVFGGNHLVEFKKAINEADPPKMYRITDIFGFKRSRPLYSSLKGGPGRITMD

SEQ ID NO: 71098 - protein, 527 aa, Zea mays; identical to SEQ ID NO: 56976
  Clone ID: UC-ZMFLB73086G03_FLI.pep

SEQ ID NO: 71099 - protein, 552 aa, Zea mays; identical to SEQ ID NO: 57919
  Clone ID: UC-ZMFLB73008B10_FLI.pep

SEQ ID NO: 71100 - protein, 159 aa, Zea mays
  Clone ID: UC-ZMFLMO17186H06_FLI.pep
QDAEEHDNKLDSFLLSGYKTNDQSNMTPVAQQQKKTEVVSLNGPHESHESSRAAGGDGAADLVLPTGPLHLLEVGEVGALPGQIDEVGEDHPSDADVVERVRRARVDVLLFSSAVELLESCYFGRLFCTQTARNCLAYCHVPQRLVISNFKTKECMHCD

SEQ ID NO: 71101 - protein, 487 aa, Zea mays
  Clone ID: UC-ZMFLMO17138F03_FLI.pep
GFRASPPYKYKDTAAGPQRKRRAYSPAMAAPSPLPRFLILLLAVTSSAFAAAAATGAPVVGEDYVRPPPARCHRKALLSLFPWSKKEESAASSDPQQVHISLAGEKHMRITWVTNDNSVPSVVDYGTKESTYTMKSQGESTSYSYLLYSSGKIHHVVIGPLEDNTIYYYRCGGQGPEFQFKTPPSQFPLSLAVVGDLGQTSWTTSTLNHIKQCEHDMLLLPGDLSYADYMQHLWDSFGTLVEPLASNRPWMVTEGNHEKEHIPFFESGFQSYNARWKMPYEESGSRSNLYYSFEVAGAHIIMLGSYTDYDDSSDQYAWLKADLAKVDRKRTPWLIVLLHVPWYNSNWAHQGEGDSMMASMEPLLYAAHVDMVIAGHVHAYERAERVYNSRPDPCGAVHITIGDGGNREGLARRYRNPKPAWSVFREASFGHGELKIVNSTHAHWTWHRNDDEEPVRTDDVWINSLAGSGCIQEGSRDRESRKILMSP

SEQ ID NO: 71102 - protein, 345 aa, Zea mays subsp. mexicana
  Clone ID: UC-ZMROTEOSINTE043B11_FLI.pep
FWWIILLRAYTKTTGDLTLAETPECQKGMRLILSLCLSEGFDTFPTLLCADGCCMIDRRMGVYGYPIEIQALFFMALRCALQMLKHDNEGKEFVEKIATRLHALSYHMRSYFWLDFQQLNDIYRYKTEEYSHTAVNKFNVIPDSIPDWLFDFMPCQGGFFIGNVSPARMDFRWFALGNMIAILSSLATPEQSVAIMDLIEERWEELIGEMPLKICYPAIENHEWRIVTGCDPKNTRWSYHNGGSWPVLLWLLTAACIKTGRPQIARRAIDLAERRLLKDGWPEYYDGKLGRYVGKQARKFQTWSIAGYLVAKMMLEDPSHLGMISLEEDRAMLKPVLKRSASWTN

SEQ ID NO: 71103 - protein, 585 aa, Zea mays
  Clone ID: UC-ZMFLB73064G06_FLI.pep
LGRFKMGKRSSIGSKDALPAEVEAPAPAPAPPESTTEKQRKNSWEQEGRERDIRQGIDLATTLERIEKNFVITDPRLPDNPIIFASDSFLELTEYTREEILGRNCRFLQGPETDMSTVDKIREAIREQKEITVQLINYTKSGKKFWNLFHLQPMRDQKGELQYFIGVQLDGSDHVEPLRNRLSENTELQSAKLVKATAENVDEAVRELPDPNLRPEDLWDIYSRYVSPKPHKRYNSSWIAMEKIIKSGVKIGLKHFKPIKPLGYGDTGSVHLVELQGSGELFAMKAMDKSVMLNRNKVHRACMEREIYSLLDHPFLPTLYTSFQTPTHVCLITDFCPGGELFALLDMQPMKLFREESARFYAAEVVIGLEYLHCLGIIYRDLKPENILLQEDGHIVLTDFDLSFLTSSKPHVIKHSTSRRRRSKEYLPPSFVSDPATPSNSFVGTEEYIAPEVITGVPHTSAIDWWALGILLYEMLYGRTPFRGKNRKRTFHNILHKDLTFPSSIPVSPAAKQLIHGLLQRDPSSRLGSSAAANDIKQHPFFEDIHWPLIRCMEPPELDVPLKLTRKEPEQKVKPEEDIYSCSDY

SEQ ID NO: 71104 - protein, 145 aa, Zea mays
  Clone ID: UC-ZMFLMO17126D07_FLI.pep
WKLNCTSRSGITSNLRSQAHSVMLIVCILVTRLHAAGYDDLPRMMLARSSWSLATRRTRRLHGAKMSVIGMSQIPNASISIVALSVSRALNICGFGFLHRTAIWIVFSPGLLAYISFIGRPSHALRAIGYLVISTLVQCLTFGIS

SEQ ID NO: 71105 - protein, 129 aa, Glycine max
  Clone ID: UC-GMROPIC042B11_FLI.pep
ISLYDSCALFFYRCYKLYAVSKNDSCSVFILQACKKLKQIELADCEIYASCEPCPMCFGAIHLSRIKRLVYGAKAEAAIAIGFDDFIADALRGTGFYQKATLEIKRADGNEAIIAEEVFEKTKEKFQMY

SEQ ID NO: 71106 - protein, 689 aa, Zea mays
  Clone ID: UC-ZMFLMO17084A01_FLI.pep
IPDSSSVLVSLPLLDSSNNNEVLLPERDEQLALYALIARASANTTIPFLAQLFSERFARLNQRNGESDPTQTLEELYWLLLVTSHVLTDSGEGETLLIPEALQAGFPNVIEAAHHPVVTLSWSIINFSRQCLDPGIRAKYFSPRLMEAVIWFLARWVATYLVPLDVSRGKVSREIDNVGTNGSQHSRKLLNSFAWENNQGELVLDFVVLISMLALTTYQGENELQTLTCQKLLATVVRRKHTCTYLVQLDSWRDLTRAFASGRSLLSLSGRLQRSLAETLASGASCIKDPEASAQYLRDLMGPVAGCLVENASRSDLKSVAQQADVIYMVCCLLERLRGAARATQPRTQKVLFEMAHTVMNPLLTLLEVYKNHSTVVYMILKFVVDFVDGQAVFLDAKETSALVSFCLQLLQIYSSHNIGKVMLSLSSSLRNESQAEKYKDLRALLRLLTNICSKDLVGFLSDCGGEGSPDIAEVIYIGLDIVTPLISLDLLKYPKLSRDYFVLISHLLELYPEKVAHLNSDAFTRIIGSLDFGLRNQDSDVVERCLAAVNALASYNFKERLGGRGRLNSQLMESEGSNGKLQESISSHFLRLLLQILLFEDFRSELAGYAADALLPLLFCEQELYQRLVHELLDKQQNPTVKSRLATAFHNLTSSNNLSSSLDRPNRQRFRKNLLSFMADVSGFMQIK

SEQ ID NO: 71107 - protein, 236 aa, Zea mays
  Clone ID: LIB4762-022-E12_FLI.pep
TPAKKKLCGNEIKAGESILCRLRKRERTLGVRRSDSMAATKVCNVRFEGNVITTTVTASGAAVESWLDEILSVHRRRLHKLVVGLDVEWRPSFSRAYSKTAILQLCVGRRCLIFQLLHADYVPNTLDEFLSDPDYTFVGVGVAADVERLENDYDLEVANAEDLAELAAKEMGHPDLRNAGLQGIARVVMDAHVEKPQWVRTGPWDASSLSDEQIEYATIDAFVSFEVGRMLLSGYY

SEQ ID NO: 71108 - protein, 400 aa, Zea mays
  Clone ID: LIB4766-006-G11_FLI.pep
RPGKKKKKISQEHCYHQVSGPMVLAPALLVVAALLAQPLGSRSGDDAGAANLHPVVLVPGYGSNQLQAMLTAAYEPPAPACAGSADQGWFPLWPNHTAMRDASQVPCFADQMSLVYDAGADDYRNADGVATRTPFFGSARALIGWDRLVQQLEGMGYRDGETLHAAPYDFRYAVAPPGHPSAVGDRYFRDLGRLIQESRLIHGRPAIVVAHSFGCALTYQLLLSRPLPWRRRYVKHVVLLGPALGGFAHGMRLLGAGMDYGLPNVPRPAMLRMARTQQSALWRLPTPLVFGDRPLAGDQRRGLLGAQRVGVPRGHRLPGRRAAVPDAGAADVGGAAAADGAGHQRRRVRRQHARDVRVRGRRARGGGRGAVRRRRRGDQHGEPGGCREMVGGGRPGLEGR

SEQ ID NO: 71109 - protein, 195 aa, Zea mays
  Clone ID: LIB4835-003-G4_FLI.pep
QPMQLDRFMAASVVVLAVVVSLAAVLPIARAEIKTTPIVSDSRSVILFEEFGFRRGGHATVSATGITWRVPEDSQLQAVDTTLMGFFLISNSLFYKINNESDYAEATGGAFCPLTSKYVQRLFLFKEVAPDGTGRGSLTIDSDDQYTVLFSSCQEGVEVTMEVRTEMYNLRRSGAREYLPVGLLPLPWIFAAAAL

SEQ ID NO: 71110 - protein, 52 aa, Zea mays
  Clone ID: LIB4300-011-C10_FLI.pep
QGSHILLRPTSNIESTIVYQQWQLKYFASLCSLVFLQVLLRRPFSHNAHKLL

SEQ ID NO: 71111 - protein, 206 aa, Zea mays
  Clone ID: LIB4301-013-H2_FLI.pep
QHRKHNSVPIMAAKIFCLIMLLGLSASAATASIFPQCSQAPIASLLPPYLSPAMSSVCENPILLPYRIQQAIAAGILPLSPLFLQQSSALLQQLPLVHLPAQNIRAQQLQQLVLANLAAYSQQQQLPLVHLLAQNIRAQQLQQLVLANLAAYSQQQQFLPFNQLAALNSAAYLQQQQLLPFSQLAAAYPRQFLPFNQLAALNSHAY

SEQ ID NO: 71112 - protein, 119 aa, Zea mays
  Clone ID: LIB4756-009-A7_FLI.pep
YPRGRPGLAHPSHPLTTPPPSAALTATTHCGCTTCTAALSVDRLCTTRPRARSVGVGSHGAGGDGGVRGDPGQRGVQVLRRRGVAQLRLRQVRRHRQPHHPQDAVQGASMHAGGGEQGD

SEQ ID NO: 71113 - protein, 280 aa, Sorghum bicolor
  Clone ID: LIB3476-023-H1_FLI.pep
KCSALLQHRLPQAKVSMMPGAMSSSMSNATVSTQPQENANPVGLPNPQLTQSQPSTSIASGPPLPQHLLHPYAQATLPLGYASMIGYPSLPPSYAYLPPAAFQQPYMNSGLFHQAAAAVPNSSVKYPLPQYKSNIALASLPQPGSLLSSYVGGFGTANNMPGNFPLNQSTTSATTTLGFDGTVPSHFKDGNQFISLQQNENPAMWMHGAGSRGMPPLAASTMYGYQGQSHQAGLRQGQLPSQFGSALGQSQPGLGPEHRNPSDSNLSGAAQANQMWPNSY

SEQ ID NO: 71114 - protein, 626 aa, Zea mays
  Clone ID: LIB3593-007-D5_FLI.pep
NLTMPATSTKPEYNVDSIDDELANGPLAKRSCRDPLCCLLFVLFMGGMVGIAIWGYTQGNPNLIGRGYDTDGRMCGVDDAVKDYPYLYFPTPVSGQLNKALCLSSCPTSDSLPATLGCKTTTEYPDCVADGNNQTLVADYASNSYVGNIYIYSTKEYVSRFCIPSEAGELLKTATATMMNSSGADILEQWIGDIRETWPVIAVSIAVAFVIGFTYMVLLRYCSGVLTWFAILAFIAGTAILGWRFYESAKKLETQNTEAGNTDDDSTTSKTVLMEKVIAYICWGVAGFTFLAVLCLYSRIKLAIAIMKAAADYVKDTPSVFLVPPVTVVILLIFYAFWAGAAVFLVSSGEATHTAGSVFGSFTFDKTLKRLLIYHLFGLLWFNAFVIAATQFVLASSTALWYFSQGTGQAAPKTIRTSVKRFFRYHFGSIAFGSLILALIQLVRIILAYMEAQANRMKGKDNKIVKFTLKCLQCYVGCFERFIKFLNKNAYIQIALSGKSFCGAAKDAFVLIASNPLRMGVVSSIGSIFVFFGKIFIAAITALIAFIVLTNWDRYSQNIYSPFIPTLVIFIFAYVVGAIFMTVYGLAADAILACFILDEQINKKKNAPPRHCPSSLRDFLDNHKRN

SEQ ID NO: 71115 - protein, 203 aa, Triticum aestivum
  Clone ID: LIB4145-003-G10_FLI.pep
KIEQTKAHTLCTSLITTLRFVYCENKSNGVCYVVRRHIIGSISAGVGQVSLDVRGGEAVEVGAGGGGVGAHVVEHEPVPHVHLWQLVPGHHRVEGVARRPEHRRRVRLLAGARHGERPRVRHVVVHGDAAEGPVEAIVDPVLAYLAASALPDDPRRHREGGLGEVPPRLAYHLHAGKLPEVALERRVDDRGRLVERGAGHEPA

SEQ ID NO: 71116 - protein, 408 aa, Triticum aestivum
  Clone ID: LIB3400-026-F7_FLI.pep
RDAAVKRSSCWLGAEVRASGFGFHLMSCSGKAADGAMGSKAARACDGCLRRRARWYCAADDAFLCQGCDTSVHSANPLARRHERVRLRPTSPLLPGAAPRERRRGDEVVPAWFKRKARTPRSQAKSVGRLLSRRLVVPQASGGDSPEEQKCDVETDEEELPYRVPIFDPALAELCSPLTLEEATTAVASCCNEDGAIVEDPTKPAATPSPVPVQFFPDSLVNLGPTDAELMEFAADMEALLGRPGMDDGDEEEPFCMEALGLIEPMDVDGGRVKLEIDPMRACGLEQKPEVSGDMFDIDFDYDSPLGTPDENAASSGASADAQFTPRSLALNLNYEAIMENWGSSPWADGERPHVKLDDCWPHDYYSLQEGAWMMGGVVGHGGEGLGTPRLRMDGGREARVSRYREKR

SEQ ID NO: 71117 - protein, 293 aa, Zea mays
  Clone ID: LIB3067-006-F10_FLI.pep
APAHSESPGVAQTTATTMAAAACYSPARIIISCSATTTSSPSSARTLRVAVVGGGPAGASAAEALASAGARTFLLERSPAGAKPCGGAIPLCMLDEFAIPRDLVDRRVTRMRVLSPSNLAADFSRALPPGAHIPMLRREVLDSFLRRRAVEAGAELVPGLVTSLSLPAGPADPYLVHYISSSPEGVGAGRSVLEVDAIVGADGANSRVAREVGAGDYTTAIAFQERICLPDAGMAYYDDLAEMYVGGDVSPDFYGWVFPKCDHVAVGTGTVAAKPEIKRLQSGIRARAGPKIA

SEQ ID NO: 71118 - protein, 213 aa, Zea mays
  Clone ID: LIB3245-018-F3_FLI.pep
KMSRVTQVPKLEQQVPRTQLPARSGQSVPPPSPGPTCAWRHGSHAHRTQLPATALCAYPRPFRSRVDRSTIRLRQVRVRPAFFFLGSSTHSEQGGSDRSYDGAGREHGDGPGDAAGEHGDAGVRVADAVVPARRRVGAQDPHEGGHARQGRRHHRRILRNRRGTYRRVLVLVARREQRLFAIRDNARLLGAGHVLVIAADVVKEDDCRRLVAD

SEQ ID NO: 71119 - protein, 498 aa, Zea mays
  Clone ID: LIB3245-460-A12_FLI.pep
ECCKHRHTAAIGCRRPKPRRNATHPLSVLSVLNSRLASSLPFPPAEASRSFSSETELTSSPAGRMLAASTKVGSRLASPHASLSAGAAAAALASSPVLGSGMLPGAGFGETGSHHAADAPPALPCSSSGDSREYYQWKRLVNQRQSTLDGGKVPAALGHHVFGAGCSSRNQHIYRYFSSSHQGSIWAGSKVLHDLPGYVKIVEVGPRDGLQNEKDIVPTPVKVELIRRLATSGLPVVEATSFVSPKWVPQLADAKDVMEAVRTMGGVRFPVLTPNLKGFEAAIAAGAKEIAIFASASEGFSKSNINCTIKESIARYNDVALAAKEKEIPVRGYVSCVVGCPVDGPVPPSNVAYVAKELYDMGCYEVSLGDTIGVGTPGTVVPMLEAAISVVPVEKLAVHFHDTYGQSLSNILISLQMGVSVVDSSVAGLGGCPYAKGASGNVATEDVVYMLNGLGVKTGVDLGKVMAAGEFICRHLGRQSGSKAATALSKVTANASKL

SEQ ID NO: 71120 - protein, 213 aa, Zea mays
  Clone ID: LIB3279-194-D7_FLI.pep
SGVEGVGALGVLDDADDEHEHGGGDHGVAAQGAEEDDAGGEELEEEADEVAEPQLVVLQRVGGDGVRAAQVEQQERRPEGEDDGAAAAACVVVAGSGARAAALEAEAGAGRGAASSADVAHVVEEEAEGEVGDPVGEEVAGPDDEAGERGGGTLAHGAHEDEEHLEEEAHLHRHSDLPVAVLLRHGRVEAHLAGRRRSSNKDMQLMSLVNRWQ

SEQ ID NO: 71121 - protein, 190 aa, Zea mays
  Clone ID: LIB3354-070-D10_FLI.pep
SGMPSGWRNTAGIVACCSSLVLLVVILALTPAEASRAMPTTTTTTTATVAAIGGTTTNSNDSQQKHGQRAAAPGVNADQKTFLPGYVGGVGGFAGAGAGLGGIGGVAGGIGGMTGGGVGGVVGGGLGGFGPLGGAGGGSGLGGGSGLGGLGGLGGGGGLGLGGGSGSGLGGSGGLGGGSGLGGGGGCLHP

SEQ ID NO: 71122 - protein, 178 aa, Zea mays
  Clone ID: LIB3354-100-C9_FLI.pep
RAGGERGEVGPGERAAQGPRGHVVGARRGLGGVEGAEPDARALRRVPDLRREPAPRPLPHAPVPRSRHGRRVAHRAPLCVICRLLSSSLYSTERALLGAPLRSLSLSIGPEAGSSRQGADERDREGVRGWDSATTTRRELAALVWPGRWDGGRRRPGGGGGFGQPLPTFPTASLLRCH

SEQ ID NO: 71123 - protein, 136 aa, Zea mays
  Clone ID: LIB3594-001-D11_FLI.pep
GLVEAGADVVDGLERGGAEREVGRRLLLAGLGGRGVQQDGGVAALHEAVVEVEPDQRRGEPHVLPDRRRQELPHDGLRLGAALLVEVERQARSQRRVPGPLGRQGHDGCCQCQCQDKQSSCRAPRRSSSRHCCSAR

SEQ ID NO: 71124 - protein, 111 aa, Zea mays
  Clone ID: LIB3596-051-C4_FLI.pep
LPSSLASRAVVEYLGDRLGRRSTGTPPLISNGRRVQLQGGHRVRGRARAGAGQLCEPVQVARVRRRVRQVGGHGAAPGRRRRRAGEPRRRRQRAVVLVPPLLLQRQRQHAE

SEQ ID NO: 71125 - protein, 159 aa, Zea mays
  Clone ID: LIB3597-011-F8_FLI.pep
PKLSKMFFIKLQNNFSLHGKRHVNELCSCFLQVRDEISTLLRLLQPREDHLGSRNVLFRVKQVLIQSVFFPDYSLVFVSRRVGVACSGTRLPPKKTVQVWTLLVAGALVDRVALRALGLKDLLAGFRVPGGSLRERRHRRKQRSEPRRRRGGRGQPQLP

SEQ ID NO: 71126 - protein, 134 aa, Zea mays
  Clone ID: 700339286_FLI.pep
KKLCSSLLQVREKKDSKSIQIIISAQERFRSSGKYYFPSPFYLYPLASSSLFLFLLFGREDPALLSMFSLSSASASSSSSSASPSSSSASSSPSSSSSPSPSSSSSSSPSSSSPSSSPSGPSSPSSSSSSSSSS

SEQ ID NO: 71127 - protein, 66 aa, Zea mays
  Clone ID: 700337462_FLI.pep
GWWFWRRFRWWLRRWWRFGWWHRWWTVEVAGAWCVHVECVHAMKLKSDTWSVWYGMDIARVTLHHH

SEQ ID NO: 71128 - protein, 167 aa, Zea mays
  Clone ID: 700338726_FLI.pep
MAKVVELGMTWVVDSAKAVVVLAAVVATVLVAAGALVVEVDMAWVPDSARVVVLAAAMALAVEVGMAWVPDSARVVVLVAAAAEVVAAAAVGLAKDLALGLAKAAGSVVVAAVGAAAASVITIDTSACSIRLLWFYHLLLYSFMLRTLSCLWVMVTSFTVVLCTYSM

SEQ ID NO: 71129 - protein, 57 aa, Glycine max
  Clone ID: 700764839_FLI.pep
YITLVYNLQPSLHIVNKNTGGILVSFKTIFTQHLKNHLALPNRPPDHDLNLKWFRNL

SEQ ID NO: 71130 - protein, 132 aa, Zea mays
  Clone ID: UC-ZMFLMO17012F03_FLI.pep
GKPGPKPIQGAQTTQTTATHTHSTHPESSLPSSTQVTSSDSQDGQHKAKGNTTITNTGTGEGRLRRVVVAKPRDTPLESAPILHQRDFQNLNPPPRLRQMPRLRRRPTHEEGGFAPRHRCRATSPDIAASTS

SEQ ID NO: 71131 - protein, 67 aa, Zea mays
  Clone ID: UC-ZMFLMO17205B11_FLI.pep
IPKPGFKILYFQTCPNIHAQTCRRPNHAQQLWDPSTKLDSKTAQKYNNRNCMSELKKKSISFLHSSS

SEQ ID NO: 71132 - protein, 124 aa, Zea mays
  Clone ID: UC-ZMFLMO17211B07_FLI.pep
AYKSVIMSVLKSLALGFYHLLVVPKTASASRAKHSTITSCKYLPPTQDCYKTRCFRPPALQTKEPCSRGTPASSKCSSCRTQIFNWETPRPLLPITASELTRSTVAPVPHIEVTRIIVGKWMGF

SEQ ID NO: 71133 - protein, 150 aa, Zea mays
  Clone ID: UC-ZMFLMO17233C09_FLI.pep
RGKKNPVLWCKQRMLLCSNGKCQTSYQEAESGIGLTAPCMRRKAVLIRSFSVAFSHSTSPLLPSKCATFPSTDMTNFPSSATLTSPKSDVIRAYTTFRAAFSVSSLVFTASSTGTTLGPSRPMFKTIATTESESYVTLQWSSDPISDMVS

SEQ ID NO: 71134 - protein, 112 aa, Zea mays
  Clone ID: UC-ZMFLMO17019G06_FLI.pep
LQSTQTCVCREITYNGKQRQFYLLNLLATAGSVSVSQTFSLPFEPPHANKKGLSFENDTEKIAPSFGFWEAMHDGLSFDRSHSFTILSTEPVARKLGADGLKEMEETALSCA

SEQ ID NO: 71135 - protein, 166 aa, Zea mays
  Clone ID: UC-ZMFLMO17103G11_FLI.pep
ISSSSSPEGEQPGGGGASSSRRWKMSYLLPHLHSGWAVDQAILAEEERLVIIRFGHDWDETCMQMDEVLAAVAETIKNFAVIYLVDITEVPDFNTMYELYDPSTVMFFFRNKHIMIDLGTGNNNKINWALKDKQEFIDIVETVYRGARKGRGLVIAPKDYSTKYRY

SEQ ID NO: 71136 - protein, 288 aa, Zea mays
  Clone ID: UC-ZMFLMO17104D03_FLI.pep
VKDKAALVTGGGSGICFEIAAQLARHGAQVAIMGRRREVLDKAVAALRSQGLRAVGFDGDVRNQEDAARVLAATVAHFGKLDILVNGAAGNFLASPEDLTPKGFRTVLEIDTLGTYTMCYEALKYLKKGGPGKGPSTGGLIINISATLHYSASWYQIHVSAAKAGVDSITRSLALEWGTDYDIRVNGIAPGPIQDTPGLRKLAPEEMSKGLREMMPLFKFGEKRDIAMAALYLASDAGKYVNGTTLVVDGGLWLSHPRHIPKEEVRELSKVVEKKVRASGVGVTSSKL

SEQ ID NO: 71137 - protein, 103 aa, Zea mays subsp. mexicana
  Clone ID: UC-ZMROTEOSINTE004C10_FLI.pep
SPTAAPDPPSTSSPPTPPPSTRHSSPPWPSSAGSASRPAPTARYAASAPPSTKPALAACLLLACVGFTYFTSSFSCLYTYVCRMDFVGSHEMRSLFLTSHDRD

SEQ ID NO: 71138 - protein, 121 aa, Zea mays subsp. mexicana
  Clone ID: UC-ZMROTEOSINTE006A12_FLI.pep
RRGRRRLRAAGRGGRRGPGVVRGAATWRAGERGGHDGVRGGARCVVQEAPAAAIRGRHPQVGVRQDPAEAAQGRVRQEDGSSVIMHIILWVAACLCQCKILRSPLDEDNNTIRVQSDVPSY

SEQ ID NO: 71139 - protein, 214 aa, Zea mays subsp. mexicana
  Clone ID: UC-ZMROTEOSINTE014G02_FLI.pep
KDGIKGTYRVDVDIPANDWINVTKFYDVLIFNTGHWWDRYKFPKDTPLVFYEGGKPIEPPLDIHNGLKVVLKSIASYIEREVPRKTLKLWRTQSPRHFYGGEWDHNGSCVSDRRLEEHELNSWFDPQFGGVNKEARTVNLAIQEALAGTEIQLLNLTYMSEFRADAHPAIWLGKKDAVAVYGQDCMHWCLPGVPDTWVDILAAQIMHHFKQGKG

SEQ ID NO: 71140 - protein, 84 aa, Zea mays subsp. mexicana
  Clone ID: UC-ZMROTEOSINTE026C07_FLI.pep
YAPQSTDLIYNYHMSCIHVTETKKMKQVILQCSYKQPRQPQNSLNNNEGQCHLESVWEGQAYKNCKAPKSSYILEAPCFPQLLE

SEQ ID NO: 71141 - protein, 395 aa, Zea mays subsp. mexicana
  Clone ID: UC-ZMROTEOSINTE075B12_FLI.pep
PHAATQATGKSATAGETRNAWTNFNRPVSPNVHPYPTGLKKSWHQLFSRSASVSPCPDVTTSAHDMIRKAEPNGAQIYNAHTFLSQYPPLDYKPSSSQSMQFPGFPPLNGAPPSNPLPHFPAGHMPFYDDAESTLLEEPEQFEDPCYDPDAIALLGPVSESLDNFPSDLDCGFFSSDVAKESHGRPSPIESPLSRSRTVEEKPIEPPHSSVARGPGGSILPESSSEQGTWQMWSTPLVQESLGLQGPQSQWLRQNTNQFNHSANLFSSGGGATSPLGTGLNDSDPWLQKAPFQQLPPDTPSLFLSHEMPGKLHNDLVFGSPNKSAREHPFGPPGYLWPKEELALNGAQDGGGGHILSPSGGARVGGGVGLFSSASPDVQSLWSFHETFNEKESIE

SEQ ID NO: 71142 - protein, 105 aa, Zea mays subsp. mexicana
  Clone ID: UC-ZMROTEOSINTE023E07_FLI.pep
LQVPHLYNKMCGVLEESGAYALSSFFGDKSASSSLANSLRQFETVCENVVEALRPHQNGTGSAIKEELVDAATKAAAAAAPQQDSGHDAPHGQSSTAKADMEIDG

SEQ ID NO: 71143 - protein, 88 aa, Zea mays
  Clone ID: UC-ZMFLB73230F01_FLI.pep
LPPPQRPDDKKSFDIPKPATADRIANLYAYRKAQGLCYKCGLQYSRGHKCAETVQLHLVEEMWQLMDLSDSDDSHDVPPAQVNSILLS

SEQ ID NO: 71144 - protein, 67 aa, Zea mays subsp. mexicana
  Clone ID: UC-ZMROTEOSINTE064F12_FLI.pep
IGSRAERIRLRNQAANGTGDSSTHTAMYPNKNGHCSDTEGKAWDPLATKITGSTARGSPAPTPSVCF

SEQ ID NO: 71145 - protein, 80 aa, Zea mays
  Clone ID: UC-ZMROMO17098B11_FLI.pep
RSDLEHLGCAESQETPAAPKELQDPALMCTQFLFFFPFVEQNAFFCYVHKVRRAGRRLVELRFCCGVYRLRTVTLRQERN

SEQ ID NO: 71146 - protein, 330 aa, Zea mays
  Clone ID: UC-ZMFLB73001B02_FLI.pep
GSKGGVKAVILCPTRELAAQTVRECKKLVKGRKYYIKLMTKELSKSGNFKDMHCDILVSTPLRLDHAVKKRDLDLSSVEYLVLDESDKLFELGFVEVVDSVVEACSNPSIIRSLFSATLPDSIETLARTIMHDAIRVIVGRKNSASSLIKQKLIFAGTERGKLLTLRQNFQESLNPPVLIFVQSKERAKELYKELAFDDIRVDVIHADLSEQQRQDAVDNLRAGKTWVLIATEVIARGMDFKGVASVINYDFPESAAAYIHRIGRSGRAGRSGEAITFFTEEDKPFLRNIANVLVSSGCEVPSWIMALPKLKRKKHRVDRDPISYLPDEV

SEQ ID NO: 71147 - protein, 212 aa, Zea mays
  Clone ID: UC-ZMFLB73012D10_FLI.pep
KDTLLDGYTNSFWTCSVSKLGYSGTAIISRVKPLSIKYGLGISDHDTEGRVVTVEFDDFYLLTAYVPNSGDGLKRLTYRVTEWDPSLGNYMKELEKSKPVILTGDLNCAHQEIDIHDPAGNRRSAGFTNEERESFGTNFLSKGFVDTFRKQHPNVVAYSYWGYRHNARKTNKGWRLDYFLVSESITEKVHDSYILPDISASDHSPLGLVLKL

SEQ ID NO: 71148 - protein, 81 aa, Zea mays
  Clone ID: UC-ZMFLB73144B01_FLI.pep
LWISLFCSIKLLDLSLQIDFVRHVRVLLTSYILSVSVDHWTVFCRAIIVGRPEFVSRSILKTGICSVMVVPINNEIIAFDP

SEQ ID NO: 71149 - protein, 65 aa, Zea mays
  Clone ID: UC-ZMFLB73144E07_FLI.pep
FPDLLAVLITLRIILITTASSTITIVYFHWRWLLHTRMVGSSGRGRLLSWNREHSMSVGQPTHLP

SEQ ID NO: 71150 - protein, 129 aa, Zea mays
  Clone ID: UC-ZMFLB73349D11_FLI.pep
SNPELQMQTTDAINLVAFGIPPDSGLKDSPKIFPKCRWQSARCKRMATPPSPEHSVTHCSWWRFCQPIIRPDRLTIVMSPHRSDVTGSHVVVLLKWLPTIDWETSLRISCVFVSIQCDMTWSMCTLSQR

SEQ ID NO: 71151 - protein, 326 aa, Zea mays subsp. mexicana
  Clone ID: UC-ZMROTEOSINTE072B02_FLI.pep
RLPNPSIVLSRARAMEKSRVLVVGGTGYIGRRLVRASLAQGHPTLVLLRPEIGLDIDKLQMLLSFKAQGARLVEASLEDHAGLVAAVAQADVVVSAMSGAHIRSHNLSLQHKLVEAIKEAGNIKRFIPSEFGMDPSKMGHALEPGRVTFDEKMDLRRAIEDANIPHTYVSANCFAAYFCPNLCQMRTLLPPKEKVHVYGDGNVKAIFCDEDDVATYTIKSVDDPRALNKTLYIRPPENILTQNDVISKWEKLSGNVLEKIHIPADEFLASMKGTDLANQAGVGHYYHIFYEGCLTNFEIGDDGADATLLYPEVQYTRMDEYMKRYL

SEQ ID NO: 71152 - protein, 343 aa, Glycine max
  Clone ID: LIB3065-013-H3_FLI.pep
SGSIKRLTSSSNNNKITSFPLMKRLSSSDSSSALMTICPSTEEHSPRNSQHMYGREFQSMLDGLDEEGCVEEPGYQSEKKRRLSVDQVKALEKNFEVENKLEPERKVKLAQELGLQPRQVAVWFQNRRARWKTKQLERDYGVLKANYDALKLNFDTLDQDNEALRKQVKELKSRLLQEENTGGSGVSVKEEIITRPADSEDKTMEQSKSDPSSETSNINPSSESEEDHLNYECFNNNDDCVGGTAASLLQVDFKDGSSDSDGSSAILNEDNMYSPLKFNNCSISTSPSSSSMMNCFQFQKPYHHHAQYVKMEEHNFLSADEACNFFSDEQAPTLQWYCPEQWS

SEQ ID NO: 71153 - protein, 162 aa, Zea mays subsp. mexicana
  Clone ID: UC-ZMROTEOSINTE061E11_FLI.pep
PVSVAEHNNHQHRLHSPTPASATKISIPISSSEAALFGKGRYKVWALAAIALLALWSMFAASVTLRLSSVDLATTFGDASDPLIDELDPLEMEQREKLVRRMWDVYTRTDNHVRLPRFWQEAFEAAYEELAGDDMLTTDAAISEIARMSIHRPEVEQSWNKD

SEQ ID NO: 71154 - protein, 247 aa, Zea mays subsp. mexicana
  Clone ID: UC-ZMROTEOSINTE083F07_FLI.pep
GSTNSSTEEGKELNDPRVLTDVGDVPIQEIRDCGVEDDRLMHVISESVKTVMEEEPLRPLVLGGDHSISYPVVRAVSEKLGGPVDILHLDAHPDIYDCFEGNTYSHASSFARIMEGGYARRLLQVGLRSITKEGREQGKRFGVEQYEMRTFSKDREKLENLKLGEGVKGVYVSVDVDCLDPAFAPGVSHIEPGGLSFRNVLNILQNLQGDVVAADVVEFNPQRDTVDGMTAMVAAKLVRELTAKISK

SEQ ID NO: 71155 - protein, 246 aa, Zea mays subsp. mexicana
  Clone ID: UC-ZMROTEOSINTE084D11_FLI.pep
RNDSTKNRGQQFTPRFSSPAMQTTAAAAVAWAPGPSASTSSSSSPSTFRVGVASTAVRACSAPRLVASSAPLGCRRLRQVVQAVANPDPAIELPLTAENVEMVLDEVRPYLMADGGNVALHEIDGNVVRLKLQGACGSCPASVTTMKMGIERRLMEKIPEIVAVEPIADEETGLELNQENIEKVLDEIRPYLAGTGGGELEFVTIEEPIVKVRLTGPAAGVMTVRVALTQKLREKIPKIAAVQLLP

SEQ ID NO: 71156 - protein, 90 aa, Zea mays subsp. mexicana
  Clone ID: UC-ZMROTEOSINTE085H03_FLI.pep
PSIVSSQSPEQNGKKAERQQLVKEAERCTQTRPERTLHAAHRRGSTRRRGAISCWPHPPPPPPPRRCYRRRRRRSGSGRRCAPAAPAPRS

SEQ ID NO: 71157 - protein, 159 aa, Zea mays subsp. mexicana
  Clone ID: UC-ZMROTEOSINTE086B05_FLI.pep
TASSLIMSSWEAKARQFLLEEEKEDDELFLVIVPAVLLAMQEEKRSVRTSGTSAHGSAKKWKKSHVASVLEDYLEHRKKQTEKTVEALLEKKSREEEYSVERCLDTVDALEELTDEEKATAAEVFKNEVNREMFVIVMQTNPNVGLIWLRRKISRIAST

SEQ ID NO: 71158 - protein, 314 aa, Zea mays subsp. mexicana
  Clone ID: UC-ZMROTEOSINTE086F08_FLI.pep
LSLAHCPSTYRFQVKFKIDKDCRPLPESSLKQAIKENYNAKSKFDPELTTKQVQRLLLLFKPVSAPQSVSNNHLGERRHYEKRRKPYRHFEERRPIEAARRPRFDEERRPAVRHVPFEDPYRAPRYAPVPVDSQHGHSLASDHHRYYQPALTPEPRQLPLVLEPRYVPPALDHHHVPELRHAPPAYYRTLAPSGDSYYRSVENLVPERYADRTMADLTARDPIIRDHTALPGEALARADRLDDLYRSDRVEELYRSDRLVNRAVDRPHPAYFTAAYETNPAYAETSIRPVSARVNGPSAAVSSLYSFSGGPVYR

SEQ ID NO: 71159 - protein, 137 aa, Zea mays subsp. mexicana
  Clone ID: UC-ZMROTEOSINTE087D12_FLI.pep
PGQPRRVHHAGACQGCPGHHRPQRTDRVPSEHPGRPTQAQARHWPCQGAPWVGAEDPPPRGPSPHGHRLPQAHLRRPRHRGCHHRKPARLGRKRSTGPGNFWWPASSCLVGPPLLTDKSYGHVVRRKCVAEIPWLML

SEQ ID NO: 71160 - protein, 153 aa, Zea mays subsp. mexicana
  Clone ID: UC-ZMROTEOSINTE087F03_FLI.pep
QLSEQISTLNERMDEFTFRVEELNSKFTVKKHLPSQQNLALPNDACNGSTPTNLFVSHLGNGTLIPHSSSSNQLSKDSPMIEEIMNITRGQRQVIHQLDNLTNLLHEHLVLTRQTNNTASRNRVLDSDTLICPLICLTVASIGYFMFKGLSRG

SEQ ID NO: 71161 - protein, 216 aa, Zea mays subsp. mexicana
  Clone ID: UC-ZMROTEOSINTE087G12_FLI.pep
PAETNINSFPLHESSAGQNDAGCSLNISHNFSAMVEDLKNDLPVIGRYLEGNLLPSDVASFLERVSTMIKSYTPPQGSRRKDRVSHGHADPVRSKNPRKRGRHSLFQDSFPHRYLSTPVNIVFDGTIPLLNGGEALKEQVAMDPWRVSQSHLTMTTSSSSLDSSSPESMKRRREGGDEIPITRDTDCLQSGRLCVQLKMFKHRDGVNAEAANPIFR

SEQ ID NO: 71162 - protein, 151 aa, Zea mays subsp. mexicana
  Clone ID: UC-ZMROTEOSINTE090C12_FLI.pep
RAPLVPPLQFGNGFVSGAVGQQRGGPVPPAVSPRPVTASAFGKMEGDDLSSLSPSPVPYIFGGGLRGRKPPAMEKVVERRQRRMIKNRESAARSRQRKQAYMMELEAEVAKLKELNDELQKKQVCLYNVCIFVSWGALTYESISPEIVKFK

SEQ ID NO: 71163 - protein, 148 aa, Zea mays subsp. mexicana
  Clone ID: UC-ZMROTEOSINTE091G08_FLI.pep
DLKKQESLSLQSKFSLQHVGLQRDCKNQHYPCTTVQRSFTRTITVHNLYTHIIQNRYHTQALRCTRATLPCQQPGSREKKPFHDDRKTNHIQIHPQKGQPRHAKPLKNDHPDVGHRTPLFFSSPSSSREADGLTEQPQEQSPLEHKYR

SEQ ID NO: 71164 - protein, 123 aa, Zea mays subsp. mexicana
  Clone ID: UC-ZMROTEOSINTE092B03_FLI.pep
HIHTWRPVPRSCAHAFSSFSSSQATPTRGGWWRRRATERKEHARVASSSKEMEASVQGRKWRPLQRALSRSSSAAMACRRPPRTPGLRLPATAPVLATKGRSTTSLIAVCSCTRSYLISIQLS

SEQ ID NO: 71165 - protein, 212 aa, Zea mays subsp. mexicana
  Clone ID: UC-ZMROTEOSINTE092E11_FLI.pep
RRLQRPPRWLRGDHRGLLRGRPLGGRHLRVRVGVGAHRAQRAGREAPVRRPAGGRAVARWVRRVGGPLHGPVRAQGVRGADLRHAGASVRLVHGRRREAAGRERGDDPGDRHVGERHHGPAVPGAQQDGAAPSLGRGRDGRHGPDAARRVRVRVPRRRLELEQQAQGDAEHADRGRGQRRVLVCWITNLSMLVLHHDCTITTMRYTPFVLRI

SEQ ID NO: 71166 - protein, 102 aa, Zea mays subsp. mexicana
  Clone ID: UC-ZMROTEOSINTE100B06_FLI.pep
PYFMAVLRAKISAANALRDVVLRGKKVKAAEGKEMGIVDAVYPSALETADQAFKFAEQLAARKWDGGVYASIRMSMYPEACRSVGIVEESDDEKRKHFASKL

SEQ ID NO: 71167 - protein, 112 aa, Zea mays subsp. mexicana
  Clone ID: UC-ZMROTEOSINTE104A06_FLI.pep
MKHRPQGSLPCRQVIEMSERTGNIVVQSNPIQSVDMLIWGGAAGLSDENLQKNHVVLAVAPEEPSIILSNGCRSSGCSRRRRASSPPRLSQWPGRRRPRRGRRRSSARTWCG

SEQ ID NO: 71168 - protein, 185 aa, Zea mays subsp. mexicana
  Clone ID: UC-ZMROTEOSINTE109B01_FLI.pep
SANRGDTKETRVAATFGIHRLNMKPLTNSFITRVFGCLLAIVQAEHVILHEEGPSRRQQMECLGELDGVLLGAGADGTGDEDEHASLGPRRLAVDGDDLVLAGLEGKRSELAGNGGWALELLALEGEHGGLLIQPHQRRAVGVERPVVVLHEGFRHRVRVHRHHLAAAAGRHAPRVSRSSGKERE

SEQ ID NO: 71169 - protein, 410 aa, Zea mays
  Clone ID: UC-ZMFLMO17023C08_FLI.pep
NPMALSAEIRFGHQIPYPTTTLTPTRRRKKRKRKTRRSSRGWRAEEMDEVTVSSPLMLPATEARGGVSVVEMVMGALRRSLMLCSSSAGAGAGVREPEQEEDGVTPPGGMQIGGPTDVRHVSHVTFDRFIGFLDLPADLEPDVPRPVPSARIRGKKAKVNFRDEAAAAGAQKPAATATTPTACASAARLGPPPPKFRADEVFGNMNGGSNDLFAIMFAFSDSSSQVVRVEPGEGAAGFLPAVEVLDDEPLLPGSKRSAANMLLLSGQSSDSYGSCDLGWDWDDDTMTSDYASVFAPAAPSNVVPAWYTQGGPASKRTRSSYGYGVAMLQQGDGAQAMPGGFDPETNYQYQLLPYVVESSPSDGASTHDMDCLQMMRAGDVPQDGASSGGGGGGGGDIWSLDELLMAAGAY

SEQ ID NO: 71170 - protein, 357 aa, Zea mays
  Clone ID: UC-ZMFLMO17069A04_FLI.pep
DSKVACETCTKTNMVMVFGEITTKANVDYEKIVRETCRNIGFVSNDVGLDADHCKVLVNIEQQSPDIAQGVHGHFTKRPEEIGAGDQGHMFGYATDETPELMPLSHVLATKLGARLTEVRKNGTCPWLRPDGKTQVTVEYRNEGGAMVPIRVHTVLISTQHDETVTNDEIAADLKEHVIKPVIPEQYLDEKTIFHLNPSGRFVIGGPHGDAGLTGRKIIIDTYGGWGAHGGGAFSGKDPTKVDRSGAYVARQAAKSIVASGLARRAIVQVSYAIGVPEPLSVFVDTYGTGAIPDKEILKIVKENFDFRPGMIIINLDLKKGGNGRYLKTAAYGHFGRDDPDFTWEVVKPLKSEKPSA

SEQ ID NO: 71171 - protein, 90 aa, Zea mays
  Clone ID: UC-ZMFLMO17153C11_FLI.pep
ISHHLELPSKVPQPSHVQTAPPGNARLHLMPKPIECPLESFCLISWWWWRWGGGIELVIACPSSRFVSRGEQMIDCLPAWLNVPSKISEL

SEQ ID NO: 71172 - protein, 70 aa, Zea mays
  Clone ID: UC-ZMFLMO17166H06_FLI.pep
YPTWVTNFAARLALDLLKTMREIEECRISGTILVIGEYHRRIILHGLTNKKLEVLQLAKEKLGCTLDTLF

SEQ ID NO: 71173 - protein, 149 aa, Zea mays
  Clone ID: UC-ZMFLMO17078H12_FLI.pep
SLPNASANAGTGNLDVLRNNVQFQNLLGLVQANPQILQPLLQELGKQNPQVMQLIQENQAEFMRMINEPLEGDEENEMMLDQMADAAETIAVTPEENEAILRLEGMGFDRALVLEVFFACNKNEQLTANYLLDHMHEFDNDDGLGGPPL

SEQ ID NO: 71174 - protein, 124 aa, Zea mays
  Clone ID: UC-ZMFLB73192A05_FLI.pep
WHLSPVAPATTAQKNTAPACLAAAMAAAASAARSFLRSSGSSSLRSAVARAASRAGPGPAPLPRRMPTSAPRVLLRSPVEMSSVCLESLMPMHSATASALMTSLLAAPACKGFGWLSEGQAETR

SEQ ID NO: 71175 - protein, 150 aa, Zea mays
  Clone ID: UC-ZMFLMO17219E02_FLI.pep
SGRGSNSRGRGRKGGREGNRPEENESSNGRGSGFGGKRGGWNQGNPAEENWNPNGQQGFGRGGRRGGWNQGGPAKEDGNSSGRQESFGRGARRGSMNHDQSAEDNEGHNNPAQDFTRGPAPRGGHGRGGGRNHHRRDRAMKKHMQGLTGL

SEQ ID NO: 71176 - protein, 137 aa, Zea mays
  Clone ID: UC-ZMFLB73225H03_FLI.pep
KISAEPSQQPKKSDKAARTATNASPNGNLKPRSLNSDATESKEAVKKESIQKVNPGARIRGSCNRNPVKNTTAKEAVAKNTGKETKKGAKGQQEVSEAPSALPNQESADVVKEITHEDKENMGDIEMAVDVAVAQDI

SEQ ID NO: 71177 - protein, 86 aa, Zea mays
  Clone ID: UC-ZMFLB73227F07_FLI.pep
DSSQSNNCGQSSVYHTLKRTLVAKGVNNFAQQNGGSLSLAARPRAQAVNHQFLSFFLWAERAKKDDALSNLCSTLGQLKKWQWIWT

SEQ ID NO: 71178 - protein, 66 aa, Zea mays
  Clone ID: UC-ZMFLB73201G11_FLI.pep
LWKRWLRTPMHFMAVFISAAATTTTKTTSTTNFAETNIVTILTHARNTADEHQGAHRGSERLAYYV

SEQ ID NO: 71179 - protein, 278 aa, Zea mays
  Clone ID: UC-ZMFLMO17267B12_FLI.pep
SLSARGKYPLISSHALLPRLLLLPHPHPPPPLRQPRHAPTRKLPARPPLPGINQIISRPSSFPSNQVHLHSLSTLSLVSGGRWPRLPFPVALMAPSAALAPVAFRSAFSTPLASNPTRNRINIEGTFCLPCSARKRASYRSFRVYSLFGGKKDKDENGDEAPSKAGIFGNMQNLYETVKKAQMVVQVEAVRVQKELAATEIDGYCEGELIKVTLSGNQQPIRVEITEAAMELGAEKLSELVNDAYKDAHQRSVQAMKERMSDLAQSLGMPAGLGDGLK

SEQ ID NO: 71180 - protein, 207 aa, Zea mays; identical to SEQ ID NO: 70799
  Clone ID: UC-ZMFLMO17267C03_FLI.pep

SEQ ID NO: 71181 - protein, 346 aa, Zea mays
  Clone ID: UC-ZMFLMO17020B08_FLI.pep
NDDNHSSRSTSDCILIEFYQRLREESLTAISRHVKDLRGAQKGSTISDENNKATAMGGDIQEIYDKLKDSSLPEGFFTEEQPWKDIYITELLNCIKEEHLKDFEQEYCLAEKIEGATEDTDIAVELYKLSISTLDLLKLASKEEQGDYVGAWYSMLLSCAQELKHGVALWQEFYHANVCDRVVSEGGHYFIALGEIYRVAQILYLSLQRFKPWVLADPGMLSKMLSCLDSCTYAWTSGLETALKMVIDSSHIDSSLAKALMESIKNITKLEVPNLQKNIPNNEMQCRLTLLPSSLLPGLNLVIWNGGHYFVKVANLWANRISPDPPLLPSNPTSSMNNAATHSQSC

SEQ ID NO: 71182 - protein, 127 aa, Zea mays
  Clone ID: UC-ZMFLB73387E11_FLI.pep
QKLRGQGMAFLVGGGSVMQKILAPREVITVDAACIVAMSATINFQLKSPNQLRRAVFGGDNQLTASLTGPGVVFIQSLPFHRLSQRIASRSVAGPSLRDNPKFFIQIVMFFFLAYVMIVSSIILTDV

SEQ ID NO: 71183 - protein, 93 aa, Zea mays
  Clone ID: UC-ZMFLMO17264D08_FLI.pep
YRNINDCLLLLGVTSLGLLDTTDLLGPVLPLFHLLAGLLNLSSKTIPDEAVFGLELLGRLEVIVDEAEASGLASTEVGAELEDEDGVGVLHLV

SEQ ID NO: 71184 - protein, 79 aa, Zea mays
  Clone ID: UC-ZMFLMO17150A05_FLI.pep
KKIPDVANKKFQAHGHLFEQNKNSALQSVPDLPEFALSLRPDGYELPITDSIWENVDGQPQIQSLKEHMIDDEDEVGTK

SEQ ID NO: 71185 - protein, 218 aa, Zea mays
  Clone ID: UC-ZMFLMO17074H04_FLI.pep
PEASAVRVLRGGAAAVAGPVARRQLQPLQQAHGAHGRLLGLRQCRVRRPDRRAAAKDRPDAAAGRPARLRDDEGGDLRAAASHNHVGGQDRRELRCDQLHAQAAGSLPLQQRRAAQAAVREDRLGGRDHVQRHRHPPDQSESAVRRSRGERHGRLPRRLQLRRLLPQEGRPGPQLPRRGQGQVPAVHAGEARHPQGRAQWQPASHGSGGCGVYRRGIS

SEQ ID NO: 71186 - protein, 146 aa, Zea mays
  Clone ID: UC-ZMROMO17028G10_FLI.pep
ISQASNFWRIREGISEASVKVGAVYKYDLSITVEKLYDIVEEMRCRLGDNAEVLGYGHLGDGNLHLNIVSSKYDDNILAQIEPFVYEWTSAQRGSISAEHGLGLMKAEKIHYSKSPEAVQLMASIKKLLDPKSILNPYKVLPQSVL

SEQ ID NO: 71187 - protein, 356 aa, Zea mays subsp. mexicana
  Clone ID: UC-ZMROTEOSINTE059E03_FLI.pep
ALEVGQDVSCKLSFIMSLLRNLVGEGHHVLIFSQTRKMLNLIQEAIILEGYAFLRIDGTTKVSDRERIVKDFQEGCGAPVFLLTTQVGGLGLTLTKATRVIVVDPAWNPSTDNQSVDRAYRIGQTKNVIVYRLMTSATIEEKIYKLQVLKGALFRTATEQKEQTRYFSKSEIQELFSLPQQGFDVSLTHKQLQEEHGQQVVLDESLRKHIQFLEQQGITGVSHHSLLFSKTATLPTLSENDALDSKPGGMPMMPQQYYKGSSSDYVANGASFALKPKDESFTVRNYIPSNRSAESPEEIKARINRLSQTLSNAVLLSKLPDGGEKIRRQINELDEKLTSAEKGLKEGGTEVISLDD

SEQ ID NO: 71188 - protein, 466 aa, Zea mays subsp. mexicana
  Clone ID: UC-ZMROTEOSINTE072B09_FLI.pep
GFCCHRALLFKTLADSINLPCRIVKGCKYCKAGAGTSCLVRFGHDRECLIDLIGNPGFLSEPDSLLNGLSSISVSSPLRPPKHDSADISDNFKLFAKKYFLDCQSLNLMFSDPAAGTVIDLDEAMGSNLGLNSSHATNSDCQATFTHLKAGTRRSSQDGSFIMQRSSPEDTQSGLSDPFSDMSLEIEDLIIPWSELVLKEKIGAGSFGTVHRADWNGSDVAVKILMEQDFHPERLKEFLREVAIMRSLRHPNIVLLMGAVTQPPNLSIVTEYLSRGSLYRLLHRHAARENLEERRRLSMAFDVAKGMNYLHKRNPPIVHRDLKSPNLLVDKKYTVKVCDFGLSRLKANTFLSSKTAAGTPEWMAPEVLRDEPSNEKSDVYSFGVILWELMTLQQPWSNLNPAQVVAAVGFKGQRLEIPSSVDPKVAAVIESCWVREPWRRPSFVSIMESLKLLIKTLPPNQLLEEN

SEQ ID NO: 71189 - protein, 330 aa, Zea mays subsp. mexicana
  Clone ID: UC-ZMROTEOSINTE072G12_FLI.pep
EDKHQCAVQTRHPPILPAFSDLLKDGLDCESIERNALRFRDFGSRNKESVAELFVSLISKLLSAESLWEHGLCASNFEASWISKTWKKGVGNLSVEDFLDRSQNFARSVGKVQMQKICKCLRECALNLLDFMRGKMDTTKLKTLLFGRLSPDELVSKPRLKHVKRKRNWERTPQGGRCVLQKSAKHAGSATGSDSLPTPNKVLHHALHYRVAGHQSSIHQFVPIIRWPRIIPSGFGYGLSLGIPSVAPHLGKGILGKPPIIPSGFGYGLSLEIPSVAPHLGNGILGKPPSNITPLDQRSSTQLVHVRNPHQHTCQQSCGGAMEPSSSGVA

SEQ ID NO: 71190 - protein, 186 aa, Zea mays
  Clone ID: UC-ZMROB73028E03_FLI.pep
DVSVKNSHLKDNTDLKPLKQPAVLPAASLKEREAAYRAARERIFSGDGAKGNDRSYVKCRQVPVVAKRMIAHALGQKVQNTTETAASKESKGKQLSNGKTIPTHSRNNFCPVTPDNIEAVLMGMPSSAGSNSYQTPPSQRCHATNTRAVTAESLKKEQTGAAKRMFAHALGLSAARGSCGTLPKPK

SEQ ID NO: 71191 - protein, 104 aa, Zea mays subsp. mexicana
  Clone ID: UC-ZMROTEOSINTE017D11_FLI.pep
VNVHRLIMRGTLEEKVMSLQRFKVSVANAVINAENSSLKTMNTDQLLDLFTSTPASRKASDEQSKRKSGGKGLKSILNGLDELWDQSQYADEYDLNQFLAKLNG

SEQ ID NO: 71192 - protein, 285 aa, Zea mays subsp. mexicana
  Clone ID: UC-ZMROTEOSINTE041A01_FLI.pep
ADVWSAGVILYVLLSGVPPFWAETQQGIFDAVLKGHIDFDSDPWPKISESAKNLIRKMLCPCPSERLKAHEVLRHPWICENGVATDQALDPGVLSRLKQFSAMNKLKKLALRVIAERLSEEEIAGLRQMFKAVDVQNRGVITFGELRQGLKRYGSELENREISDIMEVADNDNNVTINYEEFIAATVPLNKIEREEHLMAAFTYFDKDGSGYITVDKLQRACGEHDMDDTFLEEIILEVDQNNDGQIDYAEFVAMMQGSKAGLGWQQMETTLNVTLRDAPQVHCH

SEQ ID NO: 71193 - protein, 285 aa, Zea mays subsp. mexicana
  Clone ID: UC-ZMROTEOSINTE048D07_FLI.pep
VDTELINVQGHVAPREKHAGSLSEGFYQTQVSTLAVKDNLLVAGGFQGELICKHLDREGISFCCRTTYDDNAITNAVEIFNTSSGAVHFIASNNDSGVRYYDMERFQLFKHLQFEWPVNHASLSPDRKTVVIVGDDPDGLLIDANSGKTLHSIKGHRDYSFASAWSPDGRTFATGNQDKTCRIWDARNLSKSVHVLRGNLGAIRSIRFTSDGQFMSMAEPADFVHVYDVKSDYNKRQELDFFGEISGTSFSPDTDALFVGVWDRMYGSLLQFGRLYNYSYLDSVF

SEQ ID NO: 71194 - protein, 335 aa, Zea mays subsp. mexicana
  Clone ID: UC-ZMROTEOSINTE049D10_FLI.pep
QGLQVQDYYGNFCKRVPTDIDLPAIDSDKTVMVTFKHDDKLPENVECGFQCALLYTTVYGQRRIRVINLSLSCTNLLANLFRYADLETQFSCFLKQAANGIPTSPLPRIRDEATNTCINILQSYRKHCASVTSSGQLILPEALKLLPLYTLALVKSLGLRTDGRLDDRSYWISVASSVSVVLAVPLVFPRLIPIHDLTSRDDDDSLIPSPLMLNSENVQEDGVYLLENGEDGLIYVGNMVNPATLEQIFGVSSLAALPAQLALEQFDNELSRKVNEVVNEIRRQRCSYLRLRQCRRGEPSGDFFRSFLVEDKAPGVFSYVEFLVHVHRQIQSKMT

SEQ ID NO: 71195 - protein, 287 aa, Zea mays subsp. mexicana
  Clone ID: UC-ZMROTEOSINTE057E09_FLI.pep
GMSMAASRRLLHLLPRLELCLRSRALSIPSSSRAQGMARCRREPPRRKLVTCRQGVFEEGNAARDKAVPIPDKVLRHCKYANGRALDLEPIEKNFANESMQFSFEEESDDMVGEISESVVRDVEKAAIELLAARAFTVSELRKKLRSKKYPFDTIDAVIANFKSRGLLNDGFYAESFSRSRWLTSTWGPRRIKQALHQKGVPEAEVDQATRRVFQDGDDYGKEATFGMSEASMDRLFAQASKQWQRGQSLTLESRRARMVRWLQYRGFNWAVTNAVIRKLEAQHPPP

SEQ ID NO: 71196 - protein, 194 aa, Zea mays subsp. mexicana
  Clone ID: UC-ZMROTEOSINTE042A09_FLI.pep
IKTSSAKQSVLIGPQCRLIQSTTRSIPDVVNLQHRSEVIACVEFLQEVRVPYILRPQLMHQALLADHILPNHMVALLCMFDYVVQLLRRVEQKHINHLGVGDVLVFTDLLSDGRAELRGRDNVVEVVDLHDGGDRAACLLEEIEDAVPGLLQRGRVRRHLHCPHRERHRFESPAAPPPVPVAGGYYSASRAGLL

SEQ ID NO: 71197 - protein, 115 aa, Zea mays subsp. mexicana
  Clone ID: UC-ZMROTEOSINTE120H02_FLI.pep
ESILDNLSRRPCSSWPVVAVLVAQESFSRGQLLRLVEIFLGGLVRAFVIETHLRWWGCVLRVVKVYYWFGVDCIWFRLVRQRLYGICFFLSTGHCNWVLFFGRREQEKLALFCGV

SEQ ID NO: 71198 - protein, 297 aa, Zea mays
  Clone ID: UC-ZMFLMO17207D05_FLI.pep
FWKRKEKTIPDALQPELGMKLLIAHGSHQELGKGDSMTNLMINMCDVVHMLMHATEVHYQCPKRVRVQSDVSERIANGTSVHVNTHVQNLNLDIEEQSHKHSISHIEEPNTNNSEGSLASAAVWDVFRRQDLPKLNEYLAVHREECAARCQAVSSVKYSIYDQTVYLNDYHKKMLKDQYEGLKTIEQITMDSASVETNMFKLCKVRFVQFGQKGIPYLNTYDGRAIRYLDPLIKANDTIKIDLQTNKIMDFIKFDVDNMVMVTGGRNTRRVGVIKNREKHKGSFETIHVLLGAFCYV

SEQ ID NO: 71199 - protein, 98 aa, Zea mays
  Clone ID: UC-ZMROMO17011D02_FLI.pep
DKIRARVGWMPEMFMDCERRNFVVQAYHRELLEQMIASGRMPPSGAVVVTDAAPSRKVRAGSRKATPSKKPSVKRKKEKKSSSRRRLPKPVAGGLGAM

SEQ ID NO: 71200 - protein, 260 aa, Zea mays
  Clone ID: UC-ZMFLB73217A02_FLI.pep
SLPFTCFYKRHHRRFTHAWVANNATFNKRKQSYRQTDTIAADARTQTPTVQREKQAVPFPPRPTRSIAMPCTDRRRSVRSSAAGALGRLHGEAVGVDAVVVDEVVRARPHELVALVHAQLRHLLLLPPVAALLAPRGLAAPARLRGVAVRGVARPGAPVHAHLPERGLERRVRPVRLHAPALRRPVVRVPDGAVHGHRLRPGERRRGSSQRGGGGVGAVGLRRRAAVPVVAVAVALVQRGVLVHPDGRVVHHEHHLAGVP

SEQ ID NO: 71201 - protein, 42 aa, Zea mays
  Clone ID: UC-ZMFLMO17043G02_FLI.pep
TGRYATSMSSCLLAYRKYRDLETGYVSWLFFFHRYHFMTNVV

SEQ ID NO: 71202 - protein, 168 aa, Zea mays subsp. mexicana
  Clone ID: UC-ZMROTEOSINTE039D11_FLI.pep
GVEGPTRKCYRQANPGEPALARASTNERAMAIIICSSKLSGTLTESMLDPAKVDELSTPASTVPSDSAILVPASATSDHWTLELEYSAASIVRCVLLVGGSSTLESEELLPATLRSCVVDLSGLLRVPNLIVWQGDALEDSPCICCCSAKAATAQANPPEEAASAVVV

SEQ ID NO: 71203 - protein, 158 aa, Zea mays subsp. mexicana
  Clone ID: UC-ZMROTEOSINTE043F01_FLI.pep
ASGQSSPQGLLQADSSTVHGQLHGVAARSGVVGRRRRVGGGGVIVAVVVGGRPPPPPPPSSSPRREERGAPRLRGDHQDHQEAAARADGEERRRRRPRVTATGATAVVRGAAAGRHHGLRRGAPPRPPLALEARAAEHPRDRRVMTVMHDLSWCLVVQ

SEQ ID NO: 71204 - protein, 147 aa, Zea mays subsp. mexicana
  Clone ID: UC-ZMROTEOSINTE044G10_FLI.pep
PHPRRPPPPPPRQPSRTACRPSSPPWTPSSSTCLPTIRSAPCCRTSPHPWPGSVPCCRPTLRGRSRLTSGLPSCIKWAPRMNSPSSRPGSSTSTSTRPTVPFWLRCPPLVCNRAWTWFVLYFYYSTIDICNFGTAILLLIRKFCFLY

SEQ ID NO: 71205 - protein, 157 aa, Zea mays subsp. mexicana
  Clone ID: UC-ZMROTEOSINTE047A01_FLI.pep
KLPPDYKEFLSLLRRKNLTRDDEFLIVNNAALLPMKNRTEVFLMLHDRIVNFLGQKNRAKKKKILSNLPYKNNWLDTATANAKINQWVVNVQNEYKRTTIDLLRLNRNVRSHLHQYNHEDDIEEILYCEWPMLLIVMEKMLHLEGELQDTGIHNKFG

SEQ ID NO: 71206 - protein, 205 aa, Zea mays subsp. mexicana
  Clone ID: UC-ZMROTEOSINTE047C07_FLI.pep
LGFTFHRIDLASDSENMGGGRDNHHVDKGCYPPTVYPPVHSTGSYAFAPPVAYPYSYAQHGSMAPPPLGSYPYPSPMYSSHSGYPPSGYPTYNQSVYPSMGGYPGASLHATQHHGNGYNMGATLIGGAAAAAAATYGVHHLTHGHHPHNHHLGHFGKFKHHYNGHYGKLKHGKFGKHNGLGGKHGLLGWKHHRHGFFGGKYKRWK

SEQ ID NO: 71207 - protein, 228 aa, Zea mays subsp. mexicana
  Clone ID: UC-ZMROTEOSINTE048A12_FLI.pep
IGSAKGLAYLHELADPPIIHRDIKSTNILLDESLNAKVADFGLSKLVSDTQKGHVSTQVKGTLGYLDPEYYMTQQLSEKSDVYSFGVVLLELVTASQPIEKGRYIVREIRTAIDQYDQEYYGLKGLIDPKIRDSAKLIGFRRFIQLAMECVEESAVDRPTMNDVVKELEIIIQNEGAQLLNSASLSVEQFGNEKRRDPYAEHLPMNDESSSSTFDYNSGYSYSAVQPK

SEQ ID NO: 71208 - protein, 369 aa, Zea mays subsp. mexicana
  Clone ID: UC-ZMROTEOSINTE051E04_FLI.pep
KAKELSSLGFTIVWSPPPTDSVSPEGYMPRDLYNLNSRYGSMDELKELVKIFHEAGIKVLGDAVLNHRCAQFQNNNGVWNIFGGRMNWDDRAVVADDPHFQGRGNKSSGDNFHAAPNIDHSQEFVRNDLKEWLCWMRKEVGYDGWRLDFVRGFWGGYVKDYLEASEPYFAVGEYWDSLSYTYGEMDYNQDAHRQRIVDWINATNGTAGAFDVTTKGILHAALERSEYWRLSDEKGKPPGVLGWWPSRAVTFIENHDTGSTQGHWRFPYGMELQGYAYILTHPGTPAVFYDHIFSHLQPEIAKFISIRHRQKIHCRSKIKILKAERSLYAAEIDEKVTMKIGSEHFEPSGPQNWIVAAEGQDYKIWEASS

SEQ ID NO: 71209 - protein, 83 aa, Zea mays subsp. mexicana
  Clone ID: UC-ZMROTEOSINTE053D08_FLI.pep
LLHYFSKTYNYDVLVQIIEEFQKCHLDHPVKKFFGECTDLKIKLDRCFRQEKALKRKANFEESKRFKEQLKAYKREIAEKSEE

SEQ ID NO: 71210 - protein, 150 aa, Zea mays
  Clone ID: UC-ZMROB73070C07_FLI.pep
RASEVDRRWLRYTHTHTSTENEEFLFIMGVQSSEGQMMFSSIALLQQRFRELERIREKREERLLHVLAPRPVATTSPREMPVKWFFHPELLYPCRPLRDTAAASLFPACECKSFQLHGDNDPITVELWPSKTYNYKHVSGEVDVDTSLHL

SEQ ID NO: 71211 - protein, 278 aa, Zea mays
  Clone ID: LIB3078-022-G5_FLI.pep
PKRKRLQPAGSAAQAWEWPSGSGSEKEERAKRSKREEGSAAAAFRKMGKYMRKRRGAAGEGVAAVEVSQVVGVRTRSRSAAATGGGVAKVAPPRRKKALLPAANETASGEPGAVGAGGGDGGSCCYIHLRSRMLFMAAPQQQPSAALTPVEAAGAAQQGGVVALAAGLSRCSSTASSVDVGGQQPASGSHACRSDAAPAEVDGDHVPDVVTASNSGSVPDRERRETTPSSSRAHGGELSDLESDLVGRQKTGCSSSPATTTSAAELIVPPAQEIQEFF

SEQ ID NO: 71212 - protein, 111 aa, Zea mays
  Clone ID: LIB3078-023-H7_FLI.pep
IELAGTVPCRAMQFVAKLGSPCPIMEATRFLQGVQFLAHKHRICSSALRLPLSPTSGLTAFAPVAGRRRAALHSPARQNSIQSRRLVGGAPEDAVELTVVVDEAEDVDGSA

SEQ ID NO: 71213 - protein, 87 aa, Zea mays
  Clone ID: LIB3076-005-A7_FLI.pep
NEQAQSYLHKIDYKVQLPNKKSNRTQILCIELQWYPPPNMWRRGLLLVKKPNQYYSFFPSNFTTQALYPTPTPPKKKQTEATPNYDQ

SEQ ID NO: 71214 - protein, 118 aa, Zea mays
  Clone ID: LIB3076-006-E9_FLI.pep
LIVNIYLYIHTHTTKKKSTAGYRNRACYATVPGTTQYVHMAMLPTIYRRRLPSSDPMSARAGAKHGQAHSLTPPKNTGHARYVRTRLAISTTGGARAAERTACRRMLGHTMHAGQPTS

SEQ ID NO: 71215 - protein, 89 aa, Zea mays
  Clone ID: LIB3078-032-A2_FLI.pep
KQKCMEMETVRQFGLYRETHHSAAPCSSEGLQLSLDRSCFGCHTALWRALLYSVSVSRTPDAVTMWPGRCCVGIFPARCQWCITAAPSP

SEQ ID NO: 71216 - protein, 72 aa, Zea mays
  Clone ID: LIB3078-048-D9_FLI.pep
KEMRDYMSIPVAKQQLSNSRKSQLHILLSRKNSNFPTTHNNQIRIGHCDAALEPVCSSKRKPTIQLPNNELP

SEQ ID NO: 71217 - protein, 97 aa, Zea mays
  Clone ID: LIB3076-015-C10_FLI.pep
SACAIPATPSAAAAPRRRLSGVMAPRSRSASSLNPARSSASSPATPSRSPITGSRSSYSSPAPPAPARARLADAAMRSRSRVRACSGPAWLQKPAAS

SEQ ID NO: 71218 - protein, 173 aa, Zea mays
  Clone ID: LIB3076-001-A6_FLI.pep
FEFPPPPPLPQSLSSFPSPVAIALCSASVRQGLLLRRSSSPNPPGSPRCVPDAVEARRVRCMQGMATFELYRRSTIGTCLTETLDELVSSGAVSPELAIQVLVQFDKSMTEALEMQVKSKVSVKGHLHTYRFCDNVWTFILTDATFKSEEIQETLGRVKIVACDSKLLQPQHP

SEQ ID NO: 71219 - protein, 71 aa, Zea mays
  Clone ID: LIB3078-040-H12_FLI.pep
TSLFDTESFTVPAPTLNLFQWCVRARLLYAKTILLNRKRFRTFQPHTAIWLSISKLRRSEGLAPNLLFIVQ

SEQ ID NO: 71220 - protein, 54 aa, Zea mays
  Clone ID: LIB3079-003-A2_FLI.pep
RKAKIVDIWTTVAECKARTGALDLKKLSREIYRLHCSSQPIQDDVCVAADHLIS

SEQ ID NO: 71221 - protein, 80 aa, Zea mays
  Clone ID: LIB3078-020-H1_FLI.pep
VPYSPFLCRASIEVSSKLITQMCWFVFFFTESLVAGLAPRPHHGPQTAIRPNHHQYRSAIITPVNHRQMRASLWAGTALC

SEQ ID NO: 71222 - protein, 138 aa, Zea mays subsp. mexicana
  Clone ID: UC-ZMROTEOSINTE062E10_FLI.pep
EDPKVDPPRITDAAQDAPASTKTDVKVVDAAAATAAKPNTAENPSSSNAVPSPVRTTDSDSRKHASFPEQDSPHENKSAAVHPGEASATPGVGSSHHRHEAPEARSASFTELFGSESGIESESEDLMPDIVDGDPDSD

SEQ ID NO: 71223 - protein, 189 aa, Zea mays
  Clone ID: UC-ZMROB73012F09_FLI.pep
ENSIDCFMGSGKASSPPGPTAGGRGSPPGAAVCCMCGDRGLLPELFRCSACSVRSQHTYCTDRYPKVESYGVCNWCLRADGGVASTSNSPRSAGKAVVQRPAPHGGDKIGSGTSPKAAARGDFASSNLSKPIKKQPQQHAQRLLLRRSASDLGSRVVRTDHDAPPSPGVTTRGRPRVRRYKLLEEVITS

SEQ ID NO: 71224 - protein, 199 aa, Zea mays
  Clone ID: UC-ZMROB73050A07_FLI.pep
VKPNIAFLLQCGLTVSNVLEFPLLIGMRPESVRERVACAEKLGVPRNTGMFKSALWAVYCVGPNSIGAKLDVIKATLGCSEAELTLVVRKSPPILRMSEGKLSRALKFLKVDVGLKLQYILLRPAILAFSMQRRLMPRHYFIKILKAKGLVKENVDFYNALCLTEKRFAQKFIDPYNQSIAGLADAYAAACAGKMPHED

SEQ ID NO: 71225 - protein, 180 aa, Zea mays
  Clone ID: UC-ZMROB73050C10_FLI.pep
DKEEPCEHTKLLEDDVPTIPFDDGKALKGMGLVGEEPAGFSSPVYSSITESRSDKRSEEPTTLHSFNPVTGSTKVVSPDEQSEPAAGSGSGSGSGPREAWWKKQLLSLYRNAKESKHLWPIVATTAALVGLAYLGRRWHKGRLQFQLLKISPSTNKEVNCVELFAKYYITKENCIMLSVS

SEQ ID NO: 71226 - protein, 121 aa, Zea mays subsp. mexicana
  Clone ID: UC-ZMROTEOSINTE062H09_FLI.pep
ATLLFMWMPVAQMWTNYLNPSNIKGLSAFSMLLAMLGNGLMIPRAVFIRDLMWFTGSAWASVLQGWGNLACMYCFNSISGEVFFATSAGLLLWLGFTLWRDAIAYGNSSPLSSLKELFFGK

SEQ ID NO: 71227 - protein, 127 aa, Zea mays subsp. mexicana
  Clone ID: UC-ZMROTEOSINTE063C06_FLI.pep
VVDRSIDRSMMGLGFFHSCSELLLGAASGPGVILGQAAVLQPERRGGSLGAQQLRVQHGAVVAERLRRHVEVEADAEQEVHLQVVHLHQADAPDLGEVGVVVAYVVHELDGGEHGGNEEAVHAVGVD

SEQ ID NO: 71228 - protein, 291 aa, Zea mays
  Clone ID: UC-ZMROB73080G10_FLI.pep
HIPGRPRVDEGPAVQPALAGFPANQAAGLQVQSSLKPDIMATLAKLLPSVQSSPLVSGQMNAIDRTSQIQDPSMLSKVWNPENQVTASNSSFGQMANVQHPGQQFSGQASAAHLTNYGNMVSAQERSIQHTAYNPEVTLNLPPPPPLPTIPHSSATLQSQGGHSLPSQTNQQLYQPEQYYVPQNNYGPLVPVSHSNLQISNTNNPTLTIPQVNPGPPTNNQIGNLAQPQHSMPLHVDRASQDFSSQGQQQNRGPGAAQAPEEDKSKKYQATLQLAQNLLLQLQQRGSGNQS

SEQ ID NO: 71229 - protein, 122 aa, Zea mays subsp. mexicana
  Clone ID: UC-ZMROTEOSINTE068C07_FLI.pep
LVGSGPISREPVFTYGPRKVACGGRGFVESIIGLFFDFTKRNGNDKPAPAKSSNPVATTALRAFDMTHHITSACLLLSEMLSPPHLTLVNGRRRGQGRADCRLALVEPTQPWNWMPGAATPV

SEQ ID NO: 71230 - protein, 145 aa, Zea mays
  Clone ID: UC-ZMROMO17009D08_FLI.pep
EGRGRDYDTISGSKRPYADMDDVPRYQEIGVRQSKARLDYDIGGSSARYGDTYSERSGRPHAGYSSSRSIPVHDSAYGSSRHGMSYGGSASSADAGGMYPPSYSGSYGSRGSDVGGSSYSSLYSGRNLGTSSGGYYGGSGSSSYY

SEQ ID NO: 71231 - protein, 88 aa, Zea mays subsp. mexicana
  Clone ID: UC-ZMROTEOSINTE070A01_FLI.pep
VTIVTVALFIKLLQRPIRQAPSGSMTASTPARAPAADPAAMADPASPANGQFSPRTPQPFMEYVRRTIDDTPYYKRDARRRFNPQNTY

SEQ ID NO: 71232 - protein, 242 aa, Zea mays subsp. mexicana
  Clone ID: UC-ZMROTEOSINTE080E04_FLI.pep
PVYNHVTGLLDPPELITPPNILVINGLHPMFDERVRDLLDFSIYLDISNEVKLAWKIQRDMGERGGHSLESIKASIEARKPDFEAYIEPQKQYADAVIEVLPTQLIPGDDECKVVRVKLIMKEGVEHFAPVHLFDEGSTVYWIPCGRKLSCSYPGIRFAYGFDTYFGHEVSVVEMDGQFDKLDELIYVETHLSNLSTKFYGEVTQQMLRHADVPGSNNGTGLFQTIVGLKIRDLYEQIVALR

SEQ ID NO: 71233 - protein, 477 aa, Zea mays
  Clone ID: UC-ZMFLMO17004F07_FLI.pep
VGSPAPFPKPSGLEPNPRTHIGRRARPSSGRVSGRPAPSMAAEGSGVQETFEARVKRLFGSRLFDAVPDSSFPTASWSVAAGDVERHRWSKPSEARDAEEEAAGEAGRGDTPCVSAFYDANGCLRGRRRRSRQEEFEGNLDDLDEDEEEDSERERNAAEQDEEEGVRVNIGLDPTLDREEEEDKYDREAFGREEAADRVYMHDIMDAGINMSINSIVPDLLDDSIEEVYRFRKDPRADMRAASARLREDGSTKDCDSHCPTQAKDFPSVVHTKKAVEEDNVKPILKRKESQADLKPRKRVRFDANVKDSELDTFEHDEDSPTVPQSMDVITEVESTSTLSASPGVPDYVRNPSKYTRYNLDVPESNDGSNRTALADMHDLLARSYPNMIHSETPVEIPSSVTFIPRKKSVDTMAVDEGPRAIDSNSSAIGMVAGASDEPDQCEMDEDDSKSPSMPQMHTNSKASSRRYRSSRTDDDE

SEQ ID NO: 71234 - protein, 179 aa, Zea mays subsp. mexicana
  Clone ID: UC-ZMROTEOSINTE080B12_FLI.pep
VWSVSLPVTVVNASDRNPSIEARDIIGWIIWLVGICVEAAADQQKLVFKNSPSNRGKWCDVGLWKYSRHPNYFGEIFLWWGVFVASTPVISDAEWLVILGPIFLTLLLLFVSGIPLLESSADKRYGRLEEYRVYKNTTSPLIPLPPAVYGSLPAWFKVAFLLELPLYNPGPGGDPIKLE

SEQ ID NO: 71235 - protein, 158 aa, Zea mays
  Clone ID: UC-ZMFLB73411B09_FLI.pep
AHCKDNPDAKGLYGIAFPHFDTLAAIYGKDIATGEGAEGLGEAVINMEKEIAMGEDCPVVEEDMVSMDTPQWSMDNRNSDHSTSSSSKRRKKHKDNMSSDPFLDLASGIRGDLNKTSQHFGRMAEVMEMEAKKDQMQELQEKFVVELTRLGFGEAQRK

SEQ ID NO: 71236 - protein, 229 aa, Zea mays
  Clone ID: UC-ZMFLMO17103E09_FLI.pep
SKDGERKRDKGKARERRRRLICCRSAKRKRSAGVVKMFLVDWFYGVLASLGLWQKEAKILFLGLDNAGKTTLLHMLKDERLVQHQPTQYPTSEELSIGRIKFKAFDLGGHQIARRVWKDYYAKVDAVVYLVDAVDKERFAESKKELDALLADDSLANVPFLILGNKIDIPYAASEEELRYYLGLSNFTTGKGNVNLADSNVRPLEIFMCSVVRKMGYGEGFKWMSQYIK

SEQ ID NO: 71237 - protein, 210 aa, Zea mays
  Clone ID: UC-ZMFLMO17045A04_FLI.pep
TATGGPQDQAVATGFCSSTLLSPTCSSICAGTTSFPLSSCTCAGSSSFAFPLPPSSSFFSCLRMSSLLACRSCNLASIFSSFAFSFTGSVVFSFAPLCFLFFSFFSLSSFLPSSSSSPSASFFLPSSSLSPFGSDTSFSLAFLSFLSLSLFPIFLRFSSSPTSLPSPVSFLSLIFSCFSPLEPFNSDPSFSLAFLSSLSFSAFPESPSSS

SEQ ID NO: 71238 - protein, 154 aa, Zea mays
  Clone ID: UC-ZMFLMO17055F05_FLI.pep
MPIFLQAMRLELHNMEIALQKFQDLFSSIGHEGMNSFSAISENQDVQDVNNEQHERVPGTQCGLANEHTLVTAVVKEATTQNVDHQLETDPGSMQVQSPVHFKSGAMPSPELVAANTEKADSLLEPNVDIGMGSLSPARPTDCLNMDLDTESQS

SEQ ID NO: 71239 - protein, 149 aa, Zea mays
  Clone ID: UC-ZMROMO17025H07_FLI.pep
CFGKITYISFVFHANRATCIYVETGTTQREHEQLHACALVVCITTTPPVVSSMTAVLVSWDGMVVVHGGSTANTKRGLISGPGRGHRRRLSAGTLVLEHPHGRAHQTMADYSKYKNDSCELGRPGFHFLHHDDKKSGSPPLIEEWTSRV

SEQ ID NO: 71240 - protein, 292 aa, Zea mays
  Clone ID: UC-ZMFLMO17118H08_FLI.pep
VGAQSRGPAPHLQQLRMPAPFAMVHRDGQHPPSIMNPGVIPSRQSVHGNFESSASGNALAGISFASMAPSSGHQAMSSTSDSHPVFPASSLLPGSGPGSMANFVRSSTRIPVVMASEQAPRLNPYVHHIGGGPLNAAPAGIQKARAHIGHTPQAASDQSQDVLHRLLLQLPEVMAPSLAQPTASSSHPAPMAARQQAGLLNPAPDNVACPLNAVAGVGRPGARIGSQSYQVSASLLEWEATLRVGLIRGHQGTYPLGQGCSDLAGGPPGTSAAQGCGSGASREVVCLSDDEE

SEQ ID NO: 71241 - protein, 204 aa, Zea mays
  Clone ID: UC-ZMFLMO17151E05_FLI.pep
SRFCCRRHLPPAAAARVPPRAARGRRGHATGGASCTAAAAAAATASGDLLITVPLPARAGRPEARTIPSGSGAGTGTASTSSADTAAAASSTSDAAVTSPTELAVPAAGGCDEPHVAAAGSSAVQLGVPVVDAGDDPDRGTELHVRVGARSAHRRRRRARREQAHDGYGQDRVVSARMHTAAAAGVEDTKENEAPIDPRRPARV

SEQ ID NO: 71242 - protein, 420 aa, Zea mays
  Clone ID: UC-ZMFLMO17046F10_FLI.pep
PDNLLKFLSSTTNSFDGNSGLCISCSTSDSSCMGANVLKPCGGSKKRAVHGRFKIVLIVLGSLFVGAVLVLILFCILLKSRDQKKNSEEAVSHMFEGSSSKLNEVIEATESFDDKYIIGKGGHGTVYKATLRSGDVYAIKKLVISAHKGSYKSMVGELKTLGKIKHRNLIKLKESWLRNDNGFILYDFMEKGSLHDVLHVVQPAPALDWCVRYDIALGTAHGLAYLHDDCRPAIIHRDIKPSNILLDKDMVPHISDFGIAKLLEQPSTAPQTTGVVGTIGYMAPELAFSTKSSMESDVYSYGVVLLELLTRRAAVDPSFPDGTDIVSWASSALNGTDKIEAVCDPALMEEVFGTVEMEEVSKVLSVALRCAAREASQRPSMTAVVKELTDARPATGGGRSLSKSKQGKPGSQSNSSAYRQ

SEQ ID NO: 71243 - protein, 110 aa, Zea mays
  Clone ID: UC-ZMFLMO17054E11_FLI.pep
HKPLLEWLSINLLHFMGGFGVDKRLFFLIHQLDRFIFHLRTLLPPTSTFSLFLSISHLLWSVIMVRLYEVSFKLKIQLNNLFIDLVCLRIRSLLSSISPIEYLYSTSPLS

SEQ ID NO: 71244 - protein, 201 aa, Zea mays
  Clone ID: UC-ZMFLMO17056G12_FLI.pep
EFCGPLWSRRAPSQVLRLLAPDEPLPPMKMTRLAQHDTLLCGVPLRVGNPSFKGDLHCHEPHRTSHARMMSRLEDGIFLNGGRQARVLPLQCRQHPRGATLSPPVPFAVPPPSLRSCEKVPSEGDKVPRHRRLGNRDRISKPLSMHSMVSRITSAQSGVDSSRRHSSASALSPFTNPTGNMDPPGPWSALFAPKDGRTQGL

SEQ ID NO: 71245 - protein, 78 aa, Zea mays
  Clone ID: UC-ZMFLMO17059A08_FLI.pep
DRVHDETKDDGSPSSDLAAAVNRHALTRVVGEVLVRLGQRVGYVHHAGSLGRVLVQARPRDAHHGRHASQRARLLRER

SEQ ID NO: 71246 - protein, 68 aa, Zea mays
  Clone ID: UC-ZMFLMO17060H05_FLI.pep
IRGNLLNVREQWQQHNHSDHCDGTAYSQVPFFSLGLLTASRALKVQSDLTGDRERDALLLLGLVAYLA

SEQ ID NO: 71247 - protein, 211 aa, Zea mays
  Clone ID: UC-ZMFLMO17017B09_FLI.pep
AVEMLLAVEGGGFFSSSASGYSHGLALLLLGRKAEEKPVKASPWNQYRLVDREAEQVYHLPSAKDQAPGKCAPFVCFGCTANGLEVASPSKAVSSNALGRGTSQEEASCSAHKALTTSASISGSERRGCLKSNSKRDSLEHRIVVSEGEEPRESVEEVQTLRSSIERRKVQWTDTCGKELFEIREFETSDEGLSDDDAENDGFRKCECVIQ

SEQ ID NO: 71248 - protein, 66 aa, Zea mays subsp. mexicana
  Clone ID: UC-ZMROTEOSINTE066F11_FLI.pep
QNGCPSQALCIQAAYVVIYRCLPMSNTELLPLLTLLQLLLHIFLHRCQVACHMTEGSHMVFSFSSL

SEQ ID NO: 71249 - protein, 71 aa, Zea mays
  Clone ID: UC-ZMFLMO17050D05_FLI.pep
ILGSISVAGQIYSDYMFTGILTGPSEARHQQAAWWFLISFSTGGCYSGNTARVPHEEMSACNDLSCLAFLN

SEQ ID NO: 71250 - protein, 345 aa, Zea mays
  Clone ID: UC-ZMFLMO17052G04_FLI.pep
LEMDLILPYKVGDLAESKSLVSGYRGAWFRCKIHNMRVRLGYLECYLEYIDYPGEKKEWVRLFRKNSARSNQNSSDSIHTMIRPSFPKWYFVHEVPEQFPNSDVTAIVDETWQIGDRVDWLKEGCYWSGTITKIINEDLVEIELPAPPIGEGKCYKAKCSDLRPTLEWSLARGWMVPLSQANGKGWHAARLLQHYKSESDDDNDDNDSCDARQTVCRASNTHEEAPGPMVPAPPSATNNAPSHTYQKDAAVASTEDLLKPGSTSKSPDPRHDAQASAQPAGTGVSMKPEPVIGVSTIKKEDSLTEGEVDGDTEECLEKLGAIKARLKYLMQGTRLEHERSATFRG

SEQ ID NO: 71251 - protein, 85 aa, Zea mays
  Clone ID: UC-ZMFLB73372A12_FLI.pep
DQTGCKVGVKNMCLACTLNSKSYIMQWIWWGPLPPWSTHQKKRTYADCSSNLSLEFQPTPAPVDSKKYRKKLPAIRNSGCRKTEF

SEQ ID NO: 71252 - protein, 343 aa, Zea mays
  Clone ID: UC-ZMFLMO17060E12_FLI.pep
MSSKSNTKTLQSSKAVLDESSVIKRNGYGTLDVPEPTWFILSGHRLLRKEYRAILRRLRGRVCRDSHHWSFQATHLVTTEMRRTEKFFAAAAAGRWILKPDYLTASNEAGKFLEEEPFEWHGEGLNIGDTISLDAPRKWRQLRQRTGYGAFYGMQVIIYGECIAPTLDTLKRAIRCGDGTILATSPPYTRFFKSSVDFAVVSAGMPSADAWVQEFMRHSIPCISADYLVEYVCKPGHPLGKHVLFNMHDLAERSLQKLMKNQEDAPGSCSACGSDNREVPMLVCGGDGRSQSSGCGVRTHADCCNPPVEGCDGGEWLCGRCDQQKSAKKAKKTAAKPRVLKQR

SEQ ID NO: 71253 - protein, 253 aa, Zea mays
  Clone ID: UC-ZMFLMO17065H10_FLI.pep
GSDDEPAVRKGPWTLEEDLILVSYISQHGEGSWDNLARAAGLNRNGKSCRLRWLNYLRPGVRRGSITAGEDTVIRELHARWGNKWSKISKHLPGRTDNEIKNYWRTRIQQKKQQGAKTTQQREPSTTASSGAGDDYWCTKPDPNQQAHYCLQKAAMAAATATTSAVVVSSEDDAPSAALTSQDSSAAAGGDWYMHQQQQMCYPYCSELSFVAAGHDETVGLDAVTMQFLSSHFTASFWTNGVDDFWESKPIDY

SEQ ID NO: 71254 - protein, 111 aa, Zea mays
  Clone ID: UC-ZMFLMO17012B07_FLI.pep
LVGSSSSPSAASELWLLPAGKMPLRHRPPLRCGFFLARKMPPNPSWLHFVTYILLMCFIVLVMSNSQGDFEWTLVWAGAKGDGQTGVILAFVVHVLGDVGGHYIWSIFLAK

SEQ ID NO: 71255 - protein, 285 aa, Zea mays subsp. mexicana
  Clone ID: UC-ZMROTEOSINTE040D01_FLI.pep
SAYPLRRSQDGRTASTRERTEERRHRRHAPFGRGKGMELTSSSRSVLSSCNRPVARALCRTAYPGARRKEKGIVCILSEEKEVVQRTIRRRAGFSLLLASPVLSVAFSAYGKSKTMNPYDERRLLQQNKKIQEANRAPEDFPNFIREGFQVKVVTPDNYITRASGLMYEDIKVGTGDSPKDGQQIIFHYVGYNEAGRRIDSTYIQGSPAKIRLGNGTLVPGFEEGIRDMKPGGKRRIIIPPELGPPVGPSTFFSAKQFEVFDVELLAVQDCQRRTIAFYSDVVCS

SEQ ID NO: 71256 - protein, 62 aa, Zea mays
  Clone ID: LIB3067-051-E1_FLI.pep
YTVITREAQHSTAQGVRSWSHYSELSAAIDRAYRSQPFHRRSSPAPARLVCPSGQVTWASVS

SEQ ID NO: 71257 - protein, 240 aa, Zea mays
  Clone ID: LIB3069-028-B2_FLI.pep
ICTASSRRPQAEALLVQPRTLPHLVHPPPPANLAAKPHRRRHVLHHLPERRQLGVGRRGRHRGRAGVRVGRRLEPLYYSLSPFRVAAAAAAWPAGRQCQLKVAFLGQRSRRCCGLVEADDVLLRTCCRPLAAPDIQLRRSRSRLGVDDRRSRNRLRLLRHQLLLGVVQPVQLVYLLSEDPFLVQDGHPHLLPVHVSDFSRATVVCGVCLFSGSPARHSPVRKRDLKNKNSEAEKAKKKKL

SEQ ID NO: 71258 - protein, 236 aa, Zea mays
  Clone ID: LIB3067-022-C6_FLI.pep
HDQRADRVDILLPHSWPAVATGGRRITGSLIVPEQHFDVVFVLDAALAARVGLAEHRVGLLLRESVAVAYHHLPQLLRGDGPAAGVVEHVEALGEARLRLPGAHLARRHGQERREVDVAGARRDARVLQEAPRLRLVHVLAQGAQRRHELARGDATVLVGVEQVEDFLALVHLLRRQLLRHVAHPSQPQPLPLAMDALDERSAELSFILIRFRQVKRVNSKFRSGRPLATFSLSLF

SEQ ID NO: 71259 - protein, 118 aa, Zea mays
  Clone ID: LIB3067-058-D4_FLI.pep
NSKKGDHAHCRSRSTHGTTPTFIAGAAAGLLVSCSEMTLCQSQRRRRVPSPYSSSPQRLGHVVEQPWLLLFRFLPVLPPPQHNDLGTHVSRYSIVAAPPTCDPVASAPGCRKSKAPRD

SEQ ID NO: 71260 - protein, 151 aa, Zea mays
  Clone ID: LIB3068-057-A6_FLI.pep
KGTGNFFRYDETNKRICTALHCTALRYNTPTTATTAIIRSAQSPSLAVACRHAQPFSLGNPDHRACVVLAKLIMCHGVGTAVRRALLASPGVHACPVACRCRRERNELGFLAKKGSREQSPPRKKKSFLQRRVEHDRKRPAAQLRREGCPS

SEQ ID NO: 71261 - protein, 67 aa, Zea mays
  Clone ID: LIB3069-006-G2_FLI.pep
IGEHKGGGASSGTCYADLSVICSLCGGDRQFVSSSVGIQYLLVNRTHAYYSWHRNHDGAKVVADGVW

SEQ ID NO: 71262 - protein, 141 aa, Zea mays
  Clone ID: UC-ZMFLMO17051G10_FLI.pep
LLVVVHPGSRAGAGAGGDAQHHHRPPAVALRRVLQLLLRPVLPGQHARLAARRRWAPSVFGRLAAPFLGYKSFLFLVMSAHCCAAAQDWISDEMGAVKGMEKKYINFDVLFTLVFFLLRPLKRDAVTDLPLHSTQCLRDSR

SEQ ID NO: 71263 - protein, 431 aa, Zea mays
  Clone ID: UC-ZMFLMO17310D05_FLI.pep
QTCFDDQLLGSRIKNEIIEKRQLVRVLLNNEDNKPSSYEPLPSMCVACGASTFEVWITVPKWAAQVLKHLAPEISYRSLVALGIAWVNGTPVSSFDRQDADRLLFFCSNQCGDQAIQNGSYAHVSSWSAPLTKDRTTGSLESKQMSFGAKGVVGDNTISLSSLKPRLKPATMRPLPHSRKQQMHPFMGFPQSIIHDASQVKPSLPAPPVKHNAVPVTAVTPRKSSSGSPSSWSRVQLPIPLNPLPIKKHECNRLPIHICSEEDFLKDVMQFLLQRGHIRLVPQGGLAEFPDAVLNSKRLDLYNLYKEVVYRGGFYVGNGINWKGQIFSKMHNHTVTNKMTGVGNTLKRHYETYLLEYELAHDDIDGECCLICHSGALGDWVNCGLCGEWAHLGCDRRKELGTFKDYSKADGMEYICPQCSLAKYKPPLPAP

SEQ ID NO: 71264 - protein, 328 aa, Zea mays
  Clone ID: UC-ZMFLMO17223B03_FLI.pep
SVTTMLLGGAQIHQWKQWENGIKKDAPGNGPKVTNVHHHEFIKKRFKGIGKDSIMLSWLHSFGKQFYRSVSKSDYTTMRLGFIMTHCPGNPKFDFHRYMVRVLEADFKKVVGISWYLWVFVVIFLLLNVNGWHTYFWIAFLPLILLLAIGTKLEHVIAQLAHDVAEKHTAVEGDVIVKPSDEHFWFGKPRIILYLIHFILFQNAFEIAFFFWILSTYGFDSCIMGQVRFIVPRLVIGVVIQLLCSYSTLPLYAIVTQMGSCYKKEIFNEHVQQGVLGWAQKVKMKKGLKGAASASKDESITNADSAGPSVKIEMAKAGEDVEIVGNTG

SEQ ID NO: 71265 - protein, 98 aa, Zea mays
  Clone ID: UC-ZMFLMO17228E09_FLI.pep
RKFPHCPFPMVPSNAESQSVVVIGAGIGGLTTAALLAQQGYRVKVYEQAAIVGGCASTFRRRGFIFDVGATQVAGLEPGGIHHRIFRQLQVDLPEASL

SEQ ID NO: 71266 - protein, 167 aa, Zea mays
  Clone ID: UC-ZMFLMO17223H08_FLI.pep
ELERRVMSSEEARASFSELVVGSPTRTEGETYSSGDMSSEEGAHVTCFTEDLHDVTLHFQIVRFSKQIYVWVGCNTAKFGHLYAAATTRPDNRVSVTSVLGGTSDNTGSSMARRLVLKTGLNIVLACNIPKDSPILEAAAERKLVEKLKGLGYIKTPAVGANTSSAQ

SEQ ID NO: 71267 - protein, 444 aa, Zea mays
  Clone ID: UC-ZMFLMO17223E07_FLI.pep
IGGHKLAAASMMVLSGQSFPANAGESVRNAHVLAVFKEGRDCTSSLTLREYHNRPVSMIDNGANMKLDLENIDNSHMLMSSPDFNATVCHSYKDQTFLTLETNTSVMTEKDSSQARNASQQFVSTALRTQNVSQEPLCTAIAPKQLIDPQVQKKSYGVFGSGSAHLGHLTVGNQQLNERWHQRQSDSLSSVEVRARGHSAMIVQPALENHSRNGVAQKGPRIANVVHRFKCSVEPIEIGAVLSGKLWSSSQAIFPKGFKSRVKYFSVVDPVQMTYYISEILDAGQQGPLFMVTVENCPGEIFINISPTKCWNMVRERLNMEIRRQLNMGRANLPTLQPPGSVDGHEMFGLLTPAIVQAIEARDRDYICTEYWRSRPHATIENRDNQNMSPQDPPLVALRGLFQRANCDELRALRSLLMSNRILGDNSRQQACQILDEEIAKQWH

SEQ ID NO: 71268 - protein, 150 aa, Zea mays; identical to SEQ ID NO: 57673
  Clone ID: UC-ZMFLMO17029H05_FLI.pep

SEQ ID NO: 71269 - protein, 152 aa, Zea mays
  Clone ID: UC-ZMFLB73108D12_FLI.pep
QNLILLKLESNNITGDVSSLIYCLSLNILNVSYNHLYGTVPTDNNFSRFSPDSFLGNPGLCGYWLHSASCTQLSNAEQMKRSSSAKASMFAAIGVGAVLLVIMLVILVVICWPHNSPVLKDVSVNKPGDTSFWFPVCCSNKKKFNTLLKPPL

SEQ ID NO: 71270 - protein, 384 aa, Zea mays
  Clone ID: UC-ZMFLMO17150E08_FLI.pep
TVIVLPRASLARCAFKFRTTSAFDAPNPSPTPPPPPAPPPTMSSAAAPAAVGSGKELANPPADGITNLRFSNHSNNLLVSSWDKTVRLYDADANVLKGEFMHPGAVLDCCFHDDSSGFSAGADHTVRRLVFSSSKEDVLGRHDGPVRCVEYSYAAGQVITGSWDKTVKCWDPRGVSGPERTLVGTYAQPERVYSLSLVGNRLVVATAGRHVNIYDLRNMSQPEQKRDSSLKYQTRCVRCFPNGTGYALSSVEGRVSMEFFDLSESAQSKKYAFKCHRKSEAGRDTVYPVNAIAFHPIYGTFATGGCDGFVNVWDGINKKRLYQYSKYASSIAALSFSKDGHLLAVASSYTYEEGEKTHEPDAIFIRTVNEVEVKPKPKALAAPQ

SEQ ID NO: 71271 - protein, 218 aa, Zea mays
  Clone ID: UC-ZMFLMO17129D01_FLI.pep
VLCAFFSEESSQASEVYKPLQDPLISRCVDIIGMNEDKASVSEKLTFAAKGVLSKVFPKPRRAWLPTGCLKLMDTLHQALPSMSLIASDFSYLPDVSIPGDRAPLVSSKKDGKTSDHRNYFDAQGDADIFFPTDFRLLEQIDHNCAGFSKEQKNPGAFKPVKKRRTIILDTAAFMEEFGMPLKTRTKDGYNPLLDDFKNTKFYLSVPTHNVPTHSRRN

SEQ ID NO: 71272 - protein, 124 aa, Zea mays
  Clone ID: UC-ZMFLB73046F07_FLI.pep
QIAPLGYDRRGEPERALEVFPRTSSYGYSSMQVTDDGYGGLPSYASKAYEEHVPRLEMTVPASGISKVMGKHGTNLDNIRKISGAHIEIIEPKSSRHEHIAYISGTSEQRHSAENLIKAFIMST

SEQ ID NO: 71273 - protein, 52 aa, Zea mays
  Clone ID: UC-ZMFLMO17183D09_FLI.pep
ELSNIIHEYGRSIFLELLGRLCCDPRLTFSLTAFGHALQNCCSLRNSCILTM

SEQ ID NO: 71274 - protein, 64 aa, Zea mays
  Clone ID: UC-ZMFLB73202D01_FLI.pep
KVWLKSDATKIGWYNYFVLDFPLESNIDGWLVPGGDGIQLCYSKKVGDGGKKQSIRASITVFSC

SEQ ID NO: 71275 - protein, 295 aa, Zea mays
  Clone ID: UC-ZMFLB73144G03_FLI.pep
SSLGFLNISSSSLSTLWMSGLCSLTKAVMNCPNLTELSLDFPKQNNDSTDLAALIDSLGRTCPNLRNMHVSSIRLCNEAVFALESANLRGLCMLSLVLGSKITDAAVASIVRSYSSLELLDLSGSGITDNGLGMISKAFPDTLTRLLLALCPNITSSGVQVAAAQLPLLRLMDCGNSICANPQPEAGRSYFGDLTGGIKFCSKLPVQKKQQQQQAACQKLIIKHGALKKLSLWGCSAIDALYVNCPELVDLNLNACTNLHPERLLIQCPKLKDVHVSGCRDMLIGAVRNQVLNEF

SEQ ID NO: 71276 - protein, 293 aa, Zea mays
  Clone ID: UC-ZMFLB73152A07_FLI.pep
SPHQCNPLASFLVASKIRPPLSICTHAGRYVRTLKSRKIKLTHRSIHRVVAVVSINPSSSCSTKGRPRARLHAGPTAPPPLVITYWSWHEELVAALAAPHLRVVLPLGADAGLDGHAGGAARRAPPAPRAARRRRRPRPRQQPPPPGGWEDFVGGGGNCRRRVYSPPRQRRCWQTDGPPPCRHNQGRGEDCGGEEGGGVAAAPARPPPAAHGAHIAAGEELAGSCTRSIDRRSRSSFKSANHDARCCPVDATSVRSRQLARAGQQWRQAEQAADSCGPVPGRPVADLRLSCDL

SEQ ID NO: 71277 - protein, 142 aa, Zea mays
  Clone ID: UC-ZMFLB73242C08_FLI.pep
LVAGAWLSGDLDVAKSRSATGRSAAPLPGFMLVSVLFRFGASSSSPLRQFLLVSTSALLSCSASALLARLHFGAAELLRWRTGRDYATPRRRHAAGGCRRRHGLYWAYSLVLGRDRGCSPGSPGRRSAPGRQDAEAAARVNA

SEQ ID NO: 71278 - protein, 391 aa, Zea mays
  Clone ID: UC-ZMFLB73146B03_FLI.pep
IISIAIYIVGSGSQGKNEADGGDEPPPRHPARPRWRRRLPGGPAAVVEPSGRPREAGAAAEPGGGGGGLLGGCGGGVGVRGVPAPARVPGGPVRVRGGRVARGVPRQDDRPLRAVRAVQRREHGVPEADAGAVGARGADPLPGVADQRARGHVPPHGAGGVPRRHLRRRGRPPPQGARGGRRRRRAHLQLQPAQPHAVLHVAHRQPLRDAARRRQPQPQRNGMQRRHHRHRPRQAPATGALGHVRAGGEHGEHHSQRLHGQQPPHAGHQHALPRRRRGHPAVQPPRRPPPRQVPAHPHGAHAPRRARPELRLRHAGGGRRGVRRRLPGQGAHGGRRRGPAHQHHHAGPARPAHVRAAPLPGHRRPQPRLPRQSARLPAGLQARLRPLLHPR

SEQ ID NO: 71279 - protein, 255 aa, Zea mays
  Clone ID: UC-ZMFLB73186G06_FLI.pep
MTCNLYHGIARILTKTFTSDFPHVERYFWTMVNQPNFKKVIGEVKQAESAPPIPKKAAPSKEPKAKDVKKEAPKEAPKPKVVEAPAEEEAPKPKPKNPLDLLPPSKMVLDDWKRLYSNTKTNFREVAIKGFWDMYDPEGYSLWFCDYKYNDENTVSFVTLNKVGGFLQRMDLCRKYAFGKMLVIGSEPPFKLKGLWLFRGQDVPKFVMDEVYDMELYEWTKVDISDEAQKERVNAMIEDQEPFEGEALLDAKCFK

SEQ ID NO: 71280 - protein, 217 aa, Zea mays
  Clone ID: UC-ZMFLB73418F08_FLI.pep
WRWPCRRRWPRTAPWRRRRRRRRRRRTRCSARTSCRGACCRRGSRRSGTTPPRGRSRPGWTRPARRASRSASATTPPSPGSSAPARSPTSPASPRRTSSCGSPSTTSRSTSPPPASSTSTSASSRSTSRSPSSTRRRPARPTRSCSGWRTWARADWPWWAPRRPGDDGWRRTEEGSTAPASQDHERSFERRTGDRRPSSMHIDSVGISICFLFSASY

SEQ ID NO: 71281 - protein, 454 aa, Zea mays
  Clone ID: UC-ZMFLB73164H05_FLI.pep
SDSSGAIELPSDAEGDSQEVNSKAKVRDDHANCKLNEVHQSSESEKDKQLVPDNAATTNMSDVQRENSHVQNNQKYEIINVPSDSRPLLVFINKRSGAQSGDSLRQRLQILLNPVQVFELSKQQGPDVGLALFRKVTHFRVLVCGGDGTAGWVLDAIEKQKFETPPPVAILPAGTGNDLARVLCWGGGLGVIEKRGGLFSVLQDVEHAAVTVLDRWKITIKDNQGKLMRPPKFMNNYFGVGCDAKVALDIHNLREENPERFYSQFMNKVLYAREGAKNIMDNTFDCFPWDVKLEIDGSKIDIPQDSEGILVANIRSYMGGVDLWKNEDDVSDTYLPQSMHDKKLEVVSFTGMLHLGKLQVGLSRAKRLAQGHHIKVEVSTTMPIQVDGEPWSQEPGTIEVSHHSQAFMLKRVSEEPLGHAASVMADILENAESSGIISALQKRTLLQEIASRLL

SEQ ID NO: 71282 - protein, 259 aa, Zea mays
  Clone ID: UC-ZMFLB73397D12_FLI.pep
FPLHFDPIVSSPNTPPRTFSPSNNSPSYSEESMCGGAIIFDYIPARRRVSAADFWPDSEADAEDSDSHAPDPERVPRPRGKAKRGRKNQYRGIRQRPWGKWAAEIRDPVKGVRVWLGTYPTAEAAARAYDRAARRIRGAKAKVNFPNDASSSSVTAPTAASGVAAQAPAVFLPAPKVEARAQVSDEVKELSEELMAYENYMNFLGVPYMEGGNAAVSATTAAAAAAAVPEEAQVPAPAPAGLWSFEDYYYPPSLSLFTE

SEQ ID NO: 71283 - protein, 382 aa, Zea mays
  Clone ID: UC-ZMFLB73190B10_FLI.pep
AYMYRYFVRLNREGNAGGSHQLPHVLQERLHALSAAINALQLVDPSFAWLDSICEADDKISPSKRPRNLLMENSAFGTNSELSRLQFCVDIEILEKEYILTEAQYMLSTLKSSFDFSESQSIESLMDILINEKLYDIAFTIVLKFWKESEIKKQLDRVFSVIAQQCCSNRSDNKSSKQVPLLPSSENDAWEINNRSIAVTQQLQGSNHWETLELYLDKYKDLHPRLPVIVAETLLYTDPEIELPLWLVQMFKANKAGNKISWGMSGKEADPAALFRLYINYGRHAEATNLLVEYLESFASSRPVDVLHRKKMSAVWFPYTAVERLWCQLGEMQRAGHSVDQCDRLKKLLHGALMSHLQQVVVDSDDVLSSVGDGQGMEDQSS

SEQ ID NO: 71284 - protein, 372 aa, Zea mays
  Clone ID: UC-ZMROB73002A06_FLI.pep
VRGRMKGVSEGLIIGTTVGVVIGVLLALGTLLCLRRRRRSQTQIRSSSSRRASTVPIRTNGVNACAMLSNSTTGQESPTPRELEERGSSLWIQGPGRKSVISASGVPRYAYKELQKATSNFTTLLGQGAFGPVYKADMSSGEVLAVKVLSNNSRQGEKEFQNEVLLLGRLHHRNLVNLVGYCADKGQHMLLYAYMPNGSLASHLYGEDSAPLKWDLRVSIALDVARGLEYLHDGAVPPVVHRDIKSPNILLDQAMHARVADFGLSREEMVTRGDGAANNIRGTYGYLDPEYVSTRSFTKKSDVYSYGVLLFELIAGRNPQQGLMEYAELAAINADDGRRTGWEEIADARLGGAFDADELNDVAAVAYRCVSR

SEQ ID NO: 71285 - protein, 242 aa, Zea mays
  Clone ID: UC-ZMROB73044G05_FLI.pep
GSSARESPYLMAPKRRRADQGSSVPAPPPPLRKAKLQPVVIFAHGAGAPSSSDWMVHWKKMVQDALDAVAVVTFDYPYMSGGKRRAPPKAEKLVDHHLGIVKDAAVKYQGHPLILMGKSMGSRVSCMVASSTEVDVSAVVCLGYPLKGVNGAVRDETLLQLKVPTMFVQGSKDALCPLDKLLSTQKKMTCKNELHIIDGGDHSFKVGKKYLESKGLNQYDLEMEAVTKISQFFQDSFTESCT

SEQ ID NO: 71286 - protein, 392 aa, Zea mays
  Clone ID: UC-ZMROB73011D10_FLI.pep
SSREDLDDGRDASGVRDLVVTEPSRQEDPPPLVLLPLRPVHEAQYVEIQHIRLPARLVVVVVVCPRSEHRVYYYHLPPCFLATDRFLAALHYLDALVLIPVVQDPLEHECVSRRDVLEHVAAVEGQAGGAGGSLGDDVGEVHDGAPLDVREGGDDGGGGGAAAAADVDERLDAVEHVRAPADHGLHHEPGVGVHALVEAGPVGRVVLHARPHPLPVHRLVQRHGRRALVLHPLAHAEQQGDGVGADQVGDVGEDARGSSVLLRGAGAGGGGVDAAAAAADEQPGRRGELVRDGGRVVGLGGVVVADREDAHGCQRAHDPSEVVVVGRRDLACGEQLAQGGAPAAAVDGVGDAQVQGALERHGLDVAQGMAPQLPVGCKQLLGVVRAVLRLVP

SEQ ID NO: 71287 - protein, 135 aa, Zea mays subsp. mexicana
  Clone ID: UC-ZMROTEOSINTE042B01_FLI.pep
LISCNMSHPSGVWRFLASRDSEPQASSATSPFDRLQVQGDGSAPLSFFPTASAPNVQPPPSSGGRDRDQQNHVIRVVPRNAQTASVPKAQPQPSSGGRDQKNHVIRVVPHNAQTASESAAWIFRSIQMERNQNDS

SEQ ID NO: 71288 - protein, 201 aa, Zea mays
  Clone ID: UC-ZMFLB73131F03_FLI.pep
QGLDSEPPFVDLSVGTPQEDVNDSEEPGTTMEPEDLPETEDNASTPEKFESESDKSSAQVNSEPKLESPGDTAVPNSDLTEPRDGELNKSSPSHGKGEAKKTTTDNASNPDSVHQDQAASIPMIRESIWEGAIQLNVSSLSNVVAIFKSGEKPSLKVWRSFVEIKGRVKLSAFQEFVEQLPKSRSRAIMITELCWKEGSSE

SEQ ID NO: 71289 - protein, 63 aa, Zea mays
  Clone ID: UC-ZMFLMO17037G05_FLI.pep
VIEGWKRSGGLHVCGVIWSSSLFLLFLVNISCEVVTYVHVVGFVSDQSVKLRPGPVWQVSGSS

SEQ ID NO: 71290 - protein, 107 aa, Zea mays
  Clone ID: UC-ZMFLMO17043C11_FLI.pep
SIPEISTTNSKVQMGFKEMPGPYSMPMQPTFFNRCQPSASQLKRVVLDLMQRSAIPECIIRTHHQNVAELVQKYACLSAMLIDSVAEKAPRLIYYTYCVDNHLKQAH

SEQ ID NO: 71291 - protein, 323 aa, Zea mays
  Clone ID: UC-ZMFLMO17058B08_FLI.pep
EEVREYESDMRKLEELLSKLNPSAEEFVPQSRRRVDGGAPRLSADAPVFVSPAIDYYARHHQLPPPPLLQQQQPMHVLQFVGGVGGVGMGGGGGMDSSSDGSANGQPNRRRRNGFIQGRRRMMGARPRRADREDSVRRTVYVSDVDQHVTEQKLAEVFSTCGQVVDCRICGDPNSVLRFAFIEFADDVAAQSALALGGTVLGFYPVKVLPSKTAILPVNPKFLPHTDDEKEMVSRTVYCTNIDKKIAEDEVKQFFEGTCGEVSRLRLLGDYVHSTCIAFVEFVQADSAILALNCSGIVLGTLPVRVSPSKTPVRSRSPRVTSY

SEQ ID NO: 71292 - protein, 120 aa, Zea mays
  Clone ID: UC-ZMFLMO17059G02_FLI.pep
FLEISSLISIAPIPHQTSARTTRASISSPSTSFFHTHTDRMEFRCQDAEGDTRRDRAASDVDRRALREAQELAMSDGWSRVGLRAWRDRQRGDADHQSRPQRARHPGRGRVVHSMLEQRR

SEQ ID NO: 71293 - protein, 149 aa, Zea mays subsp. mexicana
  Clone ID: UC-ZMROTEOSINTE042B02_FLI.pep
LTCSGHIAAETANGHCLSCYMTIVFVLIMLEGAITMDVFLNSNWEEDFPADPSGKFEDFKHFVRSNFEICEWVGLSVVAAQVLSIILGMVLRTLGPDRETDYDSDDDVTVPARLPLLINQSQHGSYYAEPNTSGRSDSWKLRILDKVNN

SEQ ID NO: 71294 - protein, 223 aa, Zea mays subsp. mexicana
  Clone ID: UC-ZMROTEOSINTE042C04_FLI.pep
ATMGISRDSMHKRRATGGKQKAWRKKRKYELGRQPANTKLSSNKTVRRVRVRGGNVKWRALRLDTGNYSWGSEAVTRKTRILDVVYNASNNELVRTQTLVKSAIVQVDAAPFKQWYLTHYGVDIGRKKKTPAAKKDNAEGQEVEAAAEETKKSNHVTRKLEKRKEGRTLDPHIEEQFGSGRLLACISSRPGQCGRADGYILEGKELEFYMKKLQRKKGKSAVA

SEQ ID NO: 71295 - protein, 297 aa, Zea mays subsp. mexicana
  Clone ID: UC-ZMROTEOSINTE042F07_FLI.pep
SSSTSKQNGEGKIVAQPLGPAMQRPAPYAEQTDTTRPRDASGLPDDGGLGDHGGDHVGVHVGRRPAVLEVALAVLLRLAAHAHRRATVGDSPAEGVDVGGLVPAGEPALVALAVGRDVLLVPQLQLLDGRLDHLVPALLPHGLGAVVGVGARAVPVARDRLRVERHHHAGDLGDPLKNVASNPHLIARRDADGRSDLELPLPRHDLPVDATDVDACVQAGLVVGVDYVTPERFLRADSTVVRTLRAREAANRPPEGPVGVLLKEGVLLLDTIPGLLGSDLRAAEDLGGAVPLVGGNW

SEQ ID NO: 71296 - protein, 114 aa, Zea mays subsp. mexicana
  Clone ID: UC-ZMROTEOSINTE046H09_FLI.pep
IATVTDSTTTSSQFKPITRADKLNQHACVQMCTYLGAGGFSASAAGASAGLLAFSAAGSGLAAAASSMPAVGSFSLRSMVSFLAAAAPPPGRPSRSSVPTSTSAPAIGSSAGAS

SEQ ID NO: 71297 - protein, 147 aa, Zea mays subsp. mexicana
  Clone ID: UC-ZMROTEOSINTE053F02_FLI.pep
ALSPCGLDDILCGKTHKWVSNGTELCRLAGFSVQISETSSGGVGDTFCYGGKASLDSISDSWTSSKDRPTLSGVASWDVQDFQRWAREMPIGERVSWAIGGMVLTAGLIFISKRKSYSHRQKQAAIARNMRLRRLDSRANPQQTKRS

SEQ ID NO: 71298 - protein, 304 aa, Zea mays subsp. mexicana
  Clone ID: UC-ZMROTEOSINTE060B05_FLI.pep
QMSSVQVLLNSKDLLDTEPEGIRELISSCKVGNATKSKLRKVAEWIIHTKCALGESHHQMQVVSKNWKLAKENESAHFLSISELISQRKLCNINIFACIGKMVLVSSPTSPLKVNLSDLSVIDRRSFKEHSDIVRDLVTAGCKLCGLPLYHKNLHGENTSALDCPNNPKYLHVPGQIYKPFLIYIYDQSGQVPLLVRNRAAETLFANITADDVSECHNSHMLSETYESCNLSTPGTVDGCGNEEIAKRRKTERKPNFYLIWLTLVKCLLSQGSNSPFCFQISVNPEKNVEDGRFELVCLTMPIP

SEQ ID NO: 71299 - protein, 188 aa, Zea mays subsp. mexicana
  Clone ID: UC-ZMROTEOSINTE062C03_FLI.pep
WVRHLENGIKQSIEGATMYDYVVTADDVGTLLAVDCTPMDDNGRQGDLVTEFANNGNKITCDPEMQSHIDACISKGRAEFEVFVLAYSPEEWELATLVLTRPNYQIKFKQTGNVVIDEKYSQSLQTKIPNGRTTQFVLITAGTTLPFNTQGISEPNNEDYDVRLRDLIVLVMRTFQKKALDAKRKGKA

SEQ ID NO: 71300 - protein, 149 aa, Zea mays subsp. mexicana
  Clone ID: UC-ZMROTEOSINTE066F06_FLI.pep
NSAGSQFNFLNARHAITKYRSLPHHIHIAHPLLCTDHVSWPAGAGWCPASEIRTRASKAPRTRRGRTISDAGISLPPHATVSAWGSSDDTGSGSTCPAPAPARGAPTGGRPPPSLRASRRSSTSNAASRGPRTARRGGRRTARRGRGLG

SEQ ID NO: 71301 - protein, 350 aa, Zea mays subsp. mexicana
  Clone ID: UC-ZMROTEOSINTE066F10_FLI.pep
NETRTRSLPPPKPMHQLQLRMVTPSESSEVFSSETKDSGVKRKAHAISATTESTKIQNAARDWSCALCQVSATSESGLNQHLQGKKHKAKLVQCGAIKVMDTNKSGLQVTTGNNNGAGPSDAPKKIHILVDGEMHQVVQKSNRVWCERCRVSCTNAGAMADHLRGKKHSLLNKVWASIKAVRRNNGVKEDSATATCEREVNESGPTGIPEDEERKEEGDAYMASEFSGDGSSEIPMETKETTDMAEEADADSHSVTHVGINKEDTDTASKATGNYPAGTKQEGTGVVMDVNKNSPPKVHQKSRKAFPLKVHQESRKRRQNKKFLSKVHQKANENLLPQCASESKTKGFGK

SEQ ID NO: 71302 - protein, 51 aa, Glycine max
  Clone ID: 700834730_FLI.pep
AARRYGLFSYNTFIISLQSFIYESQLCIIYLVRVLAFLNIFVIEINGKGNL

SEQ ID NO: 71303 - protein, 346 aa, Zea mays subsp. mexicana
  Clone ID: UC-ZMROTEOSINTE069F08_FLI.pep
MNTPQPSKIEDPQGNNQAHTLSHLSNMMQANPLSTSSLLASNQNHPSLHGIEFDLPYLEAKYNAGSTTNPRPAISMQEALKAGVFSNARSTQSLPSTSIPTGHPLPQQLAHHPYSQPTLAPITHFPNIVGYPPYLPQNYAAYLSSGTFQQAYPSNGAFHQSAATLLGSGMKYSAPEYKNNLSATGLQQQHQPQPQPPSSVISGYGGFGSSSNIQGNFTLNQSTGTGSTLVFDDALGRQYKDTSQHIALQQPDNSGMWLHGSGSRAATLPPNHFYGYQGQSQLGGFGQAQQQQPSQFGGHGYPTFYQSQGGLTQEHHPQNLAEGSLNGFQVAPSQPSHPSWQHQHTY

SEQ ID NO: 71304 - protein, 322 aa, Zea mays subsp. mexicana
  Clone ID: UC-ZMROTEOSINTE070G05_FLI.pep
PPSASQSQRRYSLTGSASDGRYPAASLGSNSVPSAIRRSRLPVSRSSPPDVSPSVTKTYSPSSIRNKKLSPPSYRKARQANNCNYKVEIAVAPDATPIKVVTEEKLLEGGNVRGRLEARRALFQGSQDRSAKLAGHKAGSRVVPYEGGGNLEEISEVEGRSERYAVQKDESLSEIRTQLLQIENQQSSLLDLLQKFMGKSENGMHSLETRVHGLEMALDEISRDLAFSSGRMSSREPDAKTCCIPSPKFWRRHNGGRSSSRFSVSDAANSSDGSRTSYKWERQRFGLQGGFVTNPLAEPNISSAGKTMVTHEGRKKDVTLQK

SEQ ID NO: 71305 - protein, 440 aa, Zea mays subsp. mexicana
  Clone ID: UC-ZMROTEOSINTE073G11_FLI.pep
SFAAVLAQVVNTKNRSGERLQPALLSKICTSAVKESLRNIYGNKLDSFMRNFEKSFSSTLTTLHLVNEMPVYGQGPVPQCSSKHEDSEASSKLSTGGTQNLTREIKQERLNSVESQLVLYAGGYQQMTRRAHSLSSPEADQRILNAFERSLKEQTRSNELKEFEISLSMRKLKLKQSQLELNSYSHMLDKIKLSLGFQKASFQVEKFKTQMQDTRHAQIMRTLIDFLVSAVIIMSVCFGYGTYTYSYQRITDITAACSATSKGSKSWWMPNSVSNFNTGLLFIRCHVIAATRMFFGIVMILAVVWLAFQRSAVSVSSMPVTFNIILLGVICGYAGRFCTNTLGGDGNMWLICWEVLCSVHLIGNCYPSVLYRVLHGPISVSHSKESVWFPYWIRRWMFYAVLGFFIPALNGLLPFASLSDWNNHFTKELKSIFIDERIEA

SEQ ID NO: 71306 - protein, 301 aa, Zea mays subsp. mexicana
  Clone ID: UC-ZMROTEOSINTE077D06_FLI.pep
RWDKIFYTGNGTVGRIVMAAAAKHLTPVALELGGKSPVIVDSNVDLHVAAKRIVVGKWGCNNGQACIAPDYIITTKSFAPELVASFKRVLERFYGEDPLQSADLSRIVNSKQFKRLTNLIEEKRVADKIVYGGKADEKQLKISPTLLLDVPEDSEIMTGEIFGPLLPIVTVEKIEESFDLINAKPKPLAAYLFTKNRKLQEEFVASVPAGGMLVNDTALHLTNPYMPFGGVGDSGMGCYHGKFGFDCFSHKKGVLIRGFGGEANARYPPYTTEKQKILRGLINGSFIALILALLGFPREKR

SEQ ID NO: 71307 - protein, 157 aa, Zea mays subsp. mexicana
  Clone ID: UC-ZMROTEOSINTE077G12_FLI.pep
TLSTSTGLNRSPDNPHSGGTAIQSTQFYWDTANPSSCSSRGSSGSNGLGFELQSTSSLLESSVFPWTELTPDKNSQVHLGEELKWPDLLHGTFTDTPATMQNLSQSLYEDVIKAESQFNIEGLCAAWSQNLQPQQHLQVSDLYDKDLQRMSLSFENI

SEQ ID NO: 71308 - protein, 151 aa, Zea mays subsp. mexicana
  Clone ID: UC-ZMROTEOSINTE080G10_FLI.pep
PTTQSRSHGGGAGADGQIPFTSHPFLTRSEGGGGGAEVGDLEQAGGGGDEDVRPVAGLLPPGVEAQLALPHGFRHHRIHHHEDDGKLHRGGPQELQVRPGTQEEALTNQVKELSETHVWPASSVMLLNEKFRPLFLVSLIEMLALYVPFVM

SEQ ID NO: 71309 - protein, 115 aa, Zea mays subsp. mexicana
  Clone ID: UC-ZMROTEOSINTE082D03_FLI.pep
KYIRCSNCAKCCPKDKAIKRFQVRNIVEQAAIRDVQEACVYDGYVLPKLYAKVHHCVSCAIHAHIVRVRSREKRRDRKPPERFRRREDRPAGGQGGPRPGPGAAAPAPAPVAARP

SEQ ID NO: 71310 - protein, 191 aa, Zea mays subsp. mexicana
  Clone ID: UC-ZMROTEOSINTE104B11_FLI.pep
VDEDHTVNPKSESAKLRYNAEKGWLNLIDDPKLSAFVFRLGGIYGPGRSALDTLAKSKSLSRKQKLRESKQYTARIHVADIYQAVLASMSIRCARKIFNVVDDDPAPRAEVFAFATSLIQRRYPDMITETIDAKPAGLDYQEMIVPAEKRVSNARMKQELGVNLLHPTYRSGLQSILDAWQIQPPLPNTSQ

SEQ ID NO: 71311 - protein, 357 aa, Zea mays subsp. mexicana
  Clone ID: UC-ZMROTEOSINTE083H03_FLI.pep
ISSLGTFTVLSYNILADAYATTDAYSYCPTWALTWNYRRQNLLREIIGYHADIICLQEVQVNHFEDFFSPELDKHGYQALYKKRTTEVYSGNPMAIDGCATFFRRDKFSHVKKYEVEFNKAAQSLTDAIIPAAQKRVALSRLIKDNIALIAVLEAKFGNHGAENPGKRQLLCVANTHINVHQDLKDVKLWEVHTLLKGLEKIAVSADIPMLVCGDFNSTPGSSPHALLAMGKVDQHHPDLAIDPLGILRPPSKLNHQLPLVSAYSAFARMVGVGYDLEHQRRTDPATNEPLFTNCTRDFTGTIDYIFYTADSLTVDSLLELLDEESLRKDTALPSPEWSSDHIALLAEFRCKPRIRR

SEQ ID NO: 71312 - protein, 367 aa, Zea mays
  Clone ID: UC-ZMFLMO17286G03_FLI.pep
STAVARPPPNLLPSCLVLCFFGFQERRPLLLEKQTIGTPSCVFQIRLMAMEGPVLCRPAMQAKSPAAALVNNSLTRFGQLGTISKYRNVSRFISPISQPSTKNIGPCCSFSSSSDGNGYMAGNFSDSDEDYVNSTVLEAVEVRSGSEGYVIKMRDGKNLRCVHNNSQGRNIPESAPQPAIVLRIEDGSETLLPIIVLEMPSVLLMAAIRNVHIARPTIYQVVKEMIDKMGYEVKLVRVNKRIQEAYCAELCLTKIDDSTDSITFDLRPSDAINIAVRCKVPVQVHRSLAYSDGIRPVEPARMAVAAGLSDGLLFTELDRPDGQASVEAQEFGLVKNMLIAAVEERYKDAASWKDKLMRLRSKRKNWA

SEQ ID NO: 71313 - protein, 46 aa, Zea mays
  Clone ID: UC-ZMFLMO17279G05_FLI.pep
FVCLFVISICMQPALIHLVGRGFALGPDTSEDQHVFVVVQCPTRAM

SEQ ID NO: 71314 - protein, 491 aa, Zea mays
  Clone ID: UC-ZMFLMO17202D03_FLI.pep
EEEARLAEIAREEALARARARGGAPPELLDVLWEARRSSVRLRALQQRKEAAHVLELERRFRLFDDLIQRASRLLSPGGGAGARIGTGGAAVDHDEVVEVEATRDTELDAAPAEIGRGSKGGLGLEPKSVSSLRRAASAGTDTEKLGLIQVASLIESSAKKGTTELNLRGKLVDQVEWLPVSLGKLQDVTELDLSENRIMALPSTIGSLRYLTKLDLHSNQLINLPDTFGELSSLIDLDLRANQLKSLPTSFGNLTSLANLDLSSNLLKVLPDCLGKLKNLRRLIAETNELEELPYTIGSCTSLVELRLDFNQLKALPEAIGKLENLEILTLHYNRIKGLPTTIGHLTRLRELDVSFNEVETIPENICFAASLVKLNVSRNFADLRALPKSIGELEMLEELDISSNQIRVLPDSFGHLSKLRVFHADETPLEVPPKEVVKLGAQELVNYMKNMVAAREVSQNQTDKRSFWTWLRSLFGCYKKNQGLGPVPA

SEQ ID NO: 71315 - protein, 198 aa, Zea mays
  Clone ID: UC-ZMFLB73153A09_FLI.pep
LNATSDIEACKIIGMDCEWRPNFEKNTKSSKVSIIQIASDKIAFIFDLIKLYEDDPKALDSCLRRVMCSSKILKLGYDIQCDLHQLTRSYGELECFQSYEMVLDMQKLFKGVTGGLSGLSKEILGAGLNKTRRNSNWEQRPLTQNQKEYAALDAVVLVHIFHEHMRRQAQFGVSEGSRVEWRSHVVSRVSCTRTPLRF

SEQ ID NO: 71316 - protein, 166 aa, Zea mays; identical to SEQ ID NO: 69761
  Clone ID: UC-ZMFLMO17213F01_FLI.pep

SEQ ID NO: 71317 - protein, 93 aa, Zea mays
  Clone ID: UC-ZMFLMO17217F10_FLI.pep
SMINYSQAHKYPEQTTVISLIQSISSQLYRWRKRKAISWRLLSILGASQSSIGRNKASAACKQDGMDLINGAETIPFSFQAIRLVIARPRFMR

SEQ ID NO: 71318 - protein, 218 aa, Zea mays
  Clone ID: UC-ZMFLMO17243A06_FLI.pep
VPTFYHAIPISQSSPLPGRDPAEQSRAGSVGAAWGTARRRRRRRCCSSTRAGGWSGSTGQPAPPRSCAPTQATTSRSSRSASPRSGRTPPAASGAPCASRASSCSSPRRRCSSATSTASSPPRRWRGRCGRGRRRSRGKRSSCLSRGRVSRGARPRGRTTTTRQPWTPALISWRVRTTAAGAPVQGNGSGGRRCRASKRPRPDVSSVHSYHATVGVGP

SEQ ID NO: 71319 - protein, 104 aa, Zea mays
  Clone ID: UC-ZMROB73028H03_FLI.pep
KITLFAAFCELIARSSDYRNPQLCTKKKNIALETYRASQWNVKLFLVSFIARVPHVAKQQGSAHFVTIKPDLWAKFLLGIVKKLVITGLASWLAESFVLLLLLV

SEQ ID NO: 71320 - protein, 206 aa, Zea mays
  Clone ID: UC-ZMROB73017D08_FLI.pep
LPLCPTPFLHFPLLTSGSTMENVAANPSAAAAAAGNGVQASGAGGERPEDASKQNLAQVTSSIQKTLGLLHQLNLTVSSFNSASQLPLLQRLNALVAELDTMQKLAEGCNIQVPMEVVNLIDDGKNPDEFTRDVLNSCIAKNQITKGKTDAFKSLRKHLLEELEQAFPEDVEAYREIRATSAAEAKRLAQSHGNLLNGDVKVKAEH

SEQ ID NO: 71321 - protein, 232 aa, Zea mays
  Clone ID: UC-ZMROMO17010B09_FLI.pep
EELVTSGYDNKVFRIPLNGNQCGDAESVDIGGQPNALNLAIQKPEFALITTDSGIVLLHNSKVISTTKVNYAITSSSVSPDGTEAVVGAQDGKLRIYSISGDTLTEEALLEKHWGAITSIHYSPDVSMFASADTNREAVVWDRASREVKLKNMLYHTARINSLAWSPDSRLVATGSLDTCAIVYEIDKPVASRVTIKGAHLGGVHGLTFLDNDILVTAGEDACIRVWKVVQQ

SEQ ID NO: 71322 - protein, 138 aa, Zea mays
  Clone ID: UC-ZMROMO17011B06_FLI.pep
RKREAAQGNNYEKFAEVAVTQTGSLDETEKKSCDNVTRFADCKSGSGDEEYKEQDHILVDAHRQSSDHGDKFEAGYAAEVDAEGKQEADDYDQREGESDDYETFEGHDYKSEDENVYQDDEDFDDNDDFARKVGVLLP

SEQ ID NO: 71323 - protein, 220 aa, Zea mays
  Clone ID: UC-ZMROMO17045E02_FLI.pep
AAQLRYMMSHYFGTPPSKEVIQDLYYALRTKGGLTPKEEETLLACNLLPGVYFIVGSVLGTFAMLLGSHKGLKLLGRPPNSPLRSLTVYGYGFIVGKACANETWHQLPELLLDREEGRMKTELAKMWRLRHTYVDSTFVERTKEVEASNSDDVARSISRETITNTTPFGEMMEDSLACILGSPGCNMESNNPPEKTANVLTRSDLRARRRGRRHHRHADD

SEQ ID NO: 71324 - protein, 144 aa, Zea mays
  Clone ID: UC-ZMROMO17068H08_FLI.pep
GQAEDRNTEIQLFIHMIESTCARCIYMIEHMHVSKYSSSESLESLGWNSLTSVSLLPCLSFHCTRRLDPLRPFRAMPPGGCRGSSALRSPAAASSLEPMPPEDAGRETAAGEEGDGFLPLPLHDEVLRMRRSIAGWHQLPVAQA

SEQ ID NO: 71325 - protein, 62 aa, Zea mays
  Clone ID: UC-ZMROMO17080B04_FLI.pep
AHKECRCLVCKGREPGRDLKWLFYYPYIDMLCMVQNIHWYGGGLAMRGFLSRPVCTPWRRSA

SEQ ID NO: 71326 - protein, 284 aa, Zea mays subsp. mexicana
  Clone ID: UC-ZMROTEOSINTE080H11_FLI.pep
RPPAPTDYHASVSRPFAPTHTGVCVRGFASLTYNASSMIGHNLEGPLPVHIVKVLDLVVHMNHARPMSTAAASKVPVGARKVGLKVAMMSPGFVYEPYSPRERIPFWKRWFTLSGWRRTKEDIILEMKNAYAVSRLRKKTGYTKNQFYDQALKIYKEVNTLMAHGDTSSLRKILTERMHSTIKNELKRRQSMWNSVHWELVEPAVSIRTLRARMIGLDKNDLDKAFIQLTLEFVTKQKFEAYNSKGAVVSGDKSKEVLVKDIWVFERSLFHPGAYWRVCGRITL

SEQ ID NO: 71327 - protein, 274 aa, Zea mays subsp. mexicana
  Clone ID: UC-ZMROTEOSINTE115E10_FLI.pep
SMDPKVGVALTLSLVGGLSTSLGALLAILNHAPNNRTLGILQGFATGLMLSMSFFDLAYDAVNAIGFLRGNLWFFAGALLFSTIADVFPEPDCSAADENGKQQGGKELMMRHRRRVIFSVIVTAIVAGVSLQNFPVGTAAFLGTTKGFRVGLNLALAIALHYIPEGISVALPAYFATSSKWQAFKLATLSGFAEPLGVIIVAYLFPSNLNPEILEGLLGLVGGVMAFLTLYEMLPLAFEYAGRKDAVKAVFVGMAFMSMSLYFLDASLPKEMSA

SEQ ID NO: 71328 - protein, 328 aa, Zea mays subsp. mexicana
  Clone ID: UC-ZMROTEOSINTE115F01_FLI.pep
RGAALLLVAVFAVVAVAKGRADTPPAETNSDSSTAQPGLGKLEQHEQANPNKEHATHQEGGVSNDIGDNNKKDNSTEVTNIRRDDSIQQPKHKDSIMTKSSQPLDFLEDSLIKECDPSHRCIIENKKFIACLKVSGEDSLALSLLMDNRGINPLDVSIMAPDYVTLAEDSIHVEANGHNETQVRVSVNDDANSTTIVIKVAEKSCNISIHSAITRETAGSGRVIRMPLTPTYTLLPVFLLLVAVAVCIVVRRWRNQDGDPAYQKLDMSDLPVSVGGKKEHDDRSDKWDDNWGDDWDDEEAPVTPSKPLPNPSSKGLAPRRSAKDGWKD

SEQ ID NO: 71329 - protein, 93 aa, Zea mays subsp. mexicana
  Clone ID: UC-ZMROTEOSINTE082B10_FLI.pep
ALISLKKNYCATLFHKMILRTALVAQFNIRVSHFLISHMHSATNDFFMALHSILEHRNKATVGIGSGSGGNKRYCISVCSFMFTQQMCLKEGG

SEQ ID NO: 71330 - protein, 327 aa, Zea mays subsp. mexicana
  Clone ID: UC-ZMROTEOSINTE083B12_FLI.pep
EPQQASLRFAPLCGSLRRAAMAFSPPLIDWEAESYPAYPDFAAIPLFVVFFLVVRFFLDRFVFEWLARKLIFKEEDEKKLGPTTYAGKRKIRKFKESAWKCMYFLSGELLALSVTYNEPWFTTTRNFWVGPGDQIWPDQKIKLKLKTVYMYVAGFYTYSIFALLFWEIRRSDFGISMTHHVATVCLIALSYIFRFARVGSVVLAIHDATDVFLELGKISKYSGHELFADVSFLVFVSSWVLLRLIYYPFWILWSTSYEVVLTLDKEKHKVDGPIYYYVFNSLLFSLLVLHIYWWVLMYRMLVKQIQSRGHVGDDIRSDSEGEEEHED

SEQ ID NO: 71331 - protein, 192 aa, Zea mays subsp. mexicana
  Clone ID: UC-ZMROTEOSINTE095F07_FLI.pep
SEVVVAHRSWLRQRRHYLSLRRDYLWLWLRWKLARQHRGWQLWLWEGLRWNGELGLGEGLRWHRELRLWEGLWWNGELRLGEGLRWHGELGLCEGLRWHGELRLEEGLRWHRQLRLWEGLRWHWQLGIGQGLRRDRELGLGEGLGWHRHVVGLRQGLRWDGKWLRWDGERLRWHRQLWLGQRLRRDGKWLRW

SEQ ID NO: 71332 - protein, 243 aa, Zea mays subsp. mexicana
  Clone ID: UC-ZMROTEOSINTE101H11_FLI.pep
LQRNPYLYSGTKFRYGGNALHYKDDSDHDLEYCVSLHLGLTDYRTFVGTNLNPLWEFFLVPSEDDSVHCQHLSDALGNGAIVETSDKKIIVLQRSYNVADFPGYYVFPGGHSEPQEIGIMGHQTDEEDFASLNERVSQEMFEGVIREVVEETGVPASSLTDPVFIGVSRREVNARPTAFFFTKCNIDSSGVSELYSRAQDGYESTKLYTVSVEELQGMRQRMPGCHNGGIALYELMRNAAKKK

SEQ ID NO: 71333 - protein, 229 aa, Zea mays subsp. mexicana
  Clone ID: UC-ZMROTEOSINTE102B06_FLI.pep
HEQEKLCGLPDIGGHVMKIPLVAFQVLLCMRLEGTPPSARYIPIFALFSPLFILQGAGVLFSLARLVEKVVLLLRNGPVSPNYLTASSKVRDCFAFLHHGSRLLGWWSIDEGSKEEQARLFYTESTGYNTFCGYPPEVVRKMPKKDLAEEVWRLQAALGEQSEITKCTKQEYERLQNEKVLCRICYEGEICMVLLPCRHRTLCKSCAEKCKKCPICRVPIEERMPVYDV

SEQ ID NO: 71334 - protein, 346 aa, Zea mays
  Clone ID: UC-ZMFLMO17212B02_FLI.pep
NPTGHSTDQAAAAAAALPCSQLCWPLAFATLLYPPNRPTQSKPPPISSVSLESHRALTAMDGSSKRIGGGGDDMPSPDHDQNASPNVPPSAAGDGGASATAAAAPAAGRRPFTSLSQEEADLALARVLQEQERAYMMLTGGEYAISDAESYDYDEEDGDGSDYEEEGEALDEDEQVGDAEAEGAEGDLDLDPSQYEDDGEGDVSDRLMALVGIGDWRAMEQDDAGDEEDDEDAEVHTQGAWEDVDPDEYSYEELIALGEVVGTESKGLAADTIASLPWVTYQAQDKQDGNMEQCVICRVEFDEGESLVALPCKHPYHSECINQWLQLNKVCPMCSAEVPTSVNKQA

SEQ ID NO: 71335 - protein, 417 aa, Zea mays
  Clone ID: UC-ZMFLMO17195B04_FLI.pep
QFSIPLPPTHARPQGPGPRPTGRRRRQYGMASPELPGAKRNNVLVPPSPLLRLNDDLLADIFLRLPTLADVGRAATTCASFRRVVADSTFLRRLRSVHPAPLLGLLLFSSVHPAEPPHPSAPYARALQRAADLSFSFVPCAGRWIPIDARDGRVLLESETMGGDFAVCDPVSRRYLFLPRIPGHPATQRCRRLEPFLVPASNEEPETSLRVVCVAERKPGQLVAFVFSSDTGRWGSLTVDVRVPPSCKFSWSSYGFGSCYWKVTGSNKLLGLDTRSMVFSSFDIPSGYGQQDSVIVEAAEGRFRMFTLHNSMISAASYLVHAVQVIREEGNNLWQVKRRVRLPSQYIFSFADATDKHLLLRGIPWNLHLEPSTPGADIGYFSVEFESMQVEKICGIRNLLYAKLYTGFPPSLSLPSI

SEQ ID NO: 71336 - protein, 542 aa, Zea mays
  Clone ID: UC-ZMFLMO17199H06_FLI.pep
VQSNELLSLALGFSVFSLLSRAAWLSKDVVWLSADSQFGEYAAVSAWLNQYHNPVFLSHSVVSHTKMYGANNIYDGNSEKTEATAFKRAGTMAAALIFKVGETRRYSDRDSVTIYAEASNGQMPNLDLLNVVHYLAVHRQGFRVNIAAFSSLLSSAWLRVIAEILHTIGSVLRKINPDWKLDIAVPDYVEGTANLANSMYNQALGVPTGSHGAFRDYQVDAVSLEFSPTFHVKNENAKSLFLLKGGRLIEGVARSVNNLLEKFHQSFFLYFLTGPSKFISVGVYMIPFALLLAPLPIVAAALADGSRSMEKTADKLIGDGKTDGIADISQNKGGSWKWLRAAKVLLVVQLWAVLVSLLPYYITQIPDATPTQSTLIWVVLSIVVLISLSVLFGSPYSTGVEWKLLKATMITSISIGLGLMSIINFATAQLGALIVIPMCLFSRPLKASGMNFLPRAVLLASNVAFAVLGFPPVALLIMKGVSKGSRSWTIDVGDFWVWMEFLWERSSATYLYLFLVHLPCWLLCVLVFLHPCHQSEYKLKQE

SEQ ID NO: 71337 - protein, 151 aa, Zea mays
  Clone ID: UC-ZMFLMO17297C04_FLI.pep
RISLFHMPISRTRWPPAAGAPSPPQQAAQGTVSAVAPKRRPVVGSRSRPAKEAEATARLPSADYYSELKTLEHVEKTKKYQGKLAAQLKAKYFSNKTFEKGYVFEEIVIGSKTIRLSRWPFTRLFADPAKFCQEKSSTVKDMSPSLTGEAM

SEQ ID NO: 71338 - protein, 140 aa, Zea mays
  Clone ID: 700421740_FLI.pep
TPSIRVQLFVACPLKRHANSYGIVVCPNLIILFEHSLSEIRHILTRFLDILTEIFDRGMYAGPVGWFGGAECEFAVGIRSALLGKGHSTLVYAGAGIVEGTNPSFEWDELDLKASQFAKLLRYQERPIRYQEAENLGTVI

SEQ ID NO: 71339 - protein, 134 aa, Zea mays
  Clone ID: 700425071_FLI.pep
PVPNSMASTAAAAASEPMGATGTRAWRRASGLASWMSESQAAQSTAASALHVTAAGASSQTSHIHTRSWPRRACAGRASHVVQRKDPPTHVRQCTAAGAPSQLPHRRPPTPQYLCSSIERGHQAAGVRARLLLA

SEQ ID NO: 71340 - protein, 194 aa, Zea mays
  Clone ID: 700425210_FLI.pep
PRRGGKLNTYYGASIRPILARSVRTWVARLVAARSAWHHEDINLHTDLVSKNCVGVAAVDLGGARGAVLLLVAIVNIGAAERGHGGLCCSGRCLRDGGACRPQGPRMRARGAGDGGAEDGGRSGGAEDGGGVRTGRGSTARLAGGGGEGRGRRRGSRGAGMGRSRISRGGGARCRCFGSAAISGGIRASAEGRS

SEQ ID NO: 71341 - protein, 62 aa, Zea mays
  Clone ID: 700451801_FLI.pep
CTWKIGAHAAHIKSSPLILDLTFLVVWYILLKAPSNVVVCSGGSLEGVICKLNDQLKTLDLK

SEQ ID NO: 71342 - protein, 136 aa, Zea mays
  Clone ID: 700453717_FLI.pep
RRAARRGHQHPVQRRPEGPQEPLRQAQAGARRRETVVVRARARAPGQLRGLQVQEHQRRPHQPRQRRDRHHRVVHQVPQQAVPRLRHARDPHRRASSGGFVGLGDPTRGPGCNFRLFRGGRREDWQRDGWMDGQTD

SEQ ID NO: 71343 - protein, 431 aa, Glycine max
  Clone ID: 700557833_FLI.pep
GDYYLDELVDRSLVQVASRRSDGGVKTCRIHDLLRDLCISESKSCKFLEVCTEVNIDTLSLSNPRRLSLQCKARPNICTKKFNQSYTRSLFFFSEIMHTRGIPKSIKNARVLYSKSKGAMNYSLHSTFKTMIHLRYLRIDTGVSHIPASIGNLRNLETLDVRYKETVSSEIWKLKQLRHLYLRGGAKLPEVARERKVNLQTLWLRAFDRQMVSMMNKDMYVNDIFPRLRKLVLHYPFHRPSHEQLPTVRLPSLHHLCNLHSLKIIDFLELPPDKNAFPSHLTKITWKQIHVGSDFSLMSTLGWLTNLQILKMGRQCSDVLFDLNVGAGEFPQLQVFQMRGMKLRSWRLDKSAMPHLQHLLIEGCEYLNDLPEEVWSLTTLRKVHVLWPSERLANRLQNVKLKNGCKLIISNAPPNGQSDQNALTHSVSVDA

SEQ ID NO: 71344 - protein, 79 aa, Glycine max
  Clone ID: 700562937_FLI.pep
WPSSHGRGFPSEAWSSQEQLSSFYSFISYHIIIMNILIVTGMWMNLLSVKRCFILKIMERKVKLAAGKANLNLLFKLIQ

SEQ ID NO: 71345 - protein, 146 aa, Glycine max
  Clone ID: 700563759_FLI.pep
ENQKRLKRRQRNLVSGLQKAGISTLKTNNAGLFCWVDMRHLLHSNTFEAEMDLWKKILYEVRLNISPGSSCHCTEPGWFRMCFANMSEDTLNIAMKRLKTFVEAESNDNGCDKKRVQSSGNSSRRKSLSNWVFRLSSRDHREQEER

SEQ ID NO: 71346 - protein, 128 aa, Glycine max
  Clone ID: 700563760_FLI.pep
LMQKLRLVLVDHALQNGDKEVNSSTSIFQKIGAFEEELNALLPKEVESSRIEVENGNPAIPNRIKECRSYPLYKFVRENLGTTLLTGEKVKSPGEEFDKVFTALCEGKLIDPLLDCLKEWKGAPLPIC

SEQ ID NO: 71347 - protein, 141 aa, Glycine max
  Clone ID: 700563687_FLI.pep
LIIFIIIIVRCSFSVDGTPIREFKNLESIGVPFPKRQPMRIYSSLWNADDWATRGGRIKTDWSKAPFTASYRNFNANACVWNRGKSTCKSNSPSSNAWLSQELDSTAQQRLSWVQKNYMIYNYCSDKNRFAQGLPLECTHS

SEQ ID NO: 71348 - protein, 114 aa, Glycine max
  Clone ID: 700565171_FLI.pep
ELYYWTLKFDAFIALYDFRVCLVPVFHQRSNHAADEKRNCMPRRNHKIACIIANILGRSEVQQNARVNGLRLSQGHPIARCVWLQDSEHQQDPYYHKDSTLELSSSLQAPSVQV

SEQ ID NO: 71349 - protein, 380 aa, Glycine max
  Clone ID: 700565502_FLI.pep
LSLRLHAKHSNNNNNSNSTEGVNSNGVSSTSFTRRSWTLLPSSSFKFRPLPSSPPRAAENAVPESAAAPVENPLFKTLELGALFGLWYLFNIYFNIYNKQVLKAFHYPVTVTVVQFAVGTVLVAFMWGLNLYKRPKLSGAMLGAILPLAAVHTLGNLFTNMSLGKVAVSFTHTIKAMEPFFSVILSAMFLGEFPTPWVVGSLVPIVGGVALASVTEASFNWAGFWSAMASNVTNQSRNVLSKKAMVKKEDSMDNITLFSIITVMSFFLLAPVAIFMEGVKFTPAYLQSAGVNVRQLYIRSLLAALCFHAYQQVSYMILQRVSPVTHSVGNCVKRVVVIVSSVIFFQTPVSPVNAFGTAIALAGVFLYSRVKRIKAKPKTA

SEQ ID NO: 71350 - protein, 86 aa, Glycine max
  Clone ID: 700565822_FLI.pep
TIGLCSRTWVPIRRRPGLTSMGLAPQPSPYSLHVRARNTPCSNQYKSQTIPCSMYLLILLSTCLSFGFGNSIMAEWLLVDAAWFLS

SEQ ID NO: 71351 - protein, 84 aa, Zea mays
  Clone ID: 700581250_FLI.pep
GTLRECQKVLASHGASKVSAYVTHAVFPKQSYENFMASNSAGPGDQLAYFWITDSCPHTIKAIGQRPPFEVLSLAGSIADALQI

SEQ ID NO: 71352 - protein, 88 aa, Glycine max
  Clone ID: 700605139_FLI.pep
KLTITKDEWKKDQTQQQLSVPDVLHIYKALSFIFCKLTITSTGLSLVFVCLLFCLCDKLVRFYDNAFVHHYKVLPLKTLCMAVVSLFA

SEQ ID NO: 71353 - protein, 101 aa, Glycine max
  Clone ID: 700735473_FLI.pep
GISISKKLLDQTSDDFHKVLHTAIRCINDHKKYYEKVLRNAVKKFGTDEDGLSRVIVTRAEKDLKDIKELYYKRNSVHLEDEVSKETSGDYKKFLLTLLGK

SEQ ID NO: 71354 - protein, 167 aa, Glycine max
  Clone ID: 700737894_FLI.pep
EEEEETNYFRVSLGLDFNARFASDDDRSGHVEEQAMLDDAFQSGNFSACGQCIPNWSLEVQIHDVIGIIGDVGFPTLLQSQFCFHTFFLEKLLKPIQIVLPAELDHLHRHGQPASAEAVHELGVVDDHDELVGGGLDHLLAEEGAAAAFDEVEVGVDLVGAVDGEIE

SEQ ID NO: 71355 - protein, 111 aa, Glycine max
  Clone ID: 700738341_FLI.pep
KIYSVYYSSLRKLLGEGLGSCSLEELQQIEQQLERSVSNVRARKNQVYKEQIDQLKEKERALYAENARLCEQYGIQPQPATKDPKEIQPYAESSPSSEVETELFIGLPRSI

SEQ ID NO: 71356 - protein, 240 aa, Glycine max
  Clone ID: 700903985_FLI.pep
HIAGYVQLSGNQMSGEIPSEIGNMVNFSMLHFGDNKFTGKFPPEMVGLPLVVLNMTRNNFSGELPSDIGNMKCLQDLDLSCNNFSGAFPVTLARLDELSMFNISYNPLISGAVPPAGHLLTFDKDSYLGDPLLNLFFNITDDRNRTLPKVLKNPTKWSLVLALALAIMVFGLLFLVICFLVKSPKVEPGYLMKNNTKKQAHDSGSTGSSAGYSDTVKIFHLNKTVFTHADILKATSNFTE

SEQ ID NO: 71357 - protein, 162 aa, Glycine max
  Clone ID: 700906171_FLI.pep
RESRSSDFKGVSAVVTDRIREAHQNESAPLMMLFPEGTTTNGEFLLPFKTGGFLAKAPVLPVILRYHYQRFSPAWDSISGVRHVIFLLCQFVNYMEVIRLPVYHPSQQEMDDPKLYANNVRRLMATEGNLILSDIGLAEKRIYHAALNGNNSLPSVLHQKDE

SEQ ID NO: 71358 - protein, 60 aa, Glycine max
  Clone ID: 700906736_FLI.pep
FGLSNAGFQVSKYMPFGPVETVMPYLLRRAEENRGMLAASGFDRQLMRKELGRRLKAAVF

SEQ ID NO: 71359 - protein, 85 aa, Zea mays
  Clone ID: UC-ZMFLMO17357D07_FLI.pep
YIRRKLLSQDETKFWPLCTLGKTQILLAHESWQRNGINENKPKTACLTTNAVTKMQQAPTRLSYRRKPALPLGYLKCDATNNSSG

SEQ ID NO: 71360 - protein, 106 aa, Zea mays
  Clone ID: UC-ZMFLMO17374H12_FLI.pep
KRGLISCANKQINFISPQLSLLNNANRGQVFFMLVFWTCNKLRQKRMSTCDSWRGNGEELYTKNTCNHVSGSSKPVKSLLLVASRYLIKLGLILRNYCTAKVSIDP

SEQ ID NO: 71361 - protein, 79 aa, Zea mays
  Clone ID: 700426373_FLI.pep
PATSTSAAALAAARRPHREEVFLPLAPRIRGRDGDDVPGVAAVEVAEDGDDGGGERHADGLAPEVLHHELLVRVAEPEP

SEQ ID NO: 71362 - protein, 45 aa, Zea mays
  Clone ID: 700455013_FLI.pep
GKDTLNFPSVPSTQTATITHCVNVTKTATIRPCSVIPIPHGIGKH

SEQ ID NO: 71363 - protein, 150 aa, Zea mays
  Clone ID: 700475620_FLI.pep
NMLFNRSDTSSPKHVFIVLNATLHCIINPCRCKSTATGNRSFGGVSYKTCFFLFVMLNCSSDRDEVGRSEPWSVVQRSDHGLGLQVLVERVHAHVLAEPAHLVPAERRVRVEREVAVDPDGAGADGPRHGVGDVDVLGHDAGGQAVPGVV

SEQ ID NO: 71364 - protein, 49 aa, Glycine max
  Clone ID: 700560462_FLI.pep
IQTTNNTQNNDNFQDERRGRVKSKLTQGALDTTFDYFSIKIHDSQLQPS

SEQ ID NO: 71365 - protein, 63 aa, Zea mays
  Clone ID: UC-ZMFLMO17D04_FLI.pep
YTLTKKKVQEPIYTRNLSVKESSVNMTYAAASSSTLRTHAKRHLRQCARRHRRRARADISYSK

SEQ ID NO: 71366 - protein, 111 aa, Zea mays
  Clone ID: 700454975_FLI.pep
PPRPALPQLAVPRRHLLPPHRPLGVPHLGLREAGVLRWIRHCSCRCKGVRPSGDQVPRRRRRHKLQPQRLRRRYEADEEPVQGGVRSRPAAAEHRLLPRQLQVQGRHPAQV

SEQ ID NO: 71367 - protein, 137 aa, Glycine max
  Clone ID: 700889963_FLI.pep
SSYHLCQLAHPLLKASGYGSIVFISSIAGLKALPYSSVYASSKGAMNQFTKNIALEWAKDNIRANAVAPGTVKTVLLDSIMKAAAEADKAVEYIVSQTPVGRLGDPEDISPLVVFLCLPAASYITGQIITADGGYII

SEQ ID NO: 71368 - protein, 66 aa, Zea mays
  Clone ID: UC-ZMFLMO17083F12_FLI.pep
HQNTCDTGRETDSAQHDCYMDSVQRNICSDTGGLVSSLKQDTTEWSAFSSGLKASLRKPLTLVQYI

SEQ ID NO: 71369 - protein, 126 aa, Zea mays
  Clone ID: UC-ZMFLMO17068C05_FLI.pep
RRSEPCTLAWTTTRTPGPSTLGDGSRARASCRARKGPVCSRRSAAGRGCARATSSPGWWFPSSSTTSSRALAGRKPRRTGLSSSPPRGPSRDTPSSYGGDRIAMISDLMAMFSPLIFFGSRPKAKH

SEQ ID NO: 71370 - protein, 358 aa, Zea mays
  Clone ID: UC-ZMFLMO17082E11_FLI.pep
IGRRRLWGEYRLLLLVPAPIPMVASSQLCERRRLELLVVPEDALAVLGLDVDALPGLAPGRLGNRGRVEVVVVAEDGPDRLGGLHGVVVRHGGEEVVRDVRVRDVVEHAVEDAVVAVHGGQRAAQPVPLARVVVGERRVGVLQVGDEHQPRVHDQQRHGVHAHHPPDPERRRQLVQPERHGHDAGVRDEDLGALPVVVDGAVGVEVAGEARVRPPRRVGRQVQRPPEGELHHDVHQPADRVVVHVRGVPRQRLLLLGHEHLVALQGPRVGVVAPVAVLPREVGHHERRVQHQADHVVQERVVREGVVAALVRDDPHAGAHAPLRDPVQRPGRVAERACPRRYDGQREVEERRGDHQVV

SEQ ID NO: 71371 - protein, 389 aa, Zea mays
  Clone ID: UC-ZMFLMO17019G11_FLI.pep
TKPRFGGGGDWPTSLLEPTHPPPMLRCHTPPQCARAPLRHHGRWESPPAAAPAVVVRCARGAPQVSGIEAASPGHAAVTAALAKAEGGDARPSLAERLRLGNLLEDGLSYKESFIVRCYEVGINKTATVETIANLLQEVGCNHAQSVGFSTDGFATTTTMRKLGLIWVTNRMHIEIYKYPAWGDVVEIETWCQEDGRIGTRRDWILKDLANGEVIGRATSKWVMMNQNTRRLQRVSDDVRDEVFMHCPKAPRLAFPEENNGSLKKIPNLSDPAEYSRLGLVPRRADLDMNQHVNNVTYIGWVLESIPQDIIDTHELQTITLDYRRECQQDDIVDSLTCIEEGEEKSMNGSASAAAPHKEERQQFLHCLRFAANGHEINRGRTVWRKLAR

SEQ ID NO: 71372 - protein, 342 aa, Zea mays
  Clone ID: UC-ZMFLMO17015H07_FLI.pep
KSRVRLFALERSLENGQLGVPPSPSHRKTWEEQAHIERVLHDHFLFRKLTDSQCHVLLDCMQRVEVKPRDIVVQQGGEGDCFYVVGSGEYEVLAIQEENGKEITKVLHRYTADKLSSFGELALMHNKPLQASVRAVTSGTLWVLKREDFRGILMSEFSNIPSLKLLRSVQLFTRFTVLQLSQLAESLVEVSFADGQKIVDKNDKFSSLYIIQRGRVRLILATDQMTSDTWDLISAETKQAQSSRENGNYVLDIDEGGHFGEWSLIGETIAFTAIAVGDVTCSTITKEKFDSIVGPFPKLLQADSKIKESLVTLENVADGDFPFRRVKLSDLVRGMENVHICC

SEQ ID NO: 71373 - protein, 630 aa, Zea mays
  Clone ID: UC-ZMFLB73013C02_FLI.pep
GQATSYCSPRRLSPNLLLLQAAGDRRTPAAAGNPLAMALQGKKLINNPDDVVTEFIEGLVETYPGLQYLDGFPQIKVVLRADVERGSYDKVAVISGGGSGHEPSHAGFVGPGMLTAAVSGDVFASPPVDSILAAIRAVTGPMGCLLIVKNYTGDRLNFGLAAEQAKSEGYKMEMVIVGDDCALPPPRGIAGRRGLAGTILVHKVAGAAADAGLSLAEVAAEAKHASEVVGTMGVALSVCTLPGQITSDRLGPRQMELGLGIHGEPGVAVVELQPVDVVVEHVLKQILSQETQYLPVTRGCNAVLLVNGLGATPIMELMIAARKAVPELQLVYGIAVDRVYTGTLMTSLDMAGLSITIMKSGESILKRLDAPTKAPAWPVGSEGNRPPAKFPVPLPPSPSMKDDEILAPSQELSKQGCILEAVIEASATEIINLMDSLNEWDSKVGDGDCGSTMYRGATAILEDMKKRYPMNDAAGTINEIGATIRRVMGGTSGILYAILCKAAYASLKQSSTVTANKWADALEASIAAVSKYGGASAGYRTMLDALIPASAVLKQRLEAGDDPVTAFIASSEAASAGAESTKQMQAKAGRSSYIAPDLLASIPDPGAMAAAAWYRAAALAVKNKVHGSKS

SEQ ID NO: 71374 - protein, 791 aa, Zea mays
  Clone ID: UC-ZMFLB73016B02_FLI.pep
LTLTGNLRDPKAPEHVVLGSCSILISQTVLRHLTTDSVSLSSFIMGILESSHHESLKCQKAITELFVTYNIRFSGISRSFFKTPENQADKPGFLSLISQINALGFETNGLHWRYNLMANRVLLLLILASRSESGIYSQMLAKIAGHFLRNLKSQLPHSRMLAISALNTLLQGSPHKTSAQNSKQPIDHPEDCNISSTEEILNEIIREEGFMNETLNSLSHVHIISDNDGSSKASYGASSFQSGSDKAITYFYFDFSASWPRTPSWISLLRGHTFYSSFARIFKRLIQQCGMPVISSLQSTLEEFLISKERPRQCVAAEAMAGMLHSDIIGNLECENNWLMAQLHKIMLAPSVESAPEWAACIRYAVTGKERAGTRAPVLRQKVLECLCTPLPHSMATSVLAKRYSFLSVALIEISPPKMSPAEKQYHVKILDELLDSMNHSSAQVREAIGIAMCVTTSNMRLSGLFGTGCSPQGLHGDVSMIEQTGNKYWSERLTDGANELAVSIQNSTQSKQLESTSDSAEDSMDDREQADAKRMETIFHFMIASLKSGRSSVLLDTIIRLVYPILSLQETSNKDLSLLAKSAFELLKWRILHRPFLETAITSILPLVSDPNWRTRSALLSYLRTFTYRHTFILSGSEKSQIWQTIEKLLVDNQVEVREHAAGVLASLMKGIDEDLSKDFRERSYAQAQHIFVARRRNLKFSVGTIHGAVLALTASVLSVPYDMPSWLPSNVSLLARFIREPPPIRSTVTKAVAEFKRTHADTWSIQKDAFTEDELEVLRDTSSSSSYFA

SEQ ID NO: 71375 - protein, 209 aa, Zea mays
  Clone ID: UC-ZMFLB73014B12_FLI.pep
EESGEMQDKTKEMGIIDIDSWIHQQIIENTGICQCHTERTLDVIEVNEYETYNSNTASPVQKEFTNGSKPSLDEDSNLNLCPPTQNTEDSKETRAVNQFTKTELYTPPLKELCGSAKIKEHKNEKLGRHGSCRRSLQEELGNCKPEQPDKEPKADPNMQPEIEFHDNKHHIGKLTKFIQALRTAWIGALLGLGTMNLGLEQDFFKSLTL

SEQ ID NO: 71376 - protein, 517 aa, Zea mays
  Clone ID: UC-ZMFLB73011F06_FLI.pep
QKPQVQQNEGAGPELSRTENVDYGAAAPGEDGMTSSPSLVKTHVSSEVIVERMGSLVLGENTRTPRKKKTKTPSKMLEQEEDNSMLSSCISDSIAKQLEDVVLEERKGSQKNKMSKASSRAQKGKSTKRPASTNMEENAMNQYNYLSSSVLVDNHPSSSQSSEKDSTQAYSEQLCEEFSEAVNIGNDETSDEKMRPAWKSSLKVAGSKSSRQSVTWADENGSVLETSKAYESPSSSIKRPEEGIDNSLRRASAEACAAALVEAAEAISSGTAEAEDAVSNAGIIILPDMLNQQEHDNGKNSGGDDDPEIDRDVIKWPKKPVLLDTDLFEVDDSWHDMPPEGFSLTLSAFGTMWAALFGWISSSSLAYVYGLERGSVEELLIANGRECPEKTVLKDGLSLEIRRALDSCVCNAVPVLISNLRLQIPVSKLEITLGYLIDTMSFVDALPSLRSRQWQAVVLVMLDALSVHQLPALAPVFSNSKLVQKMLNAAQVSREEYDSMVDLFLPFGRSVQAITPM

SEQ ID NO: 71377 - protein, 279 aa, Zea mays
  Clone ID: UC-ZMFLB73012F04_FLI.pep
LQTHSKLQASIISTSVMTKKLISISTMAGKQGCKEQSNDRRIQASIQGDAKSVVVGFGGRLVTREQEQEDAIIVAALRHVVSGYSTPPPEVVVTVAGGEACGTCGIDGCLGCDFFGAPELAQEAVSCGTGQVATTASVGGGAAAAALRPRRRRNRNMYRGVRQRPWGKWAAEIRDPRRAARVWLGTFDTAEEAARAYDCAAVEFRGPRAKLNFPGHEALFQGHGDTAAAADTETLTPSPGEWQLGGGAGDELWEGLQDLMKQDEVDRWLAPVFGAASSF

SEQ ID NO: 71378 - protein, 465 aa, Zea mays
  Clone ID: UC-ZMFLB73013C10_FLI.pep
RRQNIERHRHAHDFAQTSPRGDEKGTEDLVPAARRTEASPWEMAGRRESPLMRGGGAGPPLSRGSRIAAAVVVGVALGCLCAFLYPDGLFHRAPDSAIHWPRRVESVACDTSREVAKLKSRLVLLERKNAEFKKQINELSMKLQLAGQGKNEALYKAGPFGTVKALRTNPTVTPDLSINPRLANILEQVAVKKELIVALANSNVKEMLEMWFTNIKRAGISNYLVVALDDSIENFCKSNDVPVYRRDPDDGIDNIGKTGGNHAVSGLKFRILREFLQLGYSVLLSDIDIIFFQNPFDYLYRDSDVESMSDGHNNMTAYGFNDVFDEPSMGWARYAHTMRIWVYNSGFFFIRPTIPSIELLDRVAYRLSHEPKSWDQAVFNEELFFPSHPGYEGLHASKRTMDIYLFMNSKVLFKTVRKDAYLRNLKPVVVHLNYHPDKSDRMKAVIEFYVNGKQNALERFPDGSE

SEQ ID NO: 71379 - protein, 237 aa, Zea mays
  Clone ID: UC-ZMFLB73016E08_FLI.pep
ESETELKSKIDGLKAKLRAHEAQRKEEEKVLFAIDNLDTSTTLMHKPKNYGKATDLLKSEEDRMKLLCELQKAREQRSMVHKEIRSMNECDYIDREIGVLEAEIEDSCISILETDIEKFVRDNTLAEIWEGSAKDLEALLVDYQDCVFQVNLKEEEIKVCSESLQYQARDMDKLQSKLNQAIRELGELLQDRRSLTACSLDEPTLPVGEKVAADLEAVRIHVDEAKQLLILDNQANS

SEQ ID NO: 71380 - protein, 259 aa, Zea mays
  Clone ID: UC-ZMFLB73017A11_FLI.pep
TERTGTNQHKTQQAAAAAGMGHRATDTGPHHHYHPTHTLFSPRHSQPAPDTSTRQSLLATYRATYETHTHTERDASNNRSVLNSKIPCHTAMYARERLPRHARTPIPWALAAAAACARPHSLAFSGSSGAATSSASAAGSWGPAGAGASGSSAASSSGAAASASATGSAAAGSSAPAGGAAAASSSAAASCSAAGVSSGPAGAAASASAAGSAAAGSSAPAGAAASGSAAACCSAAGSSSGSAGAAASASASASASAGA

SEQ ID NO: 71381 - protein, 222 aa, Zea mays
  Clone ID: UC-ZMFLB73018F10_FLI.pep
ATEAPPDNATTQNRLSLTNTVSNSEIVEESEQNTSVTVDSLPTSQQPYVPVEQAWQVGNRPYTSPEVERALCILDTSIALLRGDDKAGNVTTLQNLLSYDASLEASTAAGSVTCQTNVLNADSLPNGHPVAAAPQDSREKASDSAAEEEDAGDENSLKNPTASTVTKSVSMTLRSAIRVHGEESLDTDGFFHQNGFSNSKESRRARKSKKRWPCCLIPTTMG

SEQ ID NO: 71382 - protein, 200 aa, Zea mays
  Clone ID: UC-ZMFLB73020A11_FLI.pep
PKPASINKKKKRKPPLPATEEEGVPSPWLRCASLLSACVQSTQRRGRSHHHDHDPMAFMRSRSNASSGMGVAPNIRETFVELQMKKAFRYVIFKIEEKQKQVVVEKTGATTESYDDFLASLPENDCRYALYDFDFVTGENVQKSKIFFIAWSPSTSRIRAKMLYSTSKDRIKYELDGFHYEIQATDPSEVDIEVLRERAH

SEQ ID NO: 71383 - protein, 216 aa, Zea mays
  Clone ID: UC-ZMFLB73020D10_FLI.pep
ARNESHPPRPPPTALKCAPFFFRVKPSGCLIAPRSKLLLQKASCSFAPPRAVGWLLARSGWAASVARLSPAGERAMHIATCVWQEKASAGGMGGAAAGGGGCAGGEWGAARAKVASVLGVAGCALNCAVSFVVFSALDVLDVVLCLVYKLVDYAAEAEWKPRHQRRAGPRWCGCRRRPRSCSWRTCRTRCTCGRRCWPTRRGRATAAAAAWPPRSP

SEQ ID NO: 71384 - protein, 186 aa, Zea mays
  Clone ID: UC-ZMFLB73020G08_FLI.pep
PTRRFWRNIVQKGDTVVDATCGNGNDTLALLKMVADETGRGRVYGMDIQDSAIENTSSFLKMAVDDEHQRGLVKLFPICHSRMEEIVPKDAPVRLVAFNLGYLPGGDKTVITVPRTTELALRAASRILSSGGLISVLVYIGHPGGRDELDVVESFSSSLPVDTWVTCKLQMLNRPVSPVLVLLNKK

SEQ ID NO: 71385 - protein, 83 aa, Zea mays
  Clone ID: UC-ZMFLB73022G06_FLI.pep
AVSERRIVPSSLWFSLILTDEQSSTCKFLLCALVVIGRKTHVVGRGLMSTITMDVDTTARVDEFLVTTFVGPLVEEDLTRGVW

SEQ ID NO: 71386 - protein, 270 aa, Zea mays
  Clone ID: UC-ZMFLB73028B12_FLI.pep
ISNQTNKAAVATIHFSSLPDPIAATAMAEAAGGGPLLPEELVIWEILTRLPAKPLLRCRAVCLSWRRRLTSDAKFLLAHHRRQPSLPLLTQGDRSTEDRRIDALDYRTGERLPVARTTGRTAANADDLNVLASCDGLLVLIANGGLHICNPATRQRAPLALLHGASCISALYPYRPSGSYRVAGALLLRESRGRPRRVPRAHRRVARAQVRRRTSRAVGVRRRGDGDADDVVLSPARRGRQQDLLAAGKAARRQREGQQHARVRYSDRVL

SEQ ID NO: 71387 - protein, 214 aa, Zea mays
  Clone ID: UC-ZMFLB73028E01_FLI.pep
STPTFTCSCREQAMAPDLSELAAAAPARGAYLAGVGVAVLLAASFLPVAESSCVRDNSLVRDISQMPQSSYGIEGLSHITVAGALNHGMKEVEVWLQTISPGQRTPIHRHSCEEVFTVLKGKGTLLMGSSSLKYPGQPQEIPFFQNTTFSIPVNDPHQVWNSDEHEDLQVLVIISRPPAKIFLYDDWSMPHTAAVLKFPFVWDEDCFEAAKDEL

SEQ ID NO: 71388 - protein, 175 aa, Zea mays
  Clone ID: UC-ZMFLB73028G12_FLI.pep
QNERWNDKYSRVETMMLFWNRSRPSCRKRHREPPPVQCGHRKKSSHLYFQSWIADMVASPRSTSTHTQHTGTLHRRYVHLDTSCMVWSHTMSPLILLCFTGHPFYLPTGMPSSETPQQINLSLPPLPPTAIREYSHMEENMYKDHLSTNRGRVSPHFSFDFFPGGFSMVFQPCPF

SEQ ID NO: 71389 - protein, 195 aa, Zea mays
  Clone ID: UC-ZMFLMO17065H09_FLI.pep
ITVHVIYYGHSTQMEPERETGSVSSQYSVAASAEEGVNLVLEVRLVVPEAGGGGAILPADQRWHALEPEPGVHPPRVRRVAPSGLVPDVGAQEHRVLALQCLQPLVDHRLRHVAVGAPGEGGVRLAVGQEEQQLHLAVGGGVRGSEEAIEVGFEVGKPRVHLLHRHLALLSPSAGRVKRADWSSKKDWETDWWKW

SEQ ID NO: 71390 - protein, 95 aa, Zea mays
  Clone ID: UC-ZMFLMO17019C08_FLI.pep
SLHILAVCIHAMRYLGAVSKAKQPSLAYKLLQMFNPTQRLILPYSKRHYTQKTMAKPPVSKRLNSPASLRSFFFVPVVTDRWATQVTSLIDQRRR

SEQ ID NO: 71391 - protein, 71 aa, Zea mays
  Clone ID: UC-ZMFLB73011C07_FLI.pep
SNKKLELVTRDTLPAGEIIMSRGAQEYLLATMRSHISLVVPYYHSTTTPFQKQMGLQNGMYTSRNIVQHKY

SEQ ID NO: 71392 - protein, 113 aa, Zea mays
  Clone ID: UC-ZMFLB73094G05_FLI.pep
LGVEALHAGVAGDLQHRGGRSGRADEAPRRDLLHALHALHLLAGALPDGPGARELPLRELQLPPRQLPDALRVGALGRRHAGLVRGLLLHGAHISARILLVLLMLPRAGRYRR

SEQ ID NO: 71393 - protein, 368 aa, Zea mays
  Clone ID: UC-ZMFLMO17082F10_FLI.pep
LIKKGSLTKDRMHKAMSLFKGALDYSDFKDVDMVIEAVIEKIPLKQSIFSDIEKICPKHCILATNTSTIDLNVVGEKTNSQDRIIGAHFFSPAHIMPLLEIVRTEKTSPQAILDLITVGKIIKKVPVVVGNCTGFAVNRTFFPYTQASHLLVSLGIDVFRIDRVISSFGMPMGPFQLQDVAGYGVALAVKDIYADAFGERNLGSNLVGLMVKDGRQGKVNAKGYYIYEKGAKPKPDPSVKHVIEEYRKQANTMPGGKPVTLMDQDILEMIFFPVVNEACRVMDENVVIRASDLDIASVLGMGFPKYRGGLVFWADTVGAPYIHSKLSKWAEMYGPFFKPSSYLEQRAKSGVPLSAPGTSQQGSARSRM

SEQ ID NO: 71394 - protein, 644 aa, Zea mays
  Clone ID: UC-ZMFLB73018C12_FLI.pep
TLHFAAATTTRRGPTMAPVAAPIRDLLTSFSPGADFLALSSGDGRIKVWDAVRGRLQTEFADIPAVEAVAVAESKRGHLALDYTCMKWVQLSSKKKRKAGSSLIVLGTGSGDVLALDVAAGHWKWKVSDCHPGGVTAVEYSKHGRNVYTAGADGMVCRIDASNGAVVGKFKSSSKAISALAVSSDGNMLATAAGQLRTFDTSSNKKIKKFSGHPVAVRSMVFSNDSQYVLSSGVGERYIAIWKLGSGKTQSSNCILSMEHPAMFVDCKCSDKGEIHILAISEIGVCYFWSANVVDDLRNKKPTKIILSESSVSTTHQALSIFAAKLQGVDGPNSAHVLLAYGSVVKPSFDKLLVCYGTDISLGISQDGVLLPNTQTTMAKKGQSVKKHETVIALDRANAEDAILPLPKLHTQEKKRKHGVTKPSGDVEPEIHSDLTTTRSIHKRVPVQRIEDDSTCIEDMMRECGIIETRVDESMKGHAGIPFNILSCLFGDGSIKVDANLPSKKIRGHLRSLKPGDACKLLDKLVSAWKTRSGSTELVLRWIYCLLVIHGRFICSEESINNLEKMCAERYTVTEDLLKLSGRLRLITAQVDKAASNMSEPTSGEMQDAAFQSDEEEEDEDVDETVFGQDSDSSQNSGTDDDAK

SEQ ID NO: 71395 - protein, 171 aa, Zea mays
  Clone ID: UC-ZMFLB73019G05_FLI.pep
FSTSAAAVSAAAPAALSSSSPGASIRKPCCQRQQLPPHLSGSWGELQRPGGTPHRGVPAVGAALRRHEGEGVVRSVEELLRVRARHGALVFWGEDFDAAPEVAAYGDGDGKINLISVLAFEKEMRRQPEQKKQFKSIKINKAQHSTIVTDDFALHRVIQEIVEANNQKIPS

SEQ ID NO: 71396 - protein, 332 aa, Zea mays
  Clone ID: UC-ZMFLMO17063C11_FLI.pep
GPSKKSSEDIIQLRAQNGFACREVPVKETKKVFRSEDENGNKMVNQYVHLGKIGSGSYGKVVLYRNIKDGKLYAVKVLNKPYMMKVHVVHTKTAMTDVLREVSIMKMLNHPNIVNLVEVIDDPNMDKFYMVLEYVEGKMVCDNGLEEATARIFLRDIISGLLYLHSHNVIHGDIKPDNLLVTSTGNVKIGDFSVSQVFEDDDDMLWRSPGTPVFTAPECCQGSAYHGRASDTWAVGVTLYCMVSGHYPFLGDTLQETYDKIANDPVEIPGDVNPQLADLLLRLLCKDPGDRITLRAAAEHPWVAGDEGPVPEFICRCGFGRRKRNDVREEVQ

SEQ ID NO: 71397 - protein, 334 aa, Zea mays
  Clone ID: UC-ZMFLB73031G04_FLI.pep
GATQTANCHLLPQPLCPSPCHQGPRSPERDLAATQAMESPFRADLLRGKAALVTGGGSGIGFEIAAQLARHGAHVALMGRRREVLDKAVAALRSEGLRAVGFDGDVRKQEDAARVIAATVEHFGKLDILVNGAAGNFLASPEDLKPKGFRTVLDIDTVGTYTMCYEALKYLKKGGPGRGPSSGGLIINISATLQYTAAWYQIHVSAAKAGVDGITRSLALEWGTDYDIRVNGIAPGPIQDTPGMRKLAPEEMGNKGKRETMPLFKLGEKWDIAMAALYLASDAGKYVNGAIIIVDGGLWLSRPRHIPKEEVKALSKVVEKKVRASGVGVPSSKL

SEQ ID NO: 71398 - protein, 86 aa, Zea mays
  Clone ID: UC-ZMFLB73118A04_FLI.pep
GYVLVKQEDIVDGIACFMAAYLLSLKQTKDLTPNQLQQALSKTFSAKKRKSKLQKAWDGTKVVYNIASWSATAIGIYQNPAIVQVR

SEQ ID NO: 71399 - protein, 251 aa, Zea mays
  Clone ID: UC-ZMFLB73012E10_FLI.pep
VLGSGTQYANGFAVADIERSSLILCGKAFADSAIVKDALTAMTAPILSARGGLPVPGWILNFGGSTVLLFAPVEIMMSCVEIHNALLSIDCGAVISSKGSTVLFPTKASREQKLLTKPTAVIIVSSDSSGAIPSVCKLSPGQAAYHFLAGYHDGKFVPAYNRAPSPADPLALASSLFSHLKEDDTPSYLINAKHSGKYIDGNGFMKLLKLALSHDLPDIKTEGSRVGELKGKYRSFLSSKFGQCLPEEFSF

SEQ ID NO: 71400 - protein, 97 aa, Zea mays
  Clone ID: UC-ZMFLMO17063D05_FLI.pep
DGVAIRSRKEAGVFFGFVEFEDMSGIQNALSASPVELNGRFVHVEERRPNCGFPRGRRGRGRADFSRDQAGGRYDGEYATRSKGIGHQKKTGRQYDY

SEQ ID NO: 71401 - protein, 961 aa, Zea mays
  Clone ID: UC-ZMFLMO17122H04_FLI.pep
KYCHAWLRNMTCGNPDCLYLHDVGSQEDSFTKDEIISAYTRTRVPQMASGVSQRRTGTVLPPPGDDFSYSAVVSAKHTFKNGTLNTTSQPRLSPPNSSSGRSTLPSAASWGQRDLNARTTATGATSSQSHTKPKSESQSNPFSSSSVFSCTKTPSSWNDDTSTAAKISEGQQLSEKESRTLQPYKPGISKETQALSSLESSLDIDFSTIPSAWNDDDIVVPDVMPKGSDENQVANKNGELTHPASKSLVLSKKDIKMNITSKTPSDFVSSPAISKSDVSTSDGDHSLTNITPKCLASNAVECQSSHTAVEKMLEDIGSKDTDMEKLSAQISSVTLGGNDEIQSMAGNQQPDVMPCTSVDVLMDQNFGRDLAHPNPDELLLPSENKDSIVSCQYSSDKRLDWSLEMQNCSVTPLNDRMDSALLTDKIHSRQLDGSEQSSYSSFVEFPSTVDTSLWNDTENNAALTIDNITSSQMQPGFSSTDNTYALLNGGQDGLGTVYTHDNVSVYTHGNVSGHPGMGSHHHRAMGSLRNNSIGSFDKTISVNKYERRIISDTLSEFNPWDDSYSTANNFARMLRESKNNDVHCIAPSWKSGTGIKESRFSFARQDNQGNLFDSSLRNCGTGTEQNFSLLPQNSRGNIYQNGLAFQSLENEFSNNNSPGVLDMATTGTSMSKISAPPGFSAPTRVPPPGFSTAFPSQDSLNPTPVFPSGILCHGGSIPPPRFSSFSSGISTQEVSKPPTRPPSPFSSRFSSQDGLDPSSRFPFSSGFSSHDGSNQSYGSTNPENLLRGTVQGGNSNHYQSQFGRHSSDMEFDDPAILAMGKGLMPGIGDSGLEMKNTPAFQAQLQPASSDPRFQLHVQPNVQSRQNMRFTDPMQDGLNHMNDNYLASRFLAQNQGPLSPYVQIPQQPRNSQVINGHWDGWSDLRQGNNAPMSDMSRILYPSEVNKLHMLGSNDVHNRAFGM

SEQ ID NO: 71402 - protein, 480 aa, Zea mays; identical to SEQ ID NO: 70466
  Clone ID: UC-ZMFLB73279E05_FLI.pep

SEQ ID NO: 71403 - protein, 207 aa, Zea mays subsp. mexicana
  Clone ID: UC-ZMROTEOSINTE119B07_FLI.pep
QQYDEKNIRRRVYDALNVLMAMDIISKDKKEIQWKGLPRTSISDIEEMKTELVGLKGRIEKKSAYLQELQDQYVGLQNLIQRNEQSYGSGNTPSGGVALPFILVQTRPHATVEVEISEDMQLVHFDFNSTPFELHDDSYVLKEMRFCGREQHDSTQESISNGGESSSVSNIYWQHVQHVERPNNGTGRLPSSPPIPGILKGRAKHEH

SEQ ID NO: 71404 - protein, 509 aa, Zea mays
  Clone ID: LIB3069-015-A3_FLI.pep
VKAKIQDKEGIPPDQQRLIFAGKQLEDGRTLADYNIQKESTLHLVLRLRGGMQIFVKTLTGKTITLEVESSDTIDNVKAKIQDKEGIPPDQQRLILPASSWRMVAPWLTTTFRRRAPSTWCCASGGGYADFCEDHLTGKTITFEVESSDTIDNVKAKIQDKEGIPPDQQRLIFAGKQLEDGRTLADYNIQKESTLHLVLRLRGGMQIFVKTLTGKTITLEVESSDTIDNVKAKIQDKEGIPPDQQRLIFAGKQLEDGRTLADYNIQKESTLHLVLRLRGGMQIFVKTLTGKTITLEVESSDTIDNVKAKIQDKEGIPPDQQRLIFAGKQLEDGRTLADYNIQKESTLHLVLRLRGGMQIFVKTLTGKTITLEVESSDTIDNVKAKIQDKEGIPPDQQRLIFAGKQLEDGRTLADYNIQKESTLHLVLRLRGGMQIFVKTLTGKTITLEVESSDTIDNVKAKIQDKEGIPPDQQRLIFAGKQLEDGRTLADYNIQKESTLHLVLRLRGGQ

SEQ ID NO: 71405 - protein, 172 aa, Zea mays
  Clone ID: LIB3067-022-F8_FLI.pep
ASGCLRLSHKHTDTMAFPGTPARKIVPGGFTAARTAVASGGALSFDLDGAGDFFWGLWQLIKAKAAEAAAYLAALFAALAEKADEIFPPETRSETLRQWMRVAVSVVIPALVVALVLCCCWRCCCCACRRTRGGRRFMAAPGRGGARMPRGAFENNPRLYFRDLHAGKPLLY

SEQ ID NO: 71406 - protein, 455 aa, Glycine max
  Clone ID: 700844032_FLI.pep
FESCKSISVIDLDSNSLSGTIPNGVSKCQALEKINLSNNNLTGHIPDELASIPVLGVVDLSNNKFNGPIPAKFGSSSNLQLLNVSFNNISGSIPTAKSFKLMGRSAFVGNSELCGAPLQPCPDSVGILGSKGTWKVTRIVLLSVGLLIVLLGLVFGILYLRRGIKSQWKMVSFAGLPQFTANDILTSLSATTKPTDIQSPSVTKTVLPTGITVLVKKIELEARSIKVVSEFIMRLGNARHKNLIRLLGFCHNQHLVYLLYDYLPNGNLAEKMEMKWDWAAKFRTVVGIARGLCFLHHECYPAIPHGDLRPSNIVFDENMEPHLAEFGFKHVSRWSKGSSPTTTKWETEYNEATKEELSMDIYKFGEMILEILTRERLANSGASIHSKPWEVLLREIYNENGASSASSLQEIKLVLEVAMLCTRSRSSDRPSMEDVLKLLSGLKHLEDGRTSKEGQ

SEQ ID NO: 71407 - protein, 64 aa, Zea mays
  Clone ID: LIB3068-039-E7_FLI.pep
MVEPISPTATRLEGCPPSDTEVRDAHILPFLAPTMASTCSTPFSRPQHEAHIQAAGSIWRGFQG

SEQ ID NO: 71408 - protein, 193 aa, Zea mays
  Clone ID: UC-ZMFLB73106D07_FLI.pep
QPERARRGLLRPPRRVRVVQVPAAHGGGVAAARVPGPRRRRRLVAGAGRSQRAPRALPRRRAPPGLPGGVPRPPGQGRRPRPLEGRQLGLEPLPPLRHLPGLPRHRRWQRRARGRRVQVPDHHLLPRRGLGLAGLLPVCAAVSSVLRIQTEAAACEGNRETKACLAPCIMGWLPVSLALSKLAALPACCWCAC

SEQ ID NO: 71409 - protein, 451 aa, Zea mays
  Clone ID: UC-ZMFLB73028A06_FLI.pep
VLLYVCYLCCYFFSIMCTMSLCHIHIQMCKLYFCRIVLGIQCLVAILSRDIALLVLSQTGARLLCHPSSLAMVICSLGLILGHRHSMVHLSNLMVATPQHLVVIRLDGISLKTSNLIQLPLVLGMIIIVSSSNLSNNLPLGQLLLLMPLATIMVSLRRMLHRDMILPTLSRVVGSKHMDMMATLVTRPKGSSRATLSRLVMISRVMAHLLMDQLQARPRMGPTMVVLEGPVRHLQGSKHQTQLLEANLAIPANRPLVLQQLTHLKVQLHLDMALHHPSLAMAPNHHSKPDMVRALMGSLLHRARNLLHCHLMDRLRLLVLLRLVTGSMVTANLLTVHHQLTLVHPLQATRAMASSSLMASSSLMAMLMVVQAMGSLQPTLLKQHLLLHPRITLLPLLRPLEQQLRQLLKTVGAPKHPLKLELQQLIGNKHFPRPCRVVSSALLLNIITHLI

SEQ ID NO: 71410 - protein, 763 aa, Zea mays
  Clone ID: UC-ZMFLMO17241A02_FLI.pep
RSAVGFRVLSFLASSMADPDDLGRRLAAVAVSESPTAAAAALESSNNNLFQVMRAVEDAEATIRQQLEENSRLKDELMLKTRELHRIRSEATDQASSHGIRIHQDRALGAHTDTSSTAPIRTTATAAEAFEWGAGDAGINHKYLEANQANGIPRKSPSAPDSAFPSQLSTPSSRSLSPTRHHKETDYDSRLNLSGQGALPVSDLNSNVVIWKQDLLVKVKEQGEEIAQLRRHLSDYSVKEAQILNEKHVLEKRIAYMRMAFDQQQQDLVDAASKALSYRQDIIEENIRLTYALQAAHQERSTFVSSLLPLLSEYNLQPPVLDAQSIVSNLKVLFKHLQEKLIITEEKLKESQYQITPWHAESSNNTSAAAQSPSHPPGNALIKANLDIVPQQAYSHVHSPVSSPVQTRRDWDLLGNENRQVIRSEVATTSAEHDNVGRTSPSTSSHNMKDAPQRTDHDSRAVRFNIESKDQNPSFKDLIKSDASESLEGAEAQIPQELSAQQDSGGSPNLTSGLDDANPPYPYLPTVLEEPSSSFSEVAEDDPLPAIEGLRITGEAFPGRELQASGYSIHGTTSCNFEWVRHLDDGSINFIEGARQPTYLVTADDVDFVLAIEVQPLDDKKRKGEIVKVYANDQRKITCDPETKEHIKKILSLGHVSYEVLLPVRFLDMWEPAILAIKREGYSVKCNGQRGVVVMEKFQQAMTINIPFGRPTEFSILSADGAEYNLKPAENAPSRDAIVLILRLFRMKAVEKSKGKRKGIFFK

SEQ ID NO: 71411 - protein, 317 aa, Zea mays
  Clone ID: UC-ZMFLB73091F09_FLI.pep
LSFSPVPPLFADKHAAFSSPSTPAAAGPGRCSPPPAEKCRRSVRTSGTSSGCRRSSWTTTSSPRRRRRPWRPGARATRRTAWRGSRAGSRASSATTGSGSRLPPPPPQIAPPSAKVPAGAGGHYHPLAHLVSQRQMQAAQFHLLKQHQLLKLQRQRHLAAWSARQSACAKPVGCGGGDAPLGLNPAAWPPLQKPPPPPPPQQHQAPAHPASGMRAVFLTPPGAKRERNGTGVFLPRPAGAPAAEPKRKTAGACSTVLVPARVVQALNLRLEDLGAQPRYYPGGFVLDHDALISRSNAMLASQKRRAAAAAAVCHRST

SEQ ID NO: 71412 - protein, 337 aa, Zea mays
  Clone ID: UC-ZMFLB73092E06_FLI.pep
AAASASRNANGLMPMHANFGCMSSTVQSVANVSTTSTSQDQCDLQLGFGVQKQHIFSRHGELRTATARSPLPGSIAKRNSVPTESSQFESMDGPKSFPNGTSQFGGFARPTFVPAAPSQFGSMAQPNYVHSSQSSQFTSLVQPNSVPPAESSQFGSKAQSSSAPLAKTSQFKGMAGPNSVPPAEPSQFGSMIRPNLVPPASSQFLGSMVRPNSVTPESSQFGSMTRPNSVPPVSSQFVNMPSQNFVSASEPTLVLGYAPQIGSDPPHQVQLGWDLSLPRMVTGGSMVTCLCIWCNSQFHHFGPVDGQQASSFGFICPTCKDRMSGHHSMPSNGSWQP

SEQ ID NO: 71413 - protein, 100 aa, Zea mays
  Clone ID: UC-ZMFLB73205H04_FLI.pep
SPVPTHHLGDTITVTNIKRQKFYFTGIELTSPDLYHLGELFRCHGIKGIIKQTATQSKSGNMHSLCRSNFCGTREDIDQKPIIGTSSLPPPNTGSSTIPA

SEQ ID NO: 71414 - protein, 337 aa, Zea mays
  Clone ID: UC-ZMFLB73208E09_FLI.pep
KREWKIKSHDIRCCMSHFYGLCLQKTSYDANMDVPSVDPSAAISERPSPVSVLDSSFDQEDLFPTSRTPNSLAVDDERETLEEPWKPSVAIQSKNNKLANVASLLEKLQQLSVNKDEDAPPVDHIAFLCETESPDHRYVSEILLASGLLMKDLGSGQTGLQLHSSGYPINPDLFHVLEQRKAGWVSTPDGIHQSRSGTKSDPRRAHRKLMFDTVNELLLQKFEKETAVYALSSFTRAKDPPAKTFSGQQLPKFISSGIEELDMERSSISQKDSSVIPDAEILRRLQGWTSFSKELPGMVLEIERSIFKELVDEVVHGESADGPEMKAAGRRRRRLFA

SEQ ID NO: 71415 - protein, 752 aa, Zea mays
  Clone ID: UC-ZMFLB73193F01_FLI.pep
SVRKRDRKKETKVYYETRPRPFQKYTYRGYKAVSDRSGRDPTGGFKGPVKKEPEMQAPLNSSALDVKTSDTTEIFSATINVAQTDAKNTTSQPLSKVQHGWGGIPGRPSMAEIVKMGRPQAKVGSRSVASSTALPTVGDSVISNTPNLVPEEYNRTVFASEAGHVAADKLPNGAVEVHSLPKDASAFDMLPSAEGTDVEAPSMSANAQGSSTPDANEDDIEKYANLEEGNTESLISPGQVSASGKDIQSEYTEVVSHVDEGSIEKTNDFQLNGLPFEHNQNLNGDVSTATTQFDHLTLHEGPKLSDDNPAVIIPDHLQVSNADCAHLTFGSFVSGTLDSSLTTKPLESHGDAAAVPDDDSIDQSDGRIHDDEGKVTLATDVNEYVTSAANSNEENLDITSVQQSEVTRADFLDVTSNTEYNLTSTPDYATSSAPLQDSASQSLQENRQFQNISPFSSFMQMQNGLLPPAIPPLREFDPAFSLLLTHPPMMHGTMSSSMSNTTVSTQPQENANPVGLPNPQLTQSQQSTSIASGPPLPQHLLHPYAQPTLPLGYASMIGYPSLPPSYAYLPPAAFQQPYMNSGLFHQAAAAVPTSSVKYPLPQYKSNIALASLPQPGSLLSSYVGGFGTASNMPGNFPLNQSTAAATTTLGFDGTVPSHFKDGNQFISLQQNENPAMWMHGASSRGMPPLAASTMYGYQGQSHQAGLRQGQLPSQFGSALGQSQPGLGPEHRNPSDSNLSGAAQANQMWPNTY

SEQ ID NO: 71416 - protein, 214 aa, Zea mays
  Clone ID: UC-ZMFLMO17219H09_FLI.pep
DIATFTRKKQNHKYGSYVKADKVELHAPDNHGWVLYKATVSSSAGHTLTGINIVCTLKFTGEISPESEDVDGTSLYQASLGHLSIRNTDKNTEFPPAESWITEGDYISWSKCSNGSELVNLKISWKLKNPDQPQPPFSKYNIYVEKLTADSDLKVPSPKSYLGVASVDAFYVSGLEVSNEVTGLKFFIQAFAHDGSWQELEECPKFFLFPVHSE

SEQ ID NO: 71417 - protein, 60 aa, Zea mays
  Clone ID: UC-ZMFLMO17219H12_FLI.pep
TENQMIVFCHNSQLHVLSEENGLCFTSIILYITYMPETIEQKKITRENTCNQPSRSTEYK

SEQ ID NO: 71418 - protein, 171 aa, Zea mays
  Clone ID: UC-ZMFLMO17192G12_FLI.pep
TSSSYWRTPRSAAAACDGGAAARVGVSLPAGAAVVVGGSPDGAGHVVPAQRAVAEVAAALQHPARHGVPAREAELLVLSRAHHAEVPAEGRRRRHVARRAGQHQEQEEREQERARRPRHRRRRIAMENGGGGRGGERSVGLVLCCLVLLWRRDAGEAGRVGLVGPTGVERS

SEQ ID NO: 71419 - protein, 182 aa, Zea mays
  Clone ID: UC-ZMFLMO17234E01_FLI.pep
SEGEQESRQGVGGAVGAAALPDALGGDGGGEAGDGEVGVEVLTELGDHPIGSHGPGVHPVATPLVALGDHGAGRGGEGVHGAGHEAEAAGGGGGGGCQEAHHVLLVLGRAMEPPLQVGRQQRLHGGVVPGVERLVQAEDQELVALLRSLRRWVDAYLVALGGGAAFLQLRRRQQIDPLCLSN

SEQ ID NO: 71420 - protein, 845 aa, Zea mays
  Clone ID: UC-ZMFLMO17077H03_FLI.pep
STLTFPTPELHGHARSLSNATGPQQQQSPNAAASAASSARTRNPSQRISRRQGHRRVAASRSMGCGQSKIDQEEAVFRCRERKRLMADAVASRNGFAAAHTGYTVRLKSTGGALSDFAQGEAPDPSLVSSHTHHAPAVATSSVSTPPGPSAASVNSPSPPPPPFADFSHSSLQRSSSTPNIPMPEPRAAAKNRPPADASIREEDEDEDEEEQDGHIKIDSDDDSDDDSDEDDDHHEHDDVSVDDMVHGQQSKRILMSSVGSSPVTPPPPPRLNHTPPTLATATPPPPVLESQMATWDYIFGPTPTPPPTLEQPAADTLWMERRDKEPVAEVKAPVAKTVVSKPAATEERPPETAVEKDKAIEEMMANLPPSKPIVRKPPKAPGPSQEAAHYQHASSMGAVEIRKGKVMVASGTASLLQIVTRLDDNFLRASESAHDVSKKLEATRMHYHSNHADSRGHIDHSTKIMHVITWNRSFKNLPDHEDLNDNFEIDDRFETHAAVLDRMLAWEKKLYDEVKAGELMKTDYQKKVSLLQKQKKRGVKLETLEKTKAAVSQLHTRYIVDMQSMDSTVSEINRLRDRQLFPKLMDLVDGMAKMWSSMYRHHRSQFLIISGIRGFEIPPIPRETTDSHYIQTCELRDIVREWHTQFEKLMDNQKAYIRALNAWLKLNLIPIESNIKEKVSSPPRLVDPPIKHLLHAWHDELERLPIELAKTAIKTFAEVISTIVHLQEEEVNLRRRCDETRRDLNRKKAQFEDWHQKYLERQTAETQNIDPVEDRKRTIEELEIRLREEEGHHLRHARQVREKSLANLRTHLPELFRNMSDFAYFCKDMYNNLRKTAALSKDEV

SEQ ID NO: 71421 - protein, 364 aa, Zea mays
  Clone ID: UC-ZMFLB73346D10_FLI.pep
PDSADPLTTQPSPDPGIPSWKPLAGGKLKKPLTDKQRAAAEQRLSHLRAHLILRSLDSPAGGARSLPPPQEAALDALGLLIFFRLDLQSGAPRPDLIAPLVAYYDRVCKRSFVRGVRVGVSRHHIIRALCLPSKPASAAPAPADVDPAAVVAAVMQLLQDYVLLPFQGDDRCILPQQVAAAEQMVREGAAHRVDWGELIWGLVEKEMLELPKREDWVCYYGPHLQRLIYAQKPHLLELVEEGPVQEPSANVDLKRKSMVELEQGDGDREAGNNVKSKSLNDSESGKAGARNDGLDELELADAVTRNKVMGEFGLGDVDARKNSIVKLEVVDEDARCKCLNEIQAVDAINNNIVELDAANERCKV

SEQ ID NO: 71422 - protein, 229 aa, Zea mays
  Clone ID: UC-ZMFLB73349A01_FLI.pep
FHCARYFWCRDHKLAISAEILPELYHAARDAYYNARDAPLSRTNLMRHTKALLILCPDLLTAWNSRKMVLSALYDFTKLKDELQLCALILSYSPKNESTWSHRRWVIKQVAEQHQDMLELIGNESILVKEIAEKSKMNYRAWRHRCWLIPYMTRKQVLDELNESTRWSELHVADNCCFHYRRSLLLALLDNFFGNEEDSLSWESDICLLWKEELRWDEMLIKRYQGREV

SEQ ID NO: 71423 - protein, 83 aa, Zea mays
  Clone ID: UC-ZMFLB73402B09_FLI.pep
ARLEDIRRIALILSFACTVLRINPAFACISTAYTIENSFHLIAYLLSLRSYHLTECNRVGQVWMRFHRNICQIMPWEHLRLLH

SEQ ID NO: 71424 - protein, 250 aa, Zea mays
  Clone ID: UC-ZMFLMO17018C11_FLI.pep
IAFPSFHSMAGSHRRVVFVRFSFALGYCLISAHRYGSRWPMIMLAVRGLNSKMLEKRLHGCLLLLVFLLADVSGSRAETAVDLGPDSEDGSKRRSLATTMFCVAKQGADATALQAGLNWACGQGRANCAPIQPGGPCYKQNDLEALASYAYNDYYQKNFATGGSCGFNGTATTTTSDPSSGQCVFTGSSMAGGGTPAASAPSGLSPPSSFTPGIGSPSNTLIPLDGAESLVSSVWSAICAPLLALPLFFL

SEQ ID NO: 71425 - protein, 380 aa, Zea mays
  Clone ID: UC-ZMFLMO17018E02_FLI.pep
TMIASVDLDLVIGSDFSGQVLPLPLPAARRTQNPRLPAAAATRHAAMSAAAALRPIEPLPLPTGLSLSPRLKLLLTFFRADLTVRPLDEWQLKSALLAFLRDPPLPLPLLPDSDLSVSRLPDLQKRRREEPVASGVLHVRDLSFLRPRKGDGEAEEMTGEQEKYFEWRSTLVQKLEGIELNLEGVKFRMTVEIPSSDDFRTMKKSWEDFYSSELLNTRNPVRKIAKRPDTIVVRGVPSRWFAETRVSSKPSTLVTHTVFSALGKIRNLNISNDDEIEAKGHGVNKGLISGLNCKVQVQFESYNDFQDAMKALCGRSLEKEGSRLKVDYDVTWDCEGFFRISQYEPVRNNLEERDSLASVNSQRKHHTSRIESDYRKRFRE

SEQ ID NO: 71426 - protein, 376 aa, Zea mays
  Clone ID: UC-ZMFLB73135G02_FLI.pep
QIQDLECSDSSFGNNPNLCGPGTTKPCPGAPPFSPPPPYNPTTPVQSPGSSSSSTGAIAGGVAAGAALLFAIPAISFAYWRRRKPQEHFFDVPAEEDPEVHLGQLKRFSLRELQVATDGFSNKNILGRGGFGKVYKGRLADGSLVAVKRLKEERTPGGELQFQTEVEMISMAVHRNLLRLRGFCMTPTERLLVYPYMANGSVASRLRDRPPAEPPLDWQTRQRIALGSARGLSYLHDHCDPKIIHRDVKAANILLDEDFEAVVGDFGLAKLMDYKDTHVTTAVRGTIGHIAPEYLSTGKSSEKTDVFGYGITLLELITGQRAFDLARLANDDDVMLLDWVVNCAISSVQIVPQVFMPFLWLPYCAGAGAHLFLCNC

SEQ ID NO: 71427 - protein, 471 aa, Zea mays
  Clone ID: UC-ZMFLB73045E06_FLI.pep
IASLAMGQTHLLLLACFWVLSTCSLLLDASSDGLLRINLNKKRLDKEALTAAKLAKKESNLRRSVGADQYLSASTDDIVPLDNYLDTQYFGQISIGTPPQNFTVIFDTGSSNLWVPSSKCYFSIACYLHHRYKSTKSKTYTKNGESCTITYGSGQIAGFFSEDNVLVGNLVVQNQKFIETTRETSPTFIIGKFDGILGLGFPEISVGGAPPIWQSMKQQKLVAKDVFSFWLNRDPDASSGGGELVFGGVDPKHYKGDHTYVPVTRKGYWQFDMGDLIIGGHSTGFCAGGCAAIVDSGTSLLAGPTTIVAQVNHAIGAEGIISTECKEVVSEYGEMILELLISQTSPQKVCTQIGLCVFDGAHSVSNPIESVVEKQKRGSDLFCTACEMAVVWIQNQLRENKTKELILNYANQLCERLPSPNGESTVDCHQISKMPNLIHHSKQDFHLNTRAVHSEAGASRTNYLHQWVYGI

SEQ ID NO: 71428 - protein, 335 aa, Zea mays
  Clone ID: UC-ZMFLMO17235H07_FLI.pep
FWQSSQSKSLSEQVMEVPEISPMSEYLSTHDVILSVDGLKITRTDEWIKILNQGTTAKSRDPEFLEGSHRYVATSSTKGYCVPDSWIDASKNLWQIRDKLPCPDELIAFEKVICNVSTILAEKTSIGSDQKEVEGKYCLIAKDVVKLRRCGNGWHRTEDDESSCACFEDEHCLVPVLNPGFSWIEVSYARPYSLRCLQKGGNLLSSHTANSNFGQSPCEGSFVYVGDLSSAARSVRLSHYRPRWALLLFIADIPYILENGLSSLLHASAALAVINCLPVYFLDGEAILETTLSYVAWFTPRLQRRILKVCSVVWTGLLVITFSSICYSTVLHYGV

SEQ ID NO: 71429 - protein, 728 aa, Zea mays
  Clone ID: UC-ZMFLB73001F04_FLI.pep
ENDQAFVRVNVRSGTKSSRHEVVFQLDCWSSPYRVENRSMFLPIRFRQFGGDDHSWRNLLPNSSASFFLEDLSRRHLLEVLVDGTDPMNSMTYDINVVMDHQPLTNSDALKKALRVTVLKEGKLNVIQIIDWLPDNRNRGQITERMLSPIFQPSEVDYGQSSPDLDSEFHVTLELTELGISVIYHMPEEVLYLSVQQLLLAYSSGIGSGVNRLKMRMHWIQVDNQLPFVPMPVLFCPQKIENQSDYIFKFSMTVQTNNSLDFCVYPYVGVQVPENCVFFVNIHEPIIWRLHEMIQHLKFDRIYSNQPSAVSVDPILKIGLLNISEIRFRVSMAMSPSQRPRGVFGFWSSLMTALGNMEHMPVRIAQRYREELCMRQSALMNSAISNIQKDLLSQPLQLLSGVDILGNASSALSNMSKGIAALSMDKKFIQGRMRQDSKGVEDFGDVIRDGGGALAKGIFRGVTGILTKPIEGAKSSGVEGFVQGVGKGIIGAAAQPVSGVLDLLSKTTEGANAVKMKISSAIMAEEQLLRRRLPRAIGGNSLLYPYDGHKATGQAILHLAECATFLGQIDIFKIRGKFASTDAYEDHFLLPKGKIFLITHRRVLLLQLPMMTQRKFNPTKDPCSVIWDVLWDDLVTVEMTHGKKDPPDSWPSKLILYLKAKPSNSKEIVRLVKCNRGSDQASIIYSAIDKAYKAYGPNSLKEFLRWKVPRPYAPRNSSGRSIQDLSFG

SEQ ID NO: 71430 - protein, 303 aa, Zea mays
  Clone ID: UC-ZMFLB73295A10_FLI.pep
LHTSHQSPHGHTTPSCPHRAHTLSVSPSQSQRLRSSPESSSSHGGSPVPPPPAAGYVHRLRRGVLRVQDGRARPGDAGGDRLRLRQGGRLRLRLQGRALLRQRQQGGRLLLHLQQLLPEPQRHGRHLRLQRRRHAHRHRPQLRHLQVRLRPQQRRHRRWHGRWRGYRRWHGRWHRRRDRRWHRSRHGHGHRDGDQHRHRRRRRGRDPRERPEPTVRRHWRVRPVRGRQHGLQRRRRPARRRAARGGCPRSRRRRRRTSPPLGAVPWQLGAGGHDTRRRDPASAARQRGLWSMSGVSACAYLMK

SEQ ID NO: 71431 - protein, 428 aa, Zea mays; identical to SEQ ID NO: 62800
  Clone ID: UC-ZMFLB73299F12_FLI.pep

SEQ ID NO: 71432 - protein, 581 aa, Zea mays
  Clone ID: UC-ZMFLB73006C10_FLI.pep
RRYSHGEWRSKLYQRAHEHNDFRLNGTTCCQRRKAFKEKFQDKNCDETLNFRLNIPAKSAPSSGFSSPVQSPRRLSNVDFSSAAISIQDTNVWSARSLWSSDAMGSSPPCDSPDKFAGGQERSPLSSPLRSPVLKSRNPSAPPSPMHPKLFPENHVSRPDGNGSASFHPLPLPPASVSPKQTNASHQLVPKAEMPSVAGQWQKGKLLGSGTFGCVYEATNRHTGALCAMKEVNIIPDDAKSVESLKQLEQEIKFLSQFKHENIVQYYGSETIEDRFYIYLEYVHPGSIHKYVHQHCGSLTEAVIRNFTRHILKGLAFLHSQKIMHRDIKGANLLVDINGVVKLADFGMAKHLSTAAPNLSLKGTPYWMAPEVVRATLDKSAGYDLAVDIWSLGCTIIEMFTGKPPWSGLEGPAAMFKVLRTDPPIPDNLSPEGKDFLRCCFKRNPTERPTANKLLEHPFIQTLNHYSPHSVVHSFSGIKSPDTVHSSARDKVPWKSDSYMRGKHANGETSSARSSESLAYRLMTPLPNLGTNSLSPPPLSSASSSGSAAHTPNSMHFSVPYHQPSPLPKPNGKEAINLVSH

SEQ ID NO: 71433 - protein, 184 aa, Zea mays
  Clone ID: UC-ZMFLMO17180G09_FLI.pep
EISAIHLALDSEISPCNEEIVASSVVFELMTSAMACIVGVRGVPMLPKLFCLLSLLGEKILSMPPLPRLRSCSIVPCPRDLSSLRRRRIPAVILPIASASDLQSITRCSSSSFVATASICKAQMDKQFRKQIQINRFRQLTKMSSFWFFDRNFDIIHCPFGTLNLDFANDHGSFNINSMVTNIT

SEQ ID NO: 71434 - protein, 475 aa, Zea mays
  Clone ID: UC-ZMFLMO17030G08_FLI.pep
YARLQNLEAKKINDEKKAALAAQFAAEATLRRVHAAQKDDDMPPIEAILAPLEAELKLARQEIAKLQDDNRALDRLTKSKEAALLEAERTVQMALAKASLVDDLQNKNQELMKQIEICQEENKILDRMHRQKVAEVEKLTQTVRELEESVLAGGAAANAVRDYQRKVQEMNEEMKTLDRELARAKVSANRVAVVVANEWKDGDDKVMPVKRWLEERRILQGEMQQLRDKLAIAERAARSEAQLKEKFQLRLKVLEEGLRMSTSRTNVSGTRRQSIGGADGLSKANGFLSKRPSFQMRSPVSTTTTLVNHAKGASKSFDGGCRSLERYKGHVNGNGMNVSTDSSEDKDSNNSDEKCNEFASAESEDSVSGVLYDMLQKEVISLRKACHEKDQNLKDKDDAVEMLAKKVDTLTKAMESDAKKSRRELAAMEKELAAVRLEKEQDNRARRFGSSSGSASSSQLPPGRTLPRSGSARNM

SEQ ID NO: 71435 - protein, 308 aa, Zea mays
  Clone ID: UC-ZMFLMO17037F08_FLI.pep
FFFPESLHKFPRRGNSGVSSVQVQQESEGQKPVPQNSNQSGQNSAPATGMEASASGNGDATSNNSLNCAPCTSAPSSSSVVGLLQGSVSYRQDHPTSSGNGIYNGGNSGPAAKANSTNSMQSNGPASFPLPAPSASNGNMMPAPQHSSQMNSPTMPSSLPPMQTPASRPQEPEPNEPQSSVQRILQDLMMQSHINSVGPVGSNMKTANTVGLNGANSLAGNPMTNSPGIINGMGFGAMGGLGQQMRTAMGNNALAMNGRAGTMNHSAHDLAQLSHQQQQQRDLGNQLLGGLRAANSFNSLQYDWKSSQ

SEQ ID NO: 71436 - protein, 168 aa, Zea mays
  Clone ID: UC-ZMFLMO17039F09_FLI.pep
SKQRTGLLPDRNQLCSFTCPGISSAAGGWRRIHTRRNGSTSQSQEGWTTTVHTSSENQRTRERERSQNEAESLVPRTAATALEASAETEPAAPRPRLRPEPAGPPRRRRRGAAQHLPHHVHVLVLARAHLLPQPPQPGLANPEAGRDAEPGPPHRQHDAVPPVAHRQI

SEQ ID NO: 71437 - protein, 492 aa, Zea mays
  Clone ID: UC-ZMFLMO17040C09_FLI.pep
QQQYISQSIPHDRSMQQLYDSSHGTIHTSLSSGDRMKLCLQRTEEILDLALKLPGHGKHNLQLHASVKLRETGNIGLSESCATALPLPHEMMGHAAWKECSASLTQGSAVVDALSQKESIVDSPSKKTPSYGFNDYSKMTVFEVTGFPQPFQGLQKPKSVASHISNEVHEMDISSVHPHSWKPTPGVRAKSVLEIQAEERLETQREIALENTKVTTTTASGLSIHWVDLVETSGQQFGDQARPMCDKKNGNISQSNRSHLHDLLAREELIKSNANAGVIINSADDTSFPPLAPSITQSDAHIHDGADFIEFKGTRKISNRGKKPKGSAVKTPASHANVIPGPATDPAQVREPCSLRNIQVEEEQESANLQQLVPASSHAKGPMDQHIHGNNSSWQGSESPPSRGNELLKMTSHVSSHSTPNSEEYLFWEPREHAKQDKPRLQSPPSSVVNTRSAALDIQKKGKKGTKLSTSALGFKVQSTRIMMGEIAHVDE

SEQ ID NO: 71438 - protein, 541 aa, Zea mays
  Clone ID: UC-ZMFLMO17041C02_FLI.pep
SPPSATIAEATAPPQLVLFNSFTKREEPFQPRVEGKVGMYVCGVTPYDFSHIGHARAYVAFDVLYRYLKFLGYEVEYVRNFTDIDDKIIKRANERGETVTSLSSQFINEFLLDMTELQCLPPTCEPRVTEHIEHIIKLITQIMDNGKAYAIEGDVYFSVESFPEYLSLSGRKFDQNQAGARVAFDTRKRNPADFALWKAAKEGEPFWDSPWGRGRPGWHIECSAMSAHYLGHVFDIHGGGKDLIFPHHENELAQSRAAYPESEVKCWMHNGFVNKDDKKMAKSDNNFFTIRDITALYHPMALRFFLMRTHYRSDVNHSDQALEIASDRVYYIYQTLYDCEEVLATYREEGTSLPVPSEEQNLIGKHHSEFLKHMSNDLKTTDVLDRCFMELLKAINSSLNDLKKLQQKIEQQKKKQQQQKKQQKQQQQKQQQLQKQPEDYIRALIALETELKNKLSILGLMPSSSLAEVLKQLKDKSLKRAGLTEEQLQEQIEQRNVARKNKQFEISDGIRKNLATKGIALMDEPSGTVWRPCEPERSEES

SEQ ID NO: 71439 - protein, 739 aa, Zea mays
  Clone ID: UC-ZMFLMO17020C07_FLI.pep
SPHTHTRPLPSPPSPISPPPFDALPLLLAHTNQFEHPTPRPRSNPPEPPAWGPPAPLLESGGIRPPALLPRAVAVALAVCTTARRKEEAALVVGIRRRHCWCREEEEAYPMKATAPPAKRRRGPRLAVLALVFCSLLVPIAFLFNRFPAVYVTDERPQQEIDLPSFDRVVFENGGSVIEDVSKKTSRSTSVSHRGIDSDPSIVSTKPKAIVLRPPKIEQVLPPPKVEPNPEVKPVLVPVPVHQNKKINLDKIRPPRVQSADEVEKAKACQLEFGSYCLWSIEHKEVMIDTIVKRLKDQLFVARSYYPSIAKLKGKETLTRELKQNIQEHERVLSESIVDADLPSFIKTKLERMEQSIARAKSCTVDCNNVDRKLRQILHMTEDEAHFHMKQSAYLYNLGVHTMPKSHHCLNMRLTVEYFKSMPLDPNDSSAHKFNLPDNRHYVILSKNVLAASVVINSTVSSSEDTENVVFHVLTDSQNFYAMKHWFARNSYRESAVNVINYEQIIFENFPEFGTQQLYLPEEFRVLISSLERPTEKSRMEYLSVFSHSHFFLAEIFKDLKKVIVLDDDVVVQRDISFLWNLDMGDKVNGAISFCGLKLGQLRNLLGRTMYDQQSCAWMSGVNVIDLDKWREHNVTENYLQLLRKFGNNDDEASLRASALPISLLSFQHLLYPLDERLILSGLGYDYGIKEELVQNSASLHYNGNMKPWLELGIPDYRKYWKRFLTRDERFMDECNVSP

SEQ ID NO: 71440 - protein, 441 aa, Zea mays
  Clone ID: UC-ZMFLMO17023C10_FLI.pep
PQSSSANPGNSLGDVKQLEDEIYAEIRGRIKEDDIDAPLRKGRYYYYERTLTGKEYVQHCRRPVSTDAPITVHDVMPTGPDAPDEHIILDENVKAEGHDYYSIGAFKVSPNNKLVAYAEDTKGDEIYTVYVIDTESGEYVGQPLKGITSDIEWAGDDHLVYITMDSILRPDKVWLHKLGSDQSSDACLYHEKDDTFSLGLQASESKRYLFVESGSKNTSFIFYLDIPKQNKELAVLTPRVYGIDTTASHRGNHFFIKRRSDEFYNSELVACPLDNVAETTILLPHRESVKIQDFQLFDNHIAVYERENGLPKVIVYRLPAIGESIGQLQGGRAIDFIDPTYAVDPEESQFHSSVLRFHYSSMRTPPSVYDYDMDSGVSVLKKIHTILGGFNASNYVTERKWAAAADGTQVPMSILYRNDLVKLDGSDPMLLYGYGSYEVAY

SEQ ID NO: 71441 - protein, 353 aa, Zea mays
  Clone ID: UC-ZMFLMO17035A03_FLI.pep
KKTSKAHGGKSNPSWRKRNPDESALVAPNSVEQADVSYESKEVQNFTYQKQPVELGKQDTQLKFNVDAAAENSSAPVQTVPLSVGGAKQHSAANRQRRQHVKAQRNEASGYSNESKGREGKNDVVYQSATPVMDSNSSNHRNVPRSDVKNSGVVSHSRAWKPKTNSHPQDSSDGKIAVDGQVDSHGGRLEMNTSKDTITHLVTSSEPTKRSDDKEVSHSKHENLAREDGNQKGETEQEQANPTLRRQGQPNARYHRGGGSHRGRGGYDTGRPNHVTNVERRKGGSHLEYQPVGPQNKAADFQQSLSMEERTEGPPASGQAFRQRGHNRGLRPAGRFVQRNPASTPTTNSHQNE

SEQ ID NO: 71442 - protein, 406 aa, Zea mays
  Clone ID: UC-ZMFLMO17042E09_FLI.pep
GGSNPPHREAAKAIAKASARRVGRRRGRMARGLRGVRDDLSELGRHLLDIACFLHPLLNPAHTDSPPPTPTGRRRRARRSPSPHPAAPPSPSLLAGILSDLAEIGGSFRGGFSRSSPAPDHPAPDVLESQQAASSPSPRQPPPAAADQIADDVVGAARALAARPEAWIDFPVLALDEGSVISGIQRDHMESIEKLVPDLASLRGRLCPSYMDEDIFWKIYFRLLESNINEHNSEEDIRSVPNSVHHNNEIESDSPPHVCEIESVKSNQEGYQSSDGRAFPKTRSERSIDQWVFAKSKSEESMDQWSEIPSDVESFREGKRYLSSEELSDVDSANVVVMDKYMDSVLSDRRNLPYASSSVRRDSVRRKPASSADYSRRPPQPTPPASLSKKESWDVIEDSEFDILDS

SEQ ID NO: 71443 - protein, 594 aa, Zea mays
  Clone ID: UC-ZMFLB73247B01_FLI.pep
KDHFLCEDEACLAKKFVVFLSEAELKRHNAMEHGGRMSRSQRNAALQIPTSFIYRRNEQAQRRGRGRGRNALHDRFDSHISSSAQNGQATADRRLDSVSGSFQSLSIGSSSGGAEVGQGSRTGQVLEQLSFPPLLDPDIPDNNVDSFHDETSFPSLSEQQSRYALALSQSARGTARLGDESLFPPLPGSSGSNNNRGAGSVQQGLQSLAKSTLAARLQQRSKGPVKVLNTARPRPPENVEALSSSTQTWPTPDQGLVLSGYSQLRSGTQPTRENAMPTISSNTVWNPVAPNKMKHSVSTPNLVSGGSSAQVSLSTAYGSNKSQDPPQGNQTLPVPEDFRAANKTLVERMRSALGMDEDRYSAFKEIAGEYRQGIIGTLEYLSYVEQFGLSHLVPEMARLLPDPQKQRELADAYYTNTRFKSLQENGGGTSSQEGNRKKKGKGKAPVTESSAANDVNSALADNILETVRRLQSNQQAREGGAEVLSKDGYRPSKGVQPAAGSSSNLDSDTSSNTKSSGAKDNIGKGGGNKQPKKTAKFLRARLGDNSLATLDLSRPSASPERPERELQGPETGLPARGAWKNGGGQKLFSSNGRK

SEQ ID NO: 71444 - protein, 527 aa, Zea mays subsp. mexicana
  Clone ID: UC-ZMROTEOSINTE040D05_FLI.pep
QFWASMFLVFGAVYFLSLPVSSYLFSIAGCRLIRRIRLMTFEKVVNMEVEWFDHPENSSGAIGARLSADAAKVRGLVGDALQLVVQNSSTLVAGLVIAFVSNWELSLIILALIPLIGLNGWIQMKFIHGFSADAKMMYEEASQVANDAVGSIRTVASFSAEEKVMDLYKKKCEGPLRTGIRTGIISGIGFGVSFFLLFGVYAASFYAGARLVEDRKTTFPKVFRVFLALAMAAIGVSQSSTLTSDSSKAKSAASSIFAIVDRKSRIDPSEDAGVTVEALQGNIVFQHVSFKYPTRPDVQIFRDLCLTIHAGKTVALVGESGSGKSTAISLLQRFYDPDVGHILLDGVDIQKFQLRWLRQQMGLVSQEPALFNDTIRANIAYGKDGQATESEIISAAELANAHKFISSALQGYDTVVGERGAQLSGGQKQRVAIARAIVKDPRILLLDEATSALDAESERIVQDALDRVMVNRTTVIVAHRLSTIQNADLIAVVRNGVIIEKGKHDALINIKDGAYASLVALHSAASS

SEQ ID NO: 71445 - protein, 493 aa, Zea mays
  Clone ID: UC-ZMFLB73238E10_FLI.pep
VRAESPYISSIANGSVDHSNTSNNMGSDSSDAPHNSTQGQNSIPGDQQKGGNSKADKQYKVKQPRKNQSDNVSKPTRTDEASVDGVSDSSKGSTATEPNQSQSSSSSLPSSDLHDGGGAQVDELNTQKNQPSSQSKKPKKSTLSHQKSAPHDFYHGKKPGVSVESSSKNGAPDVTSNGRPKYQKPQSSHQPRQQNPVNHRPHGGSGNFQSSNSHRSNSCPAPAGHNGIPTAPLQFWPSGPPYHGPPINYPDMSRLNISEYPRGIHNNQGLHANYHPNHPGYNDYSYRPPTQPNMPSNMQNIGHWGANPGCSQPSSDPQGLVRYILGALEVLKTEKIPPTEQYIADCIWYGHGDANMPNFDVKKALQVAMQHQAVVKKKLGKMSFFLGKDENLWKCVNIMDDNAKYPKETLDAVHAFMSSAPGYSEIKSSQSRYQAATMLKKTCLKHLSLAEVLQVLNIIINTKKWFVPHSSGWQPLSFNIIVADATTATGGKA

SEQ ID NO: 71446 - protein, 361 aa, Zea mays
  Clone ID: UC-ZMFLB73019F09_FLI.pep
WDMMKLKSGRRPFYKDVKLVDCRSGSSLPHLAAQAKFAAMNMKTEDVNPRRPVQVRRSRWALGDVTEVLDHNSWRLGKITEVLKNDYFVIRLVGCIQPREFHISCLRIPHDRKQLTVGGRDHQAYEEVDHYAKRKAANICASTGARAVKRKLEASRIPPNGLVRRTGKEQKVSTHEFRQLTKNELPPKVSARNAIDEDDHFHRPLSSRYNDLPEKPLRTREEDECSVASCSANYTSGTKRPSSNTDTASSPPKKNKNAMVRCMKGLLDRLDSGSSKDVDTATQIQEIIETKRKEQQAADFKEIDLCLALAKECGATEETDEFFVASQLFASCKFQRHVFLGLSSNAGRMAWLKKHCKGWTF

SEQ ID NO: 71447 - protein, 149 aa, Zea mays
  Clone ID: UC-ZMFLB73240A04_FLI.pep
QDATKSNSKRLSKVPLLPTTLHSDICTGKKRKPYVQFQYGREGLVWSGRRYCICFTSPWRPPPRRRRRRGIRRRQRSRSERPRRRRWRPPRSRRRCGGLGRAPRRLGAGGGGRPCRAPSGRGGPGGPGSPPPASRCAPPRPRRPRPRRP

SEQ ID NO: 71448 - protein, 575 aa, Zea mays
  Clone ID: UC-ZMFLB73255F06_FLI.pep
RADLTIAPIPSTTTSPIPITSRSDLCSLTAASASHAARQQLGPELERRRGLGRCWGGLGSASLAMSGMSDSAGGVRAGAELMVQQFHLKVLHAVLAVRTPRPHAFAAPAAASFRRRDRWFHLPLHDPPPPPEAADRLDELVPGEPLVVDVLLSPAGSVGARGEVVERWTVACEPWPDAAGGEEVAVNRAYKHCFTLLRSVYAVLRVLPAYRIFRLLCANPSYNYEMGHRVDTFAEPFSRPQEAAMRSQRFVPVETQLGRLVVSVQYLPSLAAFNLEITSLSPSKIIPDYVGSPAAEPMRAFPASLTEATGSGFPPSNQQQRPHSWASPVFWSHTPAHQARFSPPPVFYASPTPSPPHFPPRLMRWESAPMPIPQVSERRSPAHRQNMLPPPSTRRGDMRAAGALQSPSESGRLIGRMEELRIADPYVTSSPRHKGKDTKDGSGRFSALSSCDSPRQDDLDDVDYHFDVDDVDTPVSQPRRIDGKETGDQVGSSSHKSQDAQVGSLVNLLRNASPLRNPSNSSQISRAESSEVASASSVTSRRTSDALEELQSFKEIRERLLFRSSAKHQEPPGKP

SEQ ID NO: 71449 - protein, 239 aa, Zea mays
  Clone ID: UC-ZMFLMO17283B02_FLI.pep
EGGADLAGRGHGCCRRDPAGGGVGGRQGVRGDAGLPPRAGAVRAAAVGVRPRRGRGGRGGARRAEPPDLPVPLRRPAVGAAAGVPGAAAPGLRRLPHGGVQGPPRLRRPPQGVPQLGAAPEAPRPPPRGRRVRRARARRHRRRGRRRQPPGRARRGRPRHRPPRVLPRPRRSRGALAGRGGGGRERQGGRGVGGRREEGGRRRRGGAHAAVHGGGTKITQMRNLLVIRASENHTFFVGF

SEQ ID NO: 71450 - protein, 1049 aa, Zea mays
  Clone ID: UC-ZMFLMO17273E11_FLI.pep
IRGRDAAFLGPDDNQYAILEEDRTGLNLFSLKAVATKEALENNAAVLEENTFADNAASATSTERQGPLQFTFESEGYRLSADNGLSITTKTDGKKFIKLKPNETVLQAHWQTTLRGPVVGILTNQRVLIASADLDILSSSSTKFDRGLPSYRSMLWVGPALIFSSATAISMLGWDNKVRSILSTSFPRSVLLGALNDRLLLVNPTDINPRQKKGVEIRACLVGLLEPLLIGFATMQQHFEQKLDLSEVLYQITSRFDSLRITPRSLDILTKGPPVCGDLAVSLSQAGPQFTQIMRCNYAIKALRFSTALSILKDEFLRSRDYPQCPPTSHLFQRFRELGYACIKYGQFDSAKETFEVITDHESMLDLFICHLNPSALRRLAQKLEESATDSELRRYLERILRVRSTGWTQGVFANFAAESMVPKGPEWAGGNWEIKTPTNIKNIPQWELAGEVMPYMKTTDAGIPSVVADHIGVYLGVMKGRGNVVEVSEKSLVKAIAAASSENTQPVSSASAEKSKAIPRGDSVGDTLARQLGVQIASSDEQAKAAEDFKKTLYGVVDDGSSDEDESTSKTKKIHIRIRDKPAAPTVDVNKLKEATKQLGLGPPLSRTRSLSGTPQDFNQAPTQPGGPAAAVSPAMPNSAIDLFGTNTLVQPQAPSSSTGPVIAGMGVTAGPIPEDFFQNTIPSHQLAAQLPPPGIVLSRMAQPAPGIEQGRPVPNQMMANVGLPDGGVPPQAPPQQSQFPPQQSQFPQQPGIPMDSIGLPDGGVPPQSQPLPSQGQFLPSQAQGFQLGIPAPSQPIDLSALEGPGAAKQAARPPAPTAVRPGQVPRGAPAAECYKMALAHLEQNQLTDALSCLDEAFLALAKDQSREADIKAQATICAQYKIAVALLQEIARLQRVQGAGALSAKEEMARLSRHLASLPIQAKHRINCIRTAIKRNMEVQNYAYAKQMLDLLYSKAPPTKQDELKSLIDMCVQRGLTNKSIDPFEDPSQFCSVTLSRLSTIGHDVCDLCGAKFSALSAPGCVICGMGSIKRSDALAGGPGPVPSPFG

SEQ ID NO: 71451 - protein, 315 aa, Zea mays subsp. mexicana
  Clone ID: UC-ZMROTEOSINTE119G06_FLI.pep
VTLKAIFKSHVLRVHKSKFAQFIMFYACSLHPEIGDGFANFLTDIFIDKDKNEDAITRVSAVSYVGSYLSRARFISVNIVVSVLKRLVDWCDYYCGHQLDNGVTSNPIKHQLFYASCQAVMYVLCFRLRSIMDYPNLKQQLFRMRIRDILVHPLQPLKVCLPSIVNEFLRQATAASLFHAPAISMHEDAVESDLSKAFGGLNRLDMFFPFDPYLLKESDRYIRPNFEFWSLVKTTYSNDNSDEDDEELGDIDAPGMNVGSLDDHFEIDFNSDDDIEYKMNKMSITPQRTFYHPLATNSESNRMPARIRPSVSPPS

SEQ ID NO: 71452 - protein, 645 aa, Zea mays
  Clone ID: UC-ZMFLMO17288E02_FLI.pep
NQQRLIEADASNASLNQPRIFAVSSDNKDIERECPSPTPRSECKESLMKNSVLTSAAPEILVRSSASASDTCKMEEFVNQQRPIEVDASNASLNQPPRCHIFTASSNNQDIERECPSSTPRSDSKEPFVDNLVLTSAVPGNLLTSSAVASDTCKMEIFNKKITLEADASNAPLNQPPLSSVFASSSGDDQDNVYGRPSPNPRPEGEQPLMGNSGLISTVPRNLTSTSASASDICKMEILNEKRTLEANPSNGLITQSPQPKVFLVPSPDILECEFSSETPRHEFKEPVADSSGLTSAAHENLGTKPHVHSPDAFVPPKSGALTGELGDTKSDFKGEETIQKEQHFGSESIAATRENLLIDPSSGVESIDVSDVLDSLMEERSGTSYMPGSIEDFLAEEEPQYSSPIALSPWGEPSYYQGDAVDSALWGTQDLINDMWSLLSPRPMLQPSSGIGTEGKETFDINEVAVTHVSSDYFQKGSMFGEENVNQANLSAAADWMLPEQVPSIPNGMSTSSVDESTIVLGSQPSTNQSLDWGGTTWSTGQNVSVYSNEKAEPSSKSYWEEPRKQETTKSSVSISGQAIANNKGLDPRDNAANRGSRLSHHHRGRYSQISESWLLSSSHSRSRSDRFGSGGSSRSTSKGQSRG

SEQ ID NO: 71453 - protein, 166 aa, Zea mays
  Clone ID: UC-ZMFLMO17020G07_FLI.pep
SIMAGCQPAVVSRRSPKLVDRFQIRQPADRDQGEHQVPDQARRRRRRRAGGGRAEATGGRDQGRARREAGVRVARHGRVLGRRDADGGDGDGALRAGAGVPRAVPGRDGQPAGHRHGLAIRPGAGPGAPAPGARLLRRAPRVPRLLRRRRRQGGRAEHHRDAGRRP

SEQ ID NO: 71454 - protein, 167 aa, Zea mays
  Clone ID: UC-ZMFLMO17022A11_FLI.pep
FVRSGRRRQRSSATTTTRYVESERIDVEPKVVVVVVARQHLRGRDERARLQAPGPAPQLPPPPRLRPGASSVANRWLTRSTSPGHCAVHMHACSPFSSFKRLKCARRGGDMTCIMQASTAKLLKETCSYIKSLQREVDDLSDRLSDLLSTMDHNSPAAEIIRSILRS

SEQ ID NO: 71455 - protein, 259 aa, Zea mays
  Clone ID: UC-ZMFLMO17289D02_FLI.pep
GEPRAIRMEAAMDLMRRMPPRSAETALNALLSLLPDHSLDLLSQVDLPLQVCMDKESLKEYILCEYNRDADSYRSPWSNKYDPPLEDGTVPSQGMRNLEVEANEVFSVYRDQYYEGGISSVYIWEDEDNGFIACFLIKKDGQGKRGYMQIGSWDAIHVVQVGPEEEGAAHYCLNSTVMLSLTTDNKQSGTFNLSGSIRRQMSMTLAVADGHLVNMGKMIEEMEGKLRNSLDQVYFGKTREMVCTLRPPPEVLNMRLPDS

SEQ ID NO: 71456 - protein, 328 aa, Zea mays
  Clone ID: UC-ZMFLMO17292D06_FLI.pep
SFQVRLVTEKDTSKPRGYAFIEYVHTRDMKNAYKQADGRKVDNRRVLVDVERGRTVPNWRPRRLGGGLGSSRMGGTDTDKKDSTREQQQGGRPRSEEPRRDDRRADRDREKSRERVRERDREERTRERSHDRTRDRDLRDEKHHHRDRERTRDRERGKDRERDHGRDRERDRRDRDKDRGRDYDRERDRGRSHDRHRERGRDRGERDYERTSHERDRGHMHERDADYGNGGTKHDKNLSSYGQDYGYGQYEQHKGHDAYGYSQDVRGHETEHSKRHEHEYYRVDSYGKMEANYQMPPNNAEPEGPEEGEAYEEGDYQYHRSGEHMKEA

SEQ ID NO: 71457 - protein, 296 aa, Zea mays
  Clone ID: UC-ZMFLB73120H01_FLI.pep
MLQRLTAVWYGRHRFLVVRWRRAGGVRHRRRRSVGGRLGGRRLRCGSVRRWGRLGRGRLGSRWLGAWSVRRWGRLGCRRLGGRRVRRRGRLRCRRLWGRGVRRWGRLGRRVYVGGVGLGVGGLLAGGLGLGVYVGGVGLGVGGLGEGVYVGGVGVGLWGVGAGVYVGGVGLGGVGVGVYVGGVGLGLGVYVGGVGLCSLGGFSGLGPCSLGGLCSFGGFSGLGPLVGGFSGFGVGVAGVGVGVYPYPASAWISTARLTATRASSRAALPLPPIILSLSHTLSNCKLFWLALAGQWR

SEQ ID NO: 71458 - protein, 551 aa, Zea mays
  Clone ID: 700101735_FLI.pep
YGDDWEGLFEAITGYGLGGSSMALFGRVGGGIYTKAADVGADLVGKVERNIPEDDPRNPAVIADNVGDNVGDIAGMGSDPFGSYAESSCAALVVASISSFGINHEFTPMVYPLLVSSVGIIACLITTLFATDFFEIKAVDEIEPALKKQLIISTIVMTIGIALISWLGLPYTFTIFNFGVQKTVQSWQLFLCVAVGLWAGLVIGFVTEYYTSNAYSPVQDVANSCRTGAATNVIFGLALGYKSVIIPIFAIAFSIFLSFSLAAMYGVAVAALGMLSTIATGLAIDAYGPISDNAGGIAEMAGMSHRIRERTDALDAAGNTTAAIGKGFAIGSAALVSLALFGAFVSRAAISTVDVLTPKVFIGLIVGAMLPYWFSAMTMKSVGSAALKMVEEVRRQFNNIPGLMEGTTKPDYATCVKISTDASIKEMIPPGALVMLTPLIVGILFGVETLSGVLAGALVSGVQIAISASNTGGAWDNAKKYIEAGVSEHARTLGPKGSDPHKAAVIGDTIGDPLKDTSGPSLNILIKLMAVESLVFAPFFAAHGGILFKWL

SEQ ID NO: 71459 - protein, 322 aa, Zea mays
  Clone ID: 700243150_FLI.pep
QYLNDGIIMRGMAMLSQVELPVSKQNTVVVGGNLIVNGSAGSGAATTVLRHQLSPVSSIEFMATAGLRSVIGGQMFRQISPHSTATSGLAVSLRDGSINLSNAWTRQLSDNTVGNIQLVLGDESSISVGWQKKDEKRTATGEVKFGTNFFGASAHYTHRFSSKSHARIAGRVGSTILDFEIGGGRRISEFSTVRMMYNIGIQGVSWKFELHRAGQKLIIPVLLSTDLNPLFVTSAFAIPSTLYFLLQTYVVKPYYLKREKQKTLEKMEGLSTQLTEARKAAEKAQKLLEPVSNRKKNRQLENNGLVITKALYGSRQKNQNEQ

SEQ ID NO: 71460 - protein, 310 aa, Zea mays
  Clone ID: 700084960_FLI.pep
LDEHQDQETNPLLLALDEQRPTKEQIVKQWYSQDVFTEAATGITEQSDTEDERESLQRNMKKMVTGKTEKVAKAQRLQRDDIEIVPAEPVRDEEDTSSSSGESDVSEDELDDYRKAEVLAYAKKMLRKKQREQILDDAYNKYMFDDEGLPNWFVEDEKRHRQPMKPVTREEVAAMRAQFKEIDARPSKKVAEAKARKKRVAMKKLDKARQKADAIADQNDINELSKRKMIDRIYRKAMPTKPQKEYVVAKKGVQVRTGKGKVLVDPRMKKDKRASGTCKKGKKGGKGGKGKGGQKGMRGKTGKKAGKAPS

SEQ ID NO: 71461 - protein, 532 aa, Zea mays
  Clone ID: 700170905_FLI.pep
FLASLKCLLLLCWAPAPQAEDKKAWMSDEEFARETLAGVNPLIIRRLTEFPPKSTLDPSKYGDQTSTITEAHIAGSLEGLTVQQALDSNRLYILDHHDHYMPFLIEVNSLNDNFIYATRTLLFLRGDGTLAPVAIEMSLPELRDGITAAKSTVYTPVPPTAGAEAWVWRLAKAYVNVNDYCWHQGISHWLNTHAVMEPFVIATNRQLSVTHPVHRLLLPHYRDTMNINALARQKLINAGGIFEMTVFPRKYAIEISSKVYGSWNFTEQALPDDLIKRGMAVPDPSSPYKVRLLIEDYPYASDGLAVWHAIEQWVTEYLAIYYPNDGVLQADVELQAWWKEAREVGHADLKDEHWWPKMQTVPELVKACTTIIWIASALHAAVNFGQYPYCGYHPNRPSVSRRPMPVPGSDAYKELEKNPEKFFVRSITAQFQAVVGISLLEILSSHSSDEVYLGQRDTKEWTSDAKAQEAFKRFGARLTEIEKRVEAMNKDPRFKNRYSAAQFPYTLLFPNTSDKGDNTGVTAKGIPNSISI

SEQ ID NO: 71462 - protein, 182 aa, Zea mays
  Clone ID: LIB3356-034-E1_FLI.pep
EITTTGLAQHILIDPLSSNLLFFLFEFPVKNTKKRNKQRAELCSSASSALGPGFALRTIIRVVLEFIEILVVEVAVEVVVEVAVELAVAAHSLELILVIILVLDHRLPARTTACRVTAPEAQSSSLGRRLHNKPSIGSGRRHHHRPEMGKGDGAWSHCRRCGGEAAQCERGGAVHSHRLYEV

SEQ ID NO: 71463 - protein, 205 aa, Zea mays
  Clone ID: LIB3592-001-D2_FLI.pep
RRRRAPPTRTLKAASHGAAARPMPRRQRPPATRSQPQSLSRPRRQAGSRQLQQRRGHRHHGDDVVAGRPEAVARGRAWAGAVGGVAARHDVADAGASRGGSGGGRRVPGAARARAARGPAGMGRRRGLRRALRGGAARGPLRLPVVEVGRGGDGVRPWLGPRRAALERPFHGEGIFFLGGGGGGGGGGGGGGILRRRRRGGGSRQ

SEQ ID NO: 71464 - protein, 616 aa, Zea mays
  Clone ID: UC-ZMFLB73080E11_FLI.pep
SDQFDEMVHPSDVLGPSIPGPTVLLVDCPTQYHMPELFSLHPLSCFYEDSPEQSGKKVNCIIHLGPSPVTRSVDYQNWMKKFGATQHIMAGHEIKNMEIPILKGSARISSHLNFVCPQLFPSSGFWSEQPSNDVMENDKSVSSEACGSVSAQNLLKFHLRPYAQLGLDRTSIPNLFTYKDFVEELVSEIPAIREVPEQVCKFWQNNVNDNNILTPTGNHMGEEQWINKKSDKVDDGTLFQEIVLRKHPRDNQEIPCCVEDATREDMEITFLGTGSSQPSKYRNVSSIYINLFERGGILLDCGEGTLGQLKRRFGVNDADEAVKGLRCIWISHIHADHHTGLARILALRSKLLKGVPHKPLLVIGPRPLERFLNAYSTLEHLDMQFLDCRHTLKSSVEAFLSENDTDPATPQLETTMFAPGTRMENYNRKPASPRDTTALANFKEVLQESGLEILYSVPVLHCPQAFGVVLKAMEKANSTGKVIPGWKVVYSGDTRPCPGLIDASRDATVLIHEATFEDSMKDEAIARNHSTTKEAIEVGTSAGAYRIILTHFSQRYPKIPVIDEVDMEKTCIAFDLMSVNLADLPVVPKVLPHLKVLFKDELVVDEAEEVQEAAVY

SEQ ID NO: 71465 - protein, 1030 aa, Zea mays
  Clone ID: UC-ZMFLMO17093A11_FLI.pep
FAKGSKRERRGRRRESKTRASMEFATGAMGTLLPKLGMLLQEELHLKNNVKEGIKSLTAELESMQAALVKVSDVPLDQLDPNVKIWANEVRGLSYDIEDRLDSFKVRMEGLDSTKRKTIMGFIQQTRGLVTKFKIRHVIFDDIKDFGSQVKEVKERYDRYKVHDVVANPIATTVDPRLLAMYNKVSDLVGIDEEAKELMNNLFEDGDEPAKKIKTVSVVGFGGLGKTTLVKAVYDKVKKEFDCSAFVSIGQKCDLKKVFKDVLYDLDKQNHENIIASEMDEKQLIDKLQEFLADKRYLVVIDDIWDISTWKLIRCALVESNPGSRIIITTRICEVAKKVGGVYNKKPLSLDDSKTLFYTRVFAGESMSLDNISGEVCNKILRKCGGVPLSIITIASLLVGKQREDWSKVYDYIGFGHEDNEVIGNMRKILAFSYYNLPPYLKTCLLHLSIFPEDHKIEKNSLIWRWIAEGFVIGREELGLFEVGESYFNELINRSMIRWIELSSRSKIRDGCGIHDMVLDLIRTLSGEVNLVTVSDVEQQCTTSSSYSPVRSISARRLAFHKKRSIEHNPGTEIGQVRSFNAFNCSGSRMPRLLSFRVLRVLALENCNFSAGNCCLGNIGKLHQLRYLGLVETSIRDDLLPGETGHLKFLQTLDVRRSGIKILPASVGELMKLMCLRATEGTRMMAEIGKLASLEELEVHSVDKSPNFATGLGQLTKVRVLEIHFDEMDESTEKALMESLRNLRKIQSLQIWSKKERTIDLGGLLEDWTPTPSDLRQLMLCGIHLPRRPSWIDPSCVPLLSYLSLTVQAVQVQDLEILGRLPLLSYLYIWSEGINCLSYTATSRDEFQNLRHLDTNLEIMCGQQGALPMVEKLTCRASMGKYVAFARSSMPFDDGSVVNPATVAEAELPVILPLDIGWPVNMPCLRGITYLLDYQDCSAKEWAHVETLLLHVRKIHPNCPPFRIKKNCRDKKITLIDAFSYLEAVKDVFKGNPSKYSEFFDLMIDYKRDRSLLLHALLSYLGIACIACQA

SEQ ID NO: 71466 - protein, 534 aa, Zea mays
  Clone ID: UC-ZMFLB73267B01_FLI.pep
TPSAREPSPMENPRPQAPALTPPMAPLPVPIHPPIAPIPVPPPRVPAPAPAAAASMASTPTPSTGDGGEAEYEVSDDHRAARERHERAVQELLQRRRAYAMAVPTNDSAVRARLRRLGEPITLFGEREMERRDRLRALMVRLEADGQVDRLLRAQEDDQAARIGEEEEEEQIEYPFFTEGSQELLKARLDIARYSLPRAKARIERAKRRHEDPDEDPEAEAELVVKQAGEFVLECSEIGDDRPLTGCSFSRDASMLATSSWSGIVKVWSMPQITKVATLKGHTERATDVVFSPADDCLATASADRTAKLWKPDGSLLMSFDGHLDRLARLAFHPSGKYLGTASFDKTWRLWDINTGKELLLQEGHSRSVYGVSFHPDGSLAASCGLDAYARVWDLRSGRLFFTLKGHVKPVLGVSFSPNGYLVATGSEDNFCRIWDLRKRQMLYSIPAHKSIISHVKFEPQEGYYLATSSYDTKAALWSARDYKPIKSLVGHESKVTSLDISGDGQKIVTVSLDRTIKIWSCRSSTQDNEMELD

SEQ ID NO: 71467 - protein, 667 aa, Zea mays
  Clone ID: UC-ZMFLB73018F06_FLI.pep
LDPDLSKDYLDLIQNRTKERSYTFDHVYAPGCSNSDVYKNISSTIAGVVQGLNATVFAYGSTGSGKTYTMVGTHSDPGLMVLSFRTIFELIKKDDSKDTFEVSCSYLEVYNEVIYDLLERSSGHLELREDPEHGIIVAGLRSIKVHSADRILELLNIGNSRRKTESTEANATSSRSHAVLEITVKRKQKGQYGNQVLRGKLALVDLAGSERASETNNFGQKLRDGANINRSLLALANCINALGKQNKKGLAYVPYRNSKLTRILKDGLSGNSRTVMVATISPADDQYHHTTNTLKYADRAKEIKTHVHKNIGTLDTHVEDYQRMIDNLQVEVSQLKKELAEKEHQLSVKPTEKTADSELSWLNVLSQETGENVQERINLQKALFELEETNKRNRMELQHLDDSIARHQVKEMDSTILQALTSRRQVILDNIRDNDEAGSGYRKDIEMNESRRRQLQDMIEEAISNNGNKTYLHILSQYRLLGMTNAELQIEMAMRDQVIHNQREALRSLWNILYGTGLNQKQILKLAAKQGLTVEGCPLPSSSPDVTTPPSCQPHRFPSFMPFPGPQSEPYSPSACFFQHGFSTMSLLKNQHETPTICRQEHLSSYYMMSGCSPYSGDGKQWSSGRPTAFFSTPEKPKEAQSQHNKEHSGSHDFSLHRKDLWSTERK

SEQ ID NO: 71468 - protein, 811 aa, Glycine max; identical to SEQ ID NO: 56081
  Clone ID: 700789744_FLI.pep

SEQ ID NO: 71469 - protein, 323 aa, Zea mays
  Clone ID: UC-ZMFLB73272B11_FLI.pep
IASTKKKAERSATPMSPRQAIACCHLLPSTDAPTHQPQPSEPQRRSSTSERPKKAKARVPAWGERSKDGTLDRVGVAPAGVTAVRLQASMAFVAGPPTTRRNARSQPALPTPQAETRGGEINLAGEAQDPAPSPTTMTHHLQKAPLAAADPPTPPIQAPRYKHKRATPPPQRAGRVRGRQRRRPATAMATRARALPPRASRTSHHGCGHKATCPCQQGGAADGDQPLDPASQPADPAFPAADQVAGHLQEEGGVEWVEEGREMSERAVPPPPSSLLVELPASCSGDGGGEDRRRWVRSMGSRPCRPEEDDVRAGKKLGYYCEF

SEQ ID NO: 71470 - protein, 426 aa, Zea mays
  Clone ID: UC-ZMFLMO17176C12_FLI.pep
AEGDMGMFFSKAEPPPPMVLVPPLFDYPPIAARTRMAVPAYELMFGKVSLHNLFEDYFDQAGNMTSRIMLKPLEDPHVDLIATVSAAADRNSGTEVKGDALFRWQRELDDPHTFVDLLVSTSNPLLQLRLCAYHPKYRIGAFGTLPLLMGNRVRSEDYGVMGVRYGSENLSVGASFVPISLSSEVPFGAWLVGRKGSLSAGVQYKPLSGSKYPMPFTELENWNYAISYGVGSTSPLSPSFIFSLELARSTQLTASFYQHLVVQRRVKNPFEDDQVVGITNYIDFGLELAARVDKDKVSGDGNSFQLAGSWQANKNFLLKGKLGPSTSSVALAFKSWWRPSFTFSVTAVNDHSKGTTSYGFGLRVEDLRRASYQRADPNYVMLTPSKEHLAPGVLREYGKRPMFQTQIDSGNYDHLPTELKPLGRIF

SEQ ID NO: 71471 - protein, 1097 aa, Zea mays
  Clone ID: UC-ZMFLMO17023F10_FLI.pep
HLLLLLLRNLLQRRATSCISGFSFHEKGRGNRRMPAKYLGALAEDRRPDLYRQVGCVTGILQAFDRRHHLASSHKRLLPPTGHAPSNPSKGGECTRYSPQVVLEKNSSKTWADSQRAPATELSQTSYSSSPSSSFSSLDGNRSTQQDLSSTDRMLFPERPFKSSPKLKSSFDSDNGLDYPDDALTKSKNMPIVQSSLPTLGIRNLVKDSIYKDSHELSVRISTEEEVKDHPSNCGDQPMQLNGPHHDSTQGKSKGLMDINESLRVLAKLREASWTPPESVHHARLSYDAPRFSYDGKEATSKLREVPRLSLDIKEGHLWNREIDSRLDPSLSSADRNSNTVTGSNAAFETQQEQPACKRLPSVVAKLMGLEELPEHNQSTASSHACNTVQENKQDAMLNSLSISYQYEHAPQQERNPDSTVRNLPNSKFPVQTAPWKQQERIVLPRKLPKGSKGAHGREPAAPWNQLKDLDFQQPNKDLRALKQILDSAKGLLENKKREEAFMPKLYNGNHDDQEMASANMRLNRNTNNMWMPEESNAESSFKSPIVIMKPSKSANLYSKVDSSVFPLGGSSDLPQPQTSNSTDRRKASTINRTAKGQYAKLSPRVPTSQPLVSCDRRSYGRNDDSSNNQKSSSLLVTESSTRRQQLPRNSSVSMQKNKNSTSPKLLQRKLDPERRARPPIPSAESNKSERQSGDRNNSETVSPRSKFRRKLVRPQGDDGMPIGLNNRTRSLYQHDNDMSIRSDGSISVASELDIISNDRSTGVNISNFEQGIGTPSGRNPQKVKTSYDANMDVPSVDPSAAISERPSPVSVLDSSFDQEDLFPTSRTPNSLAVDDERETLEEPWKPSVAIQSKNNKLANVASLLEKLQQLSVNKDEDAPPVDHIAFLCETESPDHRYVSEILLASGLLMKDLGSGQTGLQLHSSGYPINPDLFHVLEQRKAGWVSTPDGIHQSRSGTKSDPRRAHRKLMFDTVNELLLQKFEKETAVYALSSFTRAKDPPAKTFSGQQLPKFISSGIEELDMERSSISQKDSSVIPDAEILRRLQGWTSFSKELPGMVLEIERSIFKELVDEVVHGESADGPEMKAAGRRRRRLFA

SEQ ID NO: 71472 - protein, 518 aa, Zea mays
  Clone ID: UC-ZMROB73053D02_FLI.pep
IDRASMAAKRRARQPRTEDSKELGLNGGNEGSDEEEEESSKSDALKRAEQPSPPSPEDAEAERSGEASPQRSKPRGWVAMKTKTTTSKRVKKPSPASEKEYEAGDSGDLSPASDPLPDNIVDAGDNKMPATLKPGKKSSPTPQQEEERPEKRAAGSDGETVATSSPQRKKKSKRSVDKDRRKKNRNQIRKALTQEDEDHDTVMAEQEQSNTSLPQDEHAAREEEQEEKMAQQEHAGDTSHPHDKDMRSAHGEEQQDANQEHADDTSPAEDNHSVDEEEQQVEPIPQQEQPNDTSPPQEKNRAQEDEETGAQVNGKALEGRNAPSTKLRSFESEKKPAVERSWSYDDELKILNALVEHAQSHNGSLPDSSHVLANLTFDKIDANEDKLTDKIRKLRTRYRRWLLQGYTSSVSGSQLFKLSEILWGQADEDEQVEPTSRDFSVVSKLYPHLAKEVKAYAETHSSGDLIMGMVMTICDKKARDLDAKCKKQQIETFKLELGQANLTNELLSALSSQTHVKF

SEQ ID NO: 71473 - protein, 495 aa, Zea mays
  Clone ID: UC-ZMFLMO17061E02_FLI.pep
PRKEEEKLETLAMLQIRLSKIGSSDSGGAAASTAAGAGAPAAVGAAAALGGSILESVTVACPDHLVIADLPVAKSLGAVTASAAAATRAIGRRSRRPLGERVHICSRCEFPIAIYGRLIPCEHAFCLSCARSDSSCYLCDERIQKIQSVKMMEGIFICAAPMCLKSFLKKADFEFHVPDVHANLLQTNLEKEEERNESDAPNIPCASAGDTQRQSQMPEMSTARAPPPRPGVSQDREERSRYHQSREQTPLRPPPLSKPPFHGRHSYPPGDTQAENNPPQGFDRPYNWASQSRQESPGAVTPLRQESDHSTQDRQQLMANAPFMFPPIPPHQGNFMMPMNMNQPLISNAPFNYPLQQDGNPQYFSAPFQMPPLPDTGSDQGSMSSVQPPVGPMSFPEGLQRPWAMGMMGNPFHPMALGQGMVDGAGDPQGGGGLAFMQAGFGGMPDGSMNTGMPDRGDGRGVRAQMPTPMQMQMSLPPPPPTQPPSGSQQTFNRT

SEQ ID NO: 71474 - protein, 378 aa, Glycine max
  Clone ID: 700843977_FLI.pep
NIPKELEGLHEKYSSTCRLFEYQELVSATSNFLHENLIGKGGSSQVYRGCLPDGKELAVKILNPSDDVLSEFLLEIEIITTLHHKNIISLLGFCFENGKLLLVYDFLSRGSLEENLHGNKKNSLVFGWSERYKVAVGVAEALDYLHSKDDQPVIHRDVKSSNVLLSENFEPQLSDFGLAKWASTLSSHITCTDVAGTFGYLAPEYFMYGKVNDKIDVYAFGVVLLELLSGRKPISRDYPKGQESLVMWASPILNSGKVLQLLDPSLGDNYDHEEMEKIVLAATLCIKRAPRARPQMNLISKLLQGDAEAIKWARLQVNALDPPEMLDDEACPPSNLQSHINLALLDVEDDLLSMCSVEQGLTLEDYLRGRWSRASSFD

SEQ ID NO: 71475 - protein, 337 aa, Zea mays
  Clone ID: UC-ZMFLMO17279G12_FLI.pep
ILCKLMGEWRLMDELFVLRAIYLLGSGDMLQQFLITIFDKLDRGNSWDDDFELNNLLQESIRNSADKMLLTAPDSLVVSLAKYDTHNGEEGLSTSKKGRALGFGIDALDMLNFTYKVSWPLDLIINTEALKKYNQVMGFLLKVKRAKFALDETRKWMWKARGRTTHNFKQHLIVAQKLLHFVDAFHQYVMDRVYHSAWTELCDGMTAATTLDEVMEVHEAYLSSIQRQCFVASDKLWALIASRVKTILGLALDFHNVEQTLSTGGTASAVRTRCEMEIDRIEKQFDECVIFLLRILSFKLNVGHFPHLADLVTRINYNHYFMSDSGSFSAIPGSRPR

SEQ ID NO: 71476 - protein, 72 aa, Zea mays
  Clone ID: UC-ZMFLMO17202F06_FLI.pep
SSWVTAEVILLGRIAAQSQRALDNLCLHEALVLETTIFNFLWGNLFDSNKIFQVDSYKLDQFDNLVSVIVKL

SEQ ID NO: 71477 - protein, 206 aa, Zea mays
  Clone ID: UC-ZMFLB73304H10_FLI.pep
NMKKLEEWSLTVEESQVVLPCLKSLQIQWCPKLKALPEGLKHVALCELHVEGAHSLTEIKDLPKLSDELHLKDNKVLQRISNLPMLRSLIIDDCSKLKHVAGLDALQHLRLVFPPSTETFYFEELVIFWSVAFPRWLELLIQKCKGLRRFELQCGLSLLRSCLDGGKNWHLVQQIPEVRIISCDGKRYFRYNKSRRIYETNAQSEE

SEQ ID NO: 71478 - protein, 289 aa, Zea mays
  Clone ID: UC-ZMFLB73369G08_FLI.pep
KHRNLVSLQGYSLSPVGNLLFYDYMESGSLWDVLHEGSSKKNKLDWVTRLRIALGAAQGLAYLHHDCSPRIIHRDVKSKNILLDKDYEAHLTDFGIAKSLCVSKTHTSTYVMGTIGYIDPEYARTSRLNEKSDVYSYGIVLLELLTGKKPVDNECNLHHLILSKTASNEVMETVDPDVGDTCKDLGEVKKLFQLALLCTKRQPSDRPTMHEVVRVLDCLVNPEPPPQPQQQQQKAHAHHQLPPQPSPPAYVDEYVSLRGTGALSCANSSSTSDAELFLKFGEAISQNMV

SEQ ID NO: 71479 - protein, 207 aa, Zea mays
  Clone ID: UC-ZMFLB73297H03_FLI.pep
KAGAEMAGESCVPKPLFGGAIFTTFPDRFQDVSNIREVPDHQEVLVDPSRDESLIFELLDLKGEVDDAGSALWFLQDIANEQDAGDNLVVEHSGTLELAALHLGEAPAVAATAVGQLAVSKGRQGREAQNIVRIYLANIRLKNAATDVLITAYEPLLINPLSESAAAVAAGPAIPAEQVGCLPMSEVFKLAVTNFNVRDWNLFDGGP

SEQ ID NO: 71480 - protein, 325 aa, Zea mays
  Clone ID: 700354479_FLI.pep
IDFGLSVFFKPGDRFTEVVGSGCYMAPEVLKRSYGPEIDVWSAGVILHILLCGFPPFWGGSDEKIAQSILRGVINLQKDPWPKVSQSAKDLVTRMLDPDPCTRLTAKQVLEHPWLKNADKASNVSLGEVVRSRLKQLSSMNKLKKKALGVVAMNLPMEEIGKFKEMFHTMDKNKDGSLSLEELKEGFRINDHPVPEEEIKMLLQAGDIHGTDTLDCEEFVTVLLHIKKMSNDEYLPKAFEFFDKDGNGFIEMSELMETLSDGELKPDEQLVNDIIQEVDKDKDGRISYPEFELMMKSGSDWRNASRRYSTENFSSLSQKLCKDTL

SEQ ID NO: 71481 - protein, 317 aa, Zea mays
  Clone ID: 700473501_FLI.pep
DRDRHPWTSTRLASNIITHFIKPIHTNRKYTTHSLSLGVRETWRGSILHRRGNGCTVLRPLPTPSSVQFPGAGLPPNPFLRSSMKLEERSLMLDGTLGACGIRGRSPLRLGTRAPLCSSAPATDDACRFRNSDFFLSNEAPPLPSCAGRSSLIVTVLLVTFVSSAFATAGAAASASTGPSAAAAPSCFRSGSGTPLAVVAALSSKTVVATPLGPPSPWPPSCWKSNSALSMGMANSSSSMPPSPPPPSVGGGGWPPAPLLLGPSAMLFILLTDRFLARNVRNRSHMPPAALVAGSTSPPPLPFSAITARLLYLYLAA

SEQ ID NO: 71482 - protein, 389 aa, Glycine max
  Clone ID: 700563071_FLI.pep
LTLYKKSRKDVVSSIIRLLALCAVFLSNIRVRVCAFLFLFLCSFRSFFDFSGEKRMTSVARQPTWKERENNKRRERRRRAIAAKIFSGLRMYGNYKLPKHCDNNEVLKALCNEAGWTVEADGTTYRKGCKPPVERMDIVGGSAAASPCSSYHPSPCASYNPSPGSSCLPSPRASPFPPNPNADGNSLIPWLKNLSSGSSSASSSKLPQLYIPNGSISAPVTPPISSPSSRKPQIRADWEDQSNCPTAWGGLAYTFVPSSTPPSPGRQVAETDWFSKIRIPQGGLAPTSPTFSLVSSNPFGLKEDAMVGSGSRMWTTPGASGTCSPAVAAGSENTSDIPMAEAVSDEFAFGSSSSGLVNAWKGERIHEASFGTDDLELTLGSSKTRLLHK

SEQ ID NO: 71483 - protein, 644 aa, Zea mays
  Clone ID: UC-ZMFLMO17340D09_FLI.pep
SKHPSFQRGDNPRSASPSPPNRNCVRSRKLPGSYQRRKGFYSLAWRNRTRGRATRREREIERERERAGYPSVSPAAMTSCSGNATVACRDDAQPHGDAPCVIVYPLLAKTGEVHIPVAGDEAPAVPVLTSKSPGRLATAVKEALSVSLGAAFPMTPLVSSSDAHAEARSILGLALPMILTGLLLYLRSMISMLFLGRLGGLALAGGSLAIGFANITGYSVLSGLAMGMEPICGQAFGAGNFSLLGITMQRTVLLLIAAAVPIGGLWMHMRPLLLLCGQDAGIAAVAETYILASLPDLVLQAFIHPVRIYLRAQSINLPLTVCAALAIVIHLPINYVLVTVLGLGIRGVAFASVLANLNLLLFLVAYILFKSVHKRTGGFLLSRESFRGWGELVSLALPSCVSVCLEWWWYEIMILLCGLLLNPQATVASMGILIQTTSLIYIFPSSLSFGVSTRVSNELGANRPEEASRAAAVGLMLGFAFGGLASAFAFLVRNVWASMFTADPAIIALTASVLPILGLCELGNCPQTTGCGVLRGSARPKDAASINLRSFYLVGTPVALVLAFWLHYDFKGLWLGLLAAQATCMVRMLLVIGRTDWACEAKRSRQLTGGLVAEDSDDKAGGDEKSRLLGDTDIEQANAHSDRC

SEQ ID NO: 71484 - protein, 300 aa, Zea mays
  Clone ID: UC-ZMFLMO17341B03_FLI.pep
AEAMESPFRADVVKDKAALVTGGGSGICFEIAAQLARHGAQVAIMGRRREVLDKAVAALRSQGLRAVGFDGDVRNQEDAARVLAATVAHFGKLDILVNGAAGNFLASPEDLTPKGFRTVLEIDTLGTYTMCYEALKYLKKGGPGKGPSTGGLIINISATLHYSASWYQIHVSAAKAGVDSITRSLALEWGTDYDIRVNGIAPGPIQDTPGLRKLAPEEMSKGLREMMPLFKFGEKRDIAMAALYLASDAGKYVNGTTLVVDGGLWLSHPRHIPKEEVRELSKVVEKKVRASGVGVTSSKL

SEQ ID NO: 71485 - protein, 208 aa, Zea mays; identical to SEQ ID NO: 61723
  Clone ID: UC-ZMFLMO17344A01_FLI.pep

SEQ ID NO: 71486 - protein, 312 aa, Zea mays
  Clone ID: UC-ZMFLMO17425E12_FLI.pep
RLRSRRSRSSQHIHPTSLALPTLPSRPSHHRRRPPCMAYYSGGGKLSAVDAILAEAADLVALEQVAKLNTAHLDDDSALPSSLEARFRKLKSLPSPAAVPPVSTLARSATAPRPAPALPGPDPPAPAPPVHHPVHEDPPPGDAETKGGGSSPRQARAPAPAPAVHADDAEDLDQLFGSAPRGRPTLRERNRGSDSSSVSPSPPPPPRQACCFGFSPKKPLRRAPSAKGKKKEVCHGSRDVLGVDADEWGDENRRIATELREQQRRLRKALEDQVQVSRETAKMARWVKQASARMTHAEAIDDLLSDCEDDLK

SEQ ID NO: 71487 - protein, 156 aa, Zea mays
  Clone ID: UC-ZMROB73015C11_FLI.pep
TLWTRVNITVANRITWPRGPHRSVPPVPVGVAVAAATVATAVAAATTTVAAAATVAAATAVAATAITAPATAVAAASTATTVPTAAASTAAAGLGLVDGDVAAVQLLAVHALDGVPHRLLRGEGDEAEAAGPLRLPIEDDLGLEDLAVGAEGVVEG

SEQ ID NO: 71488 - protein, 259 aa, Zea mays
  Clone ID: UC-ZMROB73015H02_FLI.pep
VRHVYLLKGPRAEPGWHGHGGVRAKPADRPRRSVSPAGHRRRRRGHPRRRHSGLPERALGPAPDALAQPEREPGLLLGRLVLLLLLQVRPCPCLGGRRHRRRHVVGHAAECRAARQALVVADAPHVAMVRRRRGSHPDHRPRGPCLRVGRDHRPGRCRRRRHRHRRRRHVAVGDGERRQGLSNGGIRRAVGPRLVAALDGRPPPGAPPRLQVRQDRVGRHRCRLQQLMGVGVGEGSLAFDHGLHLPLRPRVCLLPRQPA

SEQ ID NO: 71489 - protein, 345 aa, Zea mays
  Clone ID: UC-ZMROB73017C10_FLI.pep
YEPTRDCSQGLCSMYCPQWCYFVFPPPPPAFDIAGPGGGGGDDDSSGPTFSPLVIAIIGLLASAFLLVSYYTVISKYCGTFSSLRNMVFGSRRGRGRGRGGGGGGGGGGDSGAQVPWGAMPPDGLDETLINKITICKYKRGDGFVDSTDCSVCLGEFRDGESLRLLPKCSHAFHLPCIDTWLKSHSSCPLCRCNIAFVTVGVGAVSPEPEPERRAPREDRDWRRDNPELVLTVGGPSSDPVRGAPQSQSQNAVSGSGGDDGQDALARKDCPERSEEGSGNAEIKEDCALPAVRAASSLSDTHREGRMSIADVLQASLEDELTMARESGLLAGSSGRCPCHGEHSK

SEQ ID NO: 71490 - protein, 624 aa, Zea mays
  Clone ID: UC-ZMROB73017D06_FLI.pep
PQPRPPMSAIAASSAAAAAASNSDEEENYEEYIPVAKRRAMEAERLRQLRLSKSAPASAVSSLPMPPPPPLLPAQTSVPDAAAKPSLLVKATQLKRAAPEVTATEQRIQQEKEVIENLSDNKSLRSVREIAKGIIYTEPIQTGWKPPLRLRRMPLAKANEFRRKWHIIVDGDDIPPPARDFRDLRLPEPMLRKLRERGIVQPTPIQVQGLPVVLSGRDMIGIAFTGSGKTLVFVLPLIMVALQEESLMPIVPGEGPFGMIICPSRELAKQTYDVIEQFLIPLKEAGYPEIRHLLCIGGVDMRTQLDVLKKGVHIVVATPGRLKDLLAKKKMNLDNCRYLTLDEADRLVDLGFEDDIKEVFDHFKDQRQTLLFSATMPQKIQNFAKNALVKPVTVNVGRAGAANLDVIQEVEYVKEDARIIYLLECLQKTPPPVLIFCENKADVDYIHEYLLLKGVEAVAIHGGKDQEERQNAIDSFKTGRKDVLVATDVASKGLDFPDIQHVINYDMPAEIENYVHRIGRTGRCGKTGIATTFINKNQTETTLLDLKHLLKEAKQRIPPVLAELNDPLDDEEIIAKESGVKGCAYCGGLGHRVSDCPKLEHQKSMAIAGSRKDYFGGGGYRGEI

SEQ ID NO: 71491 - protein, 228 aa, Zea mays
  Clone ID: UC-ZMROB73017E02_FLI.pep
HCSRSFNGVLLLLLSLPDSFSLPLNRWARYAVFLPRSPAAASSPARSEYSAPILAAGRGSSRFFAHTPARSEYSAPIRVGPVRVRDLRAGVPARPEPADAPAAAQGAVEAAEAGGRGGGAEARVPVPGAELPAPRPLARAGRPRRHQEALPPQAQRPPPVGLRLLPHCVGINCLAYLDGSIFSTSDHLFCGSRDGTLKRWELNNGDASFSGTFESHVDWVCFFLFLIK

SEQ ID NO: 71492 - protein, 347 aa, Zea mays
  Clone ID: UC-ZMFLMO17132F03_FLI.pep
GRQPSRAEPCSLLQLPKSHSAMAGTCAHVEFLRAQPAWALALAAVGLLVAVRAAARFALWVYAAFLRPGKPLRRRYGAWAVVTGATDGIGRAVAFRLAASGLGLVLVGRNQEKLAAVAAEIKARHPKVPEVRTFVLDFAGEGLAAAVEALKDSIRGLDVGVLVNNAGVSYPYARYFHEVDEELMRTLIRVNVEGVTRVTHAVLPAMVERKRGAIVNIGSGAASVVPSDPLYSVYAATKAYVDQFSRCLYVEYKSKGIDVQCQVPLYVATKMASIRKSSFMVPSADTYARAAVRHIGYEPRCTPYWPHSVVWFLISILPESLIDSVRLGMCIKIRKKGLAKDAKKKAL

SEQ ID NO: 71493 - protein, 318 aa, Zea mays
  Clone ID: 700548828_FLI.pep
GQGAIWWGWFHNHTLNYTRPHLVELMYSTNVVISNLTFKNSPFWNIHPVYCSQVLVRHVTILAPLNSPNTDGVTPDSSTNVCINHCYVRNGGDVIVIKSGWDEYGISFAQPSSNISISDITGETRGGSGIAFGSEMSGGISEVRAVGLRIVNSLHGIRIKTAPGRGGYVENVYIADVSMDNVSMAIRITGNYGEHPDDKYDSTALPVISNITIKDVVGVNIGVAGILEGIQGDNFSNICLSNVSLSVQSAHPWNCSLIEGYSNSVIPESCEQLRSNCRQTSICYDGSSSSVMSVQQPRHTSPTSRLLDLFTGVGFILV

SEQ ID NO: 71494 - protein, 432 aa, Zea mays
  Clone ID: UC-ZMFLMO17072F09_FLI.pep
KPTRPVLKVRKPRALVDITPAVSSALLMNELQWIGLIVKPIDYSLKGGILHIDAGAELKIEESQMIEIEIYVSDMECANSANSSIKAGKVEKVPIENGKIELPDWASDVTTLVWFPVRAIDDTIARGESLVSQKQSVVDGMRMIALKLEFGVFRNQVFERTIAVHFTNPFHVSTRVVDKCNDGALLLQVILSSGVKATLHVKDVRLDLQSGFDHLGKGDGRPALSLFPLVIAPSSKAGILFMLRLSGTKDVDDAENADSTLNITYGISGDRKTGAHSPIPVKSGDSEELVFKIALRLKRPVLDPCVAVGFLPFSTDCLRVGQLVNMRWRVERLKTPEDASISIDEILYQVEANPQNWMVAGRKCGHVSLSNEQGSRMEITVTCVPLVSGYVHPPQLDLPEVGEANISCNPAGPHLVCVLPPAISTSYCIPAI

SEQ ID NO: 71495 - protein, 198 aa, Zea mays; identical to SEQ ID NO: 47609
  Clone ID: UC-ZMFLB73114B07_FLI.pep

SEQ ID NO: 71496 - protein, 291 aa, Zea mays
  Clone ID: UC-ZMFLB73238B09_FLI.pep
GAPAAGLAPRPPARPFPIPWTPNCLPPLPVRLSRLQHFHPRAAVAGASRAAGRPVGSAAAKMNDADVAKQIQQMVRFIRQEADEKANEISVSAEEEFNIEKLQLVEAEKKKIRQEYERKEKQVEVRKKIEYSMQLNASRIKVLQAQDDLVNKMKDDAMKELLLVSHNHHEYKNLLKDLIVQGLLRLKEPAVLLRCRKEDHHHVESVLHSAKHEYASKADVHEPEIFVDHDVYLPPAPSHHDAHGQFCSGGIVLASRDGKIVFESTLDARLEVVFRKKLPEIRKLLFGQTAA

SEQ ID NO: 71497 - protein, 301 aa, Zea mays
  Clone ID: UC-ZMFLB73271E07_FLI.pep
GRHPSPCPSRVGLFAELAEGQPDMSSSVGGGSAGGGGVDMVSLLEKAKDLDQLKKEQDEIVADINKIHKKLLASPEMVDKPVDTILLKLRGLYARAKELSENEISASNALIGLLDGLLQSGASTAQKKKIEVGEQKKKRIKSDTDSARFSAASMRNQLDQAASLKGEQVAARVKSDDEKDEWFVVKVIHFDKETKEYEVLDEEPGDDEESTQKKYKLPMSYIIPFPKKGDPSSAPDFGQGRQVLAVYPGTTALYRATVASHRKRKSDDYILEFDDDEEDGALPQRAVPFYRVVALPEGHRQ

SEQ ID NO: 71498 - protein, 271 aa, Zea mays
  Clone ID: UC-ZMFLB73282F11_FLI.pep
LVNITTTMCWKLIAKHVQTAIWVKPEDESCRQKNVDMNLLSICESNDNISPSWKIPLMNCVKLNKDKSNIQKLPSRSDRLSFYSKSLEIIGVAPERFEKNNQFWKNQVHKYWSFLHVEKTSIRNVMDMNANYGGFAAALSSDPVWIMNIVPYTMMNTLPVIYDRGLLGSYHDWCEPFSTYPRSYDLLHAFHLFSHYKRRKEDCLLEDIMLEMDRIIRPQGFIIIRDENDTLSRIINLAPKFLWDVTTHMLENEESGTDQVLFCRKKFWAIV

SEQ ID NO: 71499 - protein, 94 aa, Zea mays
  Clone ID: UC-ZMFLB73288B03_FLI.pep
SIKLIAGSKTFKEITRSPTPWFTLRRAKNSPLQGQGRAYMYGLAVSYSFRASVPAAATAAGAFVLVPRVFAMYRSLPRPSAAGCRGPIRRTPSS

SEQ ID NO: 71500 - protein, 284 aa, Zea mays
  Clone ID: UC-ZMFLMO17335A04_FLI.pep
GGAAQARRAAHLEPEHAAAVPRAGHGPRRRRARQEAVDAAPLVAAHGGQERAAGERVAQDGADVGGEELDVREPAAVQPLGVAGAEADHRGAARRPEAVRVHRVHQQRRRPELGVAAAAGEEPQRRLVGPVGGHVRVLGAHQLEPLLQPMHQLPRDAHPPVGRRDAEAKNVADSGEGGRARAALAGGDRLDGSPDEGDDPAVRPGRLSYQHEVVRRVADARDGVAEQVGVQRHPAGGGGRADLALPLDGLRAVAVRLGIVVPSFWWSAVLNHAFIWLLHVVVLS

SEQ ID NO: 71501 - protein, 479 aa, Zea mays subsp. mexicana
  Clone ID: UC-ZMROTEOSINTE119A03_FLI.pep
LWVAQALLRKGSVKTVSKRILIFTNEDDPFGTITGAVKTDMIRTTLQRAKDAQDLGLSIELLPLSPPDDQFNMSLFYADLIGLDGDEMTEYLPSAGDKLEDMTNQLRKRIMKKRRVKTLSFAITNDVCIEVNTYALVRPTTTGTITWLDSLSNLPLKVERSFICNDTGALLQDAQTRFQMYNDTIVKFSVRELSEVKRVASHHLRLIGFKPLDCLKDYHNLRPSTFIYPSDERIFGSTCVFVALHSSMLRLGRFALAFYGNPTRPQLIALVAQEEVTSSGRQFEPPGMHMIYLPYSDDIRYPEEVHVTSDDAPRATDEQIKKASNIFKRIDLINFSACQFANPALQRHYGILEALALGEDEMPDIKDETLPDEEGLSKPGVANAIEEFKTSVYGENYDQEEAEAAAGKASRGNASKKRKEVTDAAAQISAAYDWAELADNGKLKEMTTVELRSYLTAHDLPVSGKKDVLISRILTHLGK

SEQ ID NO: 71502 - protein, 300 aa, Glycine max
  Clone ID: 700891711_FLI.pep
AIDIWSIGCIFAEMLTGKPLFPGKNVVHQLDLMTDLLGTPPPESIARIRNEKAKRYLNSMRKKQPIPFSQKFPNADPLALRLLERLLAFDPKDRPSAEEALSDPYFTGLANMDREPSTQPISKLEFEFERRKLTKDDVRELIYREILEYHPQMLQEYLRGGDQTSFMYPSGVDRFKRQFAHLEEHYGKGERSTPPLQRQHASLPRERVCAPKDESKQNNDSEKPSGSNLQQSPPGSDETGAQNGTSKPNYSARSLLKSASISASKCVVLKQNKDPEQEPITEVNDEAVDGVTGEIAALHA

SEQ ID NO: 71503 - protein, 352 aa, Zea mays
  Clone ID: UC-ZMFLB73280G11_FLI.pep
PFGSNGGSQRNVRGRHDHNPIHLGHNPGVACATSSTHGPPHHANVIGPQSTAVPQNRAYFSIPPRVTAPGSDGNCSMVFREGTYYSAPQRTNINAPPVLAPPGSSDSLHFVHGGYAPRAAPPNSISTYPAPAFATPNNSVTVTHEPDIPCYRPAVPGYPPATSAAAAAASVHAEGAAASSRHLGHVALGSSGSARSRRLRDSYHAFRPLVIEENNLRGPATERFMMLNQLFIHESREDSDPHWDMRLDIDDMSYEELLALGERIGNVNTGLADEKLSSCVTEIPCCSSARTHDDNESARCVICLEDYKFEDSVGKLKCNHKYHADCIKKWLQVKNACPVCKASAADDGGGTE

SEQ ID NO: 71504 - protein, 424 aa, Zea mays
  Clone ID: UC-ZMFLB73346B09_FLI.pep
GSARASNHAGSNMTSDNQSHQASQSVGAAGSHDGGNVQGQDPERSTPEGGTNTSHDQGQQSSTGAEGSQVPLRRNSGHGWVTSAASAFDAAKDIMEALRSKHTNLANELELLLSEIGSRFVTLPEERLLAVVNALLHRCYKYPTATTGEVPQSLKKELSGVCRACFSQDAVNKHVDFVKEYKQDFERDLDPESATTFPATLAELTERLKHWKNILQSNVEDRFPAVLKLEEESKTLRDFHVVDIELPGQYFTDQEIAPDHTVKLDRVGPDIPIVRRHGSSFRRLTLIGSDGSQRHFIVQTSLTPNARSDERMLQLFRVLNKMFDKHKESRRRHLAIHTPIIIPVWSQLNQAVSGQLSPEAIVELRLQAYNEITKNIVNDNIFSLIYAQDSANWQLPVDLQETICNPSGSLLLHVVYAADWRQGS

SEQ ID NO: 71505 - protein, 139 aa, Zea mays
  Clone ID: UC-ZMFLB73108G12_FLI.pep
GSLGIQVEDKDVSSSQVLGGTQDLSSKKPQEDNVNIVPIVPVYVNDGLMMPNSVDDEASLPLEETNPAEVLQHIGAGEENPCPAQEFESIGAGGEEELNLLRSMGWDENEDVQPLQQEEIADCLKQNVRLQQKLQECKG

SEQ ID NO: 71506 - protein, 472 aa, Zea mays
  Clone ID: UC-ZMFLB73106D11_FLI.pep
GLLSAMSDRQPSEEPEEQVDLEGDDDGMDDDDAGYRRRGSRDDSEEPEEDDDNDERHGDADDDAGMEPEPAGSKGGDDTGKGPDVAGGGPEDEEERSKWDDMLALPPHGSEVFIGGLPRDITEEDLRELCEPLGEIYEVRLTKDKDTKENKGFAFVTFMDKEAAQRAIEDVQDREFKGRTLRCSLSQAKHRLFVGNVPKGLSEEELTNTIKGKGPGVINIEMFKDQHDPNRNRGFLFVEYYNHACADYARQKLSSPNFKVDGSQLTVSWAEPKGSTDASSAAAQVKTIYVKNLPENVSKEKIKDLFDKHGEVTKIVLPPAKAGHKRDFGFVHFAERSSALKAVKGSEKYEIDGQVLEVSMAKPLADKKPDHSHRPGGGPNYPLPPYGGGGYMGDPYGAYGGGGPAYNQPMIYGRGPAPAGMRMVPMVLPDGRLGYVLQQPGGMPPPPPPRRGSDRRDSGRGGEGHSRRYRPY

SEQ ID NO: 71507 - protein, 501 aa, Zea mays
  Clone ID: UC-ZMFLB73009H07_FLI.pep
GNNRRNKDTEARAGFAQGGSCSSHNGFIGSGSNASGHSKERHEPEDDKVVLQRKQHAQWNIDIISSSKSRMAESSFSSVSSIKKQPQPNFLLESTNSLNHRGSEASGTVTSTTTAGASSTPATQLVLNKGPVSSAATQNEKPLPLQVLVPSKSEVQKQASLTGSATTEAVSVSRPLTAPQVPAAKQSAPVTSTAQNAPFLSRSMSAVGRLGNEPSANAPSFVPRSRTYRNAMMEKSSGGGSCFTHQQGSSEQAVAPWQSMFTSQPFIRPSETLSWKEETLLRSGFTFGTVKPESLNPYQGREENSQQASSNSSDCAPSSSNIRSEIEKLNLSGRPRSKQLLSEISTRFTPYQPQGLVADEFPHLDIINDLLDEEQSDRRRVLQPDFVQQSYMPHGASTPDYGEPYLFDQSEQYFDEEPPRFYSPLSSAPRRLRDLSYSHFDLPSHSSSSQFDDLMMSQWPYSRTDISMPSFGSDTSGYPYQVWDLANGSSRYPSYRPANGH

SEQ ID NO: 71508 - protein, 243 aa, Zea mays
  Clone ID: UC-ZMFLB73043E02_FLI.pep
ADSQGMGTNPHLQELAASAVAASEPPPRARVVRILVHDADATDSSSSEDEAPPLLPRRRSRGGSSSLSVRRRVMEPAGASSAVRFRGVRRRPWGRWAAEIRDPHNRRRLWLGTFDTAEEAANAYDAANIRFRGVSATTNFPAARYSPPPKPAKPIISLTPEPGKVITLPPVPVKPTFPVQVKEVGGSWGGLIKGARSEVKAFAPKPVWKMIPRVHQKFPGCADGSGLRAVHAASIYVEEVGGG

SEQ ID NO: 71509 - protein, 201 aa, Zea mays
  Clone ID: UC-ZMFLB73303G11_FLI.pep
STTSTTCSRGRSSSSSPRTTEAASSATCSPRWRRTPPSPATATSPPSRSSAPTASSGSPLSSCPPRRPPWTRSSALSTCHSTSADPTALPSTSTPLPSGTRSRTSRPSTMPMGRTRSTCASCSGSHSPRSTTTTTITAPVGAAPTTHQLRRLVLLPSLLVHPIRRLSLDVGLVSTERNHQANCTHLSSHWVYNIVVVAVFP

SEQ ID NO: 71510 - protein, 618 aa, Zea mays
  Clone ID: UC-ZMFLB73266E04_FLI.pep
ENFRYPAARRDLRPRLRSPPSPTYWGALLIRGSQRARQRESPAPAPPRISAVADRRLSLPPAGGARREMDGGAGAGAGRRNVSSSSGSRRRVLPAENGHGHDAPPPSRRSSVSLSRGHSTSLTGERTVKRLRLSKALTIPDHTTVHEACRRMASRRVDAVLLTDSNALLCGILTDKDITTRVIARELKMEETPVSKVMTRNPVFVLADTLAVEALQKMVQGKFRHLPVVENGEVIAILDIAKCLYDAIARMERAAEKGKAIAAAVEGVEKHWGAAVPGPNNFIETLRERMFRPSLSTIISENPKVVTVAPSDMVLTASKKMLELKVSSAVVAIENKPGGILTSRDILMRVIAQNLPPESTTVEKVMTQSPECATVDTPILDALHTMHDGKFLHLPVLDRDGNVVTVVDVLHITHAAIATVGNSGAAGSEATSAMMQRFWDSAMSIGPIDDDDDSRSEGSTRVVSEATDIGRPAFFPASGLSNTFGFKIQDKQGRMHRFNCETSGLAELITSILQRVGDDIDRKHLPQILYEDEDRDKVVLSSDSDLIAAVDHARKIGWKSIRLHLDYAGVGRRKGGGGPSDLEYAGKDAAWASAYSAVAAGAALVAGLGVMAYLKRSG

SEQ ID NO: 71511 - protein, 524 aa, Zea mays
  Clone ID: UC-ZMFLB73263D07_FLI.pep
EPTEGQKEILELRERLKEQIRRKAKAAAACTAGRSSSSQIPQARDKFGSFFGPSKPVISRRVIEERKSLKELHSTVAREPRPSGVHKDIPSSSKVQSRVNGHQHKQKIVNQVKKKAEALKDNRDYSFLLSDDADLSSSPKEKPAARSSLTQRADREVTQSTVKRKAPTSQPARLSNGYGPKNTMSTQRHAEGKVNSMRREDFSNTERVVSRDNERMYERVVSRDNERMHSIARNGSNQASTSKTTIQKHPSRGPIANKQPSKDSNDATLRKSSVASKHHPLEIDRPKSSQSQRMQSAGQRPQHSSHGQTPHQSMQHRTQQSLQSRRPQQMTQGQKPQQSLQSQRTQQSLQNRRPQQSSHIQKSQSSQAHRPQSLSNRSQALQGQRPLSSQGQYPEQRRVHASDRVKQAERQIRPPSKSMPSRPVSSNGIRDDHAKRKQVAKRRFDEDDEDPLAMIRNMFGYDPSRYAGRDEDVSDMEADFATIEMEEKRSARIARQEDEEQLRLIEEEERREQERKRRKMARGR

SEQ ID NO: 71512 - protein, 231 aa, Zea mays
  Clone ID: UC-ZMFLB73414B02_FLI.pep
PLHCWMKHGPLSRGAPSLVIIFILLTTLFIILVIDLRLGLVRLLFIFLLFLLGRSLLSCSALALVVGSDGLVVLELELVSLGYIGSLVRLAQGFPPVASSFPHRSDRLVLRVLLLELLAKFLHEHEESAGSPLRLVGVLAGLPFPALGGLLRPLALHRQLGIGLGGALGFGPLHGGFERRHGAQRSDPRLAEGIPVAGGRIGVESRAKLPLAARGEREGGKGKGRRRALQE

SEQ ID NO: 71513 - protein, 473 aa, Zea mays
  Clone ID: LIB3068-043-D5_FLI.pep
IPRGGRGEGVQAACSCRVRFFQEPAAGMDLYDEGEEMALQDGDSCLAPRASRGGCEVDLQWADGLLEGADRKRRAREGFKDEVHFVQEMDEVDGSGKRSKPPSPQPHTPDIREAHAPGRRRTVVAGGGELSCGGGDLIGQIGRDLSINCLLRLCRSEYGSVASLNHDFRSLVRGGEIYRLRRQNNIAEHWVYFSCNVLEWDAYDPYRKRWISVPKMPPDECFMCSDKESLAVGTELLVFGMAHIVFRYSILTNSWTRGEVMNSPRCLFGSASVGEKAYVAGGTDSFGRILSSAELYNSETHTWTPLPSMNKARKNCSGVFIDGKFCVIGGVTNNNMILTCGEVYDVQSKTWRVIENMSGGLNGVSGAPPLVAVVKNELYAADYSGKDVKKYDKQNNGWITLGKLPERSVSMNGWGLAFRACGERLIVIGGPRTPVGGMIELTSWTPDDKPPVWNLMDRRPSGNFVYNCAVMGC

SEQ ID NO: 71514 - protein, 223 aa, Zea mays
  Clone ID: UC-ZMFLB73349F05_FLI.pep
SYLAVAAQRTMEWLSWRTVCCLSVLCTVLFLRPVEGIRFVIDREECFSHNVEYEGDTVHVSFVVIKADTPWHYSEEGVDLVVKDPNGAQVRDSRDKTSDKFEFIVQKRGVHRFCFTNKSPYHETIDFDVHVGHFSYFEQHAKDEHFAPLFEQIAKLDEALYNIQFEQHWLEAQTDRQAILNENMSRRAVHKALFESAALIVASVIQVYLLRRLFERKLGTSRV

SEQ ID NO: 71515 - protein, 531 aa, Zea mays
  Clone ID: UC-ZMFLB73119G05_FLI.pep
LDKISENRADYNIEHTPAPAWAACSSSATTLAAWDDLEEYTVGLDKYSDMLKEQLLDDSVPARALVAIAGESSIGKTTLARKVYQSLEVRNHFEIRTWTVLPHKCRAADVLRDIHEQMTSQLRRTPSASNSKQAVEDACDDKAFGPGKDISNQLYRSMTGRRYLVVIDGSVAVTDWNSLRASLPDEGNGSRVLLITDLEGLEVVGHAQAGHTYDPIELTRLSPESTYEVFRRRVFGARGDCPGRYKSRYYQDVFRITRGLPLSIVVLAGILRSKELPAEWDEVMAQLAPPAREQQRGGSGGSSNSWPRIMSRAFDDLPHHLKSCFLYLAAMRESTPVDAQRLVRLWVAEGFVRPRRGSTMEEVGQGYLKELISRCMVQLVDKDDFGAVLTVVVHDRLHAFAQDEAQEASFIESHDSTDVLAPATVRRLAVLNSTTDRYVQLSNALPKLRSIICDLVEGRRVRSSNFIRTSDLSFLHASKFLRVIDIQGLELKRLPNEIGSMIHLRYLGLRCGHLEKLPSTIGNLVNLQSLI

SEQ ID NO: 71516 - protein, 80 aa, Zea mays
  Clone ID: UC-ZMFLMO17236H10_FLI.pep
CISLNLLKKNNRQNKKEKVEQWYPNYQTFNFAAGTDLRVETNNPLCLFPFRFFCIPKYELQNKMEMYLSERNWEWQCMYR

SEQ ID NO: 71517 - protein, 416 aa, Zea mays
  Clone ID: UC-ZMFLMO17240D09_FLI.pep
RFVSVSPKGVKFLSTADKIDGAPLVFQLTAEMIELEEHGSSHHKEGGLNLVPTLESEKFSEDESKLYQRLLNVRMKIAQDIGTAPYAVCGDQTIRNFAKMRPSTGARLANIDGVNQHFISRFSNIFIQNIAELSKELNLPLDNSPFPPPPPTNPAAENIAGIPKPVQNNLPGILGDAKLTAWELWHKQEYSFLKIAYFRRAVPIKEQTVIAYILDAAREGCEMDWSRFCREVGLTPDIATAIRLAISKVGSREKMKPIKEELPENVTYDMIKTFLTIEGCGLSEQVFGNGTADGVSSRIAESPISSCHASEAGGNGVPAAAEASDANPSAKRGQTVCAEEPATKLQRTYEHGAELTGTATATVDSVLDLVASCNGVSLEDVAKHFKGSKRESVLEILEGLESEFTIYKKNGNYMVL

SEQ ID NO: 71518 - protein, 642 aa, Zea mays
  Clone ID: UC-ZMFLMO17240E04_FLI.pep
KADTPPSSMAVKPTSIIAASATARHGDQQVATALLGAAGALCHDSDAVSVPGVLPPRSHHHLHRTHCPLSPLLPHSSCPPHLPAPLPPPHLTSVSARIAGVVLLPRGVFPLLPPRSRYVMGSPLLATPACGAYDVLWGFAAGRFLSILAASDEDQGSSEQEAAASNPEGVDRVCAAIADVVASGADANLEAALSALSPPLCEAVVLAVLHRFKHAHRPSYRFFRWATVSGGFTHTTITYCKMLHILGKTRQFESMVAMIQEMGKAGALSMDAFKVAIKSFAAAGEIKNAVGVFELMRKNGFDDGVESFNCLLVALAKEGLGREARQVFDKMHGQYSPDLRSYTALMLAWCNARNLVEAGRVWNEMLEKGMDPDVVVHNTMIEGLLRGQRRPEAVKMFELMKAKGPPPNVWTYTMLIRDHCKQGKMDMAMECFEEMQEAKCQPDVATYTCLLVGYGNAKQMDRVTAVLEEMTQKGCPPDARTYNALIKLLTNRNMPDDAARIYKKMIKKGLEPTIHTYNMMMKSYFVGDSNYAMGCAVWEEMHQRGICPDVNSYTVFINGHIRHGRPEEAYKYIEEMINKGMKAPQIDYNKFAADFSKAGKPDILFELAQKVKFAGKLDVSNVFYQWADRMKSRVKRNVPSDW

SEQ ID NO: 71519 - protein, 353 aa, Zea mays subsp. mexicana
  Clone ID: UC-ZMROTEOSINTE104H06_FLI.pep
QIYNDGQSSPQILMFVGTLVKKYADGLCLSGGSPCKWYINPDVPEAGALMASATKAHSPIKWNEVLSSNQPMSDVPEDQKIAYIRDLHPFENKDREFLVTVTVKKIGDRWWYNACKKCTRTAVAHGDSYKCSDQVCANIGTPSQRYKLLLAAGDETGDTDFILFGRMAQRIIKKPCDMLIANNPIGFIPDPITDLLEKTYIWNVSFSDHTINTGNICFQVNAVVAEIGTAKDFIQESPSRPKQSQPVLLQDAPSGVEDTPNKASNLVMPSTPLTPQSSATSVQDKTFCVGSSTVVPGATPAITKELTSTPRKRTRSSPSKTVTKRLFTDVDGGITGSKDAADSAAAPSPTKDA

SEQ ID NO: 71520 - protein, 452 aa, Zea mays
  Clone ID: UC-ZMFLB73270E12_FLI.pep
VCSRRAACPPGRRLPSSPKIFPGSRPPMFACRSLLARASRLTRPAIPSAAGSPLRYLHQGSYCRNKLASFVMEGAQGSSIVTKHNKRQSPVQRWRPVSTEAVPQHHQDDIIETSNSGSKKIIEDCIASSENLPPDGTTNVVEVTANDASSSKNNLSFGYSSTKVVIEDHAELSGFNKDLAGSNVFGTHSSSVEAVQSRQLDYSHFISLPLALHPDLVNKLNYFQSSILGEENSNKDGSQSEGSIGEMDYDHKQAEAKMGAKGSQSDFGIDKSIFIKPETFHLTVLMLKLWNKERIDKASDVLQSVSTQVNEALENRPISIQLRGLTCMKGFPAKARVVYVPVLEVGSEGRLAHACKVITDAFIKAGLVFERDVRELKLHATVMNVRHRKSRNKRNTWTDSFDARGIFGRFGKAEWGAYPIHEIHLSQRFKFDRSGYYYCCSSIPLPAEMHTE

SEQ ID NO: 71521 - protein, 353 aa, Zea mays
  Clone ID: UC-ZMFLB73192F10_FLI.pep
FFEGRHEQAQAGARHGVGTRRDWPVRRRTGRGPRARGGSDSTCARSRSRAPCFPLPRSSPRRPRGNFHPRGAAVSTPSSSAVNAGAEMRAGGGEEEEEEEVFYESRDRVLSSSCSSTSASDDDDNDHPRRRRDGAASAAAAALDVWTSEPAPVQERRRKLLQMMGLAGDPALARLEMGRSVSYDGPVRPAPASPIPRSRSDGAVPVSSTKPPLGGRSRQASSGSSEATPEGEDAGPRCLIRNLDDGTEFVVKEEFQLREVGTGRHFTMEEFVDLCVGCSPIVQELMRRDNVGSSGSNNGASTPIQRSNSDSSNGATRHRRHSSWLRSLRNVAGSMAVTSRDRRSSDEKDTSSE

SEQ ID NO: 71522 - protein, 288 aa, Zea mays
  Clone ID: UC-ZMFLB73270E02_FLI.pep
LPSVSQLAQAGDTATLKTLERGGVPGQRFAMTAPADKGKKAKTDADGGEENEQIDGALVFSIEKLQEIQDELEKVNEEASDKVMEVEQKYSEIRRPVYLKRGDIIKTIPDFWLTAFLSHPLLSELLTEEDQKIFKYLDSIDVDDSDVKAGYSIYLNFSENPYFEDTKLTKTYSFVDDGTTTIKASQIKWKDGMGPANGNGINKKGNKRPLVVESFFSWFSDTELKSLADGVQDEVAEIIKEDLWPNPLKYFNNEVEDEFEGDEEDDDDDDDDDNLDGDDNDDDGDQEN

SEQ ID NO: 71523 - protein, 282 aa, Zea mays
  Clone ID: UC-ZMFLB73274H06_FLI.pep
SMLRMSFWEGIYTCLVDVSEESGVFSFIEKCIQCLLPLLTLHSDGQPEFMKEWSVAILCLTNAQKKWLDDILQIRSTALVNEGHVDVAKKIILRARLCATGCGSTHELGNIKTAILCTKADGVWWSVLVEITSALNSAENIIKRQWLLDALDIGCVTAHPSTVLCFVGLLCGSCCIYMPLLLVNSINVLSDLPVTLPAFLSTIVSDDFRNSVADRLWLLTTDIYTWAEQLAHGHDQPGHDRIHRSETEIATFLANILLSTCITVEDYLSVDKRLKLANLEAL

SEQ ID NO: 71524 - protein, 320 aa, Zea mays
  Clone ID: UC-ZMFLB73290H10_FLI.pep
CRMALASLAASLPVAATAAAVRFPFRFRIGRAMASAAAGASPARVAVVQMTSVGDVDANYATCSRLTKEAAASGVKFLCFPEVFSFIGSKDGEAMKLAEPLDGPIMQRYCSLAKESSMWLSLGGFQEKGPDDSHQYNTHVLIDDTGKVRSSYRKIHLFDVDVPGNMVYKESRFTAAGDTIVAVDSPFGRLGLTVCYDLRFPELYQILRFKHQAQVLLVPSAFTKITGEAHWEILLRARAIETQCYVIAAAQAGKHNEKRESYGDSIIIDPWGTVIARLPDRLSTGFAVADLDLSKVEAVRTRMPISEHRKFDSDWKPTPL

SEQ ID NO: 71525 - protein, 311 aa, Zea mays
  Clone ID: UC-ZMFLB73274E10_FLI.pep
SLTDPPMTKQKHVEELVRLPESFLCYTPSPEAGPVCPTPAISNGFVTFGSFNNLAKITPKVLQVWARILCSVPNSRLVVKCKPFCCENIRQKFLATLEELGLESLRVDLLPLIHLNHDHMQAYSLMDISLDTFPYAGTTTTCESLYMGVPCVTMAGAVHAHNVGVSLLSKVGLGRLVAKTEDEYVSLALDLASDVNALQELRMTLRELMMKSPVCEGERFTRGLEAAYMDMWRRYCDGDVPSLRRLALLEEHPVANGPDSDKTSEKLADLKAQRASATVEEDNQPPAMANGVRSPSSPAAAKCESNGHSSQ

SEQ ID NO: 71526 - protein, 583 aa, Glycine max
  Clone ID: 700795677_FLI.pep
SSSSSLLLLLLLLVMAAASNLSTLSSSSLSKPPSSFPFRNTPTNNNASFLHNKSLPNQNSLSHKLSSPLPLACNPKNQNTCVFFDDEDQKPREECGVVGIYGDPEASRLCSLALHALQHRGQEGAGIVAVHDNHLQSVTGVGLVSDVFDESKLSRLPGTSAIGHVRYSTAGQSMLKNVQPFLADYRFGSVAVAHNGNFVNYRSLRARLEHNNGSIFNTTSDTEVVLHLIATSKHRPFLLRIVDACEHLQGAYSLVFVTEDKLVAVRDPFGFRPLVMGRRTNGAVVLASETCALDLIEATYEREVYPGEVIVVDHTGIQSLCLVSHPEPKQCIFEHIYFALPNSVVFGRSVYESRKKFGEILASESPVECDVVIAVPDSGVVAALGYAAKAGVPFQQGLIRSHYVGRTFIEPSQKIRDFGVKLKLSPVHAVLEGKRVVVVDDSIVRGTTSSKIVRLLKEAGAKEVHMRIACPPIVASCYYGVDTPSSEELISNQMSVEEIRKFIGSDSLAFLPLDKLKTLLGDDALNYCYACFSGKYPVEPEELQMKRLGVAHFNWDDDFNGNFESIDVGGWVTNQDGFKIGSV

SEQ ID NO: 71527 - protein, 100 aa, Zea mays
  Clone ID: UC-ZMFLMO17041G06_FLI.pep
PPPPCQSGHVLAVGSLEPAPQPPTSAHFDDGPCRWSIHGRESTSAELLVSSSSDHSARPTTCHNWVCSIGSSSGFNITVASSHFKFVHSLRGITVCAKHD

SEQ ID NO: 71528 - protein, 418 aa, Zea mays
  Clone ID: UC-ZMFLB73125E04_FLI.pep
LPPSVRPSSTSRPAASHSRNPSPTRRPPALPLPIFSRRAAYSARTARASALPATRRELLPSTLPVARRKLCAGDGGALPVTGGYGGIVPLGPSSIPVRRRQPTGQEYHQASAMVSSALRRCLPCHASLCHAFPPHPLLAAAGVFRRSFQSGDGETMDEFEERLFGGKDTDKGSLYEKLDRAENTGRRYNMGSGMGGLTGLSDKSRSGLSKGGFTWLSDSSSSGFPGFPASGDRSNSGWMDGYDSFNDGLNDTIANAARNIQMEEDEDVDGDWEDDFEFRPDVRFRQGSTYSVRDLDLRKPAAAKNPPRRQFETTTAEVLKKADFRNVRFLSNFLTEAGIIIKRSQTRISAKAQRKIAREIKTARAFGLMPFTTMGRRPFIFGRSAEEHYWDDGYFGYVKQKDGEPVENEDAEPNVEAV

SEQ ID NO: 71529 - protein, 307 aa, Zea mays
  Clone ID: UC-ZMFLB73122E01_FLI.pep
SPDEFSCNQIQAEQMTGQLRSLTQYILNGAVLALCPYLDRYVLAAAGNMIYVFGFTNENPHRIKKCAVGRTRFTITCLKTFASRIAVGDCRDGVLFYSYNESHRKLELVYSDPAHRLVGDIALLNCETAVVSDRRGSISVLSCTRLEVSESPQKNLAVNCSFYMGETAMSIQKAAFRYRLPIDDDTDPVLETVYNCIVASTMLGSLFVMIPLSSEEHQLLQDVQEKLSVHPLTAPVLGNDHAEFRQRGTPSVVPPILDGDMLVQFLELTGEQQQAILTHALPGKGQHRPLSVFQVLQTLERVHYALN

SEQ ID NO: 71530 - protein, 577 aa, Zea mays
  Clone ID: UC-ZMFLB73015H07_FLI.pep
APAREQNNERIQSEQLHGSASEQQTEFLRSNVSSGKVSKYHFGPIVSQKLKEHFEKDPYPCRATKESLAQELGLTFNQISKWFSGTRHYSRDAVAKNQKRPGENTTVNNNSTTFDDIQVIEPNVGLIDKPAADVNDMISEKLMVQINLNEGIEEDIPPSQYARCEEKITMTPAAISREAGLPGYGPGPGENFLQVSSRNTSCEQSVILAPTAIAREVGPPGYATGENQGNGAPWNTSYERRLFMNPVTSSRAVSPPGYGPEESRGSGISWNTSSEQILFMSPTTISRELGPPGYGPREDQCSGTSWNASCELGVFMSPVTTSREDSPPGYGPRENQENDNMRCELRMFTSPTTISREVGPPGYELTGKNKGNGASCTTNYQQGAFTSPEAFPREACPPGFVSGENQGNDTPWYMSSKQMAFTSPTTNPRVGPPGYGQENQGSRVSWNTSYEQGVFMSSTNISREAGPPGYGPGESQGNITSWISTGGQRMFTGPSTIPNEVGQQGYGPSGIPGTDGSRSMDLKAFPPGYGPAGENQGGGASGSVISPQARSAENVEFSDDARKKAIQRELRRRQKFR

SEQ ID NO: 71531 - protein, 398 aa, Zea mays
  Clone ID: UC-ZMFLMO17006E01_FLI.pep
CPIIFLHMVGFSICMQLSKVSDRCYGLTLSPGEEIIAVVRSLDLNLLNQMYQVRTQKAVVEFIWIGGQFVGIPLDGSIDICSPQSADLSSSNLMWWGSNILWSLKKYENVEKRLVLWDVVAALQELKKTAPAFLETLVHSWASALFAGDSQCVSITAQSSRSMHDMMPHVSSRKLHLLNIICRKVMLGNHARHGPGAGNNSNDGTTDFWSTLLVASETELRERLVGFTFAAVVKRTACLFNGTSTANCWFPVGVAQMDSWVSMNYEKVHGQLQSIRSKIKELGSRIDGYSDVESCPYCSSPVRFESPDVAICGERHTLSRCRTSMTLCSVAQPVWHCSCCGGTVDKLLPESFFTMPLDAVRDDKGSLDLSAASAPLCPFCGVLLQRSMPAFLLSTSPV

SEQ ID NO: 71532 - protein, 208 aa, Glycine max
  Clone ID: 700897774_FLI.pep
VKSREGGFVSFRSVHTFYSLSIPLPFFSIHYTTVMRSQLVCNGCRSILVYPRGATNFCCALCNTITSVPPPGMDMSQLYCGGCTTLLMYTRGATSVRCSCCHTINLVPESNQVIHCANCRTTLMYPYGASSVKCAICCYITNISMTNGRLSIPVQRPNGTANSGTVSSTSSSMPYSQSQTVVVENPMSVDSSGKLVRNVVVGVTTDKK

SEQ ID NO: 71533 - protein, 406 aa, Zea mays
  Clone ID: UC-ZMFLMO17334D11_FLI.pep
ASLEEEKESLKAKISKLQSNLRMGLEIEQHLQRNARILEKRQALYDGFLRNGLSELQKFYTCQKAEIMKILEEESLRLMKVVAEIQDKLTEICINTEVSDHPADEIQCCDSSCKDVHVTKDISPSTCRKSDYPADLNSVSFDESKALAQALQEKMEALMLFSQEQERYLLEKQRDLIVIEELQKNLSQVKDEKVKVLMELTKLKEQYLLLKGSAVKEGHDTGDSSKLIPGHDQQGMLKTMLKRTSLRHWMRKESNTIGHGSSDGNDHTVCKEHSVDVARLRVENAMLLEGVGTVEHLTSSVHRLHIVLLKAYDDIKSADPLESTFEALNSLITEANLMKTALNVVLPVSWSGDSSDAIKYEAMCDPSDSPKSKSGKVDPLSSAGMEMVELLILAAEILKESFLVKK

SEQ ID NO: 71534 - protein, 246 aa, Zea mays
  Clone ID: UC-ZMFLMO17341H04_FLI.pep
SSRSAFSCGAINKESVALICSASLFESMTTGCYSGLEVIEETFPMTFSESNNLECEDLWVYYIKMLQKNLNQLNLSRVWPSISRGVHKYPYNPKSYSAMLTLSYLYSVSNNLRLTLDKCSQRDPSVITLLFALSFEWGKAGSDNRIHSLFERALADDKLQKSVLLWRCYLAYEAEIACNSSAARRVFFRAIHACPWSKRLWLDGFQKLGSVLTLKELSDLQEVMRDKELNIRTDIYEILLEEETNT

SEQ ID NO: 71535 - protein, 485 aa, Zea mays
  Clone ID: UC-ZMROB73028G06_FLI.pep
AEALAEPSRATTTTSRPASGWRKLSGALPEPCGGRRPGAGPMGRYELVRSDDAPAVAADLEAGTAAPCDGYPKRRVFTPSPSPSPAPASTRYRQRLVSLDVFRGITVLLMIIVDDAGAFIPAMNHSPWDGVTVADFVMPFFLFIVGVALALAYKRVPDKLDASRKALLRALKLFCLGLVLQGGFFHGVRSLSFGVDLQEIRLMGVLQRIAIAYLLTALCEIWIRGDEDVDYGYDLLKRYRYQLFVGAVVAITYMSLLYGTYVPDWEYQTSAPGSTEKHLFVKCGVRGDTSPGCNAVGMIDRKILGIQHLYGRPVYARSKQCSIDSPQNGPLPSDAPSWCQAPFDPEGLLSSVMAIVTCLIGLQYGHVIVHFQKHRERMMNWLIPSFSMLVLAFAMDFFGLHMNKPLYTLSYTLGTAGAAGLLFSGIYTLVDIYGYRRPTVAMEWMGMHALMIYVLIACNVLPIFIHGFYWKEPKNNLLKFIGIGA

SEQ ID NO: 71536 - protein, 556 aa, Zea mays
  Clone ID: UC-ZMFLMO17185E12_FLI.pep
DENCSPQAEYELQDSKRSRYSSNDLRSHVALHKRTSGGTKNRRTSVSLARIKKFGSKSVCYSGSDKDNAVLAHEVNARRYSGRLSSNSPCCVCGISDLEPCNRLIECSKCYIKVHQACYGVLKVPRGQWFCRPCKNNTMDTVCVLCGYGGGAMTRALKTKNILKSLLQGLMNLERSEYYVDSLGNASSECTSLQNPVDSAHGDNIMNAKNITSNSWTSGKYYSSLLGPQPMQWVHMVCGLWTPGTKCPNDTTMSAFDVSGASPAKRNTACSICDRTGGSFVKCRAVNCLVFFHAWCAHQRGLLQSEPEGEHNENIGFYGRCVSHAIVFSSHVNPKKEYFRNNNWTCARTEGFKGRKGEGFSDSSHKKYEEYSGEFGVSQEQINAWLRINGSKPCGRGQKEYIHYKQLKGWKHLVVYKSGIHGLGLYTSVFIPRGSMVVEYVGEIVGQRVADRREIEYQSGKRQQYKSACYFFKIDREHIIDATRKGGIARFVNHSCQPNCVAKIISVRNEKKVMFFAERHINPGEEITYDYHFNREDEGQRILCFCRSRYCRRYLN

SEQ ID NO: 71537 - protein, 443 aa, Zea mays; identical to SEQ ID NO: 57903
  Clone ID: UC-ZMFLMO17169A01_FLI.pep

SEQ ID NO: 71538 - protein, 126 aa, Zea mays
  Clone ID: UC-ZMFLMO17341E12_FLI.pep
SFSAWASASASASAVTGVVRPHDASLPLARVAGDASLPGDVGDLDARVVDLAGAPPPRQHLALRPHPLAVVAARHHHPELERPRRRLPRAPRRPAAVARHGLPVGRAHLRDVDGDDVGLAHAAVAG

SEQ ID NO: 71539 - protein, 230 aa, Zea mays
  Clone ID: LIB143-001-A3_FLI.pep
FTKSNRKHHHSITFSARTNGTQLHEHISLLGRSRSSRVGRDTILILVPLLHLHLHLLRSNTGTRHAIHFFLTRTDGSWKGSSTRTYVQTRAATAIWPAARAWRRARRRRGGTRWRSGTWRRGSSPSPSSARAAAAPCPPSARRTAWPRPRPRPAPAAEARPRTPAARRCSPAARTTPAAAPTTWRRRRRGAPSPWQSKRRAGPEPAGGRRRPSLMTLPWMEVLDSDEKEV

SEQ ID NO: 71540 - protein, 179 aa, Zea mays
  Clone ID: LIB189-010-G8_FLI.pep
KKMLNNAPEYLQNVVELCQNRVVVFDNVTEDRRLQAQQLDKLLDVVDSVCAKNGGKPFSDQMFTSIKEVHDREKEVHTSGYSDEQISELKKEIHRTRDEQLAHITNMVEEKLNCTVEKLQQQLMEEQNARLEAEKVAYEARLKSEAEIQKLKESLKKAQMENDEFRRMAQSQGSKCAIL

SEQ ID NO: 71541 - protein, 225 aa, Zea mays
  Clone ID: LIB148-033-G12_FLI.pep
SPPPTLVSSPPPAPKSLPPPTPVSSPPPEVKSSPPPTPVSSPPPAPKSSPPPTPVSSPPPELKSSPPPAPVSSPPSAPKSSPPPAPVSLPPPEVKSSPPPAPISSPPPPAKSPPPPAPMSSLPPPVKSPPPPAPVSSPPPPMKSPPPPAPISSPPPAPVKPPSLPPPAPVSSPPPAVTSAPPKKEEDSTAPPAEALPPPSFNDIILPPIMANKYASPPPPLFQGY

SEQ ID NO: 71542 - protein, 268 aa, Zea mays
  Clone ID: LIB143-011-B7_FLI.pep
ASDRAHQQPPRSRVAAGRSRKRRGGGMGRPPCCDKVGVKKGPWTPEEDLMLVSYVQEHGPGNWRAVPTNTGLMRCSKSCRLRWTNYLRPGIKRGNFTDQEEKLIIHLQALLGNRWAAIASYLPERTDNDIKNYWNTHLKKKLKKMQAGEGGGGDGDGAAGASEGGAVATAGAGGKRPAVPKGQWERRLQTDIHTARQALRDALSLEPSPSAPPPAKVEPLPATAPGYKTYASSAENIARLLEGWLRPGSGGGKGPEASGSTSTTATTQ

SEQ ID NO: 71543 - protein, 95 aa, Zea mays
  Clone ID: LIB143-021-D12_FLI.pep
IVRGTVHLFIGAERNPDEIISMSLITNYDHNTDYQGLYSIFLFKSVSSFVFSMTPSRSSFDRSFDLYLHVAPAFVLSCRRCFCLEDLRRRKRPQH

SEQ ID NO: 71544 - protein, 130 aa, Zea mays
  Clone ID: LIB148-062-F7_FLI.pep
DDQPASCTCTHTHTHWAWPRIVKCGSNCGSSSSSPSPSRSMPPSGSTTPTPSGLHVLSVAGLHPYAEPPGVAASADLTSSTQASASAMASRRARGGDVVMEIDRLPDRHTNTKGKLFREGGVEADAIARR

SEQ ID NO: 71545 - protein, 129 aa, Zea mays subsp. mexicana
  Clone ID: UC-ZMROTEOSINTE013C04_FLI.pep
RQLPRLTCYVSSCSVPYLSEHEPAAALLGLLHGGRGRAGGAVLRRRRVRWNWLVGSSFIFTSHPTLLVATVVGGGAVRAFLMNPSYTTGWRVVYSLVGWLSLFLRGPFMSSLFVRTSLPFLFYVHKTCR

SEQ ID NO: 71546 - protein, 189 aa, Zea mays subsp. mexicana
  Clone ID: UC-ZMROTEOSINTE014F08_FLI.pep
LRVRMSQASFSGFGDQKQQVLLTEHDISKAELRNLPLVNCPFCIDHPQLAAHVSGQPKSMGAHFVACRRCDKMVEKKMRCPFFKWLSVYAEFLLEKDTYDDNSLLRKIQALQREKENAKLLENQVTSPWNVNYQQGSKVPTMNSASEVMIGASELREVKEVLLKVLKVLRQLRVMFALALAALVLIALK

SEQ ID NO: 71547 - protein, 415 aa, Zea mays subsp. mexicana
  Clone ID: UC-ZMROTEOSINTE038A06_FLI.pep
PNACACCVAWRVCSRPIPPRPAAMGQDLVEIHPSELQFTFEVKKQSSCVVHLINKSNDYVAFKVKTTSPKRYCVRPNTGVILPRKTCEFTVTMQALRTAPPDMQLKDKFLVQTTIVPYGTSDDELVPAFFSKETGRYIEESKLRVVLVSAYQSLEEQPTNKIHDTEPVVEVPVLKEVPNIENEVPDAAKEVSAPLVQAPAIVTGIPSPVEETPGLREFRVPPNEAPAVLEESPSAQKDPSAITVEHASTVTIEHSPTISIESSPPLKQSVTVFKESPPSKQSIAAFKEYPSPSKQSIAVFKESPPLEETSPKEAVVLSDRGLLSVQNHQLSHVTEDVQNLKSKLNNLESKLEEAGKMIIRLKEESRSTTQERDKLQQEVVFLRKKGTPRSQVGFPLLFVVYVALLGTLLGYLLRL

SEQ ID NO: 71548 - protein, 188 aa, Zea mays subsp. mexicana
  Clone ID: UC-ZMROTEOSINTE026A03_FLI.pep
KIKTEMLFTRALLVAAQRRDVTGNPALQGLLEMLGKKAKEAENTLHELHHFMTRDKIDGTRYAAPELGDGLGAKAEHAHHAARHTADNWLSCLSCCCRRDDDDDDAAHAMPRRPRDDGHVAKLPFNRVAMSNKIRQLIEEMHSYCTRISNVLDEMPSRSRDIHTPERNLGIPFQEKYMSVLDAERERQ

SEQ ID NO: 71549 - protein, 177 aa, Zea mays; identical to SEQ ID NO: 61893
  Clone ID: UC-ZMFLMO17050A04_FLI.pep

SEQ ID NO: 71550 - protein, 230 aa, Zea mays subsp. mexicana
  Clone ID: UC-ZMROTEOSINTE009D02_FLI.pep
KLRHPNIILFMGAVASPERLCIVTEFLPRGSLFRLLQKNTAKLDPRRRVHMAIDIARGMNYLHHCSPPIVHRDLKSSNLLVDKNWTVKVADFGLSRLKLETFLRTKTGKGTPQWMAPEVLCNEPSDEKSDVYSYGVILWELVTQKIPWDNLNTMQVIGAVGFMDQRLDIPSDTDPKWASMIESCWDSDPQKRPSFLEVLDRLRDLQKQYSLQAQMQRNLSADALLKGAVK

SEQ ID NO: 71551 - protein, 594 aa, Zea mays
  Clone ID: UC-ZMFLB73146C02_FLI.pep
ILQRHSYWLIFFPSTPARFAEPRNFRSHLILDMEKQPSVRHGALEKLKSFRGMEKQRSFKFLSMEKQQSFKRNKDSPGKRGDTALHLAARAGSVAHVQKILAECDPELVVELAGRTNQDGETALYVSAEKGHVEVVCEILKASDVQSAGIKASNSFDAFHIAAKQGHLDVLKELLQAFPSLAMTTNSVNATALDTAATQGHVDIVNLLLETDASLARIARNNGKTVLHSAARMGHVEVVTALLNKDPGIGFRTDKKGQTALHMASKGQNAEILLELLKPDISVIHVEDSKGNRPLHVATRKGNTIMVQTLISVEGIEINAVNRAGETAFAIADKQGNEELVNILREVGGGTAKEQVNPPNPAKQLKQTVSDIRHDVQSQMKQTRQTKMQFQKIKKRIQKLHIGGLNNAINSNTVVAVLIATVAFAAIFQLPGNFLEDMTQAPDPDMTLGQALIASDPAFIIFLVFDALALFISLAVVVVQTSLIVVEQKAKKKMVFVINKLMWLACLCISAAFIALTYVVVGRDDEWLAWCTMAIGTVTMVATVGSMCYCVVAHRMEEKSLRKIRRTSMSQSWSISIDSEAELMNSEYKKMYAL

SEQ ID NO: 71552 - protein, 399 aa, Zea mays
  Clone ID: UC-ZMFLB73150B03_FLI.pep
HHHGLAQAFSSPSSCGGDEASSAAGAAACDAAFVRVLPGGSRDRPGPFRLDGRRLARGRARERRGHGAGVPRAARHEPDGGGGGTGPAAGAAALPAAASGGEGEGEGEASGSGGGGDDYDDVDGAVGARAAVGGSDAHGARAASGVPSPGVAGGGGGPGGWSHGTAAAAHGGGVPAPDLRGELHIGGLGGGAAPPEEPGASAHRAAPPARRRPLRGARRRVRRPPPGAAQAAHQDKECGRVGSGDSMGAGEEGGRGRARRRLQHQHHHHHQRSIHSMCMVLRLRLHIIGGSGSSSAPSDGRRLRPRLCLRQRPPLGPFQVGPLPHIRARPVAGFDQVRAKVGDGGVQQNEGHHPCRRRLLLQPFSNHGVACRHNAALASPLATLRAIDKDACMLKINIP

SEQ ID NO: 71553 - protein, 457 aa, Zea mays
  Clone ID: UC-ZMFLB73151F06_FLI.pep
AEFVSSIDFFLPKSSTHIQVLCCYKRTHSFFFFFPTVCTSNESKKIRNWKRVTDKCWFHCCITDSSEDQKGMMWLVLESYPATQLLPLTLKILSSSDVICRTAGEQPLCMSSSSLVSPLSHAAAAATARRSRYRWHTAHSTDTAASAPAIPPFIILDTTTGTADPADSQTAARPSAHPTAASSTRSAWLGEPASASRMRTAAGTAPRRTISARARRVAAMAARHDSPAATACLSRPPLSSAGPTRRMSSPSSSSESATVARAPGAALRSSDSTSLAASTRASSEVALRSTRARAAAVDGASAASAAATRLLLSSSMQSDAAMAASTRTAASAGSLPARRSTDATVSAAPPARASAFLSNSSTSSSERKAASFRSGGQGSAAGSATRRRSSAAAAAGVGPTAGDEEEEGEEGAAVDAQSAMRRRRVRLGTRSVEGSESMVAGHVVFPESSQRWMEARS

SEQ ID NO: 71554 - protein, 453 aa, Zea mays
  Clone ID: UC-ZMFLB73151F11_FLI.pep
CCAAVASAARRASDPPPAPMPVLCTHHVQLRLWWRRLGRRSATFALALLAVALVLTLSRYAAGPAPSPPPSSSYGHRLPALVDITLVYGAIDKGAVCLDGTPPAYHFLPGFGDGSHNWLLHLEGGSWCRNFESCARRKKTNLGSSAHMDTRAEFVGILSDDQSQNPDFYNWNKVKIRYCDGASFSGNVQEEVKNDTGFFFRGQRIWEAVMAELLSKGLARAKQAFLTGCSAGGLSTYIHCDDFRALLPNTPTVKCLADGGFFLDVEDISGRRYMRGFYNDVARLQDVRKIFPHCSSDMEPGQCFFPQEVAKSITTPMFILNPAYDVWQVEHVLSPEGSDRENLWQNCRMDISRCSSKQLEVLQGFRKALLDAINEFKKRRDWGMFIDSCFIHCQSMKALAWHSPSAARVNNKTAAEAVGDWFFERREVKEIDCEYPCNPTCYNVVLDQPYKED

SEQ ID NO: 71555 - protein, 561 aa, Zea mays
  Clone ID: UC-ZMFLB73158F11_FLI.pep
DRSRWRKAEENPRPQPSQTLKSSSLPHSPLQLQPLSPPIRGPPPPPPHLFASNRPVGSQETGMASGGAVREVGSAAELQAAVAGARAAAVHFWASWCEASKQMDEVFAHLAVDFPHAAFLRVEAEEQPEISEAYGVTAVPYFVFCKEGKTVDTLEGANPASLANKVAKVAGPASVAESAVPASLGVAAGPAVLENIQKMAQRNGSSAVESISSGSTEDALNKRLEQLVNSHPVFLFMKGTPEQPRCGFSRKVIDILKQEGVKFGSFDILTDNDVREGMKKFSNWPTFPQLYCKGELLGGCDIVVAMHESGELKDVFEEHNITLKPQGSKNEEAGEPESATEKGSAVSESIKLTDAQKTRLESLINSSPVMVFIKGTPEEPKCGFSGKLVHILKQENIPFSSFDILSDDEVRQGLKVFSNWPSYPQLYIKGELVGGSDIVMEMHKSGELKKILSEKGVRQKGNLEDRLKSLISSAPVMLFMKGTPDAPRCGFSSKVVNALKKEGVSFGSFDILSDEEVRQGLKTYSNWPTFPQLYYKSELIGGCDIILEMEKSGELKSTLSM

SEQ ID NO: 71556 - protein, 89 aa, Zea mays
  Clone ID: UC-ZMFLB73047D03_FLI.pep
TQKKVVVRTICYSAKDTRKHLLVLQQHTGSTKRRRQRDDRRTRQARPRTHRHGHGCQPHKRPPPESLQQRTTKKNNMGHTKLTNLPTCT

SEQ ID NO: 71557 - protein, 861 aa, Zea mays
  Clone ID: UC-ZMFLMO17004D04_FLI.pep
LPVCFRHLILPEKYAPPTELLDLQPLPVSALRNARYEGLYSAFKHFNPIQTQVFTVLYNSDDSVLVAAPTGSGKTICAEFAILRNHQKALSGESNMRVVYIAPIEALAKERYRDWERKFGEFAKVVELTGETAADLKFLDKGEIIISTPEKWDALSRRWKQRKHIQQVSLFIVDELHLLGSDKGHVLEVIVSRMRRISSHIGSNIRIVALSASLANAKDLGEWIGATSHGLFNFPPAVRPVPLEIHIQGVDIANFEARMQAMTKPTYTAITQHAKNNKPALVYVPTRKHARLTALDLCAYSSVEGAGTPFLLGSGDEMDTFTRGVEEETLKNTLKCGVGYLHEGLSELDQELVTQLFLGGRIQVCVASSTMCWGRPLPAHLVVVMGTQYYDGRENAHTDYPITDLLQMMGHASRPLQDNSGKCVILCHAPRKEYYKKFLFEAFPVESNLHHFLHDHMNAEVVVGVVENKQDAVDYLTWTFMYRRLAKNPNFYNLQGVSHRHLSDHLSELVETILNDLESSKCVAIEEDMYLKPLNLGLIASYYYISYTTIERFSSMLTQKTKVKGLLEILASASEYAELPGRPGEEEFIERLVRHQRFSIEKPKYGDPHVKANALLQAHFSRHTVVGNLAADQREILLSAHRLLQAMVDVISSNGWLSLALSTMELSQMVTQGMWDRDSVLLQVPHFTKDLARRCQENEGKPIESIFDLAEMAVDEMRDLLQLSNSQLQDIIEFIKRFPNVDMTYEVREGDDISAGDNVTVQVTLERDMTNVSSEVGPVHAPRFPKPKEEGWWLVIGDSSTNQLLAIKRVALQKRARVKLEFSAPAEAGRKDYMIYLMSDSYLGCDQEYEFTVDVKDAGGD

SEQ ID NO: 71558 - protein, 266 aa, Zea mays
  Clone ID: UC-ZMFLB73096D11_FLI.pep
NYSISTACATSNFCFLNAANHIRRGEADVMLCGGSDAPLIPIGLGGFVACRALSQRNSDPTKASRPWDMGRDGFVMGEGAGVLVLEELEHAKERGATIYAEFLGGSFTCDAYHMTEPHPEGRGITLCIEKALADAGVAREEINYVNAHATSTQAGDLKEYEAIVRCFRQNPQLRVNSTKSMTGHLIGAAGGIEAVASIQAIRTGWVHPNLNLENPEDTVDVGILVGSQKERCEVKVALSNSFGFGGHNSSILFAPFKELPSSSSSK

SEQ ID NO: 71559 - protein, 86 aa, Zea mays
  Clone ID: UC-ZMFLB73114A12_FLI.pep
DNAVLMLGMKHQLNCCSRRPNQTLSSLIMPSGHLLFTGLGHRAPLRHNVAVLHRAFHLTPSSIELATSRPASGRKENETAQLLPKV

SEQ ID NO: 71560 - protein, 258 aa, Zea mays
  Clone ID: UC-ZMFLB73094H03_FLI.pep
ASTRRARGVSVTPAAEEDSGAFPSAIIFFALVGATATTAAVGQLRRTVSWFYTQLSRSEPYVFWEDIPRRPNRHRCGEAWERYHQRMRDRTEDQRERVVAIALESSQSTPTTVLDELVNIDPNTERIRHMQDVFKKERSKCRDYRNWDSHNPNYYQHHQRDDWYWNAEAFYANQRTNFRAMTREAMTYTMSHHYSVLGLDRSRSEPFSDAEIKNAFRRKAMEYHPDQNQNNKEVAEAKFKEVMDSYEAIKRERRDRSC

SEQ ID NO: 71561 - protein, 579 aa, Glycine max
  Clone ID: LIB3028-005-F8_FLI.pep
LILMALPICLTVIAIFTLCCVINCNNGVEAFHDIYPDLQSISARSVSKLQRTGYHFQPRKNWINDPNGPMYYNGIYHLFYQYNPKGAVWGNIVWGHAVSKDLINWKELEPALYPSKPFDKYGVWSGSATVLPGKGPVILYTGVIDKQSNEVQLYAIPENKSDPFLRKWVKPKAFNPIVVADHSMNASVFRDPTTAWWSKDGHWRMLIGGRRKDRGMAYLYRSKDFVKWIQAKHPIHSAASTGMWECPDFYPVSLKGKNGLDISVVGSSSIKHVLKNSLDLTRYEYYTIGTYFKNKDKYIPDNTSEDGWGGLRYDYGNFYASKSFFDPSKNRRILWAWANESDSKEDDVKKGWAGIQSIPRTVWLDYGGKQLVQWPVEELNSLRKKEVKISHQKLKKGQHVEVKGITAAQADVEVTFSFSSLDRAEPFDSRWVNAQDLCSQKGSKVQGGVGPFGLLTLASEKLEEFTPVFFRIFKAPNKHVILMCSDARSSSLKRELYKPSFAGFVNVDLAKNKKLSLKSLIDHSVVESFGAGGRTNILSRVYPTLAIKKKAHLFVFNNGTEHITVEYLKAWSMKSARRN

SEQ ID NO: 71562 - protein, 172 aa, Zea mays; identical to SEQ ID NO: 54882
  Clone ID: UC-ZMFLMO17084B01_FLI.pep

SEQ ID NO: 71563 - protein, 250 aa, Zea mays
  Clone ID: UC-ZMFLMO17281F10_FLI.pep
YNYSRFFTSTLTDRPRRRRQLQPVADAAREAAAFHVSHRVPIRGRPANLARLVDHARSAALGAAGVLGRLLGVPGFLPEPPRGVAALRGAQVQRLEHRICLKGGGGGGGLLAVEEVLILIVGKEGDQLELLGYLVQVGVLAGPVVAEPGGGGDEVPPLRREVLHLQQRRRDEERRVRVQRRRNRDGTHGSTSAPQASYLPSGSWLDGSDLPAGAGERAEGLGDGQDGKENQTKYQQRSEWGNPQQATTSD

SEQ ID NO: 71564 - protein, 398 aa, Zea mays
  Clone ID: UC-ZMFLMO17281G01_FLI.pep
RERMASWSSPSAAASGARFGPFPSGGQRLAPCPSLVRGTPAPTLVLRPHPDGRGHGLLAHTGPSPSSRCRAVAAEVGGLNIANDVTQLIGNTPMVYLNNVVKGSVANVAAKLEIMEPCCSVKDRIGYSMINDAEQKGLITPGKSVLVEATSGNTGIGLAFIAASKGYKLILTMPSSMSMERRVLLRAFGAELVLTDAAKGMKGALDKATEILNKTPNSYMLQQFDNPANPKVHYETTGPEIWEDSKGKVDIFIGGIGTGGTISGAGRFLKEKNPGIKVIGIEPSESNILSGGKPGPHKIQGIGAGFVPRNLDSDILDEVIEISSDEAVETAKQLAVQEGLLVGISSGAAAAAAIKVAKRPENAGKLIVVVFPSFGERYLSSVLYQSIREECENMQPEP

SEQ ID NO: 71565 - protein, 399 aa, Zea mays
  Clone ID: UC-ZMROB73052G05_FLI.pep
FTRITGTGLIFSTLFTSGMGFLSALSPNYLCLVALRFLVGVGVGGSHVFISWFLEFVPAQNRGTWMVIFSLFWTLGTILEASLAWVVLPALNWRWLLVFTALPCFLLLPFFGLTPESPRYLCAQNRMSDATSVLERMANANQSALPPGVLTYNRQTKCDHDVLAPESECLLPVREKECTVDNAKSSESGSLAALRMLLSRELLRSTLLLWFVFYANSFAYYGLVLLTSQLSDANKSCASGVSFGLRQKEINLYKDTFITSLAEIPGLFLSAVLVDWFGRKASMWSMMFACCAFLGPLVLQQTELLTTILLFGARACAMGSFTVLCLYAPEVYPTFVRSTGAGIATPIGRIGGVVCPLVAVAMLRSCHQMEALIVFEVILCLAAVACMFFPVETKGRGMD

SEQ ID NO: 71566 - protein, 401 aa, Zea mays
  Clone ID: UC-ZMROB73059A10_FLI.pep
NINGTRTCTARHTGTGSSASREVRRWRRQRCVRPVLHLEHHRQADGKVSVDVAVHEPHSWVIRYEADHGPPAGRHRDGVPLLRVDEVEVLLRGRVVVAEPLRDDEEIEPVQVHRVALAPHQRRVLQHHLHRRVVRQRPHLRGLRSREQQRRGDAAQQQPLRLVRVVERHGRLVGEVPRVHAVRRVPVPRVQHRHGVCVWELERLVVHARDDRARSLVLVAGDEAQPDRDEHAGVDGERHGPPAWADERRHAGVEPVGRGRVVHLRHLGQRRRRRLLAGRRRRSDVLHDGRGDVSVVAPWAQGGRALVRGDRHVVAARARGRVGHHERVDGLSRRDDDHVRLVLRGVAGVRRHDGERVPCHLEEERRVERSVDNPQHVGGVMTHLELLDSLRRRLAAVRITG

SEQ ID NO: 71567 - protein, 379 aa, Zea mays
  Clone ID: UC-ZMROB73066H05_FLI.pep
SQVRAGEVEVEEEHRNPIQECLMAGGKEAHGWAARDVSGHLSPYHFSRRVQRDDDVTIKVLFCGLCHTDLHVIKNEFGNAKYPVVPGHEIVGVVTDVGSGVTSFKPGDTVGVGYFVDSCRSCNSCSKGYESYCPQLVETSNGVSLDDDGGATTKGGFSDALVVHQRYVVRVPASLPPAGAAPLLCAGVTVFSPMVQYGLNAPGKHLGVVGLGGLGHLAVRFGKAFGMKVTVISTSLGKRDEALGRLGADAFLVSRDPEQMRAAAGTLDGVIDTVSADHPVVPLLDLLKPMGQMVVVGLPTKPLQVPAFSLVAGGKRVAGSAGGGVGECQAMLDFAGEHGITADVEVVGMDYVNTAIQRLERNDVRYRFVVDVAGSKIGG

SEQ ID NO: 71568 - protein, 294 aa, Zea mays
  Clone ID: UC-ZMROB73077E01_FLI.pep
HRIRLVCAAEQPNGAASPGSGSGGDATANPTNNGLPKNRRVILLEYVKNVQPEFMELFIKRAPAQVVEAMRQTVTNMMGTLPPQFFAVTVSTVAENLAQLMYSVLMTGYMFRNAQYRLELQQSLEQIALPEPKEEKDYAPGTQKKVTGEVIRWNKATGPEKIDAVKYIELLEAEIDELSRQVARKTSQGSNELLEYLKSLEPQNLKELTSTAGEDVVFAMNAFIKRLLAVSDSEQMKTAVSETSASQLANLLFWLMIVGYSMRNIEVRLDMERVLGAPPKVAELPPPPSGGENI

SEQ ID NO: 71569 - protein, 201 aa, Zea mays
  Clone ID: UC-ZMROB73078F08_FLI.pep
STTPSVPGLPPVQLPLASPRKLTPKSSAFGTSTIRPAQEMGRRGEPYYVEAVPPVDVNKNTEWFMYPGVWTTYILMLFFAWLLVLSVSGCSPGAAWTVVNLAHFAITYHFFHWKKGTPFAADDQGIYSRLTWWEQIDNGQQLTRNRKFLTVVPVVLYLIASHLTDYKQPMFFLNTIAVFVLVVAKLPNMHKVRIFGINADI

SEQ ID NO: 71570 - protein, 515 aa, Zea mays
  Clone ID: UC-ZMROB73079H05_FLI.pep
IVVPFRSAMVKRLRRKGDVSSAPPPKASAPGSTKSVKLKKGVKTVPKKLKGLCTESVGIAEASASAQTPAPKSIKTSPAAATAAETADDRVAQNKTVDRNLSRKETMKGREAEKGEMTSDGVAQTKTEDRKASRKETMKGIEKKAEGEEKRTSRKEMMKGREEERVKREEKRRKLTGKEKEKESASGFIFMCSARTKPECYQNGVFGLPRGKMDVVEKIRPGAKLFLYDFDLKLMYGVYKADTRGGLDLVRHAFDGKFPAQVKFSVDKDCLPIPESSFKHAIKENYSSKGRFTQELNSKQVQRLLAMFKPIDLPQSAPQHIEEVRQSHIIEDIRNPSDYEDRRRLQHIEERGAPIDVHAYPLEDQYNITRSLHPPLFDEPRRLVLDPYHMQEPQHVPLNYYHQVATRSPYCQPHMDIMHERTAAEATLMDPLPVRDHRALPGELAARSERVDELYRSYKLSTRGMDFNPGASYQTTYHPSSSVYGEGIQRPVLARGNGPSVPVSSRYSFNGPPAY

SEQ ID NO: 71571 - protein, 536 aa, Zea mays subsp. mexicana
  Clone ID: UC-ZMROTEOSINTE087A07_FLI.pep
WLECLHGCAELERKHLFGAADADAEDEPTVAAAAFMAYKERLANLTGVTRRFIGNLVRAFKTNLPEVVVTLTPPASDLQHIVKSGPTTERQTVGIGGILSTATVTPPVSNVSSLQGTSALRPSSSSLLVSQETDIANDSVQERHSPTRNLAQAQHPVRPGGHGGFLSNPYPSFFGEATSTAGPLQLYMPNMVVSGGTTSTPSLAFSLSAPGQPITSTALGGSFGSNTRTAWGNSDMAAASSSQPDRMGMDQQAGTGSAMNLTIGLHPNAQQPPPKYVKIWEGDLYGQRQGQPVFISKLESWGGTVSRKVAEDWPETMQIVRLIAQEHMNKKYSESQYVGNTDFLIFRALNQHGFLGQLQERKLCGVIQLPSQTLLLSMYDKTSRMVGMLFPKNMLMFRPEALTQSSPVQQEELIHQQQQQLQQQQRNIHRLQRQLIQKQQQQHMQKLLPQRLQYQEQLHLQQQMTQQIQQQQQSLYQQHQQMQHQQQLWQQIQQQKHQLQHMDPQQQQLLSQMVGTELGSDDDTREDWVTGAGPHA

SEQ ID NO: 71572 - protein, 375 aa, Zea mays
  Clone ID: UC-ZMFLMO17027B09_FLI.pep
LELAESAKLQFSCRDYSDHLALVRAYDGWREAERDRAGYDYCWKNFLSVQTLKAIDSLRRQFLFLLKDTGLVDENMTMCNKWSRDENLVRAVICAGLYPGVSSVLNKEKSISLKTMEDGQVMLYSSSVNGKETKIPFPWLVFNEKVKVNSVFLRDSTAISDSILLLFGGCIKQGGLDGHLKMLGGYLEFFMNRDLASTYVSLKRELENLIHCKLQNPRMDIQTSEELLSAIRLLVTEDPCSGRFVYGRQEPRSKKAKTMLSPSSLSEAGGNGGDNAKNQLQTYLTRAGHSNPTYKTKQIKSYLFRSTVEFNGMQFVGQPCANKKLAEKDAASEALNWLTGDGGAITDSRGAQDADPMSLLMQPPRRRRHSHRRRN

SEQ ID NO: 71573 - protein, 346 aa, Zea mays
  Clone ID: UC-ZMFLMO17068E07_FLI.pep
AEMGSGMSRGRRRGFGAGASGGMLPLLALQVLIEYGRAGASRPPVTAALLAGNALIYLRPGALDGILPSVTRVSFNPRLIVENGDLVRFFLSPFYHLSESHLFYNMTSLLWKGIQLETSMGSVEFASMVAALLGLSQGIALLLSKGLLLLGDYTAYYDQYAVGFSGVLFAMKVVLNAWSEDFVYLHGMVIPAKYAAWAELILIQVFIPGTSFLGHLSGILAGLVYLWLKRAFNGPDPLTLLVSSITKVVTWPVRFARDLLWSAHPQGRFRGRGRVGRRQSARDTPRGLWRCSACTYDNSVSTDICEMCSTAREDHDFSLRQYHQAGGTGELTVDEIRRRRLQRFSR

SEQ ID NO: 71574 - protein, 485 aa, Zea mays
  Clone ID: UC-ZMFLMO17022E06_FLI.pep
RGKRSSPTLSPADCDDEGPLRGLFVLSRDPECPPRLLVVQPRLRPGSLLESKLAEALNLANSLEERRDGFYHSEFGAKGAPPHLVVQNPASRGRSHADTYFGPGTVDNVKCYLSATESEEDVDAVFVNAILSGIQQRNLEVAWGFMSGAGETELQLQRRRIQERRVSLLAQIEDVRRTRAIQRSSRKRHGGSFGQELVTVAVVGYTNAGKSTLVSALSEADLYSDDRLFATVDPRLRSVILPSGRKALLSDTVGFISDLPVQLVEAFHATLEEVVEADMLVHVLDSSASNLEEHRSTVLQVLQQIGVSQEKINNMIEVWNKIDLVDENVKSDGIDDEVFLTEGEQEDDIFSEDDAPSEQTSFDSVDVDDGADSEYLSEENSEDSNELPSKKSFAEPTEMGAMKELSSKECFGELRVLDTNGHTFPQPASTCHVKTSAVTGTGLQELLALIERKLTEQQTVVQRSYGPFDRKWRPTSMDCEKAAEP

SEQ ID NO: 71575 - protein, 221 aa, Zea mays
  Clone ID: UC-ZMFLMO170114E05_FLI.pep
EVQEELASLSDLAASYHSRLQSHGIDPDSFTDDDDDESYSYEEVGAEDVEQIGMAALQVERNVRDSGSGMEVKAMVVGNDRGEDEEDADADADDAEEPSSPVEKEFEYTVDVTCASTTKPATSVVAQYVGDGNSGGLYARVEALEADRAALRREIFALRAERAQLVMAREMARRLCWEMVAEQRAIVKKALVPASSFSVIRICKVHILLTPLVIVIELFSV

SEQ ID NO: 71576 - protein, 564 aa, Zea mays
  Clone ID: UC-ZMFLMO17152C04_FLI.pep
DIRLVRDKFTHVSRGFAFVHFHSVEDATKALEATNGITLEKNGQVLRVAYAKSTHGPASGGSQSNSLAAAAIEAASFAQQYDAIGWAPKEYNPDDKQNNNSESQKDGSTAQSGFVWDEKSGYYYDSASGFYYDGTTGLYYDSNSGVWYSYDQQTQQYVPCNDQSNTKAAGEAASENTKTSDSNSGKKVVISAPAATIKQSEKTSLPDAVQAAANAALAAEKREKEKAKEIKLASKNSLIANKKKMSNVLAMWKQRNQEGQAARIVLDDKEPANSDDKFSHSRSGTGFSLKSKPNSDLENAMGNSLGQGMTSTQTLDSVVKPRPVSNSLGTTVMGVIRGSARGVIKSDTTFHALSDAGSTDSRTTITTRASGLMTSSEALITPAPFKTDVSALVSNTPSGVSGSGKRRFSEAPGQSQYRDRAAERRNLYGSSHGTDTVGLDSTGDYPSRKGSSEIGSMPFPPGVGERSSGEIGNSENYEVITADRAIDESNVGNRILRNMGWQEGLGLGKDASGIKEPVQAKSVDARAGLGSQQRKPDPSLEAQAGDSYKTIIQKKAMARFKEMS

SEQ ID NO: 71577 - protein, 433 aa, Zea mays
  Clone ID: UC-ZMFLMO17070B11_FLI.pep
GVGSETRRVPSPHPTGTNKLPSHPNPASTGSRRTRIRPTTPRRRRSKKMAALDTFLFTSESVNEGHPDKLCDQVSDAVLDACLAEDPDSKVACETCTKTNMVMVFGEITTKANVDYEKIVRETCRNIGFVSNDVGLDADHCKVLVNIEQQSPDIAQGVHGHFTKRPEEIGAGDQGHMFGYATDETPELMPLSHVLATKLGARLTEVRKNGTCPWLRPDGKTQVTVEYRNEGGAMVPIRVHTVLISTQHDETVTNDEIAADLKEHVIKPVIPEQYLDEKTIFHLNPSGRFVIGGPHGDAGLTGRKIIIDTYGGWGAHGGGAFSGKDPTKVDRSGAYVARQAAKSIVASGLARRAIVQVSYAIGVPEPLSVFVDTYGTGAIPDKEILKIVKENFDFRPGMIIINLDLKKGGNGRYLKTAPMATLEGTTLTSPGRW

SEQ ID NO: 71578 - protein, 235 aa, Zea mays
  Clone ID: UC-ZMFLMO17153F09_FLI.pep
NLIGTHGGCKQVELSNHPTVAQVHNIYTTTKVNSCRTLKDNLTVTSILHTCTKAPSKASHKFIKARAWGLSFVLLLEAGVVQPLDGQYKRLCTEPALAVRDQGHVQLLREGEPRQRQPHGLAFRQADAEVLHEVPDIEASRHIPLQDPLPVQLQRLGPRCAGGDGLQPLGHVQPGLVRVHHALHEPYHGGCDGDLVAQLRALPRAGPAHVQRVSHELEERRQASNNGGVAASEDG

SEQ ID NO: 71579 - protein, 295 aa, Zea mays
  Clone ID: UC-ZMFLMO17154A05_FLI.pep
HINNKKMAAPPLGLACRVAGAFTTPAVAHSGFLPRHLARGLLPSRRWSGVVRMGAVVGGGKEGEEDEELRQTKEQAAARRRWEALIREQKIKTLTPREAGYTFKLTDKVLLDVRPSNERQKAWVKGSTWIPIFDVDTSVDLGGLSKKVSNFVMGGWWSGSSTLSLNKNFVQQVEEKFSKDTDIMLVCQKGLRSLAACEQLYNAGFENLFWVQGGLEAAEEEDFEREGSQPFKLAAIGGISEFFGWTDQQRAQAAKEGLGYRLVFTGRLVGALVLLDALFLGAQRIGPMLQEMQPR

SEQ ID NO: 71580 - protein, 426 aa, Zea mays
  Clone ID: UC-ZMFLMO17158B11_FLI.pep
PIEASSAAAAMAGLSLRCGDCGAQLRSVEEAQAHAESTNHANFVESTEAVLNLVCSNCGKPCRSHTEVDLHTKRTGHTEFADKTAEAAKPIDLEAPLKPASDDATDVDASASATEETQEMVVPEVNKEVLTDLEGMGFSTARATRALHFSGNSTIECAINWLSEHQEDADIDEMPLVPANSKTEVNKPSLTPEEMKIKAQELRERARKKKEEEERRMEREREKERVRIGKELLEAKRIEEQNERKRMIELRRLEKEEEKRAREKIRQKLEEDKAERRRKLGLPPEDPAAAKPSAPPPVEEKKSALPVRPATKAERMRDCLRNLKQQNKDDDAKVKRAFQTLLTYIGNVAKNPDEEKFRKIRLTNATFQERVGNLHGGIEFLELCGFEKLEGDEFLFLAREKVDSAILNTAGAELNSAITNPFFGVL

SEQ ID NO: 71581 - protein, 222 aa, Zea mays
  Clone ID: UC-ZMFLMO17160B05_FLI.pep
QPGRSASVQASGSSLSRRHPHRRRRGCRTTSSSTRGTVLSASSLGSDPPTTATRGLGLSGELAASSLYRVRGLVALSLASNGFEGRVPVGLAALGGILQVLDLGENMLSGVLHPALFGNLTSLLNCGLLFSMGLLGYIFSRSTISLVLGITPGLATLLLGTLSLKFWRSGRSSFLLILAQAEVMLMCKHLHFEFCLARMNQVYFPILLHLRDLFGFQMVCWS

SEQ ID NO: 71582 - protein, 320 aa, Zea mays
  Clone ID: UC-ZMFLMO17078A09_FLI.pep
KVEMWLVIRFVASSLLELCSGMLLYQLYVFLLTSFAFSVFCSTVITELKQFLRGSIAIAMEAGRMDQPFMAAINSQPFVEDIEPVKKASGDMPATTGSGCFECNICLDFASEPVVTFCGHLYCWPCIYEWLRPGVESAASDNSSSARRQCPVCKATLSTDTLVPLYGRGGNSKKSLDGMAIPRRPMVHRETVEEQQNAQSNVNDQHYHQSMEDNSQRQPLLQAHHHPIPTGFDFIYPPAPVGRGLIHSTAGGVLGGMAEIVLPLALRGQMPASLYYTNPYHAATQNVNPRLRRHQMEIERSLHQIWFFLCVFVVLCLLLF

SEQ ID NO: 71583 - protein, 309 aa, Zea mays; identical to SEQ ID NO: 61196
  Clone ID: UC-ZMFLMO17078C05_FLI.pep

SEQ ID NO: 71584 - protein, 320 aa, Zea mays
  Clone ID: UC-ZMFLMO17078E11_FLI.pep
RRYDLLLLAADGEELKALVDEGYDLLGQLNWSDHLPWLARFDLQRTRARCSALVPRVNRFVGNIIDEHRARLGLGDTGGVTDFTDVLLSLQGVDKLSDADMVAVLWEMIFRGTDTVAVLMEWVLARLVLHQDVQSKVQEELDRVVGPPGQAVTVKESDTASLVYLQAVIKEVLRLHPPGPLLSWARLATSDARVGGYHVPAGTTAMVNMWAITHDPSVWAEPTEFRPERFVGASAGAGAGAEDVPMIMGSDLRLAPFGSGRRSCPGKSLALATVGFWVATLLHEFKWLPPCRGVDLSEVLRLSCEMAAPLEARVVPRHAV

SEQ ID NO: 71585 - protein, 87 aa, Zea mays
  Clone ID: UC-ZMFLMO17154C12_FLI.pep
SPTRAFSGSPRIPFLFFPLPPACVLSSLGGDSATGAATPCLVPRSSWGPSPATSITSEKMRDRGRRRRRARGRNRLVRLRMDQELEP

SEQ ID NO: 71586 - protein, 285 aa, Zea mays
  Clone ID: UC-ZMFLMO17154H10_FLI.pep
FAGHVPSPVVSSTRALVALCARPQAPSSYRIPPTLCLAAACHCPNAVAGSGPCWRVFPQRRLFAGNLLLLPMSVMFSTTAQISVLNSWMPRLRGIRRVSSSTSVAPGVEPLASGVTHLLIVAPCASAHTRHQLRHVAVPPCVSVVGRLPALSLLADGSTVVFPRARPHARALLVVGSLYVAPFLPGLADAEFAQVASLSVLAVSLLSFFSSPVIYAHTSSPPLAIMLGRRLALCHCVDVCTGLRCPVLAASFSFSLAVRPCSSFDLAVGCLLLSLCKLSGCLMLL

SEQ ID NO: 71587 - protein, 193 aa, Zea mays
  Clone ID: UC-ZMFLMO17156C09_FLI.pep
AMLTDFGVAKEFDENTRSNSMCGTVEYMAPEIVQGRGHDKAADWWSVGVLLFEMLTGKPPFVGGNRDKIQQKIVKEKIKLPTYLSSEVHSMLKGLLHKEAGRRLGSGPGGSDEIKNHKWFKSVNWKRLEARQIEPSFRPNVAGKTCIANFDECWTNMPVLDSPVASPVAANSNFVGFSYVRPAPFLQKPSPLG

SEQ ID NO: 71588 - protein, 464 aa, Zea mays
  Clone ID: UC-ZMFLMO17157F03_FLI.pep
PNHMNAPCMKNGICSKGYPKDFQEETTIDGNGFTVYRRRNNGRFIDKGGVRFDNRSVVPTNLLLLKRFQAHINVEWCNKSIFIKYLFKYVTKGPDRSKIFLKRVQAGEDVPYNEQTDAKDEIKEYLDTRYICDKDACWRVFGFEIHRHYPAVERMPVHLPNQNYITYTSRSNMAQVLSEAFLRQTMLTEWFVCNSNNPNARDLTYCEFPSKWRWDEKTRSWRPRLARDSKIGRLYYVHPSAGERYYLRMLLLAVKGACSYECLRSFNNTVFPSFKKACQARGLLGDDKEWFDAFDEAASWATGPQLRQLFVTMLLYCQISDERSFFDKIWKLMVDDIEYNIQKAMNCPTYQMADDDLRNELLERLTVLFNKSGGNIHDFNLPQKVHTTQQDLNRLIEEETSYDPEILHNESQSLISQLNIDQLNAFNKIVECVLCDRPGLYFVSGYGGTGKTYLWNAIVAYLRS

SEQ ID NO: 71589 - protein, 383 aa, Zea mays
  Clone ID: UC-ZMFLMO17163B01_FLI.pep
CCDPATVKAAVSGCSKIIYCATARSTITGDLNRVDNQGVRNASKAFQDYYNELAQLRAGKSSKSKLLIAKFKSAKSLKGWEVRQGSYFPNTFVSRFDEGIDASLDFSEDQQAVFSGFVFTRGGYVEISKRLSLPLGSTLDRYDGLLFSVGGNGRSYVVILETGPLADTTQSKKYFARMTTKVGFCRVRVPFSSFRPVNPQDPPLDPFLVHTLTIRFEPKRQRPGEASQNSSDPRNFELKLEYIKALPTGQETDFILVSCSGSGIESNRREQVLKAKKAGEDALRRSGLGYTIVRPGPLQEEPGGQRALIFDQGNRISQGISCADVADICVKALHDSTARNKSFDVCYEYVSDQGNELYELVAHLPDKANNYLAPALSVLEKNT

SEQ ID NO: 71590 - protein, 71 aa, Zea mays
  Clone ID: UC-ZMFLMO17164H05_FLI.pep
STLGTSTCPTIILNTKKEPRLVESKQEHLPQYTLQRFGNYWSRLEHLSDSRFSVHPLQEKGTNTIHQSSAV

SEQ ID NO: 71591 - protein, 156 aa, Zea mays
  Clone ID: UC-ZMFLMO17158C09_FLI.pep
SEKATAGEPKHQDKCTGGNPREEAAGEEEEEAQQLTIFYGGRVVVFDMFPSAKVEDLLQIMSPGGDGVDRAGGATVPTRSLHRPSHDSLSDLPIARRNSLHRFLEKRKDRITAKAPYQQVNSSVVGVEASKQAAGAGVEKPWLGLGQEATTAKLEM

SEQ ID NO: 71592 - protein, 164 aa, Zea mays
  Clone ID: UC-ZMFLB73155E05_FLI.pep
RWFAGNFVDARLLSFFVLFLVSSSDFLFLVSMQADSTADYSSDNRISLDAIETIFCEVDELGPQAMVNNTNHCDSCGEYLIHPTMVARGAEQYLELNDLSFSLTDGPDSCGVLFSNGVSVEQLPDLELRFEQFSPDHISNTAIASTSTTVGSSASVPLLEDHRT

SEQ ID NO: 71593 - protein, 149 aa, Zea mays
  Clone ID: UC-ZMFLB73159H09_FLI.pep
KCGGSRHGRRNSTRPQRTCAGQSKPRLNPKLTGCKQCGCAQFPDRLAQEQQDWQKQERALHISWEPGQRDASVLSDTDEKLQNCEQGEEEKFALVCARTFRFHISGSSRALAHAMRFFKDGSSRSNFSLESTWFLRIGILVSCPSYPFL

SEQ ID NO: 71594 - protein, 160 aa, Zea mays
  Clone ID: UC-ZMFLB73004E04_FLI.pep
IVQDIPNPLPENLPMVLIKPPEACSTAEVYKRFRLEQTSQADPMTLLEEITQNGISQDVCVNDLEPPAFEVLPSLKRLKKRIIAAGRDDYSAVFMSGSGSTIVGIGSPDPPAFVYDDEDYKDVFVSEACLLTRDENEWYREPISANATSGKEGLQASVAD

SEQ ID NO: 71595 - protein, 191 aa, Zea mays
  Clone ID: UC-ZMFLMO17092F04_FLI.pep
QPKEMASDDAKGKGKVTGEKETINNEPKGDKPIDLGSNNKKKDMKKKKCMKKIVYYDSDASSSSPKDDDDSSSSKKKDGQTNYTRTSFNYSRIPYNANAHLLSIPHGKLPHFDGEDHSWWSHKMRSHLFSLHPSIWDIVENGMHIFDSDDENCNVIYMQEMIHKNAQVTTVLLTSLYREEYNKVSGLDNAK

SEQ ID NO: 71596 - protein, 78 aa, Zea mays
  Clone ID: UC-ZMFLB73217A10_FLI.pep
FWPKVSINLSEIKLAEPLPFALSRHISYIAGVHMYFRILELGKWRSLGDITLPDVCRLNAFTTMFMHQCNCLAGLFYE

SEQ ID NO: 71597 - protein, 189 aa, Zea mays
  Clone ID: UC-ZMFLMO17122H09_FLI.pep
VTAGQFAILFKTTAYSGPINFTNGGDIAVSSVVQVVGLVLCLHAAAKISHRAQNIAALASRWHALATCSTDSTYVTTPNSSGNLAPFPAHLFLRDYSGSDLESLDSASVQGSSHGTAQLASYMSSYHKRESLVLYLLANPGGITIFGWIVDRAFLNTILMLELTLVLFVLSKTVVIPAKTLVHSYIGYP

SEQ ID NO: 71598 - protein, 125 aa, Zea mays
  Clone ID: UC-ZMFLMO17172H10_FLI.pep
AEIIEHNSKLRKCYRFRQHRHNVNTISNWQNFDTQQQEKLVHTHHLTGDNETNCKLVFEAKSRGAFFPTNNHIRRAMSEDLNVIPPTCPLGALSPEATKASQAPNPFSTLSISNLLEPVCFSSPT

SEQ ID NO: 71599 - protein, 114 aa, Zea mays
  Clone ID: UC-ZMFLMO17129B04_FLI.pep
YEQEATNQQCSGCRATPHLWTTSVCVSNLFSTKKLFKQKDRIEKDGTVMRLSGGGHNCFQDSDEARLTFKRKFWKKAMEIDDLCGNDGAWWGIKGYMRDNFNHSNKVTSQKEHF

SEQ ID NO: 71600 - protein, 134 aa, Zea mays
  Clone ID: UC-ZMFLMO17134G03_FLI.pep
VAAELLGENALLLCMPEILPVLLWLSVRLDTADDRIKLVLDSNLLPAAPPVVLAMLATGEPLLYWYRKALLSCVVSALLTFYVYFMLCQWPGGQRDRTLTGSSLQHAVIHLKSWAKVLLKAVAVLLIFVCILSN

SEQ ID NO: 71601 - protein, 399 aa, Zea mays
  Clone ID: UC-ZMFLMO17140H09_FLI.pep
AIEVSPQVDTSQVSKSPDGGKPEQTDVLIGSNQPDTVHKKSSDPPETSVAKDIDLPALVTSSGTQTEADTPNDEVPTAIEANDSSSNDDERDSGADTPEQLSSGGENEKSSLSESEKNDTPREGAKETTSKLSAAAAPFNPSSVPAFGSMAVPGFREHGGLLPSPANVPPMLSIPLRKHPHQSATARVPYGPRLAGGYNRSGHRGLRKKPVLTSGEAPTETNTSGPRIMNPNAPEFVPGQSRSPNGHPASPNGPLASPGGIPSSPQDLLSSPDSTLESPVTASPQVSECSQISPEGDVEGGGVKQNMDDTNHPESKDGEVEPEQTKAPEGTEEEGAAVKDAAEELIAAELPSSPNPGLTTAMERLKSLRLQANENTTFSDSQHRVEFLFLEQMSISPSQ

SEQ ID NO: 71602 - protein, 370 aa, Zea mays
  Clone ID: UC-ZMFLB73017D10_FLI.pep
MLSRTSTDVLPTNSAAGPGGEGGGGPPPDSCTGASALGGEPVGRVGERGVGPALVDLLRLCAVPGGAERHVQRVEVVRPRVRHPPMRRFLLEPVHVLVPSVEERVLEPGVELGGPLRHGRVERPHLAQVVRGAAGAEDEDALLPQRRQRPAEAVVVRAVPVALHRQLAHGDVGVRVHEHQRHPGAVVQPAAVVLLHGAEPGLLQEPFGPQGQVRGARSGVLELVHGLGKAIEVVNGVVAAADDVDLRRGRVPVSRHDEDGARGLVARDLRRHPRLEEVPRRDVVVDGERGRAVRQEESVHGSRDSRRRSPLPLLRRCVSLCPRGVAAPALPLLLALTRRVPRLWLASALAPPDDFARVRRVWFVVVPRGP

SEQ ID NO: 71603 - protein, 182 aa, Glycine max
  Clone ID: 700792015_FLI.pep
EVRAVAAMSSELDRVRADVQELVAERKELAAQLHAVESELAKARAEAQFVPAIKADIEAMRHEIQRGRNAIEFEKKTHARNLEHRRAMDNNMIIMDREVEKLRADLANAEKRARAVMAADAKTNPGYPANYDNPEMGYGGITCPPDSYSMHQLQAVVDTHSPHEAGASLHYPNDLQHTQVPR

SEQ ID NO: 71604 - protein, 136 aa, Zea mays
  Clone ID: UC-ZMFLB73092A04_FLI.pep
RRSLALAAPVVAPCPGVSPASPLLSWILAGFRSLPESPSARSDDGGAIPDSTSASRHPPLPRLSNRLATSPPVICTSATDSAASTPLAVVAAVSIVSEGYLTIQISVHYIISIVLCYMCYQHRSVNPFHILCVLIP

SEQ ID NO: 71605 - protein, 261 aa, Zea mays
  Clone ID: UC-ZMFLB73110G12_FLI.pep
VDLLPAIPDVRFPAARPPVEGDAPVLRAPRPRPAPGLLRWRHRPLGHAEILGALRLPHRHRRRHRLRLRLGRRGRGREELPRHEPRGRARRHLTGAVVVVDGAPEQAEPEAAVRGVEDGRARRARVRRRRYIEIQHHLRSGARRNPPKSSSPLKLRLTSWSLCLTCRPVCQHSPPPAAAPPRAALDRRLRSHASLWRLMGRSRAAAINSVVGEGAVGGGGRGHGLGRTEDEKGEGKGSGSGAAVQWEKRKGRCDVEEGEGY

SEQ ID NO: 71606 - protein, 215 aa, Zea mays
  Clone ID: UC-ZMFLB73119E06_FLI.pep
GETMPLEDDMLLPDNEEPTALLKDVGQPQANVVPIPIPGDGVGHCFEEKHEGACSESKREDTHAGAIRTADLLASEVAGSWAVETAPSVNGENESPRSLGDATEHDEAGGSVAGDALVTLVNSEGQAAGSQNNVERGSSKITHHHHHHRHHHRVLSAMIGIVDPEFRKQMSGRSGVGNEEPMSDAETGEGIEEGDSDSGSDGSDSEEAMVEDSVV

SEQ ID NO: 71607 - protein, 106 aa, Zea mays
  Clone ID: UC-ZMFLMO17138H07_FLI.pep
WAPEAKFRVHIIRRSHRPLVRGIMNPPIQNCPTSRVKKQMYSDANYSRSTSKYHWLSTYEHCWGGFRFYSRRLGYYPYFRWVTAPGLASGRWGPVLMLKPAMLILP

SEQ ID NO: 71608 - protein, 53 aa, Zea mays
  Clone ID: UC-ZMFLMO17150A03_FLI.pep
KLAILHSISGDEILQAGMQHKADRGRCYRYRCRHTEFMHLCTGMKGVFLTRSS

SEQ ID NO: 71609 - protein, 259 aa, Zea mays; identical to SEQ ID NO: 62064
  Clone ID: UC-ZMFLMO17125C10_FLI.pep

SEQ ID NO: 71610 - protein, 353 aa, Zea mays
  Clone ID: UC-ZMFLB73117G10_FLI.pep
DDVPPGPAAFSRREGWGTSAAAAAATTNSRKTMPRSRGNEPPLRTSQRAPLHLKTTACSEANGAHHRPVADRSSPRVSPRSPLPEKKRAAGTRVAELEGKLGKVQEELKKLREQLASAEAAKKDAQVALEEAKKRVGTKGSPASTTTTTPLSPPSPGVEIAKKTEELKLPQPAAEEESSINVPATDVFEVVRAESGDKENQSAAEVCEVVSCGGGKAAVDVAENEETEEEETKKMIGEDNSAAVESDGADKESPEVVELKAKLAEKDTEIAALTAENAELKKQAEEAAEAAKKAEEGPASRAAKAEHELKEGAAREARVGEQLRASEAAREALDGELRRLRVQTEQWRKAAEA

SEQ ID NO: 71611 - protein, 322 aa, Zea mays
  Clone ID: UC-ZMFLMO17068B03_FLI.pep
PVRRGHRALARRRRPPPRHRHRRRPHPHLLPRLLPAGLRRVRPPVWFQQRAEAGTQPDAPSRGAQAHRRHPRRRPRRLRPQGVLRRHHHARHPGRRRRVRGSLLRGASRPPRRAIAGVQRPGLHAAGPRLRRAHAARRVQEPEPGHGGPRGALRGAHRGSWPLLLLHQPPPAQRRRRHHGPGVPPDARGQVRQGRQRGAGAGRAHPQRLRQQVLLRPHRQAGALQVGPGPHQRPDHQTRRHALRAQPGRLLRPVRQVHGQDEPDGRAHGQRRRGPPQLRSAQRRPRRLSRPARDRRRRRGARGRRVIRILFYNKWVASASCE

SEQ ID NO: 71612 - protein, 247 aa, Zea mays
  Clone ID: UC-ZMFLMO17242E10_FLI.pep
SRAAAMSWESRLSIAVETASALAYLHLAAKMPIIHRDVKSSNILLDDNFTAKVSDFGASRPIPHNQTHVTTLVQGTLGYMDPEYFQTSQLTEKSDVYSFGVVLIELLTRKKPIMDDIAEDIRSLALQFSMLFHGNKLLEIVDPVVAEEAGVRHVETVSKLALRCLRLKGEERPRMIDVAIELEALRRLMKQHFILKNESLLQESCCNEEMSIDAPSSLFLGVDGISDDEGMEIIPLTCPSKILTSYP

SEQ ID NO: 71613 - protein, 361 aa, Zea mays; identical to SEQ ID NO: 41293
  Clone ID: UC-ZMFLMO17153E09_FLI.pep

SEQ ID NO: 71614 - protein, 88 aa, Zea mays
  Clone ID: UC-ZMFLMO17181D06_FLI.pep
QLQLAFLGKLIAEFCIGFWNKRPNKHGLKQQKEFALQGRAADIPTKLGQPHFASFRTWYGQPTAGGQNSHLPERNHRIVSRVSKSSWG

SEQ ID NO: 71615 - protein, 175 aa, Zea mays
  Clone ID: UC-ZMFLMO17171H12_FLI.pep
TGNRGYSCKLIFKRQSFLERNPRQVEGLVKDGDGSTVASLMGKWDERMYCSASGQNVILLWEKNEASTNPTRYNLSSFAITLNELTPELKESLPPTDSRLRPDQRHVENGEYSKANAEKLRLERRQRMSRKMQDNGWKPRWFRRDDGTFRYVGGYWEARQQRKWDGCHDIFGEFV
